United States Patent Application Publication US 2005/0228172 A9 - sequence listing, part 20

SEQ ID NO: 65301 - DNA, 565 bp, Homo sapiens
cacatattaagtgcttaataaaaatctgtcctcctcttcctctttctcttcctcctgatgaggatggtggtgaggacactgattacaacggtatgggtagtaatgaggacagatgccaggtgagtcgctggtggggggagtggcccaaggacagtgaggagagacaattctttgcacagttggctgcatggagaagaaggaaagttggggcagaagtttttaagagacctggagctaagagagattttaaaagatgggagaggagtgatattgatgagatgcagccgacagacaggggagacaggagctgaactgatggaggtgggggctgtctagaagcagagcctgagatggggttcttgtgaaggttgtttactgagggaggggctgcaggaatcagggattgcaagggaaggggctgagcatggatgtagcctcggctggagactcgcttcaggctgattccayagggagccctggagcgcagcttcactgcacagccagcagggtggcctttagcacccctgtgccagtcaagcagtggtgaggtctgctgcaaggtggg

SEQ ID NO: 65302 - DNA, 752 bp, Homo sapiens
acgccaccccaactctggggaagagtgacctttcaacaaccgcagccagcaggagagggagagtgcagtgaggagggacacttgctccttaacccgccagccaggttcccrttcccttggcaaaaatgagtcccgcagccacacctgggggacgtagtgccaagcagctgtcccagcgatagcgccacaacctggaaggcacagcgcacttgtcgggtggccaccttgctgctgagaaacgctgcccccagccctagcctcggcctcccagcacacggctggttcctctgctgacccaccagcgcccttggacactgaacaagtgaccagcgcgcatgccccatttctgacatgcctgaagtgagattctacatgggtgggtggactcagctcagcaagaatcccttccctgcaccccaagcaggtgcagaccctcctaccccagccctttcctgtccctaagtttccttctcaaaagtcagaatacttagggtatgtaggggagtgtcacacaatgtccaagcctcctgaggcttgcccatcacatccagcatggaggtcagaccccagcagggccgtattttaaaaacataaaaagcacctgtcctcccttaattcagtttgagatttacaaattcctgtgattaaaaacccatgtgagagcaatggtgacatcggcgtgcgcctcgatgaaagacagacacgctactgccctttcacccagagctgaggaccgggtggtcccctgctgg

SEQ ID NO: 65303 - DNA, 752 bp, Homo sapiens
acgccaccccaactctggggaagagtgacctttcaacaaccgcagccagcaggagagggagagtgcagtgaggagggacacttgctccttaacccgccagccaggttcccattcccttggcaaaaatgagtcccgcagccacacctgggggacgtagtgccaagcagctgtcccagcgatagcgccacaacctggaaggcacagcgcacttgtcgggtggccaccttgctgctgagaamcgctgcccccagccctagcctcggcctcccagcacacggctggttcctctgctgacccaccagcgcccttggacactgaacaagtgaccagcgcgcatgccccatttctgacatgcctgaagtgagattctacatgggtgggtggactcagctcagcaagaatcccttccctgcaccccaagcaggtgcagaccctcctaccccagccctttcctgtccctaagtttccttctcaaaagtcagaatacttagggtatgtaggggagtgtcacacaatgtccaagcctcctgaggcttgcccatcacatccagcatggaggtcagaccccagcagggccgtattttaaaaacataaaaagcacctgtcctcccttaattcagtttgagatttacaaattcctgtgattaaaaacccatgtgagagcaatggtgacatcggcgtgcgcctcgatgaaagacagacacgctactgccctttcacccagagctgaggaccgggtggtcccctgctgg

SEQ ID NO: 65304 - DNA, 752 bp, Homo sapiens
acgccaccccaactctggggaagagtgacctttcaacaaccgcagccagcaggagagggagagtgcagtgaggagggacacttgctccttaacccgccagccaggttcccattcccttggcaaaaatgagtcccgcagccacacctgggggacgtagtgccaagcagctgtcccagcgatagcgccacaacctggaaggcacagcgcacttgtcgggtggccaccttgctgctgagaaacgctgcccccagccctagcctckgcctcccagcacacggctggttcctctgctgacccaccagcgcccttggacactgaacaagtgaccagcgcgcatgccccatttctgacatgcctgaagtgagattctacatgggtgggtggactcagctcagcaagaatcccttccctgcaccccaagcaggtgcagaccctcctaccccagccctttcctgtccctaagtttccttctcaaaagtcagaatacttagggtatgtaggggagtgtcacacaatgtccaagcctcctgaggcttgcccatcacatccagcatggaggtcagaccccagcagggccgtattttaaaaacataaaaagcacctgtcctcccttaattcagtttgagatttacaaattcctgtgattaaaaacccatgtgagagcaatggtgacatcggcgtgcgcctcgatgaaagacagacacgctactgccctttcacccagagctgaggaccgggtggtcccctgctgg

SEQ ID NO: 65305 - DNA, 752 bp, Homo sapiens
acgccaccccaactctggggaagagtgacctttcaacaaccgcagccagcaggagagggagagtgcagtgaggagggacacttgctccttaacccgccagccaggttcccattcccttggcaaaaatgagtcccgcagccacacctgggggacgtagtgccaagcagctgtcccagcgatagcgccacaacctggaaggcacagcgcacttgtcgggtggccaccttgctgctgagaaacgctgcccccagccctagcctcggcctcccagcacacggctggttcctctgctgacccaccagcgcccytggacactgaacaagtgaccagcgcgcatgccccatttctgacatgcctgaagtgagattctacatgggtgggtggactcagctcagcaagaatcccttccctgcaccccaagcaggtgcagaccctcctaccccagccctttcctgtccctaagtttccttctcaaaagtcagaatacttagggtatgtaggggagtgtcacacaatgtccaagcctcctgaggcttgcccatcacatccagcatggaggtcagaccccagcagggccgtattttaaaaacataaaaagcacctgtcctcccttaattcagtttgagatttacaaattcctgtgattaaaaacccatgtgagagcaatggtgacatcggcgtgcgcctcgatgaaagacagacacgctactgccctttcacccagagctgaggaccgggtggtcccctgctgg

SEQ ID NO: 65306 - DNA, 700 bp, Homo sapiens
gggtgtgggcaagaacgccgccacacaggaacttgcatcagctggtgacagtggcgagcccttcctctggaggatggggccacccaggcttgtggaggtgagcagtgggaatccagggaggaggccaaggggtttttcaaacctgagtgtaggaagcatcccagacagggaattctttaaaccagatttcccagcagatgttagatggtgatactaacaacgacagcaaacaacaacaaaaggcaaataatagttgactgttttaactacatctggaaaaataccaattgcctggtgggaggctgcaactcttgcaccctgtgatgcagccattttgaggtggggamaggtgcccccgctcccagccaggctcgggaccgagacagaggagcccccacactcaggacagctctcccagcctctcactctccaatcacggtaaaccccctccttccagatgacagcccaggagtggggtgcagtttccccactggagggcattttgtaatccactttagaaaaataaaataaccccaaaccagccacctgccgtcccgtcagcagcagcaccgcaatgtgcagcataaatatttcatgtggttacaatttccttttctatgtggggcttgtcagtaacacgacggcttagacagtttaatattcaactcttgcttccatgtttgtgaaaacagcatcactg

SEQ ID NO: 65307 - DNA, 700 bp, Homo sapiens
gggtgtgggcaagaacgccgccacacaggaacttgcatcagctggtgacagtggcgagcccttcctctggaggatggggccacccaggcttgtggaggtgagcagtgggaatccagggaggaggccaaggggtttttcaaacctgagtgtaggaagcatcccagacagggaattctttaaaccagatttcccagcagatgttagatggtgatactaacaacgacagcaaacaacaacaaaaggcaaataatagttgactgttttaactacatctggaaaaataccaattgcctggtgggaggctgcaactcttgcaccctgtgatgcagccattttgaggtggggacaggtgcccccgctcccagccaggctcgggaccsagacagaggagcccccacactcaggacagctctcccagcctctcactctccaatcacggtaaaccccctccttccagatgacagcccaggagtggggtgcagtttccccactggagggcattttgtaatccactttagaaaaataaaataaccccaaaccagccacctgccgtcccgtcagcagcagcaccgcaatgtgcagcataaatatttcatgtggttacaatttccttttctatgtggggcttgtcagtaacacgacggcttagacagtttaatattcaactcttgcttccatgtttgtgaaaacagcatcactg

SEQ ID NO: 65308 - DNA, 498 bp, Homo sapiens
gccagatgtcactatgaaactctgatctgcttccctgtgctgttactctataaattgtggtgactcttttgtttcccttagtcaacagtgctagaatatggcctgttgtctcaactttcttagtatagcagttaagattttgaactttagagccctagagccagatttctagggttcaaatcctggctcagccacttgtcagctgtacgatctttggatggcagcttaatcttgctgtgtctcagtttcttcatttgtaaagaaaatatatataatgatgataatagtaatcttgttgtgggtgctaagtaaggaaacatatgtaaagtaatgagaaaaatgcctgatagattgtaatagtctgttttrtgttactgtaatagaatacttaagcttgggcaatttataaagataagagatttattcagtttatgattctgtaggctgggaagttcaagattgggcagctgcatctgctgagggcctcaggcttccact

SEQ ID NO: 65309 - DNA, 699 bp, Homo sapiens
agtggagagaagaaataagatcaaatgcactgggaaaaaaatctcatttcttcaaccatcatcctcatctatctgaaaatggtggaaaaaataagaaaaaagctaataatcttccttatgataccactgaaacacaatttcaccacataaaggtcttctgggctgcatcccctgcaaataccatagtatatcagtaacttaatcagaaaaatgatatattgatccacacactttatataatctaccctctatgtaatctagcccattattaacaaagagaatgctccctgtcttttgatttaaatatttttctaaatggaaattacttttctgtcacacgtgagcaattgttttaatcatttttctcaagcgcacgctatgctaaagtcagcatgttgtrggggtaaaaaattagggtagtgctgctaataccccaccaattctccctccttccatctcttccaactctccctcccttttctctattcacttcagcttatgaatttacaatggccaaatgaatcagttgagatgagaatgctgatttgcttgagcaatgctatgttgaactgggaaaaaaaaaataaaaagccaatgttggggcttaggtttctacaaaccaaaggcagaaatcctgagtcacagccaggtttttcccccgtgaaacacccacccaggtgtgcaccctaccctctcact

SEQ ID NO: 65310 - DNA, 699 bp, Homo sapiens
agtggagagaagaaataagatcaaatgcactgggaaaaaaatctcatttcttcaaccatcatcctcatctatctgaaaatggtggaaaaaataagaaaaaagctaataatcttccttatgataccactgaaacacaatttcaccacataaaggtcttctgggctgcatcccctgcaaataccatagtatatcagtaacttaatcagaaaaatgatatattgatccacacactttatataatctaccctctatgtaatctagcccattattaacaaagagaatgctccctgtcttttgatttaaatatttttctaaatggaaattacttttctgtcacacgtgagcaattgttttaatcatttttctcaagcgcacgctatgctaaagtcagcatgttgtgggggtaaaaaattagggtrgtgctgctaataccccaccaattctccctccttccatctcttccaactctccctcccttttctctattcacttcagcttatgaatttacaatggccaaatgaatcagttgagatgagaatgctgatttgcttgagcaatgctatgttgaactgggaaaaaaaaaataaaaagccaatgttggggcttaggtttctacaaaccaaaggcagaaatcctgagtcacagccaggtttttcccccgtgaaacacccacccaggtgtgcaccctaccctctcact

SEQ ID NO: 65311 - DNA, 699 bp, Homo sapiens
agtggagagaagaaataagatcaaatgcactgggaaaaaaatctcatttcttcaaccatcatcctcatctatctgaaaatggtggaaaaaataagaaaaaagctaataatcttccttatgataccactgaaacacaatttcaccacataaaggtcttctgggctgcatcccctgcaaataccatagtatatcagtaacttaatcagaaaaatgatatattgatccacacactttatataatctaccctctatgtaatctagcccattattaacaaagagaatgctccctgtcttttgatttaaatatttttctaaatggaaattacttttctgtcacacgtgagcaattgttttaatcatttttctcaagcgcacgctatgctaaagtcagcatgttgtgggggtaaaaaattagggtagtgctgctaataccccaccamttctccctccttccatctcttccaactctccctcccttttctctattcacttcagcttatgaatttacaatggccaaatgaatcagttgagatgagaatgctgatttgcttgagcaatgctatgttgaactgggaaaaaaaaaataaaaagccaatgttggggcttaggtttctacaaaccaaaggcagaaatcctgagtcacagccaggtttttcccccgtgaaacacccacccaggtgtgcaccctaccctctcact

SEQ ID NO: 65312 - DNA, 710 bp, Homo sapiens
atcagcgtgttatgagttagtcttaaatttctccaaggcaaaactatgacacaatgtatgccatgctaaattatggaaatatttcatcctgagatgccaaattttaaagcagaaatactgaaagtaaatatagtttacattccatagattttgttgttcttggaattcttcatgctttttctaaccctccaccctttgctcattttcattatctttacatgacttagttatgccaatacctcctagcctactataatctgcactactctgcttggaatgccataacaaaatatcattgacttgctggcttaagcaacagaratttttgttcatacagttctgaaggctggaagttcgaaattagggtgccagtatagtcgggttctggtgaggtcccttttccaggttgcagagagtcacctttcacaatgtactcacatagtcttccctggatgtgagagctagaaggccatgaggtagatgaagcagatgaagggagggagggtagtaggggagagcaacctcttcctcttcttataaagccaccaattctatgggattaggactccacccttatgacctcatttatcttggttacctcctgaaagccctatattcaaatatagtcacattgggggtaagggcttccatatatgaatcgggggcatacaatgcagtccataacatcatcttttacatttcaattgcat

SEQ ID NO: 65313 - DNA, 710 bp, Homo sapiens
atcagcgtgttatgagttagtcttaaatttctccaaggcaaaactatgacacaatgtatgccatgctaaattatggaaatatttcatcctgagatgccaaattttaaagcagaaatactgaaagtaaatatagtttacattccatagattttgttgttcttggaattcttcatgctttttctaaccctccaccctttgctcattttcattatctttacatgacttagttatgccaatacctcctagcctactataatctgcactactctgcttggaatgccataacaaaatatcattgacttgctggcttaagcaacagaaatttttgttcatacagttctgaaggctggaagttcgaaattagggtgccagtatagtcgggttctggtgaggtcccttttccaggttgcagagagtcacctttcacaatgtactcacatagtcttccctggatgtgagagctagaaggccatgaggtagatgaagcagatgaagggagggaggrtagtaggggagagcaacctcttcctcttcttataaagccaccaattctatgggattaggactccacccttatgacctcatttatcttggttacctcctgaaagccctatattcaaatatagtcacattgggggtaagggcttccatatatgaatcgggggcatacaatgcagtccataacatcatcttttacatttcaattgcat

SEQ ID NO: 65314 - DNA, 670 bp, Homo sapiens
tctctttttgagaatattgcattaagaaaataatttctctttaattcagttggcaaattatttaaagacgagcatttacagatttttttatcatgaaaaaagttaactcgactattaaatggatatagggtatgaatttttaaaaaaagactttttaaaattcattttcttgttgaaactaactgcataccttttaatcctctgacacctggacgtccagggacacccactaatccaggaacaccatctcttcctggcaaaccaggtaatcctctgggaccctctgggcctatcggaccaggtggcccaggaatacccgsggagccatgttgggacaggcaatgatcacaatttctaattcttccactctgaagtaagactggtagctgggctttcaaaaacaaagaaaccccatcccttatgtttaaatggtgagttggtgttaattatatttttaatttttttcagtttacagagaaaaaactacgaacattgaatatgtgcatatttcttggccaataatttcacttctaggaatttgactatggaaatattcattgctctgtgcggtaattttattagagcaattgcttaaaataggggaaaaagtgaaagtgcccccaaaagaaattggtggactatattcatatttatgaactaaattatcaaa

SEQ ID NO: 65315 - DNA, 815 bp, Homo sapiens
tcatgctcccttcccctggcccagggtcatcgtgagggccatctgccccaccaggacagaccctgtcaccagagaagcccctgcacctgaggtccaggagcctccacgggggacagggatgacacccatactggctggttacccacgctcccatgagctgcagggggcccatccttcacccaccttgcaggtgcgacttcacataccgacaccaccctcacaggccacttgcttgaccttggagggccttagattcctcctctggaatgaggggctgctcctcagtgggcatcgtgcctggcacacagtgagcaagtggtcactgcmttcatcacaggcaccaggcccaaggctggctgcagtgccacaccctacataggcccagaagtgacatcccatcatcccaccacccacctcccaatcaggttttcccgagaagatggacttgccctccgccactgtgagctccagagacacgctgctcagggtgctcctggagcctctaccaggtcagatgcccggcacgggggcccagactctccagctaccaagacctttgcctcggggctgtgcccccggctgcctggctggggatcgacaggcactagtgccggggcagaacctcccctaactgcactcagatgccaccctggtctggccagggaagtggttgggcgggtaagacccgtaaggcaccaggtgctaggacctcgtatggccaagtgttccaagctgttagaagaaactggaaatctgcaccattatgtaaacagattttaaaatattggcgactcagttacatggtttactttttt

SEQ ID NO: 65316 - DNA, 775 bp, Homo sapiens
ctgcaatgtggatgataaaaacacgaggctgtgggaaacaggccagacggacaaggatactcagtgattccacttctacgcagcatctggaacaggcaaattcacagagacagaaggtacagtgaggctccacgggctgggaatgggcagttagtacttaaagggtgcagagtttctgttgggggatgaacaagctgtggaaataacagtgcttctggagtgtacacttaaaaatggcaaattttatgtcacacattttaccacacacacagaacccagaccaaaaacagcccctttgccctagtttataggctctatctgccattatctcattttctcatgccgcacacacagagcctactcagagggacaacatggatcgcgaaagcctgccttccccagtgacaccaaggtctcgcctacccccagctccgctcaggcagccccggcatgccagcccccaccccacacagctgcccccgcgccacatgctctgggggctgcctgcaacctgaggcccatgttttgccgactggggaggccacaggtttgagccgcggagtggctggaagaggctactccaccttctggagcctccgtttcctttcagagtgggtcccacagccgtaaaacacrgttctaaggtgaggatggtgcccgagatggggcaggagctcaaaaggaaaccccaattccctgcaccccacattttctcacatcataactcacccactgccgacgcacgaggctcccagactgcaacgggggcttctgg

SEQ ID NO: 65317 - DNA, 724 bp, Homo sapiens
ggtgaagagataagggttcatgcagttttcttagatattgccaagtttccttccagaaggtccctctaatttgcattgctaccagcaatgtaaggggtggctatttccccagagccttgccaacggaatgtgttgtcctattttgaaattttcgtcaatccaatagatgggaaaaagcataattttaatttgtgattttctaattatgaatagatgtgagcttttttaatattttaaaggctatttttattttctttattgtgaattacctgtttgtatctattgccatttttctatcaggtttttagaactctgctccataatttataatatttctctgatattggtgatattawctatgtctgtggtatgtatcatgaactcatgagtattttcctccagcttttactcatcttctgacttgtttataatttttttttttttttgacatggagtttcgctctgtcacccaggctggagtacagtggggcgatcttggctcactgcagcctccgcctcccaggttcaaacaattctcctacctcagcctcccaagtagctgggattacaggcacccgccaccatgcccagctaatttttttgtatttttactagagaaggggtttcaccatgttggccaggctggttttgaactcccggcctcaagtgatccaccttcctcggcctcccacaaagtgctaggattacaggcgtgagccacagt

SEQ ID NO: 65318 - DNA, 503 bp, Homo sapiens
tcagtaccaataccctgagacctagacaggtgaaatgactttctcaaggccgtctagctgattagagacagatgggggaataaaaattacctttcccaattctaccactartagtttttttgctataatcagctatttaatatagtctactctttcctcaaatgccaaaattttgtatcaagggtctgaggaccagcaaatattaaatactgtggccatcagccaacgatgactcaagaagaatcaaacttccaggtgcattatagatcatgtggggatcttggaaaatacagattctcattcaggaggtggagggcagggcctgagactctgcttgtctaacaagcttccaggagatgatatcaatgccaccggtttacaaacacgctttgattagcaaggagccagttgacctcaagtttggttcctaataagttttccgtaagaaattatttgtattgttggtgtttcatacaaagagaaccccatcctgcttctctcta

SEQ ID NO: 65319 - DNA, 762 bp, Homo sapiens
gtaagtggtcttttcctgagccatcattagtaataactggctctcccacacctactgatggtttggtaccttccggatgagaagttgctagctcatgctgtagaagggaatgcaaacaaggattaatctgctcttattttgaattcctttggcatatactgcaattattcttggagttaccatctgataaattgatgagattaccaaaggttattgaaataaggacagagacaattatatttgggtttacagaggagaaactccaaaatggaggcaacaatgtagccatgatccctacaagaagaaaaacatgttttggtcaaaatctaaaagttaatacagcaaaaaggggctaggagatcatctatcctccttgtattatgggaaagaataaaagtcacatgacatggaaatgcgggaatttatccagtctattgcctaacagagaggtgmcttcatcagagtttacctgtcttagggaaagactggagaatagagcctagatagatagatgggtttccttaaaatcttaaggcttagttttcctttcacttccccttctccttccctttcatttaaggttcaaattaaagaatggtgcagtccccctcaggatcataaagagaaccagggaatgcagcacacttactgatttatagcttaatttgaaacaaatccctgaaccaggaaagccttatcaccctgtgtacaattaactttcaagtggatcttttaaagcttttcccaatgagaatgacccta

SEQ ID NO: 65320 - DNA, 1274 bp, Homo sapiens
tttgtagagacgaagtcttgctttattgctcaggctgatctcgaactcccagcttcaagtgatcctcctgccttgacctctcaaagtgctaggattacaagtgtgagccaccacacccagccaagatttccaaaaactcttggggcatggagtgacattttttgtgatcacttttccttatgaattcctgctccagctgaatttgggcactttcacctgcctgctgacaatgttgtcctcttatcacatcactctcattcatggcaagcgggccccttcttttcttctttccccaaagactcccaggacttaaggtcattttgcctggaagactttaactaaaggtcagggcaacataggattgtgacagcaccactcggaccaggaagtgctgaaaatcgtcacactagcgtgcccagcaccctttttcctggctgctctgcctcccagagccctgcctgcagccatttctccctttccccaatcctttccctccatctctctactgccctccacctctccctgaaaatatctgattactgttactttattatacaaaggaaatttaactcttttgaacaaacatctccattctgggctattctcactctgagatcagagaaggagctgagaattggatcctcagctgcttttcttaaccaaaaaagttgaacaaagtgtttattcctccacaaatgagtgaagcacctctgtgaggaatcctgctccccccagaatgaagaaatatggcaatcattttttacattacatttttttcttcctgttrtacatatggtaatactatgaggtggatattagcccttgcccccttttttttcagatgaggaaaccaaggatggaaaaggttaaaaaagtaatctgctcaaagtgacatagctaacatgtcagagctggaccccaaatgcaggcatgtctgactccaaagccagagggggtgaccacgacaccatgtggccgctcggtgcagctcaagcaggtctgaagtgggttgcatccccagggtgaatcttactcaggaaacctttcacgggggacactgtatgggtcagaggaaggtgaattgattgactgaaggccaaatacattaaaatagagttagagctaggaatagctacctatgtatagcttcatgtctgagacccaagaagagatgttgctattaatcactgctgaatgattaccctgattgcttcatttgttgatgctgcagttgctgaattttactgtgctctattcaaccttgagtagggccc

SEQ ID NO: 65321 - DNA, 639 bp, Homo sapiens
gagaccagcctggccaaaatggtgaaactttgtctcttctaaaaaatgcaaaaattagctgggcatggtggtgggcatctgtaatcccagctactcggcaggctgaggcacgagaatcgcttgaacccaggagacagaggttgcagtgaactgagatcacaacactacactctgcactccggcctgggcaacagagcaagactctgtctcaaaaaaaaaaaagtgtccaatgtggtgttgagaatctagtgggcactagataaatrgcagctgctactatcattattaataatagtaataccttatataccatatcatctagagtctacatattgatcatattctatgcattgttattgtcatttttctgtgactagattgtaagactcctaagtgtgtgttggggggagtgcacattatagcatttacaacccagactgcatgaaccgtggcaccaaacaaaagaactcagggaattgttgttcaacttaacatcccaaccagttggcctccacacagggtccctccaccccttgcacagtttcttggactagattcaagggaataatagcggccagcctcccactctggaatccaaccgcatcagtgaattgtgtttgggccccaagaggagcaggt

SEQ ID NO: 65322 - DNA, 1581 bp, Homo sapiens
ggatccaggtctaaaaacaaacccaaaatctccttattctggtcttgttgcctagcattcctttaaacagggaacaaagtctttcatcacacaataagagcaaaggcctgatatgctaatttgattgaatacaacggaatggtatgaatctgtttcaaagtacaaatgatgattcagaactgatcacatagtgatggcaagggcctggggacagaaggagtggcaaacatgcattttaaaatcagtcattggtccttgggactcccaattaacagggaaaaggagttagttccaacactgccaggccccccactcccctcaacttcctcagctccagggaccgctsggtctgcttcaggcatccagtgtgcagttgagaacaaatgtggggttgtaatccctgctagatatgaaagctaatttggtccactttaacttccatttccagattttttttttctggttactttaaataccatttgtctcccatagctggaccacgggaaacaggggaaataacttgtctttctttagtacctgaacttcttaactagctttgggagcaaagagagagagaatgattctgtggagcagagttttctcaaagcatggtctacacagaatcaagggtgagggccagaatctgtactttgagtaagtattctccatgactcatgcacactgaggttcaagaagccctggtatagaaagaacacttgctgggtacaaggagcaagggcgaagtggatgtcaggcttcagggaggaaaaatagaagtaggggatatgggaggctggcaaatcccttcctctgagagaccagagctgtttcttctctggcttgcaaaggttatggatagccccagaactacaaagctagacagtgattggccactcttcatattttccagggtcactgagactcatcaccccaagcacacacacccttgcccaagccacccccaaacacacgttctggccactggacacaagggtacccagggaccccagccttacatttcctcacaggccaggtagagttgagctatgtagtctcttcaaagttctagcctttctgggctgctcctcaattctctgctctcctgcttcataagctgttgctagaagatgttagctacaccgcacaaaatggaggatacaacagaaatacactgagtcagaggctgtctcaggccctttacagacccttggaggtcacaaccacttttactattaaacatcccttacctcacccctccccaaaatacacacgcatcatgtcaatcaacctaaaagaggacctcatcctatgtcaaatatgtctgatgttaaaaaagtaaggaaaatggttgttataattctgaattttaaaatatattcattttgttcttataattcaaactttattatatttacatgaaactatgaaagagttgaattgcagtttacaagttgagttgacatttttgtaggcatttaatgaaaaatttgtgaattttgattttccaattttatattttggaaccaagacttttttcccacattgcaaacttttttttttttttttttcagtttggcaggg

SEQ ID NO: 65323 - DNA, 698 bp, Homo sapiens
tctccaggtgtgtgagaggtgtcccccgcccaccacaggcacagggacagccacaaacacctactctaccgtcgtcgctggggcatctctaggagccccagcacccactaggcatggggccggcttcgtacatcaaagagcccttgcatgttgcctttctgcttaaaatcctccaacagaggctgcgctatcagaatgagctcacactctgtgacctcacctcctacgcaactcccttctccctcatctcctcccacactggcacccttgaaggtgcagaaacacatgagacaggctcttgccacaggacctttgcactggctgtcccctctgcctggaacgcctgtcaccacgtaaccacatgactcattcactctgctccttcaggtctctgctcaaacgtcacctcctcagtgaagcctgccctgcccacaccattgaaaactgccacatcttcccagcagcccagcsctctaattttgcttcatgtttttccatagcacttaccacctgagaacactacaaattttccttggctgacaccttcactgtctgtcttcactgcacacacggtgagggagagagcttttgtctgtattgtgcactgcggcagcctggacactcagtacacagcaggtgctccataaatcacttgtaagcccaaggaggtaaatttgaggtttatcacggaatggact

SEQ ID NO: 65324 - DNA, 698 bp, Homo sapiens
tctccaggtgtgtgagaggtgtcccccgcccaccacaggcacagggacagccacaaacacctactctaccgtcgtcgctggggcatctctaggagccccagcacccactaggcatggggccggcttcgtacatcaaagagcccttgcatgttgcctttctgcttaaaatcctccaacagaggctgcgctatcagaatgagctcacactctgtgacctcacctcctacgcaactcccttctccctcatctcctcccacactggcacccttgaaggtgcagaaacacatgagacaggctcttgccacaggacctttgcactggctgtcccctctgcctggaacgcctgtcaccacgtaaccacatgactcattcactctgctccttcaggtctctgctcaaacgtcacctcctcagtgaagcctgccctgcccacaccattgaaaactgccacatcttcccagcagcccagccctctaattttgcttcatgtttttccatagcacttaccacctgagaacactacaaattttccttggctgacaccttcactgtctgtcttcactgcacacacggtgagggrgagagcttttgtctgtattgtgcactgcggcagcctggacactcagtacacagcaggtgctccataaatcacttgtaagcccaaggaggtaaatttgaggtttatcacggaatggact

SEQ ID NO: 65325 - DNA, 1805 bp, Homo sapiens
tcctggtttccccttctggaggatgggaggtgggtttttaaaacactccctcccgttttccacttctgacacccaaggagcctctgcttttgaattcgcccagaagcactgtgagtcagagacctcccctgacccatatcctggatgggtggtgccctgcatgacccaggcaaggacaaacacagtcagcagtcaccaagtcactccaggcattgcctgcacccacatcagactcaggtggggagatccacccaccattgcccaatctcctgggcctctcagagctcagccctctggctctccatccagaggcaggaatgctggccgcctgccagcttctctcaagagacacatgcgccctttccctgcagccagcccagctcacttgtggaagtgaggtggggaatggccttgaaagagctcagggtgcccacaaggaaggccccagggagcccacttggaatccagtatcagaatcagctgctgtccctgcacaggtgagacggccccagaggaggcagagcctgcacccggaagccaaaggttgagtaaactcatctaaaagttgggagcaggtcacagaggcctaaagggacgttctgttttccaaaccccagtgttctgggaaaagtgcctgctccagactgcttggggcagagcggcggggcagggctcagggtggacattggcagcagccctgaaactacccaagaaggactctgaggacagccccagagagaccagaaaggaggcagggaaagagaagaagggggcgttcatgaggggacagcaggacgtgagatagacagacctcaaggagtgggcgagaatgaaggagcaaatgagaaagagccatgctgagccagccactgggagatagcggaagcaggaggtccaggccctcacaggaagggtcaagcccagaacaggggggaaagggcaatggggaagggcctgtggtttcagagcctcctgtgcaccaggtgctgtacctgtgcgaccacaccagagccaagttaacaacaatggtgctggcagctactgtgctgtgcacycactatgtcccaggcacactcacatatctgatcttccgtggtcctaagaggtacatacgatcattcactctgttttacggatgaggaaactgaggcacagagaggcaaagtcacagagctacaaaagaggttaaacggggatccaatggcgggcctagctcttaaccaaacactactacaaggaggggctgatcgtctcactttacagaagagaaaacaaaggctcagggaggccctctagaggaggaggacagtgggaagcccacacacgggcatggagcatccattactcatccagtggtaaggtttctcaccacaccttaggaggccagcacagacagacaaggaaactgaggctcagagacggtcagtggcatggcctaggacacaaagcaagttacaggaaaatgctgaaagtagggcctaagacctggacctcaggcctcagctctagtctttgctagacagaggagttaagaagcctctggaacatcactattttgttcctaagacaaagtaacagcaaagagaatttgaaaagtgctgcaggggtcagctgagaccatcctatacctgctgaacatgaaaacttaaggtcaggaatctctctgtgccaatccacccacccacccatgcatccaaccatcagttcccaccagctactacagtcatccaacccccacatccatctcctaatttcccctctctccaatcattcacccatccattcactcagtagtccaactgtcc

SEQ ID NO: 65326 - DNA, 1805 bp, Homo sapiens
tcctggtttccccttctggaggatgggaggtgggtttttaaaacactccctcccgttttccacttctgacacccaaggagcctctgcttttgaattcgcccagaagcactgtgagtcagagacctcccctgacccatatcctggatgggtggtgccctgcatgacccaggcaaggacaaacacagtcagcagtcaccaagtcactccaggcattgcctgcacccacatcagactcaggtggggagatccacccaccattgcccaatctcctgggcctctcagagctcagccctctggctctccatccagaggcaggaatgctggccgcctgccagcttctctcaagagacacatgcgccctttccctgcagccagcccagctcacttgtggaagtgaggtggggaatggccttgaaagagctcagggtgcccacaaggaaggccccagggagcccacttggaatccagtatcagaatcagctgctgtccctgcacaggtgagacggccccagaggaggcagagcctgcacccggaagccaaaggttgagtaaactcatctaaaagttgggagcaggtcacagaggcctaaagggacgttctgttttccaaaccccagtgttctgggaaaagtgcctgctccagactgcttggggcagagcggcggggcagggctcagggtggacattggcagcagccctgaaactacccaagaaggactctgaggacagccccagagagaccagaaaggaggcagggaaagagaagaagggggcgttcatgaggggacagcaggacgtgagatagacagacctcaaggagtgggcgagaatgaaggagcaaatgagaaagagccatgctgagccagccactgggagatagcggaagcaggaggtccaggccctcacaggaagggtcaagcccagaacaggggggaaagggcaatggggaagggcctgtggtttcagagcctcctgtgcaccaggtgctgtacctgtgcgaccacaccagagccaagttaacaacaatggtgctggcagctactgtgctgtgcactcactatgtcccaggcacactcacatatctgatcttccgtggtcctaagaggtacatacgatcattcactctgttttacggatgaggaaactgaggcacagagaggcaaagtcacagagctacaaaagaggttaaacggggatccaatggcgggcctagctcttaaccaaacactactacaaggaggggctgatcgtctcactttacagaagagaaaacaaaggctcagggaggccctctagaggaggaggacagtgggaagcccacacacgggcrtggagcatccattactcatccagtggtaaggtttctcaccacaccttaggaggccagcacagacagacaaggaaactgaggctcagagacggtcagtggcatggcctaggacacaaagcaagttacaggaaaatgctgaaagtagggcctaagacctggacctcaggcctcagctctagtctttgctagacagaggagttaagaagcctctggaacatcactattttgttcctaagacaaagtaacagcaaagagaatttgaaaagtgctgcaggggtcagctgagaccatcctatacctgctgaacatgaaaacttaaggtcaggaatctctctgtgccaatccacccacccacccatgcatccaaccatcagttcccaccagctactacagtcatccaacccccacatccatctcctaatttcccctctctccaatcattcacccatccattcactcagtagtccaactgtcc

SEQ ID NO: 65327 - DNA, 695 bp, Homo sapiens
ctctgccctggaagtgaacgagaatcaagtatcctactcacagttcattgctcaggactacttacgtggccccaggacgtgcagtcctgtcagtggcctggagaggggagaatggaaaatgtttgacatatggcttgattaactccttcaaaggccaggacagatgggctctactggaaggaagaagccacagctcaagtgtgcacagggcagggctcctctggaagatgggagtggctcctgaagatatagcagggaggagaggaccctgtacaaaagacagagtaatttattagagtactctcacaggaataacctgggagattgattcccccgccccccgtatcccatagatgggaaaattaggaggagtgctctattttaacatttggaaatgtcttaacatttgatctttaatgtgctatggaagttacataagtctccactataaagttccrtgttcaaaagcattgtgcctagtactgtgtgtgctacattggatgttctcagtgggtactcattgaattgaatgatggttctaaacttaccacaggaaaaatgcatacactgtttttaaaaattatcattgttattattataccattattctatcttacagagaagtttggatttggaaacaagttagagtcctgtgagggccttttaaggaatttctcctgcccaggaagctgcca

SEQ ID NO: 65328 - DNA, 655 bp, Homo sapiens
tgagctgggcagcactggaacggactgcacatgagtgaagggagcccatgaagggagcccacggtcatctgcggcagcttgcagcgaatccctccagggcctctctctgcctgcctgccaagtctagttccagcttatctgttgctcctgcttttgcaataagcacaagactgatcatttattcctgctaagtattgtctgcttgtctgtcctgatggagaaactccccaagagtcctaagctacaagggcaagcgtgctcagggcagccaaaaagtttagaaatttcctacataaccacccagagaaggtggtgagtgaattatgagacctccaaaccatggaacaccrtgaccattaaaaagatgaggtggctttatataatggcatggaaggatgatacacttgtaagtgaaaaaagcaagctagagaatatagacccatatccatgtttatcctctcattatatataatgtaaggggctgaacagccacagtgttttgaaggacacacaccaaactgctaaggagaggagaaaggagaattatcactttattttattttatttttttgagacaatgtctggctctattgcccaggctggagtgcagtggtacaatcacagctcactgcagtctcagcctcctgggctcaag

SEQ ID NO: 65329 - DNA, 671 bp, Homo sapiens
actgaaccagccctcaaacctcagcttcattcctggctcttaaaaataaattgtattttcagatatttgccaactctttttttaaaaagtttctttggaccaggaaggcaggtgactggtaaatgctgagtggcaaaattagagatacttcatttaaaagacactactggctgggtgcggtggctcacacctgtaacccagcactttggaggccagggtgggaggattgcttgaggccaggagttcgagaccagtctgggcaacatagtgagacccaatctctaacaaaaaatttaaaaattagcctggcagctgggcatggtgtctcacgcctgtaatcccagaactttgggaggccgagatgggtggatcacctgaggtcaggagttcgagaccagcctgaccaacatggtgaaaccccgtctctactaaaaatacaaaaattagctggacatggtggtgggcgcctgtaatcccagctactcggaaggctgaggcaggagaattgcttgaacccaggaggyggaggtcgcagtgagcctagattgtgccattgcactccagcctgggagacaagagtgaaactttccatctcgaaaaaaaaaaaaaaaattagtcattcatggtggtgcatgccagtggtcccagctatttaggaggctgaggtggga

SEQ ID NO: 65330 - DNA, 671 bp, Homo sapiens
actgaaccagccctcaaacctcagcttcattcctggctcttaaaaataaattgtattttcagatatttgccaactctttttttaaaaagtttctttggaccaggaaggcaggtgactggtaaatgctgagtggcaaaattagagatacttcatttaaaagacactactggctgggtgcggtggctcacacctgtaacccagcactttggaggccagggtgggaggattgcttgaggccaggagttcgagaccagtctgggcaacatagtgagacccaatctctaacaaaaaatttaaaaattagcctggcagctgggcatggtgtctcacgcctgtaatcccagaactttgggaggccgagatgggtggatcacctgaggtcaggagttcgagaccagcctgaccaacatggtgaaaccccgtctctactaaaaatacaaaaattagctggacatggtggtgggcgcctgtaatcccagctactcggaaggctgaggcaggagaattgcttgaacccaggaggcggaggtcgcagtgagcctagattgtgccattgcactccagcctgggagacaagagtgaaactttccatctcgraaaaaaaaaaaaaaattagtcattcatggtggtgcatgccagtggtcccagctatttaggaggctgaggtggga

SEQ ID NO: 65331 - DNA, 935 bp, Homo sapiens
tttccttccaaggctggagaacccccatcacagggatagaccacattttgtttatctgttcatctgttgttgagcacttgggctgcttctggcttttagtggtcgtcagtaacgctgatgggaaggattatgggtgtgcacatatccctttgtgtccctgctttcctgtcttttgggtatacacccagaagtggaactgccggatcatatggtaattctatttctgattttttgagaaacagacttagctctttgagatctcatagcattcttcacctagataggcgaggagaccgatgctcggctaaaagattgtgtgcaaacccaggtgccacgtgcaggcaaagcctatgctgcacggcatcctcggccctctctgctctctcacaggcatgtgggctgctgggagaggcaggcttggtgcagcacaggacaggcctacatcactgggggagaccggtgcaaaatgaaaatgcagggctcgcaggaaaacagctttttcctttcttctgtggtctctgtcaacatgccaaggtgttttaaatttgcttgcttttttttttttggagacagagactcactctgtcacccaggctggagtgcaatggtgtgatctcggctcactgcaacctctgccttttgggttcaagtgattctcccgcctcagcctcctgagtagctgggactacagatgtccaccaacacgcctggctgatttttgtattttttagtagagatggggtttggctatgttggccaggctggtctccaactcctagcctcaagtgatccttccaccttagcctcccaaagtgcagggattataggcgggagccactgtgcctggcctaaatttgctttttaaagtcrtgttccttcaggtgtggggatcctcaccgggagagtgcagaccctcacaggcaccaggccctgtc

SEQ ID NO: 65332 - DNA, 728 bp, Homo sapiens
tctcacgctggaacatgtggtactcagcctgctcgcagatgggcggggtcaggttgaactgccgggccacggagtaggcctcctgtgaaggcagaaagggaccccgagggcccttgcctgtgagcaggcgggrggctgccggggcagccatggagagggcaccaaggtgtccccggagcaggctggcccagcagctgcagcccgggctccccactgctcacactcatagcttccctgggagccaggcaggccctggtgagctgggaaaaggaggtgggtggtgggacccccaggccggagggtccagttatgagcagcccaggctctgaaccacacagcctggatgttaatcttggcccaagctgtgtgaccttggcatgttactgaacctctctgtgccacagtgtccacatctgaaaaatgggctgcctgcggcactcacctggtaaaggcaccggtgaggattgcatgtgagagggtccctgtggaacccttgaccctaacagcaccgggcacgtctcaggagcccagtggaaacagctgacggtgttgtcaccccagagtgcttgctgagctccagggcatctgctaagagcttcacactggctctctcagggactccttagaatggccccatgggggctcacctagcagatgtgttctacaggtggggaaacaagctcagagacgttaagccatttgtccagggccacacagcgctgggatcc

SEQ ID NO: 65333 - DNA, 954 bp, Homo sapiens
gtgttttgctgycaacagcttgcacctgaaaccttcttcagaggctgcccttgggccccctgagccactttatccgcacagacagacagggagcccaagtgccaggtgttatcccaagcaggtggttgctgatgggggcaggagtcaggaagcccagtgcccttacattcatacagacaaactatgaagtgttacatacactccagagctcccctcaggaccaggctgaggctggggccacgtctataattgcttagttgcataatttcttcttcctttctctcctgcttccccacttccaggtcctcctgagaacagttgctccataagccactggaacaggaatctttatgtcaggctctgcttctggggaaccaaacctaaaactgtagtaactatcatgattttattatcataacaattattattactgcagtcgtattttaaaaagtgatttgggctcctaaagaagatgataatttctccaaatgtgcaaaactcagcacttttcaaagcacactcgctttcccctatttcagtacattgttattactaggctctccgggggggaaagaaattaagtgaaaaatctgatccatcctcttttctcttcccactgccagctccttccagcgtggctaggacctcctctgcatcagtacagataccccagctgatgtaactgagcttgatcctcccccggttctcttcaaatttccaactcctgggccctgggctgcacacacgccaatgtgtctcacccttagaaagacaaaccctaaaaacagattcctacagacccaggagagcagaggttctcaaccttaggcctacttggaaatctcttggagggctgattacaacccacatttctgggccttactctagagattgagattcattaggttggaagggagctcatggcatatctaacaaaccattaggtgacgctgc

SEQ ID NO: 65334 - DNA, 534 bp, Homo sapiens
gggagaggaacatgtctcattccgttgcaaatgacaaaaaatttcaactcaaattggcttaagaaaaaaataaagaaaagaccaagaggaggattctgcctttaagtgtggtggctctaggggctcaaagtatgcccttctccacttcctgattctgcttctctctgaggtggcttcattctcaggcaggttatccccatagatggacacaccattccaggcctacaattcatttttcaataactccaatgggaaagagatctttattcrtggtcattctaagctctggttggtcctcatcaggtaacctgcctatttttaacccatcatcactgaggccaggggaggctaggctccaatttgacaggctaaattgcatgatgaggaagtgaaagtagagtcagtttcactgtgggactttgacatgaaccaaatgatacacaccaagaaaaaaagaaggatcaccaaaataagtcaggatgctgtttccagaaaataaacaaatagaaattgatgctagttaagtcctttagg

SEQ ID NO: 65335 - DNA, 480 bp, Homo sapiens
ttcatttttaccctgatttcctagtgtatctttgataaattattatccatattttatcatcagtgttttatgtatcataattctaaatagcatgaagttgattatttttgctttatacactgataatctttctactctgatagaatttgactgatttatatttattttaataactgatataaagtttatttgtccaaaatattttgtgtgctctctgttgcattgtgttgcttttcttttccttgtaactataaacatgtaacagcaggggccattgctgatcccacctttctgtactttgcacattcccctatcttgagctccatgttgtgaatctattattattatttgatagactgtgtccttgaactgcgtccttgaatgttttcctcaaaactcaygaagttttgttttctagttattcctctactactctgagacctggccactgtgaaaagacttgcctattgctggcactga

SEQ ID NO: 65336 - DNA, 632 bp, Homo sapiens
caagggtgacattttgactaagaatctctttacaaactcgactttacatgaatgtaatgggtatgtcacattcaaaggcaaaaagagttacttcttttgtttgacagataattatttcacccgtacagaagaatgaacaaagcctgtcaaaatcatagcctgtcctcatcgctggccatctacaaacacacaaaaaatggaaatgagactaacaaagtctatttgcccattagagcaaatattgaccccactggccccatatgctttccatacctttcttaaagattgctccttataayaaaatgaccaaaaaagccaacaaaagagccacaaagctactaagtcacattctgtagcattttataaagttacatatgccagaaaagaaaacagggagagaaagctatatcacagactccaagacgatttcccacacctttcaacaaatttcctaccaggtatgagtcccaggtttttataatcctaaagcaaggaaagtcctatggtttcataatcctcatacttggaagcaaaagtctagaagtcaaaatatttctagatcatattttcagaagaaggttttctcgccattttaggttaaacctacagagcctcaggctttctgattatac

SEQ ID NO: 65337 - DNA, 712 bp, Homo sapiens
gttgacagattcaaagtgaaaggtgctataagtggrttccaggatacagaccttcctaaaggcaccctggagaatcttcccaaggtgaagctttaaatgtacagtgtgtggtaagaggagtggcgaggaaagtttgttgtcttgcaagtatgctctgaccctgtataccccatgcccttgtctcccaccccacccccctccaccatgaaccagctgcactgagctctttctctgcctacaccctcaggcctctgctcttgctgttttctgtaacctagaagaatcttcccagagacctccaggaggctgggccattcttgtcattcaattgcaatgtcacctcctgagaaaggccctttctgactatatagtttggtagggggccacagagtggcttaagtaacagaaatgtattgcccacattctggaggctggaagtccaagttcaaggtgctggcagggttggtttcttctgaggtctcattcaacagagagaggtgccgtcttctctctgtgtcttcgtgtggtctcgcctctgtgcatgtctgtgtcctgatctcctctccttataagaacaacagtcttattcgattagtggtccatcctagtgacgctattttaatccaattacctctttaaaggcccagtctccaaatacagtcacattctggggtcctgggggttaggacttcaacacatgaattttggaagg

SEQ ID NO: 65338 - DNA, 712 bp, Homo sapiens
gttgacagattcaaagtgaaaggtgctataagtgggttccaggatacagaccttcctaaaggcaccctggagaatcttcccaaggtgaagctttaaatgtacagtrtgtggtaagaggagtggcgaggaaagtttgttgtcttgcaagtatgctctgaccctgtataccccatgcccttgtctcccaccccacccccctccaccatgaaccagctgcactgagctctttctctgcctacaccctcaggcctctgctcttgctgttttctgtaacctagaagaatcttcccagagacctccaggaggctgggccattcttgtcattcaattgcaatgtcacctcctgagaaaggccctttctgactatatagtttggtagggggccacagagtggcttaagtaacagaaatgtattgcccacattctggaggctggaagtccaagttcaaggtgctggcagggttggtttcttctgaggtctcattcaacagagagaggtgccgtcttctctctgtgtcttcgtgtggtctcgcctctgtgcatgtctgtgtcctgatctcctctccttataagaacaacagtcttattcgattagtggtccatcctagtgacgctattttaatccaattacctctttaaaggcccagtctccaaatacagtcacattctggggtcctgggggttaggacttcaacacatgaattttggaagg

SEQ ID NO: 65339 - DNA, 773 bp, Homo sapiens
tggggaagcccagcgggctcctaagaggggtccttgtgtagcaggacgagccacagacaaaacctctcagacactgagttgtagaaggaagggctttattcagctgggagcatcggcaagctactgtcttaaaatccgagctcctcaagtgcacaatttctgtcccttttaagggctcacaatgctacagacttcacatgaaagggtcgtgattgattgagcaatctaggggatatgtgacagaggtttcatgccctggtagtcagagtgaaacagaacagggcagggagtatcacaatgttccttcatacaatgtcgggaatctatggataatatcggtttctaagtcatgagttgatttttaactactaggtttaggccaggcaggcctaggtccggttttgggcctggcgcggggctgcctgtctttgatttcacttccttgtttttttcttaaaacaggtactgagtataaaacaatataaaacaatatgagagggtctctctcttccctcacttgctccatcacattttatcaaagggagcaggaggagtgcatttcaggggaatatcagcttgtgtgaaggaagacacaaatgagagagcaggggaaatggcttggagttttaaggtagagtgcagggagtccaatagcatttttaaaagattttccactaaaatatcatmaacatagagacaagtgtgcgtggcctaagtacaaagctcgatgaattctcaccaagagaacacatccaggtcacacacatatggat

SEQ ID NO: 65340 - DNA, 507 bp, Homo sapiens
tgaagggatagtgacacctttatatatacaggcccagtccttaggaagaggaatgtagcttaatgtggagaaaaatagccccaaggtttatagtccaggtggctctcagtaattgcttaactacagtaatattgcacgtatctgggactcttgaaagtaatcattttcatcaatcaacaatagactttttcttatctcaaaaataaagttcaaagtctttaaggggcattggcctgtctacatttccagcttcttcttttactccatctyccgccatttcttgcctgtggtcctgctccataggactccatgctctttcctctcccttgtggcttccttatcagtcctaacagaattgacccttcctggccctgcattcctagcacttttgcttgtgtcgcttttatgacaccttatcatattacatcttcatggtcactgaactgtaatctccttgaatgtggaaatgaatttattcatcattattagcctcctctctactttgtg

SEQ ID NO: 65341 - DNA, 986 bp, Homo sapiens
acaatctaaatgtattcctttcaggattttgattgtaaaaaaattcaacagctccctcaaagatagagattatttattcaacaaacattatggcagattcaagtagcaaaacagtctgtaaatttgggcatgtagacccaaaaaagatcctctctcaaactgctaacctggtgttgctaaatgaaacagttcttgccgaagaattttcacaggtgttcatttgcatccatgaaattcctctcgttacatcagtttttaaacaggttgtttgcatcaagtttcaagagtaatttgtgaacattgctgtctgactatccatccccatagcagagatagtaacttcttaaaatttccagttattcctagagattaaagagttggaaaataaaaaagtaaaatttaaattacaatctactggtctaagcctatatcttcaaatggccaggcttataaaatgtcttcttatttaatatccttgtctcagctgtcttccccacgcaattttttttaaacagtctcaatctggcacctactgcagcctcaacctcctgggctcaggtaattctccaatctcagcctgctgagtagctgggactacaggagtccactaccaggcccggctacttttattgtattttttatacagacagggtttcgccatgttgcctaggctggtcttgaactcctgggcccaaagtgctaggattacaggcatgcgccacctcctcatgcaatttgagcagtatatacarttggaagcctcacattccaaaccccaccttcatcatgtttcccaaaattttcaaatcccaccctttcacctggtctttcagaccttcccctagagcagtagtacccagtacccggttcgtggcccaggcatcagggacccctgccctaggttacatctatttgttcttggagtcactgccacagccactgtcattattccctgacgtggcccctcacgggcttgtgctgatgca

SEQ ID NO: 65342 - DNA, 714 bp, Homo sapiens
ccaatggcctytccaggttcctccgggtctaatggttttgagatttcgtagcatatacaaaaggatacaaaacaaacaaaatctccatatgcaatcaattctaatttgtctccactttgcatagcaaatagaagtcacattttaatgatcacatatatccaaaaccataaatattatgaaaacattcattcatttaggaaatacaattccatttcctgccttgatggggttgggagaggaaatatcttcattgaatttttctaaaagaatcatacttttgaccaatgttggcaagaaagtaactttttcttttggggactgtgagctctctgttgtcttactgaaaaaaaaaaaaaaaactgctgctgattctactgtcaagctagtgacttatttgtgctttacctgaggaaccaattaaggcaaggaacttttttacctgttgcccaagagaatgatcatttgaacaggtaactagtgcacacaccaacaaaaacagtacacctctacttggtcttaggagacctgggcctctatgacaacactggtccacgggacaatggattgtaccatacctgattccaaacaaaccaggagcctcaacttcttggtgcagccagttccagggaaagcagggaagtttgggctctgccaacccccaacaccccctgtcatggccccaccagcctctcaccctccttcactacctgtgcc

SEQ ID NO: 65343 - DNA, 1632 bp, Homo sapiens
ccgaatgtcctgatttacaaaaacccgaagacaccacaacactcaaaggaaagcagtggcccagaacgggcagaggacttgtgagacgtcatacagcaaaccatcagaaacctgtatacatctggacaagtagatccagagaactgctcccccaaaatggcaaagaactgaagctcacagttcaaagagcagtgattgtgatttgtctaatgttaaaggagaatgtctagacgcagaataccagaacgtctggttttaatctgtcttagactgggatcccccagaaacagaccctggaataagaatttgaatataagtagcttatttgggaggcgatcccagaaaccaccactagaggagggggatgtgaggccaggaagggaaggcggccaatgcctgggatttattgggttaccactgcaggccactgacatcagtcatgctggacactgtgggagatggtgtataacacagctcagagttgtccccaccttgggacaatgatgaggaagtgggggtatttatccatcaaacagcatcatcattggggtcctatctcccaaactgctcagctttgaccaagcacaacttggatggagagatgaagggcaagtgttgggtgcagatggacaaggcaccaaccacatctgcaacactgctctctccccttggtgagcttggacagttgggttttctgaccctcgtctcttctcttgggtggttatatctcaacatcatttcttggacactgcagggactcactcaggctagggccacttgctgttccacagcctcccgagtcatgccctttctcactgggatgtccataaactccagcctgcagggctctgcccactctatcaactcctgaaggtaaacgctttctggagcaatattttgtatgtaccactccttcttacaaaacatttcatggcttaccattccctgcaaggcaatatccattcctcttaatcttctaggtctccacaggtcacactcagcctggcttctcagtctagggatccagccaacctagcccctaagacaggaatgactgggtcacctacgcctttactttcmccttagtcttctgccatcccctcagccatccacagaactattatagaagggaaaacagggaatggagtatcccttaggcttcaagcaagtctatggagaaaatggctatggagaggtagaggtggtcacacccaggaaaccaaacgctttggcctccagctgaactgtaaagaagaggcagcatggtaagcacaattaataacaatgtacttgatatagttaggctttgtgtccccacccaaatctcaccttgacttgtaatccccaggtgtttatggagagacctggtaggaagtgattggattaagggggtggtttccccatgctgttctctcgatagtgagtgagttctcacgagatctgatggttttataaggcagttttccccactcttgctaacactctctctcctgccgccatttgaaaaggtccaagctcatttcccccttgccttccagcataattgtaagtttcctgaggcctccccagccatgtggaactgtgagtcaattacacctctttcctttataaattacccagtctcaggtagta

SEQ ID NO: 65344 - DNA, 1632 bp, Homo sapiens
ccgaatgtcctgatttacaaaaacccgaagacaccacaacactcaaaggaaagcagtggcccagaacgggcagaggacttgtgagacgtcatacagcaaaccatcagaaacctgtatacatctggacaagtagatccagagaactgctcccccaaaatggcaaagaactgaagctcacagttcaaagagcagtgattgtgatttgtctaatgttaaaggagaatgtctagacgcagaataccagaacgtctggttttaatctgtcttagactgggatcccccagaaacagaccctggaataagaatttgaatataagtagcttatttgggaggcgatcccagaaaccaccactagaggagggggatgtgaggccaggaagggaaggcggccaatgcctgggatttattgggttaccactgcaggccactgacatcagtcatgctggacactgtgggagatggtgtataacacagctcagagttgtccccaccttgggacaatgatgaggaagtgggggtatttatccatcaaacagcatcatcattggggtcctatctcccaaactgctcagctttgaccaagcacaacttggatggagagatgaagggcaagtgttgggtgcagatggacaaggcaccaaccacatctgcaacactgctctctccccttggtgagcttggacagttgggttttctgaccctcgtctcttctcttgggtggttatatctcaacatcatttcttggacactgcagggactcactcaggctagggccacttgctgttccacagcctcccgagtcatgccctttctcactgggatgtccataaactccagcctgcagggctctgcccactctatcaactcctgaaggtaaacgctttctggagcaatattttgtatgtaccactccttcttacaaaacatttcatggcttaccattccctgcaaggcaatatccattcctcttaatcttctaggtctccacaggtcacactcagcctggcttctcagtctagggatccagccaacctagcccctaagacaggaatgactgggtcacctacgcctttactttccccttagtyttctgccatcccctcagccatccacagaactattatagaagggaaaacagggaatggagtatcccttaggcttcaagcaagtctatggagaaaatggctatggagaggtagaggtggtcacacccaggaaaccaaacgctttggcctccagctgaactgtaaagaagaggcagcatggtaagcacaattaataacaatgtacttgatatagttaggctttgtgtccccacccaaatctcaccttgacttgtaatccccaggtgtttatggagagacctggtaggaagtgattggattaagggggtggtttccccatgctgttctctcgatagtgagtgagttctcacgagatctgatggttttataaggcagttttccccactcttgctaacactctctctcctgccgccatttgaaaaggtccaagctcatttcccccttgccttccagcataattgtaagtttcctgaggcctccccagccatgtggaactgtgagtcaattacacctctttcctttataaattacccagtctcaggtagta

SEQ ID NO: 65345 - DNA, 637 bp, Homo sapiens
tctttctatgttgcccaggctggtcttgaactcctgtcctcaagcgaccctcccacctcagcctcccaatgtgttggaattacaggcaggagccgctacacccagccttcactcctatcactcacacctgcaacccacttcaatgcccttgcactgctggaactatgacccagaacaaagaaagcaagaagtgccttggagttgatgtgcctgccctccctggtgcagggtatgaaagcctcactccctggccttgaggtggagcgaactcttggtgcaattcacattccagaactgcccacagtatcacctgaaattactcccttgcttgctgctgctgcttctctcccctgcctgctctactgccttttcaatttctctccggagtcctgccttaatgaaacacacgcacacagattgtcatcatagggcttgcttcaaggaagcccctcctaagatgctagctcaaaagatgtgtgtaccccaacattgtagcttcaagccaacttcatatttcacactcctcttatcacttgctcctaaagrgagatgggaagggccactgctggctacagtgagctcaggccctcagttctggcatatgcatgttctcaaccatgtctctgactatacaatc

SEQ ID NO: 65346 - DNA, 637 bp, Homo sapiens
tctttctatgttgcccaggctggtcttgaactcctgtcctcaagcgaccctcccacctcagcctcccaatgtgttggaattacaggcaggagccgctacacccagccttcactcctatcactcacacctgcaacccacttcaatgcccttgcactgctggaactatgacccagaacaaagaaagcaagaagtgccttggagttgatgtgcctgccctccctggtgcagggtatgaaagcctcactccctggccttgaggtggagcgaactcttggtgcaattcacattccagaactgcccacagtatcacctgaaattactcccttgcttgctgctgctgcttctctcccctgcctgctctactgccttttcaatttctctccggagtcctgccttaatgaaacacacgcacacagattgtcatcatagggcttgcttcaaggaagcccctcctaagatgctagctcaaaagatgtgtgtaccccaacattgtagcttcaagccaacttcatatttcacactcctcttatcacttgctcctaaagggagatgkgaagggccactgctggctacagtgagctcaggccctcagttctggcatatgcatgttctcaaccatgtctctgactatacaatc

SEQ ID NO: 65347 - DNA, 637 bp, Homo sapiens
tctttctatgttgcccaggctggtcttgaactcctgtcctcaagcgaccctcccacctcagcctcccaatgtgttggaattacaggcaggagccgctacacccagccttcactcctatcactcacacctgcaacccacttcaatgcccttgcactgctggaactatgacccagaacaaagaaagcaagaagtgccttggagttgatgtgcctgccctccctggtgcagggtatgaaagcctcactccctggccttgaggtggagcgaactcttggtgcaattcacattccagaactgcccacagtatcacctgaaattactcccttgcttgctgctgctgcttctctcccctgcctgctctactgccttttcaatttctctccggagtcctgccttaatgaaacacacgcacacagattgtcatcatagggcttgcttcaaggaagcccctcctaagatgctagctcaaaagatgtgtgtaccccaacattgtagcttcaagccaacttcatatttcacactcctcttatcacttgctcctaaagggagatgggaagggccactkctggctacagtgagctcaggccctcagttctggcatatgcatgttctcaaccatgtctctgactatacaatc

SEQ ID NO: 65348 - DNA, 1703 bp, Homo sapiens
agagatgaagagaaagtgtgatgggaaaagggtgggggtcattcggcccccagagctatgctcgaatcctgcctgctgcattcttacatataccccaaagcacccagccagacctgtatcctgcagatggggaaactgaggcccagagagaagaaatgactagtccagagccacgccatgaaattgagttgggcctagctcctgactctcagttcagtgctcagtccagaaatgacagatgtataagggcaggggctcggagccctggacctctcctttgttcctcacacaaagtccattctcctgctcttgtcatcctggggttttggcagagtggtggcagtggcagtgctggggaagaggggtggtttggctggggttgggagcgcagcagtgaagaagttaatcttcacctcggcctctgccaagcccccagctgttattgcccttggcgcactgggtgatttattggaaacatctgtttggagatgaacgcctggctctggaatccaggggctcctcactgcagcccctctacctcctgctccttccacctggtgcctccactcaagcctctgccctccgcaccctcaaccccatcctgcctctatgggcagctggcagaggggtctgggagaggagggagggaagaaggcaagaagaagggcagtggggagacccctgaagccaggacccccgggtccccattgcaggctgagggaccagacttcagctttatcaatggagtacaggcaaggtgaccctggagaccccccaaaccccgaattccttcctgctcctcgctcagggatgttcagttctgggtgagaaccagctggctcagttctgctctcaagagatgaggggaggtgtgtatggtggggggagtgcggagggactgaagaggsgtcactgagagctctggggcccctcagctgtgcaggggtcctgactcctgggcaggaccctgtggcctcaaggaccctctgtaaatgtggggggcacttcagtccctcaggagctgggatctggatccccatctccctccaggcctggtctgtgtatgtgaattgtgtaggagatgtcttgggggccctggagcccaaggagaggggagggtggcctcggtgcctcccttggctgaagaggccgggtcttccagtgatggcagcagtcacaacattgcacactgcctgcttcctgcacgccagcccttctaagtacttgctgctcacgcatcccctcagtattgctagtcttcttttactgatgaggaaactgagtcccggagaggtagaggtacagtaagttgcccaaggtcacatagctagcaagtgtcagagaggtacagtaagttgcccaaggtcacacagctagcaagtgttagagattaggagctggggctcagagggcagaggccagcatgggggcagaggctgggagacaagcgactgaggaataagctgctactaccacgacaatcactaccctcataactggtgttatgtaccaggcacagtgctagaagctttaggtggagcagcttctttttttttttttttttttttttttgagacggagtctagctccgtgcccaggccagagtgcagtggcgcaatcccggctccctgcaacatccgcctcccgggttcacaccattctcctgcctcagcctcccgagtagctagggactacatgcgccc

SEQ ID NO: 65349 - DNA, 685 bp, Homo sapiens
gcaccaagtgggctctgcacccaagcccaggcccagcttccccggggcccaccgatcagttcagaataaagcgcaaagtccctcagtctccatgaactgggccccacctgccttggccctcatctccccttacttattccytgccagccatgctacttccttttctcggttaatttgccaggcaccttctcgcctcagggcctttgcccttgctctttcctctgcccagaatgtgcatcccctagatacccacattggccctttcctcgtttcttctgcttatgtcagcttctaagagaggccgtcccagacttctcactctctgcccccaacaccattttattattctacccagactttttcagcacttggcctattctatatttgctcatctgttggtagagtgaaaggccctgagagcagggactggcttgtctactagtgtattccctagagatgtgtctgccacagagagtgcaatacattttccaatttcagaggttggaaaacagaggccagagaggggaaagagctaatgcaagtcatgtagtgagttagtggcaaaaccttaccaaatcccaactttccagactcccacctcagtattctttcctgccttccagggcttattccccactctccaccccagagccttccaggcaacaaaggggacagaactgccttg

SEQ ID NO: 65350 - DNA, 731 bp, Homo sapiens
atcttctacccaatgattacagaatacttcttttccatcttgaatgggacctttctaaaaattggcgataggttgaggcatgcagcaggcctcaacaaacttcagagcacagaagtcatgggagagcatgctctctgatcacagtgcaaataagctaaacaccaataacaaaaactataaaataacaaaaactaaatgtttagaaattttagaaataggccaggcgtggtggctcacacctgtaatcccaacactttgggaggccaaggcgggtgtatcacctaaggtcaggagtttgagaccagcctggccaacatgttaaaacctcgtctctactaaaaatacaaaaattagccaggtgtggtggcgtgcacctgtagtcccagctactcgggaggctgaggcaggagaattgcttgacctggggaggtggaggttgyagtgagctgagatggtgccactacactccaaactgggtgacagagcaagactccatctcaaaaaaaaaaaaaaattagaaatatttttccaaacaatccatgatgcaaagaagtcataatgtcaagtagaaaagccagaactgtacccccaaaagagcaggtacctctgcagacctggccctggcacaggatatctgggagcaggttggatagccagtctgtttgctctgcaaaaatttctttgtggaatagcagaggggtgttgcagcgatgccaaataaacatagaaca

SEQ ID NO: 65351 - DNA, 731 bp, Homo sapiens
atcttctacccaatgattacagaatacttcttttccatcttgaatgggacctttctaaaaattggcgataggttgaggcatgcagcaggcctcaacaaacttcagagcacagaagtcatgggagagcatgctctctgatcacagtgcaaataagctaaacaccaataacaaaaactataaaataacaaaaactaaatgtttagaaattttagaaataggccaggcgtggtggctcacacctgtaatcccaacactttgggaggccaaggcgggtgtatcacctaaggtcaggagtttgagaccagcctggccaacatgttaaaacctcgtctctactaaaaatacaaaaattagccaggtgtggtggcgtgcacctgtagtcccagctactcgggaggctgaggcaggagaattgcttgacctggggaggtggaggttgcagtgagctgagatggtgccactacactccaaactgggtgacagagcaagactccatctcaaaaaaaaaaaaaaattagaaatatttttccaaacaatccatgatgcaaagaagtcataatgtcaagtagaaaagccagaactgtacccccaaaagagcagktacctctgcagacctggccctggcacaggatatctgggagcaggttggatagccagtctgtttgctctgcaaaaatttctttgtggaatagcagaggggtgttgcagcgatgccaaataaacatagaaca

SEQ ID NO: 65352 - DNA, 731 bp, Homo sapiens
atcttctacccaatgattacagaatacttcttttccatcttgaatgggacctttctaaaaattggcgataggttgaggcatgcagcaggcctcaacaaacttcagagcacagaagtcatgggagagcatgctctctgatcacagtgcaaataagctaaacaccaataacaaaaactataaaataacaaaaactaaatgtttagaaattttagaaataggccaggcgtggtggctcacacctgtaatcccaacactttgggaggccaaggcgggtgtatcacctaaggtcaggagtttgagaccagcctggccaacatgttaaaacctcgtctctactaaaaatacaaaaattagccaggtgtggtggcgtgcacctgtagtcccagctactcgggaggctgaggcaggagaattgcttgacctggggaggtggaggttgcagtgagctgagatggtgccactacactccaaactgggtgacagagcaagactccatctcaaaaaaaaaaaaaaattagaaatatttttccaaacaatccatgatgcaaagaagtcataatgtcaagtagaaaagccagaactgtacccccaaaagagcaggtacctctgcagacctggccctggcacaggatatctgggagcaggttggatagccagtctgtttgctctgcaaaaatttctttgtggaatagcagaggggtgttgcagcratgccaaataaacatagaaca

SEQ ID NO: 65353 - DNA, 731 bp, Homo sapiens
atcttctacccaatgattacagaatacttcttttccatcttgaatgggacctttctaaaaattggcgataggttgaggcatgcagcaggcctcaacaaacttcagagcacagaagtcatgggagagcatgctctctgatcacagtgcaaataagctaaacaccaataacaaaaactataaaataacaaaaactaaatgtttagaaattttagaaataggccaggcgtggtggctcacacctgtaatcccaacactttgggaggccaaggcgggtgtatcacctaaggtcaggagtttgagaccagcctggccaacatgttaaaacctcgtctctactaaaaatacaaaaattagccaggtgtggtggcgtgcacctgtagtcccagctactcgggaggctgaggcaggagaattgcttgacctggggaggtggaggttgcagtgagctgagatggtgccactacactccaaactgggtgacagagcaagactccatctcaaaaaaaaaaaaaaattagaaatatttttccaaacaatccatgatgcaaagaagtcataatgtcaagtagaaaagccagaactgtacccccaaaagagcaggtacctctgcagacctggccctggcacaggatatctgggagcaggttggatagccagtctgtttgctctgcaaaaatttctttgtggaatagcagaggggtgttgcagcgatgccaaayaaacatagaaca

SEQ ID NO: 65354 - DNA, 1304 bp, Homo sapiens
agaatttcaggctacaggatcagaatctgcctttaacagaatcgccagtgattcttgtgcacgatgttgagaaatgctggcttagaccacattgtgagccccgttggctcttctctgggcccagatttttctctggctgtgttttgtgactccacttcactcacctctaattccctgagggaccccttccaccccaagataaatagaactgaccttctgggccacacactcttgcagggagacatgtacacacacacaggcacctaccaaggctgatgtggtagggccagcccagcagatctgggacctcagcaaagccaatctgagggcaagagaatgagaacagaaaaagtatgggggctacagccttgccaactgctcacagatttcagcaaagaaaacagcaataattaattctgccaatactttttgagcacctgctatgtgccaggccctgggggaatgacagccgccattcatataataccttttggttgataaaacatgttcactccattctgtcagtgaactgcacatacgacagagaaatgagcctgtgatatagaaagcatgatccccattttacagatgatgaaactgaggctccaagaaactgagttacttgtccaagatttaaaaatagcttttgagctgggatccccacttttttggctttcttccctcacactcaatgtgattaatttatttgctctacatggtcatttgagcattacccccgacatttttttctgccttttctgccatgatgactgtccagcatggagaagcattgtgtccagttgccactgaatttccattagatggggccactcatcctgaactacaagtggcactgagtatgcccatgctcacagcagctattcatcatagctaaattttcatcacagctaaaatgtggaagcaacccaagtgcycatggatgaatgaatgaataattaaaatgtggcacatacatagaataaaatattatttagccttaaaaaggaaggaaattcttacacatgctactacatagattagccttaagctaattgaaataagtcaatcgcaaaaagagaaatattatataattctacttacatgagacacttaagagtagtcaaaatcatagagacaggaagtagaatggtggctaccagggggtgggagaagagggaaatgaagagttcgtatttaatggacacagagtctccattttgcaagaaaaagagttttggagatggatggtgtgaaggttgcacattatcaatgtatttaacgctactcaactctacatttaaaaa

SEQ ID NO: 65355 - DNA, 1304 bp, Homo sapiens
agaatttcaggctacaggatcagaatctgcctttaacagaatcgccagtgattcttgtgcacgatgttgagaaatgctggcttagaccacattgtgagccccgttggctcttctctgggcccagatttttctctggctgtgttttgtgactccacttcactcacctctaattccctgagggaccccttccaccccaagataaatagaactgaccttctgggccacacactcttgcagggagacatgtacacacacacaggcacctaccaaggctgatgtggtagggccagcccagcagatctgggacctcagcaaagccaatctgagggcaagagaatgagaacagaaaaagtatgggggctacagccttgccaactgctcacagatttcagcaaagaaaacagcaataattaattctgccaatactttttgagcacctgctatgtgccaggccctgggggaatgacagccgccattcatataataccttttggttgataaaacatgttcactccattctgtcagtgaactgcacatacgacagagaaatgagcctgtgatatagaaagcatgatccccattttacagatgatgaaactgaggctccaagaaactgagttacttgtccaagatttaaaaatagcttttgagctgggatccccacttttttggctttcttccctcacactcaatgtgattaatttatttgctctacatggtcatttgagcattacccccgacatttttttctgccttttctgccatgatgactgtccagcatggagaagcattgtgtccagttgccactgaatttccattagatggggccactcatcctgaactacaagtggcactgagtatgcccatgctcacagcagctattcatcatagctaaattttcatcacagctaaaatgtggaagcaacccaagtgctcatggrtgaatgaatgaataattaaaatgtggcacatacatagaataaaatattatttagccttaaaaaggaaggaaattcttacacatgctactacatagattagccttaagctaattgaaataagtcaatcgcaaaaagagaaatattatataattctacttacatgagacacttaagagtagtcaaaatcatagagacaggaagtagaatggtggctaccagggggtgggagaagagggaaatgaagagttcgtatttaatggacacagagtctccattttgcaagaaaaagagttttggagatggatggtgtgaaggttgcacattatcaatgtatttaacgctactcaactctacatttaaaaa

SEQ ID NO: 65356 - DNA, 1304 bp, Homo sapiens
agaatttcaggctacaggatcagaatctgcctttaacagaatcgccagtgattcttgtgcacgatgttgagaaatgctggcttagaccacattgtgagccccgttggctcttctctgggcccagatttttctctggctgtgttttgtgactccacttcactcacctctaattccctgagggaccccttccaccccaagataaatagaactgaccttctgggccacacactcttgcagggagacatgtacacacacacaggcacctaccaaggctgatgtggtagggccagcccagcagatctgggacctcagcaaagccaatctgagggcaagagaatgagaacagaaaaagtatgggggctacagccttgccaactgctcacagatttcagcaaagaaaacagcaataattaattctgccaatactttttgagcacctgctatgtgccaggccctgggggaatgacagccgccattcatataataccttttggttgataaaacatgttcactccattctgtcagtgaactgcacatacgacagagaaatgagcctgtgatatagaaagcatgatccccattttacagatgatgaaactgaggctccaagaaactgagttacttgtccaagatttaaaaatagcttttgagctgggatccccacttttttggctttcttccctcacactcaatgtgattaatttatttgctctacatggtcatttgagcattacccccgacatttttttctgccttttctgccatgatgactgtccagcatggagaagcattgtgtccagttgccactgaatttccattagatggggccactcatcctgaactacaagtggcactgagtatgcccatgctcacagcagctattcatcatagctaaattttcatcacagctaaaatgtggaagcaacccaagtgctcatggatgaatgaatgaataattaaaatgtggcacatacatagaataaaatattatttagccttaaaaaggaaggaaattcttacacatgctacwacatagattagccttaagctaattgaaataagtcaatcgcaaaaagagaaatattatataattctacttacatgagacacttaagagtagtcaaaatcatagagacaggaagtagaatggtggctaccagggggtgggagaagagggaaatgaagagttcgtatttaatggacacagagtctccattttgcaagaaaaagagttttggagatggatggtgtgaaggttgcacattatcaatgtatttaacgctactcaactctacatttaaaaa

SEQ ID NO: 65357 - DNA, 792 bp, Homo sapiens
ttgcatggggctgggagtgcacagcgggggagcctgaatgagcaggcagagggacctgtgggcgcttgcttttgcttccgggtcttcttcattatcatgggcccggggaatctgagagggtctcacagtgcccacagccttacccttatcccaggtgcaactgctgatcctccctgaaacaccagctcataagggcatcctcatgtggaccagaagcaatgacactggccgtgtgtcacagcttacagagcatcttcatgtgccacccaatcatctatgccctggtgggagtactatctccactcattttacagatgatgaaactgagactcagaccagtaaagctgtctgtccaaggaataaccagagggtagacttgcatccagactccaggctccaaggcccaaactctgcatctggcacctcatggtctcatgtctccggaataagtactcaatagccacagctgaggtgcctcatgyatcatgggcagccacagcccctgccccagtccccttgtctgatgaacacacatcatgatgccactctataaagaggaccgttgccagaaaggattaattcattaatgaatatgaggtctctggaaacccagaacgtgatgtaaatacccgtgctgtcaaagctgcctctctgttgcagaatgaaaagcaccaaaatccctccattgtccttggataatagctttgatttggggcagggcaggaggaaggagactctgtctgggggataaacaatgctgggatgttccaacatagcaggatttgcacacag

SEQ ID NO: 65358 - DNA, 587 bp, Homo sapiens
ctttggtgggggggacgaaatcatttgttaatgctgcatctcctgcccctcattggtttgctaatatatggctatttagctgtagttgacagcctctgaaatttattatttttatataaagcagatattctttttttaatttyatttatttttattttttatttatttatttttttgagatggagcctcactctgtcacccaggctaaagtgcactgacacgatcttggctcactgcaacctccacctcccgggttcaagtgattctcctgcctcagcctcccaagtagctggggttacagactcctgccaccatgcctggctaatttttgtattttttagtagagacaggtttccccttgttgcccaggctgatcttgaactcttgggctcaagtgatctgcccaccttggcgtcccaaagtgttaggattacagacgtgagccaccgtgccaggccagcaaagtaaagattctgaagttttgctacattaactaattttcatctatttcccagggagaaagaattattttcacttttatacgctaaagctgggagaattccactgtgaacacagcgcacaccaac

SEQ ID NO: 65359 - DNA, 587 bp, Homo sapiens
ctttggtgggggggacgaaatcatttgttaatgctgcatctcctgcccctcattggtttgctaatatatggctatttagctgtagttgacagcctctgaaatttattatttttatataaagcagatattctttttttaatttcatttatttttattttttatttatttatttttttgagatggagcctcactctgtcacccaggctraagtgcactgacacgatcttggctcactgcaacctccacctcccgggttcaagtgattctcctgcctcagcctcccaagtagctggggttacagactcctgccaccatgcctggctaatttttgtattttttagtagagacaggtttccccttgttgcccaggctgatcttgaactcttgggctcaagtgatctgcccaccttggcgtcccaaagtgttaggattacagacgtgagccaccgtgccaggccagcaaagtaaagattctgaagttttgctacattaactaattttcatctatttcccagggagaaagaattattttcacttttatacgctaaagctgggagaattccactgtgaacacagcgcacaccaac

SEQ ID NO: 65360 - DNA, 587 bp, Homo sapiens
ctttggtgggggggacgaaatcatttgttaatgctgcatctcctgcccctcattggtttgctaatatatggctatttagctgtagttgacagcctctgaaatttattatttttatataaagcagatattctttttttaatttcatttatttttattttttatttatttatttttttgagatggagcctcactctgtcacccaggctaaagtgcactgacacgatcttggctcactgcaacctccacctcccgggttcaagtgattctcctgcctcagcctcccaagtagctggggttacagactcctgccaccatgcctggctaatttttgtattttttagtagagacaggtttccccttgttgsccaggctgatcttgaactcttgggctcaagtgatctgcccaccttggcgtcccaaagtgttaggattacagacgtgagccaccgtgccaggccagcaaagtaaagattctgaagttttgctacattaactaattttcatctatttcccagggagaaagaattattttcacttttatacgctaaagctgggagaattccactgtgaacacagcgcacaccaac

SEQ ID NO: 65361 - DNA, 587 bp, Homo sapiens
ctttggtgggggggacgaaatcatttgttaatgctgcatctcctgcccctcattggtttgctaatatatggctatttagctgtagttgacagcctctgaaatttattatttttatataaagcagatattctttttttaatttcatttatttttattttttatttatttatttttttgagatggagcctcactctgtcacccaggctaaagtgcactgacacgatcttggctcactgcaacctccacctcccgggttcaagtgattctcctgcctcagcctcccaagtagctggggttacagactcctgccaccatgcctggctaatttttgtattttttagtagagacaggtttccccttgttgcccaggctgatcttgaactcttgggctcaagtgatctgcccaccttggcgtcccaaagtgttaggattacagaygtgagccaccgtgccaggccagcaaagtaaagattctgaagttttgctacattaactaattttcatctatttcccagggagaaagaattattttcacttttatacgctaaagctgggagaattccactgtgaacacagcgcacaccaac

SEQ ID NO: 65362 - DNA, 789 bp, Homo sapiens
aataacccttggcttttaggggcacagtgttgggaatgcgtagggggagccaatgaggagatggaatgagaaaaatcctaagaaaaattattaggaggctgttgaaatattatctccctccctagccttcttctttctgcccgcatttctgtcggcttaatttcaccctgtcattcatatatatatatacatatatatatatatatatatatatatatatatatatatatgacacacacacatatgatttttatttttatacattatttatacatttgtatatacattatatatactaatgcgaatagtatatacatatgcacataggtatatataatgtaatacattgccaaatgtgtacaaacattctaaatgactctttcgcacttacatcaacccgtagttaccttcccgaatctaaaaccagaagcaaatcttatttttatttatttatttattcgtttatttatttagagagggaatctcgctgtgtcgcccaggctggagtgcggtggcacaatcttggctcactgcaagctccacctcccgggttcacaccattctcctgcctcagcctcctgagtagctgggactacaggcacctgccaccacgcctggccaattttttgtatttttagtagagacggggtttcacggcaaatcttatttttacttttattttttgtagtccagaattacagcaccatagagacgaaatwtacaggtgagggcgggagcttctccactcagtctgtgcatgtgggagggtgggcaacttcctgccagcct

SEQ ID NO: 65363 - DNA, 849 bp, Homo sapiens
gcatttattgagtccttatgtgccagcacctttccaaatgcctgtgttttatctcatttcatcctcacaataactgagaggcaggttgttaccatcaatttagagatgaaaaaaactcaggtctgaatacgcaatctgaccatgtggagccaagatttcacagcaggctttgtctccagagtccagatttttaacaaacatgctctactgcctctcagatgctcaatcccctgaatccacagctactatgctgcccacactttgtttgattccttttacttggatctttttgaagtgtttttttttttttggcttgtgttgttgttgttttttttgagacggactctcgctgtcacccaggctggagtgcagtggcgcgatctcagctcactgcaggctgcgccccccaggggttcacgccattctcctgcctcagcctcccgagtagctgggactacaggtgcctgccacctcgcccggctaattttttttgtattttyagtagagacggggtttcactgtgtcagccaggatggtctcgatctcctgaccttgtgatccacccgccttggcctcccaaagtgctgggattacaggtgtgagccaccgcgcccggcctgttgttgtttttgacaggatcttgctctgtcactcaggctggagtgcagtggcacgatcatggctcactgcagtcttaacctccctggctcaagcagtcctcacactttggcctcccaaagtgctgggattataggtgtgagccaccccgcatggccaatattacctggatctttactgtcaacatgtcatatatttcaggcttccaatattccacttcaggagtgggtg

SEQ ID NO: 65364 - DNA, 2905 bp, Homo sapiens
ctgctggagtaatttctaccagttggcgtaggattcatttcctgtaacagaaagcaggatttcctaaatttgtttcctgtgcacattccagttggggaaccttgaagtgtctttattcagctatcgattacagcctgggggcgctgggccctccctgccaccgtacagtaagtcacggaggaaatgaaatagatacagtcggacccggaggagcggagcactgctcagatgctggagcgagcaggcctcagccctgacagcatcccaccatttccaggatgttccacagtgtcgagagtgggtggtggggagtggcagtgggggccttggtgataatgcaactttccaagcctttgtttcttggtttgagccaggaggtgctgtcctgtaagcagctaggatcagctctgtccatggctcattcacttgtcttttccatgaatttttcatatttaaaaaactttttttctttttttggccaggcgcttttgagacagagtcttgctctgtcgcccagtggtgtgatcttggctcactgcaatctccgcctcccgggttcaaaccattcttctgcctcagcctcctgagtagctgggactacaggtgcccaccaccatgcctggttaatttttatatttttagtagagacagggtttcaccatgctggccaggctggtctcaaactcctaacctcaaatgatccactcacctcagcctcccaaagtgctaggattacaagcgtgagccaccactcctggccaaaaaaggttttaaaatcacaagtactaatgtcttcactacagaaaagggagaaattgtagaatcaaaaagaagataaaaaataacctgtgattcttgccacctggcgataactactactgtttatgttctggtatagattttctcagactccttctaaatgtatgcatatttaaatatacatatatatttattttattttatgtgtatttatataatatatgatatgcatatttataatatgtaaatatttacatattataaatatgtaaagaaatatatataatgtaaatatatattatataatatatwatgtaaatatatattatataatatattatgtaaatatatattatataatatattatgtaaatatatattatataatatattatgtaaatatatattatgtaaataataatttaaatattgacataatatataaatatataaaataatatttactttgtgtgtgtgtgtgtatatatatatatggagagagagagagaggaccagtacagaatcatgctgtagtacatataattaaacaggaaggagggtgaattaagtaacttcctttagaaagtcatatggctttccgagattgcaccactgcactcgagcctgggcaacagagcgagactgtctcaaaaaaaaaatttaaaaaaaagaaagtcatatgactttcacatttctgtaggacttacgcttgtgttcaggtatacgtgtgtgtgtgtgtgtgtgtatgtgtgatgtattttcctgtgtgccatgttagtatgtgtgtgcacatggatgcacatgtgtgtgtatgaatgaaagctgcttgctgtatttcactgggtcttgaatagctgaataattccagagcaatgaatcagcagttctaggtaacatgcagagtgtctccatggctagcacatgctcatggcacagagtgagaagcctgttgctctccttccctgacttccattctcccaggcttcttcctctgcgacacccgctgttattaatatctgagtatacttgcagagataattctttgcatgtattagaattaccctcacgcttcattaaaatatatatatattttttattttttatttttttttttgagacggagtctcactctgtcacccaggctggagtgcagtggcaccatctcggctcactgcaacctccgtctcctgggttcaagtgattctcctgcctcggcctcccgagcagctgggactacaggtgcacgccatcacgcccagctaatttttgtatttttagtagagacggggtttcaccatattggccaggctggtctcaaattcctgaccttgtgactcacccaccttggcctcccaaagtgctgagagtacaggcgtgagccaccacacccagcctattaaagtattttttaaaatttaaaagcacaactgtaaattatagatgcagctttacactttgcttttagtagctcagtttttacaaatgtgccaggacatggaatatcattgcactgtgacctcagcgagggctgagttttactgaaacatctgccgtgggttcctgtagcctcccagtggcataaatgcatgtctgtatttcaagaccctgtctactcactttcatggaaggtgagggcatcacattggccttccctgcttctgcagtgcaattgctggccatgtttaacttgtaactttcaattcaatcagctgtgtgattttttttttttttttttgagacggattctcgctctgctgcccaggctggagtgcggtggtacgatcttggctcacttcaacctccgcctcccaggtacaagcaattctcttgcctcacctcccaagtagctgggactacaggcatctaccaccacgcccggctaattttgaatttttagtagagacagggtttcaccatgttggccaggctggtctcgagctcctgacctcaagtgatctgcccgccttggcctcccacagtgctgggattacaggcgtgaactactgcacccggcctagctgtgcgattttaagcaaatcattgctgcacctcagcctcctcaaaggtaaagagggactagggccattgacttcacaggtccttgctaaagatgaggtagtaatggtgataacagtggtactgacgg

SEQ ID NO: 65365 - DNA, 1154 bp, Homo sapiens
atttggctatgaatctctgtattctccaatctctccagagtctggggtttgccctgttacttcaattctctgatgcatctgggaaaatttgttgatttcaagtttgttcagcctttttcttattgtaataatgggagtgacaactttgaaactgtttacatgttggagctgaaaatgaaagtccctctgataaccagatagggccacctaaaatcatgctcattaggcagagcaagctggtctaggcactgcaaaacatatcaactcaggtgagttggttaaaatgaatgaaggatgaaataaaatctatcaattcacctcctagtgcagagacttgcaaaaaactcataaaaaatatgggatgatttcttacagtcccaagcaaaagacatagtcatacgatagttctatcttttgtgtttctgtagcactttcactttacatattttatgattcatawtgtgttatagttggctcattatatgtaagctttttgaaagacttcaaactagcatgaacaagaccactattagaagagattacaactgataaacaatattgtggaaacaaatacacagtgtgtgattgagagtatagccaaaactatctgcattttaagttttttacttttatatgaccatcaaatatttagcccataataatgtggatccaaccccaccaattctcataaagtacttttacaaaggcctctacaagttaatttttcttcttctaagtttcaccacttaaccaaactataagctaatcacctgtatgactatctctattctcactagataggaggctttttgaaagcaggagtgatgttatgagcctgttgtattgctggcatctagcacaatgtctaacacatagtaggttttaataaatactttataagtgaattaatgaatgaaggtcactaataccagaactacaatgttctatacatacacaaaaaaagggctgaccttatcagtaaagcaccacgaacatattgtgaaacctttctcctttttaggacaaactcattattctctatttatagcatgcacaaggaagctgacaaaatcaggaagaagtaagaaagcatgcatcatgaacattggaatgtgagacatttcctcctgtattaatcatattttcagattctg

SEQ ID NO: 65366 - DNA, 1722 bp, Homo sapiens
ccctatctctatttttcaaaaaaagaaaaaaaatgaatgaggtaggggcttcccaccatccccctgcaaagcttatattctcaaagataaattcaagccttttggccaggcacggtggctcatgcctgcaatcttagcacttcgggaggccaagactagaggatctcttgaggccaggagtttgagaccagcctggccaacatagcaaaacctcatctctactcaaaatacaaaaattagctaggcatggtggcacacacctgtagtcccaactactygagaggctgaggcttgagaatcacctaaacctgggaggtggtggcagtgaactgagattgtgccactgcactccagcttgggtgacagagcaagactgtcttaaaaaaaaaaaaaaaaaaaaaaaaaaaaaaaaaaaaaaaaaagctttttgcttgtccaattgtctaaaaagagatctgttcaaaatgttgcaaataccctttcttccaatttctctactcccatcaaggttccagagatgttacaaccaattttttctcagtagtcaagctcagagtcccacgtgcttctcctcctccagcagcctttgtaaggaggcagctgcctcgagaaatcaccttgcaactaaactgtgggaaaatgtgtaagatcttaacacagtggtagaaactaacatgtatgcagtagccactgtgcacccgacactgttctcggtgctctcatgcagcatctcgcttctcctcacctcatctggaggtgggttcagttatcaggtccatttatcagtcaggcctctggggttcatgagggtcatgcccctcactcaaggtcacacactgggaagcggttggatccaggatccaggcccaggcagtcagattccagagcctgcaccctgaaccagtaccgcaggggctggcacccccgcacattttttgccccatcaacatattatcatgtcactccgccagcatcatgaagtgcactcatgatatgtttgccccatcagcgtgtcacgagggcatttcatgatgcaggcggggttggcaggtgtgcatcgtgtaggctccacatgggacatggcatcccttatgactcttggctgcaaagtgccagaaacccagctccactcacttaatctgaaaagtgggtgtatttgttcgccagggctgctgtaacaaatttcccccagttactggcttcaaacaacacacacgtgtcctcttacagttctggaggtcaggctctgagaggagaatcggtttttttactttttttttttttttttttttttgagacagagtctcgctctgtcgcccaggctggagtgcagtggtgtgatctcagctcactgcagcctcctgcctcccaggttcaagctattctcgtgcctcagcctcccaagtagctgggaccacagatgtgcaccaccatgcccagctaattttttgtatttttagtagaggtggggtttctccatgttggccaggctggtctcgaactcctggcctcaagtgatccacccgcctcagcctcccaaaatgctgagattacaggtgtaagccaccacacctggccctttggttttttgtttgttttagtttttcttccagtggccacttgtgtatgttgactgtggtctcttcttccatcttcaaagcacatgactccagtcaccctctcctttctgtcatcagatcactgtctctcttacagggaccc

SEQ ID NO: 65367 - DNA, 1273 bp, Homo sapiens
ggctctctccaactcaaatagtcatgggttttcctctccacctcctcaattcacccccaccacctccgtgatggtggctattcctgcccaggtgctcaggccgacatggmcagctcctctcccctcctggcacccaccctctgaccgctcagcacctccatccctctgctgtccacatggactgattcctgcactccgcccacctgcctgctcctgcctggctgctctcgaaggatgatcacaccatgggcctccctggtctccctgcctagcctccaccacagtctattctattcaatgattcagattagccatgccctgcaccgagcccaggtctgcagcctcactctgtcagccacagcctttccctggtcaacagggccctgagcctctggtgccttccacctgctggtctctttcctgcttctctcctgtgtccccttgctctggtcacatggcctcttggtcttcctaggacaggccaggagctccccacctcgggatcttacccttagtcctggccgccctgggatgctcctctccgggacatccacccgctgagccctcaccgcctgggcagctgctgcaaggcccccttcttggggggctcctcagatgtccatgagcaatcacagccccccaaccaccaccccctcccttcccagctttgtctttttccagtgcacttcccaccatctgacatagtttgcgtgtcacacatggccttcggttggattcttctggaagctgactctgagagtgggcatgactcagttcacctggagaagtccccaggaagctcgggcaagacggtggggagggaaatgggaaggaaaaaatgccctttctggtgggataagtaggaggtgcccacggtgggctgctggtgctcagctgcactggagacctcatggagacgcttaggagcagcatcagaggactgcactggagaggcggggaagccaggtctgctccccgccagcttccgttcacccagggcagcttcccaggactccactcccaggccacacaggctcctgcagcctgaggaggagccgcaggagagcaggggcagcaagaagccatcgcagggcaaagactctgaggcctgcgggacccaggcggcaccaccagcttctgctttgtgcactgtcttgggctgtcacctgcttgtcctctgtccctctgtgggtcgtgagctccctgaagccaggggtctttgttttgttctttgctgtggccagagactacaatcgttcctggtgcacagtcg

SEQ ID NO: 65368 - DNA, 1273 bp, Homo sapiens
ggctctctccaactcaaatagtcatgggttttcctctccacctcctcaattcacccccaccacctccgtgatggtggctattcctgcccaggtgctcaggccgacatggccagctcctctccyctcctggcacccaccctctgaccgctcagcacctccatccctctgctgtccacatggactgattcctgcactccgcccacctgcctgctcctgcctggctgctctcgaaggatgatcacaccatgggcctccctggtctccctgcctagcctccaccacagtctattctattcaatgattcagattagccatgccctgcaccgagcccaggtctgcagcctcactctgtcagccacagcctttccctggtcaacagggccctgagcctctggtgccttccacctgctggtctctttcctgcttctctcctgtgtccccttgctctggtcacatggcctcttggtcttcctaggacaggccaggagctccccacctcgggatcttacccttagtcctggccgccctgggatgctcctctccgggacatccacccgctgagccctcaccgcctgggcagctgctgcaaggcccccttcttggggggctcctcagatgtccatgagcaatcacagccccccaaccaccaccccctcccttcccagctttgtctttttccagtgcacttcccaccatctgacatagtttgcgtgtcacacatggccttcggttggattcttctggaagctgactctgagagtgggcatgactcagttcacctggagaagtccccaggaagctcgggcaagacggtggggagggaaatgggaaggaaaaaatgccctttctggtgggataagtaggaggtgcccacggtgggctgctggtgctcagctgcactggagacctcatggagacgcttaggagcagcatcagaggactgcactggagaggcggggaagccaggtctgctccccgccagcttccgttcacccagggcagcttcccaggactccactcccaggccacacaggctcctgcagcctgaggaggagccgcaggagagcaggggcagcaagaagccatcgcagggcaaagactctgaggcctgcgggacccaggcggcaccaccagcttctgctttgtgcactgtcttgggctgtcacctgcttgtcctctgtccctctgtgggtcgtgagctccctgaagccaggggtctttgttttgttctttgctgtggccagagactacaatcgttcctggtgcacagtcg

SEQ ID NO: 65369 - DNA, 572 bp, Homo sapiens
tcactctcatttgtatttgcataataccagacttaaaaaatgggtaactatttacagtatgatcttgagctgattgagattaggaatattagatgagctgtgagctcctctctacatttaactgtcctgctcttccttctcagaaaaatctcagctaccatcaagaacaaggtcctgccccaagcacacatgcttctcarcaccctctcaatccctttcaattttttcctcctctgggaagctttctcagatacccaataaccctacaatgcctacaatgctatacacctcctataaataacatggtattgttgaaaatccatctttatatgtgctattatttgcttatctgtcttccctactaaaatgtgattttcatgaggtcagggctatttgcatcatcattgtattcccagggggcaacccagtgcctgacacatagtaaatggaatattggccaaatgaataaactgaagtattggaacttctgtgctttatattcattccaactctaaacagctacctcctaacctgcaatcctcatccaacaactcattgcatcaccattgatc

SEQ ID NO: 65370 - DNA, 1343 bp, Homo sapiens
taaatgggcatttttggcacaattggtgaaatgcgtaatggatgatactaagaatctgtggtatgagaaaggcatgctcattatgtcaaaataattatcagttagagatgcatactgaataattttcaaataacaagtttgatatttgctttaaaatattagataaaaagtatgaggaataataaaaaaaacttggcagcatttgccataatgttgataattattgcagcagagtaaagggtacatggtatacattatactatacctctgtagtttagtgtaggtctaaatatttccataaaaagtttaaatatacataaagtaaaatgccgtagaataatctttcagtcattcatattgtaggaaagtaattattcagttatttaagacactgactataagagattctatgacttgaataaattttcatttcacagtgtgtaacccaacacctaagaccaattcaaatacaaaaacattccactggtcgcttaatgtcctactcttttgtataccacacaaggctattgaatgcttagtgagtctggattttcactgttctctaaggacccatcattgttactcataactgtctggcttaagaaggttggaktcaacacaatagatagttgctgacccaaaaggatttactctcttatcctgagaatgaccaacagccctgtaaaagacagagcacttctttttctttgctagctgaactggatccattcatcctcaatgtcacagaagaaaaacgatgtgatgaaaacctttcttgaatagacataccagagatcaggtaagaaattttggacgtggccaagtagcaaacagtaaagaaagatggcattcaaaggcagaaaacagatgaattggtgatttcaacttcagacttacaaagtctttcagttttgttgctactttcttagacaaactcctctttattactccttcaattgatctgaaacctctacttggttatctgttagtatgctcaaaaccacccccacaaaagcataaaatctaagttatattcttgtgtatgctatgggaacacaacctccaaagaagtgctctgccttcccagttttcaatcaccattaagctcttccctccattgtcagagatgcacctccattttcctatggattacttcagtaagttctgtatcagtctcttgcttccaatattttctctctgcaacacacactatggggtgcttttaggttaggcttcctaaaatacagcagttagcatgccactctcatattcaaaagctttcactggctcaccattgcctattaaataaagcacatttctgttcactcagtatttcagacctc

SEQ ID NO: 65371 - DNA, 845 bp, Homo sapiens
tgcatgctagaaaaataacttgagagttattttatagtaacaatttctgcccttaaagtttgtaaatattttaaatgtatgttactctgatgatcttttgacagcagaaaagacacaatattgttgccaaatcaatgagtcagacaatgaacacagttaaacatacaagacgctattcagaatgatcactgttgctgttgaaaatgatttatgattgtgattaattgcttttaaaattttgatcaaaattgatctgtctaattttctggtactagctgtgtaagtcaaatctcaccctggaattacatgaatcaatttagtctagacttctggaaaaactagggggagaaagatggaaataatgtttgaattgtcggtgactgatggatgttcckatttcacagttttagtaaagaaaaggtcttaccgtagctgtcataggcatcctcacttactccatgaccgtagtcatagtattcaggcacactgcaacaaatttagatagcaatcaatgttactataaccaggaaattcaacccagaaactcatatggaatttgaaggcaaaatgtgtgctgaggtaatattccaggaacttcaaggcataaaacacaatcctaaataaatcttcagtaagaaaaacacaggttattgacaaggagtgctatgattttttttaatgccatctcagtatttctttctctctatccaccaatttgataaatcaaatttcccctaaaacacaagtataacacttcaaaatctgtcaagaagagagttataaaaggcctatttccaagaaaaagtgctctctaagatgacaatctggtcaatcatgtatagctt

SEQ ID NO: 65372 - DNA, 1091 bp, Homo sapiens
agatgagatcttactggaggagggtgagcctttaatccaacaaagacttaaaattcagtatgttcttatgagaagaggagaagaaagacagagacacaagaggaatgccacgtgattgataaaaaccagagactggagtgacacctctaaaaatgtaggaaagccatttccagcagccaatrgaagctaagaagaggcaaggaagtatcctccctgctaacacttttattttagatttctagcctctggaggtaagaaagaataaaggtttgttgtttcaagccatccagttatggtactttgttaaggcaatttgaggaaaataatatacggacaaggccacatgataaattgggaatgtgaatgattagaattgaggaaacactgccttagggtaaagcttaaagttttcagtgtggtttaaaagtatctccatcaagggactgatgatgacttttccagttaaccctcttgccattgttccctttgcactttatgctcagccttactgagcttctctcaggttctgtgttcctctactttgaggagctgacagatggtgttttctctcctttcattactgaccagctgttgtcatctttctgcatcctccttaccctgaagatctcaactaaacatgattttctcttcagaggtcttccccaaagcctatactaggtgaattcttctattttctatagttctcttgtcattatattcattgccttttattgttaatgattagtgaattgtctattttctttgctagacatatttcatgacgtttttggtcatcagtacttctccaatacagaacacagtatctaatgtttaggagacaataaatatgccaaatgaatatttcatgttccatgtaaaacttaggaagggttatacttaccattgcccttatcatgtattatttatctatatatatagtatatatggccaaatcagatgttgaaataatattgtcatactctttactacttatttcttgagggagccctggagtgataaaaagaggactggactaagaatcagacaataggatttctttttttttgttctgctactaattggttctgtgt

SEQ ID NO: 65373 - DNA, 1091 bp, Homo sapiens
agatgagatcttactggaggagggtgagcctttaatccaacaaagacttaaaattcagtatgttcttatgagaagaggagaagaaagacagagacacaagaggaatgccacgtgattgataaaaaccagagactggagtgacacctctaaaaatgtaggaaagccatttccagcagccaatggaagctaagaagaggcaaggaagtatcctccctgctaacacttttattttagatttctagcctctggaggtaagaaagaataaaggtttgttgtttcaagccatccagttatggtactttgttaaggcaatttgaggaaaataatatacggacaaggccacatgataaattgggaatgtgaatgattagaattgaggaaacactgccttagggtaaagcttaaagttttcagtgtggtttaaaagtatctccatcaagggactgatgatgacttttccagttaaccctcttgccattgttccctttgcactttatgctcagccttactgagcttctctcaggttctgtgttcctctactttgaggagctgacagatggtgttttctctcctttcattactgaccagctgttgtcatctttctgcatcctccttaccctgaagatctcaactaaacatgattttctcttcagaggtcttccccaaagcctatactaggtgaattcttctattttctatagttctcttgtcattatattcattgccttttattgttaatgattagtgaattgtctattttctttgctagacatatttcatgacgtttttggtcatcagtacttctccaatacagaayacagtatctaatgtttaggagacaataaatatgccaaatgaatatttcatgttccatgtaaaacttaggaagggttatacttaccattgcccttatcatgtattatttatctatatatatagtatatatggccaaatcagatgttgaaataatattgtcatactctttactacttatttcttgagggagccctggagtgataaaaagaggactggactaagaatcagacaataggatttctttttttttgttctgctactaattggttctgtgt

SEQ ID NO: 65374 - DNA, 683 bp, Homo sapiens
ttaattaaactttagtggtgtgaaacttttaaaaggtgactctcagtctttctcaaattgtgaaattttcttgcaagtgtcagattaaaaaaaactcttaagagatgtgtatctttacaaaataaattgctttaaaataactttcattttgaaaacctctgagattttcagagcatctgggtaggtaattggagagagctgwtatatcatgaaatctgtttcaggctttcaggatcagtaagagcactgttatatgtggaagtataactgagcaccgttatgcagaaacccggttaagtcctacatctatcctattaggcaaatgtgtcaatgaattagaaatgtgcattaagtttgtaaacagagttttcagtattccaggggccattagaaaccgctgactgttgaacactgtgattgaataggttgttgatttctcttttttaaacaagtgtcaagatcatgtactaactcacccagaaatgccattttaaaaataatatcttctaaagtcatggtctgaaatgttctttactggagttttcaaaagtatgattgatattttactaaacgtaatctaacttgtgccttgagtcagaaacagacattttgggaagcatattttttttccaattctatcctttgttttattttgtttgttttgttttttcccccagtgtatt

SEQ ID NO: 65375 - DNA, 683 bp, Homo sapiens
ttaattaaactttagtggtgtgaaacttttaaaaggtgactctcagtctttctcaaattgtgaaattttcttgcaagtgtcagattaaaaaaaactcttaagagatgtgtatctttacaaaataaattgctttaaaataactttcattttgaaaacctctgagattttcagagcatctgggtaggtaattggagagagctgatatatcatgaaatctgtttcaggctttcaggatcagtaagagcactgttatatgtggaagtataactgagcaccgttatgcagaaacccrgttaagtcctacatctatcctattaggcaaatgtgtcaatgaattagaaatgtgcattaagtttgtaaacagagttttcagtattccaggggccattagaaaccgctgactgttgaacactgtgattgaataggttgttgatttctcttttttaaacaagtgtcaagatcatgtactaactcacccagaaatgccattttaaaaataatatcttctaaagtcatggtctgaaatgttctttactggagttttcaaaagtatgattgatattttactaaacgtaatctaacttgtgccttgagtcagaaacagacattttgggaagcatattttttttccaattctatcctttgttttattttgtttgttttgttttttcccccagtgtatt

SEQ ID NO: 65376 - DNA, 683 bp, Homo sapiens
ttaattaaactttagtggtgtgaaacttttaaaaggtgactctcagtctttctcaaattgtgaaattttcttgcaagtgtcagattaaaaaaaactcttaagagatgtgtatctttacaaaataaattgctttaaaataactttcattttgaaaacctctgagattttcagagcatctgggtaggtaattggagagagctgatatatcatgaaatctgtttcaggctttcaggatcagtaagagcactgttatatgtggaagtataactgagcaccgttatgcagaaacccggttaagtcctacatctatcctattaggcaaatgtgtcaatgaattagaaatgtgcattaagtttgtaaacagagttttcagtattccaggggccattagaaaccgytgactgttgaacactgtgattgaataggttgttgatttctcttttttaaacaagtgtcaagatcatgtactaactcacccagaaatgccattttaaaaataatatcttctaaagtcatggtctgaaatgttctttactggagttttcaaaagtatgattgatattttactaaacgtaatctaacttgtgccttgagtcagaaacagacattttgggaagcatattttttttccaattctatcctttgttttattttgtttgttttgttttttcccccagtgtatt

SEQ ID NO: 65377 - DNA, 652 bp, Homo sapiens
caaatcccaccactgtggagcactctaaattcaagttttggaaacaggtacgtatgtgaatcacttgaagaactttttaaaatataaatttcagagccctaccccaagcaactgaatcaggaaattatggctcccaaattttatgatgataaaactgtttttttactggaccctctcatagagataagtgttaggaagaaggcattttggcaatgaaaccaccgcaggtgtaaatctccaaagagtggccagactttgatgccaacgarggaaagaacaagataaaagcttccagtgtggtttgcttggttcagttaattgatttgttttattatgtttatttacttttacatttttggatcatagctattgagtgctcaataaatgtgcttggctgacagtttttgaaataacctttttttgtggtccactttactgcttttaataaatgcaacactttacctgttaaaaataaaaattcaaagccaaggaaaacaattgatttaagccactagaaagtttctcctaccctctactgtccctgtattttcaccatgttcataaacaagaagtaaattctgctttctcaagaagtaacggaataatctccgaaggaacaccatggatagcaattattttaaaaatcctcacc

SEQ ID NO: 65378 - DNA, 557 bp, Homo sapiens
cttgtaggaagcacttaaggcaggtgcacaatcaactttgtgattactactaatataataaagcagcaggttgtttactctgatgtcccgtggaccccttaartatttctggagccaggcctatgtctgcaaaatgatgagttcctgccccagagagctacagcatctttctgtaaaaccataattgattcagactgcacctaactaacctagccagaaagttggaatttcaagatgaccaactagacctttaatagttcagtgcttttatagttcatgtccagggtcacatgtcactgggaaacaaacctccatccttctgtcctgtgaaatgggtactcatcctcaaggtggtagaaaggagaggctgctttccactctgttgatgttgttaagtccttgcttaaagggtaagactgggaggtcccaggaaggcagcctgaacaatttctcttctctctgggtttgccacagacacttcagtgcctgccttcctgacagtgggatacgccgggtgattcaccaggttcagtctgggaggaggcgtggaggatcct

SEQ ID NO: 65379 - DNA, 557 bp, Homo sapiens
cttgtaggaagcacttaaggcaggtgcacaatcaactttgtgattactactaatataataaagcagcaggttgtttactctgatgtcccgtggaccccttaagtatttctggagccaggcctatgtctgcaaaatgatgagttsctgccccagagagctacagcatctttctgtaaaaccataattgattcagactgcacctaactaacctagccagaaagttggaatttcaagatgaccaactagacctttaatagttcagtgcttttatagttcatgtccagggtcacatgtcactgggaaacaaacctccatccttctgtcctgtgaaatgggtactcatcctcaaggtggtagaaaggagaggctgctttccactctgttgatgttgttaagtccttgcttaaagggtaagactgggaggtcccaggaaggcagcctgaacaatttctcttctctctgggtttgccacagacacttcagtgcctgccttcctgacagtgggatacgccgggtgattcaccaggttcagtctgggaggaggcgtggaggatcct

SEQ ID NO: 65380 - DNA, 1018 bp, Homo sapiens
cctgaggttgggagcaacaggatggctgctaaggaagtggtcagagaccagccccggaaagttttagtcccttttaaccagccattgcagatcatagtggcgggagcccctggggggtgtcgagcaggggttagccccctggccagatctgagttgttgttttattttattttatttatttatttgtttattttactttaagttctagggtacatgtgcacaacgtgcaggtttgttacatatgtatacatgtgccatgttggtgtgctgcacccattaactcgtcatttacattaggtatatctcctaatgctatccctccccactctccagatctgagttttaaatagatggttctggccagtgtgtgggctgggtttgaaggggatgagactaaaaggagcaagtctgattagggagtcactgcaggtgcccaggtaagagacgataggacctcaactaggaccagaaatggaggggtagagagagaaggtgagccttggaaggtgtttataatgcagaaaatataattgggttggccccacttcttcaaaagacagcaaatatgtgttgaatacaytagtgcatgcatgaatattaattgagattttattgggcctaggagaactgcagggtaaggttgggcagggtgggcacttcccaaaggcgccagtcatgggggtgagggctgtagggtccgctctgcactctgctcaccaagtgcaatacagaggtttgcagagggcaacatggagacctaagacaaagatatagccccccaggtgctgaccgattcgtagacgtgaactatggctatgactgcatgctaaattgctgattccggctaggtgggcagaagagttctgaataggctgatgccatttctctccatgttctcctgtaagataagagctgggcttcttgaaccaaaaaagttttacttttttcctgggggtagaattaaccttcaacctgttgactcaagtgtgtattaaccaataatctaaattaaaaactt

SEQ ID NO: 65381 - DNA, 1018 bp, Homo sapiens
cctgaggttgggagcaacaggatggctgctaaggaagtggtcagagaccagccccggaaagttttagtcccttttaaccagccattgcagatcatagtggcgggagcccctggggggtgtcgagcaggggttagccccctggccagatctgagttgttgttttattttattttatttatttatttgtttattttactttaagttctagggtacatgtgcacaacgtgcaggtttgttacatatgtatacatgtgccatgttggtgtgctgcacccattaactcgtcatttacattaggtatatctcctaatgctatccctccccactctccagatctgagttttaaatagatggttctggccagtgtgtgggctgggtttgaaggggatgagactaaaaggagcaagtctgattagggagtcactgcaggtgcccaggtaagagacgataggacctcaactaggaccagaaatggaggggtagagagagaaggtgagccttggaaggtgtttataatgcagaaaatataattgggttggccccacttcttcaaaagacagcaaatatgtgttgaatacactagtgcatgcatgaatattaattgagattttattgggcctaggagaactgcagggtaaggttgggcagggtgggcacttcccaaaggcgccagtcatgggggtgagggctgtagggtccgctctgcrctctgctcaccaagtgcaatacagaggtttgcagagggcaacatggagacctaagacaaagatatagccccccaggtgctgaccgattcgtagacgtgaactatggctatgactgcatgctaaattgctgattccggctaggtgggcagaagagttctgaataggctgatgccatttctctccatgttctcctgtaagataagagctgggcttcttgaaccaaaaaagttttacttttttcctgggggtagaattaaccttcaacctgttgactcaagtgtgtattaaccaataatctaaattaaaaactt

SEQ ID NO: 65382 - DNA, 748 bp, Homo sapiens
ctaggtgacagggcaagtgagactctgtctcaaaataacaacaaacaaaaaactctactcaatacagctatcaccacagtgacttctgatgatcgtgtgggcagagcttttgggtctggaaaggatgcttatgtttcagtgaagcctcccagcaaggcagctggaattatgattccattttaaagatgaggaaactgagtgagcagtctgtccaaagttgtgcagcccataaaccgcagagccaacgctcagtctctggtctttgtctctctacctcatggtttgtgggactacactaaattcttaatggactggctgggtggattcccagaagggaagctccctgaagggacgagacctgggtgcatcttagagggcaasactggcctaggcaggagacaggatggagatggcccagctagggctggcaggaggatggaggtcggcactgctgactagaaagcaggcagggagcagagtgagggaagccactgcgggtgtcctgaagaccaagctctgcgatggcaactgtatcacccaggatgtggggagccactggaggcctctgatcacaacgggatatctctgttaatgtgaaccctctgaactgggggatggaaacggaagcaagataatctattagtcgggaactgctataaaatgcgcatctgataaatatgttccaaatgtgagcataaagaggtaaatgagggcacaagtatgagaagaataatccaggaagaatcag

SEQ ID NO: 65383 - DNA, 748 bp, Homo sapiens
ctaggtgacagggcaagtgagactctgtctcaaaataacaacaaacaaaaaactctactcaatacagctatcaccacagtgacttctgatgatcgtgtgggcagagcttttgggtctggaaaggatgcttatgtttcagtgaagcctcccagcaaggcagctggaattatgattccattttaaagatgaggaaactgagtgagcagtctgtccaaagttgtgcagcccataaaccgcagagccaacgctcagtctctggtctttgtctctctacctcatggtttgtgggactacactaaattcttaatggactggctgggtggattcccagaagggaagctccctgaagggacgagacctgggtgcatcttagagggcaacactggcctaggcaggagacaggatggagatggcccagctagggctggcaggaggatggaggtcggcactgctgactagaaagcaggcagggagcagagtgagggaagccactgygggtgtcctgaagaccaagctctgcgatggcaactgtatcacccaggatgtggggagccactggaggcctctgatcacaacgggatatctctgttaatgtgaaccctctgaactgggggatggaaacggaagcaagataatctattagtcgggaactgctataaaatgcgcatctgataaatatgttccaaatgtgagcataaagaggtaaatgagggcacaagtatgagaagaataatccaggaagaatcag

SEQ ID NO: 65384 - DNA, 748 bp, Homo sapiens
ctaggtgacagggcaagtgagactctgtctcaaaataacaacaaacaaaaaactctactcaatacagctatcaccacagtgacttctgatgatcgtgtgggcagagcttttgggtctggaaaggatgcttatgtttcagtgaagcctcccagcaaggcagctggaattatgattccattttaaagatgaggaaactgagtgagcagtctgtccaaagttgtgcagcccataaaccgcagagccaacgctcagtctctggtctttgtctctctacctcatggtttgtgggactacactaaattcttaatggactggctgggtggattcccagaagggaagctccctgaagggacgagacctgggtgcatcttagagggcaacactggcctaggcaggagacaggatggagatggcccagctagggctggcaggaggatggaggtcggcactgctgactagaaagcaggcagggagcagagtgagggaagccactgcgggtgtcctgaagaccaagctctgcgatggcaactgtatcacccaggatgtggggagccactggaggcctctgatcacaacgggatatctctgttaatgtgaaccctctgaactgggggatggaaacggaagcaagataatctattagtcgggaactgctataaaatgcgcatctgataaatatgttccaaatgtgagcataaagaggtaaatgagggcacaagtrtgagaagaataatccaggaagaatcag

SEQ ID NO: 65385 - DNA, 549 bp, Homo sapiens
caaaagtgtgaggacgtctgctggtagaggctacatgggcaccatttcatgccaaagcttcaacctaggaggggccagggcgagcccaagtgcaagacaagggtggcagagaagcaagcagccaccttccccttcccactgtcagccagaggaggcccagacaggggaggagaggagctcaartctgagtgacatttggagtttttggttttgatatacaactggatatgcatttttaattttaggggctattcttatgattgaaagtgaccagaggaattaaaaaatatatgtgttagagggactagatattaactgagaatgagagggaactattataaacttcatccaagggcaaggaatgaacgagccccacagtgcaggcttgaccaagcaatgggcaaggaacactgtctcctgaccacaccccgttcccactgtgcaatacactggctttgccaccagcattccaacagagccacagcatggacacaccaccttcgggagagttcaacattacagggctagagttccgtggtacgtatttgt

SEQ ID NO: 65386 - DNA, 549 bp, Homo sapiens
caaaagtgtgaggacgtctgctggtagaggctacatgggcaccatttcatgccaaagcttcaacctaggaggggccagggcgagcccaagtgcaagacaagggtggcagagaagcaagcagccaccttccccttcccactgtcagccagaggaggcccagacaggggaggagaggagctcaagtctgagtgacatttggagtttttggttttgatatacaactggatatgcatttttaattttaggggctattcttatgattgaaagtgaccagaggaattaaaaaatatatgtgttagagggactagatattaactgagaatgagagggaactattataaacttcatccaagggcaaggaatgaacgagccccacagtgcaggcttgaccaagcaatgggcaargaacactgtctcctgaccacaccccgttcccactgtgcaatacactggctttgccaccagcattccaacagagccacagcatggacacaccaccttcgggagagttcaacattacagggctagagttccgtggtacgtatttgt

SEQ ID NO: 65387 - DNA, 735 bp, Homo sapiens
cccaccaaatagtcatatgatatgaacttagtggctgtggaagaaaagttctgatgaaaaggagtatattttatattcttatgaagaactgaaataaagtcgatgcaaaaggaaaaaaaggctttgaaaaataaaaaaaaagcagtttgagtttcactgaatattttgtctcataatgatacagaattggaattacttttcatacgcaaacaaaatcattatgattcaaggaaatctaaaacaagcatggcttaaaatcttaagataattggactgtgaattaaaaaataattcattgaggtttataaatgttttaacatctgttttatgatctgtcaaagtaaattatcctaaacttgacactgtactgcctaatgaagcataccagttattttcactgtttcggaatcctaaaatcacagcataggaatgaaaccttagaagtgaccctagtccaacaacttgcctgatgggaggaagatccccgaaagatrttttcactttttaaaaggctctaactgatacagcatttttctttacagaatcttttacaggccagttaatactctaaattgcggtgtaaacaggaagaaaagagaaggaattggttacttattctgtgcttactatatgccacatattgtggtaggtgctttacatattttccataattcactccttacaccatgccagtgaactactaagagcctcattttctagacgaaggaaacaggc

SEQ ID NO: 65388 - DNA, 577 bp, Homo sapiens
ctccagtgataagcacttctgcataggttatatcctgtaatcctgaaatagacctataaaagtatcatcaccatcttttagagaaaaggaagcagtttcagagcaatgtcatcaccagcccaaatttctagaggtggaacttgaacataaactcacattctgctgtttccacactaaagcagagaaaagtgacccagagtagataaattatttatatttaaatacaagtcggtaattataattccttctttcattaccatgtggcaggctctgtacaatacgttatgcctcctggaatgtcagagttgcagcaggaagctcagactacgtacctggatagagttgtcatccaacttttctgtcccaacttcagtaacacttaactgaaggcgrtaaagctttggcttatctctagagtcagaaccatctgtgagaagagaaggaagacagctctatttgcaaagtctaatattactgtcatgttatttccaacaaacaaaaggttatctcaggcactacagttctcatttctcaggatttcttttcaaaaaattctccaaacttatgtaacacaatt

SEQ ID NO: 65389 - DNA, 750 bp, Homo sapiens
tgcatattaggaagggagcacagccccagaacaagaaaattatttaacaattttttatagaacgctcactttgctattaaccaaagaaatgtaaaatgctactggagcacacatggaacaaataaattatatagtgagaaggagatgtcagggaagagaatataataacattaatgttaataaaattagacaaaaagaaaaatggaaaaagataactttatcacaaaaatagaatatctaaagaattaaatgtacattctaaatataaaaaataaaatatctgaaattaagaattcatcagacagatggtttaacagccaactagaggtcatagaggaaaagattaatgacctcaaaggcaggtcattagaaattacctacatttttttaacttttattttaggtttggagttacatgcaaaggttcattatataggtaaacttgtgtcatggggggtttgttgtatggattatttcatcacccaggtattaagcctagtacccaatagttattttttctgcttctctccctcctcccgccctccactgtcaagtagaccccagtgtctgttgttcccttctttgtgttcatgagttcgtatcatttagttcccacttataagcraggacatgtggtatttggttttctgttcctgtgctagtttgctaaggaaaatagcctccagctccatccatgttcccacaaaagacatgatctcattctttttttatggctgcatagtattctat

SEQ ID NO: 65390 - DNA, 1960 bp, Homo sapiens
tgagttgtagaattcccaccttctctcagaatttctgcaataccatatgtaaccgacgcagagggagtgaggcaagtgtcaagctgcttattaaaatataacacagtttaatttctttcttatttttagtttgaagtaagtataaatagaaggtctaatatcttttttagcttattttccactttggaggacactgctctagaaaaaaatcagaaaacactcctcaccagttaaagaggatgatgcttctggaaaggacacagtccccaataatgaaacaacccccacaagttgtctccgtgagtgccttctcttgagtgatgatgcaaaaggagctgaaatgagttgcaacttgcaggaagtagcctgacatacaacattgtttaaattaaagtgaatgcaaaagagaagcttgttacagcttaaatagatagagaaggagaactttttctgtttccagttgcttgtctgctttggttggagaccatatgctttgaagaatcttacaaatattcctgtccatatacgtattagagtatctcaggcttttctctctggaagcctttgtgccattgtctgaaggatctataaaagcaataagccatcttgtaaatggagctggaatatgggatgctcttgttcctttcttgccagcggccactggcatttattccggagttgatgcatcagtgaccagggttattgctcccagaatccatgttaaaccacacaagcaatggaaattttctcagctgtgctgtgaactcagtctaggcttatttcactcaagtatgaatagcaataaagatattaacagcaatgctaatattaattctaatagctaagagtacccagcgcctacttrccaggtgctgtgctaggaagccacgtggatttaattgttactcctcacagcaaccttatgagaaatatactgtcacttattggacatcagagcaggaagcttctccaaggtttggaggaattaaacaatttgaacaatagagtctgagcccaaggaggattcccatagtctgactccaggtttgcaaggttaattaatgactttctgtctctctaatatatatctctatatgttatatagatatatataatagatatttacattatatataatatatataaaacttatatataagttatgacaaataaattttaaccactatggaaaacttgcaactcaagtttctatacatatgatatggtttggctgtgtccccacccaaatctcatcttgaattgtagctcccataatccccgtgtgtagtgggagggacccagtggggagtaattgaatcatgggggtgggtttttcccatgctgttctagtgatattgaataagcctcatgagatctcatggttttataaagggcagttcctctgcacaggctgtcttgcctgccaccatgtaagatgtgactttgtgcctccttcgccttttgccatgattgcgaggcctccccaaccacgtgagacggagtccattaaacctctttttctttataaattacccagtcttgggtatgtccttatagcagcatgggaatggactaatacaatatataagtatatattatatataatatatacatataaaatataaatttttatatattatataaactatatgaatattatttatatactgtaatataaatgtcatattatatgtaatatgtaattataattacatatcactataatatgttatatatataatttattagaaggtcattttggccagctccacactgctttttgaccatcttacatcaatgcctcatgtcaccattgccaggtgttggtgacagaattctaagatgactttcactgaccctcacccttgtgtaatccccttcccttaagtgtgggaggaacctgtgactatgacaagataccatgcccatggaaaaagggattttatcatcgtaatcatga

SEQ ID NO: 65391 - DNA, 1960 bp, Homo sapiens
tgagttgtagaattcccaccttctctcagaatttctgcaataccatatgtaaccgacgcagagggagtgaggcaagtgtcaagctgcttattaaaatataacacagtttaatttctttcttatttttagtttgaagtaagtataaatagaaggtctaatatcttttttagcttattttccactttggaggacactgctctagaaaaaaatcagaaaacactcctcaccagttaaagaggatgatgcttctggaaaggacacagtccccaataatgaaacaacccccacaagttgtctccgtgagtgccttctcttgagtgatgatgcaaaaggagctgaaatgagttgcaacttgcaggaagtagcctgacatacaacattgtttaaattaaagtgaatgcaaaagagaagcttgttacagcttaaatagatagagaaggagaactttttctgtttccagttgcttgtctgctttggttggagaccatatgctttgaagaatcttacaaatattcctgtccatatacgtattagagtatctcaggcttttctctctggaagcctttgtgccattgtctgaaggatctataaaagcaataagccatcttgtaaatggagctggaatatgggatgctcttgttcctttcttgccagcggccactggcatttattccggagttgatgcatcagtgaccagggttattgctcccagaatccatgttaaaccacacaagcaatggaaattttctcagctgtgctgtgaactcagtctaggcttatttcactcaagtatgaatagcaataaagatattaacagcaatgctaatattaattctaatagctaagagtacccagcgcctacttgccaggtgctgtgctaggaagccacgtggatttaattgttactcctcacagcaaccttatgagaaatatactgtcacttattggacatcagagcaggaagcttctccaaggtttggaggaattaaacaayttgaacaatagagtctgagcccaaggaggattcccatagtctgactccaggtttgcaaggttaattaatgactttctgtctctctaatatatatctctatatgttatatagatatatataatagatatttacattatatataatatatataaaacttatatataagttatgacaaataaattttaaccactatggaaaacttgcaactcaagtttctatacatatgatatggtttggctgtgtccccacccaaatctcatcttgaattgtagctcccataatccccgtgtgtagtgggagggacccagtggggagtaattgaatcatgggggtgggtttttcccatgctgttctagtgatattgaataagcctcatgagatctcatggttttataaagggcagttcctctgcacaggctgtcttgcctgccaccatgtaagatgtgactttgtgcctccttcgccttttgccatgattgcgaggcctccccaaccacgtgagacggagtccattaaacctctttttctttataaattacccagtcttgggtatgtccttatagcagcatgggaatggactaatacaatatataagtatatattatatataatatatacatataaaatataaatttttatatattatataaactatatgaatattatttatatactgtaatataaatgtcatattatatgtaatatgtaattataattacatatcactataatatgttatatatataatttattagaaggtcattttggccagctccacactgctttttgaccatcttacatcaatgcctcatgtcaccattgccaggtgttggtgacagaattctaagatgactttcactgaccctcacccttgtgtaatccccttcccttaagtgtgggaggaacctgtgactatgacaagataccatgcccatggaaaaagggattttatcatcgtaatcatga

SEQ ID NO: 65392 - DNA, 633 bp, Homo sapiens
gttgaggtgccccaccctcctggcacacggatgtggttgtgaactggaaygctctctgaacctggtcattttgagtttgtaatgcaggtctcgttatgtagacatgattgattaaatcgttggccattgatgattgactcaatctctagcccctttcccctccctggagggggaggttgggagctaaaagttccatgcttttaatcaaggcttggtctttctggcaactattccccatcctgaagctatctagggacccaccaagagtcacctcatttgagcaaaagatgctcctgtcacccttattatgcaggaaattacaaggaacttaagaaatatgtgtcaggagccaggacaaagaccaactgcctttctatggtaccccagtagtgcagagagtggaaggcaagctcacagccagctccctcaagtccatgttgacatttgggatgctaggtgcagaaggaaagagagcagttgcagtctatcggagacctgagaatgataattcttcaagtggataaggaaggaatagaatatggactgtattccattaagaatcttgacttttactttttcaagacaccattctttcgcttcttctagccaaagatatcacatagcaaaactgtg

SEQ ID NO: 65393 - DNA, 633 bp, Homo sapiens
gttgaggtgccccaccctcctggcacacggatgtggttgtgaactggaacgctytctgaacctggtcattttgagtttgtaatgcaggtctcgttatgtagacatgattgattaaatcgttggccattgatgattgactcaatctctagcccctttcccctccctggagggggaggttgggagctaaaagttccatgcttttaatcaaggcttggtctttctggcaactattccccatcctgaagctatctagggacccaccaagagtcacctcatttgagcaaaagatgctcctgtcacccttattatgcaggaaattacaaggaacttaagaaatatgtgtcaggagccaggacaaagaccaactgcctttctatggtaccccagtagtgcagagagtggaaggcaagctcacagccagctccctcaagtccatgttgacatttgggatgctaggtgcagaaggaaagagagcagttgcagtctatcggagacctgagaatgataattcttcaagtggataaggaaggaatagaatatggactgtattccattaagaatcttgacttttactttttcaagacaccattctttcgcttcttctagccaaagatatcacatagcaaaactgtg

SEQ ID NO: 65394 - DNA, 633 bp, Homo sapiens
gttgaggtgccccaccctcctggcacacggatgtggttgtgaactggaacgctctctgaacctggtcattttgagtttgtaatgcaggtctcgttatgtagacatgattgattaaatcgttggccattgatgattgactcaatctctagcccctttcccctccctggagggggaggttgggagctaaaagttccatgcttttaatcaaggcttggtctttctggcaactattccccatcctgaagctatctagggacccaccaagagtcacctcatttgagcaaaagatgctcctgtcacccttattatgcaggaaattacaaggaacttaagaaatatgtgtcaggagccaggacaaagaccaactrcctttctatggtaccccagtagtgcagagagtggaaggcaagctcacagccagctccctcaagtccatgttgacatttgggatgctaggtgcagaaggaaagagagcagttgcagtctatcggagacctgagaatgataattcttcaagtggataaggaaggaatagaatatggactgtattccattaagaatcttgacttttactttttcaagacaccattctttcgcttcttctagccaaagatatcacatagcaaaactgtg

SEQ ID NO: 65395 - DNA, 1480 bp, Homo sapiens
acgggctaagctgggactactcgaagtcatagtgtcagagacttgaagctcttggggacttcctttattttatacctgggagactgaggcccaaggaggggaggtgagcacctgataagacacagtcgacaggagattgggacatggcacctgcagtgggttgaatggtggctctccaaaggttgtgtccacatctgaactcctgaaatctgtgaatgtgaccttatgtggaaagagtatcatgacttcagacttctagcctccagaattgtgcaagaatatatttctgctgttttaaaccaagtttctggtcacttatcaacggcagccccaggaaactagtacacacccaaaacaaaagttcagatagtcatggaattcaggtggtctaatggattcaggcattctaatgggattctggtgttctaatagaggcaggcactctaattgaattcaggtgttctaatggttcagttattctaatggaattcaggtgttctaatggagtcaggcattctcatggaattcaggtgttctaatggagtcaggcattctcatggaattcaggtgttctaatggagtcaggtattctaatcgttcagatattctgatggattcaggcattctaatggaattcaggcattctaatggttcagttattctaatggaattcaggtgttctaatggagtcaggcattctaatggaattcaggtattctaatggattcaggtggtctaatagaattcagatattctaatggctcaggtatggaattcaggtattctaatggttcaggtatggaattcaggtagtctaataggattcaggtgatctaatggagtcaggcattttaatggatccaggtatttcaatagaatgcaggtattctaatagattcaggtattctaatggattcaggtggtctaatagaattcagtattctaatggattcaggtatggaattcaggtagtctaatgggattcaggtgatctaatggattcaggcattttaatggattcaggtatttcaatagaattcaggtattctaatggattcaggtattcyaatggattcaggtggtctaatagaattcaggtactctaatggattcaggaaaatagaattcaggtatcataatgttggactcctgtcatgggccaggtgctgtactaaggattaacactaaggatatttctcatgatgacaccaacaaggcccagcaggtacagctgttatcctgacagtacacaagtgttaatttgctgaaggccaaaagctagtgctacacagccaggactggaagcccgcacatcctatccaccccttcctttccaggtctttctgacaggctgcaggtggggcaggtctctttcaggagaataagggcttatgattctaggttcccaccacgtgggcaagtattgctaaacctgacattagcaacaaactccaagactcatgatcaaaatttgaggagt

SEQ ID NO: 65396 - DNA, 1480 bp, Homo sapiens
acgggctaagctgggactactcgaagtcatagtgtcagagacttgaagctcttggggacttcctttattttatacctgggagactgaggcccaaggaggggaggtgagcacctgataagacacagtcgacaggagattgggacatggcacctgcagtgggttgaatggtggctctccaaaggttgtgtccacatctgaactcctgaaatctgtgaatgtgaccttatgtggaaagagtatcatgacttcagacttctagcctccagaattgtgcaagaatatatttctgctgttttaaaccaagtttctggtcacttatcaacggcagccccaggaaactagtacacacccaaaacaaaagttcagatagtcatggaattcaggtggtctaatggattcaggcattctaatgggattctggtgttctaatagaggcaggcactctaattgaattcaggtgttctaatggttcagttattctaatggaattcaggtgttctaatggagtcaggcattctcatggaattcaggtgttctaatggagtcaggcattctcatggaattcaggtgttctaatggagtcaggtattctaatcgttcagatattctgatggattcaggcattctaatggaattcaggcattctaatggttcagttattctaatggaattcaggtgttctaatggagtcaggcattctaatggaattcaggtattctaatggattcaggtggtctaatagaattcagatattctaatggctcaggtatggaattcaggtattctaatggttcaggtatggaattcaggtagtctaataggattcaggtgatctaatggagtcaggcattttaatggatccaggtatttcaatagaatgcaggtattctaatagattcaggtattctaatggattcaggtggtctaatagaattcagtattctaatggattcaggtatggaattcaggtagtctaatgggattcaggtgatctaatggattcaggcattttaatggattcaggtatttcaatagaattcaggtattctaatggattcaggtattctaatggattcaggtggtctaatagaattcaggtactctaatggattcaggaaaatagaattcaggtatcataatgttggactcctgtcatgggccaggtgctgtactaaggattaacactaaggatatttctcatgatgacaccaacaaggcccascaggtacagctgttatcctgacagtacacaagtgttaatttgctgaaggccaaaagctagtgctacacagccaggactggaagcccgcacatcctatccaccccttcctttccaggtctttctgacaggctgcaggtggggcaggtctctttcaggagaataagggcttatgattctaggttcccaccacgtgggcaagtattgctaaacctgacattagcaacaaactccaagactcatgatcaaaatttgaggagt

SEQ ID NO: 65397 - DNA, 1480 bp, Homo sapiens
acgggctaagctgggactactcgaagtcatagtgtcagagacttgaagctcttggggacttcctttattttatacctgggagactgaggcccaaggaggggaggtgagcacctgataagacacagtcgacaggagattgggacatggcacctgcagtgggttgaatggtggctctccaaaggttgtgtccacatctgaactcctgaaatctgtgaatgtgaccttatgtggaaagagtatcatgacttcagacttctagcctccagaattgtgcaagaatatatttctgctgttttaaaccaagtttctggtcacttatcaacggcagccccaggaaactagtacacacccaaaacaaaagttcagatagtcatggaattcaggtggtctaatggattcaggcattctaatgggattctggtgttctaatagaggcaggcactctaattgaattcaggtgttctaatggttcagttattctaatggaattcaggtgttctaatggagtcaggcattctcatggaattcaggtgttctaatggagtcaggcattctcatggaattcaggtgttctaatggagtcaggtattctaatcgttcagatattctgatggattcaggcattctaatggaattcaggcattctaatggttcagttattctaatggaattcaggtgttctaatggagtcaggcattctaatggaattcaggtattctaatggattcaggtggtctaatagaattcagatattctaatggctcaggtatggaattcaggtattctaatggttcaggtatggaattcaggtagtctaataggattcaggtgatctaatggagtcaggcattttaatggatccaggtatttcaatagaatgcaggtattctaatagattcaggtattctaatggattcaggtggtctaatagaattcagtattctaatggattcaggtatggaattcaggtagtctaatgggattcaggtgatctaatggattcaggcattttaatggattcaggtatttcaatagaattcaggtattctaatggattcaggtattctaatggattcaggtggtctaatagaattcaggtactctaatggattcaggaaaatagaattcaggtatcataatgttggactcctgtcatgggccaggtgctgtactaaggattaacactaaggatatttctcatgatgacaccaacaaggcccagcaggtacagctgttatcctgacagtacacaagtgttaatttgctgaaggccaaaagctagtgctacacagccaggactggaagcccgcacatcctatccaccccttcytttccaggtctttctgacaggctgcaggtggggcaggtctctttcaggagaataagggcttatgattctaggttcccaccacgtgggcaagtattgctaaacctgacattagcaacaaactccaagactcatgatcaaaatttgaggagt

SEQ ID NO: 65398 - DNA, 612 bp, Homo sapiens
tgggcgagagggatcatgcctgtaatctcagcactttgggaggccgaggcaggtggattgcttaagcccaggagtttgaggccagcctgggcaacatagtgagaccccttctcttataattttaaaaactatattaaaaaaggaagtactttaacatcttycttgtttagctcacaaaaaaagtcctataaggagatgggaagtgttatcattgatattttactggaaaaaccccactgaggttcaaattaagtgtgatttaccaaaagtcttattctaaatgggtgatggtaggaggtattgtgtgaattccagccctgagagtgctcaagagcatcaaatccctcactaacagtcagccgaacatctagctgttctcaaggcgttcaaactttaaatctcaccaaagcagattccctgcagagaaaacatcacacagaagtaaggttttcttaacctatcaccgcgtttctcccagccacagaggcagatacgccctacgcatctgacaggtcagactactcacagctttcatttttattcctgccatgccctgacttagagacgcagtttccccatctggaaatagaagggatgatgggatgatcttaa

SEQ ID NO: 65399 - DNA, 612 bp, Homo sapiens
tgggcgagagggatcatgcctgtaatctcagcactttgggaggccgaggcaggtggattgcttaagcccaggagtttgaggccagcctgggcaacatagtgagaccccttctcttataattttaaaaactatattaaaaaaggaagtactttaacatcttccttgtttagctcacaaaaaaagtcctataaggagatgggaagtgttatcattgatattttactggaaaaaccccactgaggttcaaattaagtgtgatttaccaaaagtcttattctaaatgggtgatggtaggaggtaytgtgtgaattccagccctgagagtgctcaagagcatcaaatccctcactaacagtcagccgaacatctagctgttctcaaggcgttcaaactttaaatctcaccaaagcagattccctgcagagaaaacatcacacagaagtaaggttttcttaacctatcaccgcgtttctcccagccacagaggcagatacgccctacgcatctgacaggtcagactactcacagctttcatttttattcctgccatgccctgacttagagacgcagtttccccatctggaaatagaagggatgatgggatgatcttaa

SEQ ID NO: 65400 - DNA, 612 bp, Homo sapiens
tgggcgagagggatcatgcctgtaatctcagcactttgggaggccgaggcaggtggattgcttaagcccaggagtttgaggccagcctgggcaacatagtgagaccccttctcttataattttaaaaactatattaaaaaaggaagtactttaacatcttccttgtttagctcacaaaaaaagtcctataaggagatgggaagtgttatcattgatattttactggaaaaaccccactgaggttcaaattaagtgtgatttaccaaaagtcttattctaaatgggtgatggtaggaggtattgtgtgaattccagcccygagagtgctcaagagcatcaaatccctcactaacagtcagccgaacatctagctgttctcaaggcgttcaaactttaaatctcaccaaagcagattccctgcagagaaaacatcacacagaagtaaggttttcttaacctatcaccgcgtttctcccagccacagaggcagatacgccctacgcatctgacaggtcagactactcacagctttcatttttattcctgccatgccctgacttagagacgcagtttccccatctggaaatagaagggatgatgggatgatcttaa

SEQ ID NO: 65401 - DNA, 2138 bp, Homo sapiens
cactgactactttaagggaagtgagatgatcaagtttgcttttgtaaatatttgtctaagttattaaagcagcccatattagtgataaccaatgaaaatgacaccaaagagcctcccaagaaatgacttctccagatctcattcctcgggggtaactgctgttttcagtttgggatgaatcatttcagaattaaaacaataacaacacaaccagcaccaatccaattccatatacagggaagcattttttaaagaataaatatagatatccrtgcatacatgcataacattatactatatataccatcttgtaacttgcttttgtctataaacatatcaagaatcgggaatatttttctgtaatagatactatttgtaaatagatactatctgcttttttaagcttgcatcttattcaacttagcgaatgcaccataatatatatttttttcttttttcttttgagacagggtctcactgtcacccaggcaggagtgcagtggagcaatcaggtgtcactgcagctttgacctcccaggttcgagtgatcttcaacctgcccagtagctgggaccacaggtgcatgccatcatgcctggctaatttttgtattttttgatagagatggggtctccctatgttgcccagcctggccttgaactcccgggttcaagcaatcctcccaccttggcctcccaaagtgctgggattataggcatgagccaccatgaccaaccacattttcttttaaaatgaacgtcttattttggaataattttagatttacagaaatgttgtgaatatagcacagagttcccctaatgttgccataaccatgggacatttgtcaaaactaaacatgcacgttggtatatcattattaacgaaatcttttgcttgcgtttcaccagttttctcactaaggccctttttctgttccaggacctagtccaggcattgagtttctccctgcagccctgatttagcaattcccacatggtggacacttggtgttttgcacttttgctgtgccatgaggctgcagtccgcacctcgtggcctctctccctgctcacctgcacacatccttccctcccacaggtgcatccttccctcccacagatgggccagagtggagggcagtgcgaggttatgcaggcacaggaggctgctcccagaggagggaggcgtggcagttgtctaccttacctccaccttgtttctgtgatttgcactttagcaagctcactctggctcctggggctgagacttggagggagaaggctggtctagaggcttcagtggagggacagaggcaaggggacagacattagagagctttagacaagactcctgtctggttgggtgtggagttgagtgaggggaatgatgaaggacttcagctttgttatttaggcaaaggaagtcatggggcccttcagggaggcagcaggaacaggggaggaggttcatcaagaggctgagggatccagttgtggctccgatgtttgggtgcccttgggatacccgggaggcaggagtcatagatttggagcgtcccgagtggccagacgagagccgaagccatggatggggatgtgacgcccttccttctagattggatctaccgaattaaagacacacacaagctcaagcacacgtgcacacacaaagcttgttttttaaaatccagcagaaattgtgcggacacacacagctggagggtgatttagctacagaacacagagacctggaaaacccagcaggaggagctgagcctgccgtggatgccctggtggaagagctgtgaagaagcgttacatccaggctagtggcaccagcaggtagctgaaggggatgtgtgatgcaggtctgtggccgacacccggccatcctgctctttctgctgcgctgagctagacaacagtctgtcccactccaggcacgttgcctttccccggtgccccttacatggatctctgggccgcctgggtctagcctgtccccaacttgccatcacccctcactcctccacctgccattccgcacaggaggaaactgagccactgccccgcttctgagaactcctcagctatccttaactctcccacagcctcccctctgaggatgagtgtctt

SEQ ID NO: 65402 - DNA, 706 bp, Homo sapiens
cacactcatctggtattttaacagtgtttcactttggcatggtctgttcttatgtgactaaagaactcctgagtcctctatttgtttgtgctgttttccataaaaggaaatgggggtgagaaatagtgaaatagctccatccagatagttgaagcaatatagagttgcacaaaattaaactcaccttaagataaatggacattgatgttttggtgctctaaaattgctccaaaacattctttgtaagttatgcatactgttaagggtatttattagctgtggrccttgaacaagtgatttaaccatcctgtgcttctggtttttttgttcgtttgttttccctctttcagcagaatcatgtttctttatctgtaaattggagtaatgatagtaccttcttcagaaggatgtaataaggactaaatgactaaagtgcttggaacagtgcagagcagtacatgaagtaaggacgtgtgtactagctattgttgttactgatgtagaaaaaaaaacaggttcttgtcacatgaccaggataatttaggcacagggacacactgtaaggttagtagggcagggtttatcgggtgaaaaggaaaaaaaaaagggaaacaggaactccagcaaaccgaaagagaggccggctagcaggttttcctcctcaaagattgaatcccaggtcaccacacaggaacaggagatgcca

SEQ ID NO: 65403 - DNA, 710 bp, Homo sapiens
cacacacacaaaattagctgggcaaggtggtgcacacctgtagccccagctacgcgggaggctgagacaggagaattgcttraacccaggaggtggaggttgcagtgagccaagatcatgccattgcactccagtctgggtgacacagtgggactccatctcaaataaataaataaataaaataaaataaaaaataaaaagaactgggatgaaatatttttggccttatgtattataagctcagtgatcttgcattagctatctttgtatatagctttttgttgactatattgtttgtattatacaagttattttcttgatatttaagaatagcagttgattgatgaagatgtggtagcatttactgagaaaacaatttgagttattttaccctttacacaaccatcgtaaaattttcattttcatctactctagcgaatgtgagcctgttaaagaattttaaagttttcagtctacttggacatacaagttattgaatattcatatacaaaattattaccttgagtgctgcatgttctgtatgagattttatatcatgtgttaagtattaaaagggtttaagtgctctagactttaaactactttatttcttttgtttcatatcttaaatcggcattataaattctacatttttatcattaaacttttatattatagaacatatacatttcagcttaaggttttatgca

SEQ ID NO: 65404 - DNA, 862 bp, Homo sapiens
ttctcaaaggtgttgcaagtgatgagtgctctgtcatcactgaacttcaggcctattcctacactggttcctctggtgttttcatctctttctctctgtgacttatgcctatatctgtcccagaytgaaaatccctaaagagcaggtatcctattggtccctggcttttttgatgttgattacaatgatgaagtgggtgatgattatggctttgcttatgtgccaaagcatgtttaagaatgtctcgataccagtttgagaaatagctttatttgtgatactgcaatgattaatttaacaaagataaacatgtaagttgttgcaaaatgatacggttttcaacagaaattaaggccattggggcagagataaattgataaaagtttattggaagccaaatgtgagaatttatccagtaagatacaccaacaaagttgggcatgttccaacatctgttacaagttggaatgcttttataagactgtttaggagaaggaagggggactcctcatatcggagttatccttttccattggagggtacaatacagaggttacaatcattgcctatggatgacagcgtacaggctaaaatgttttatgcacaagacaatcagtaaaaacaaatcagcagagctttatgatttagaaagaaaacaatgtccctttcaatgtcagtattaatcagtaacctgacaattaataaatacatagtttgaggaactcgcaatagaatttgagtgcctcacgataagattctttactcagagacaggatgtaagccatcagtcttaagaccttttccaagcagttcatttggaagcctgtgaaatgtgtcctgcaggttatcagggtctttttgc

SEQ ID NO: 65405 - DNA, 1121 bp, Homo sapiens
ctgtggagattggagagagaaaccaggccctcccccttcagcctcgcctagcatccccagcagcaggtacctcttctccaaggccccagctcctgcagcaaggaccagcccattgtggtagcagttctgccaggtgacatagccttgccctcgggaaatacyccctcatgcctttgcccctcctgcctagggtgatgctggtctctgctgttgccagtttgtgggtggccttactgttcctaatggctttccagctgttccttcagctaagtaaccaattctttgtattaaagtcccttggatttaaatactgaaacagtttctgtttcgtggttaggctttgtctgatacatttgatacccaagtgtgttccacatgcaggctctggactgcactgccagcacttcagaatctgctccattcacataggaagctctcttcttgggtttttctggtctctttgttagaatgctgcctcagtgtgattttcatcctggctaaatttatctcaaactgcagtgattctcttggaactgggaagttagtgttgtgataaatccagccttgacatcaatggattcttgagacccttcatatcggtttcccttttgcgtggctacaatattgtgctgactgcctggtgtttgaagtggtttacaaagtgactactcaatccccctgccctgtgtacctgtaggcttggcttttacaagtcccctatgttttattgctaatgatttttttgaagtgatcctttaagaggaggaatccccagttttttctccattcctgtgttctccttccccaccccagtctttatgcccttttgggtttatctgtcctgcatacgttttggtttctctgttccagcgttttatgaacaattaaagaaaaatgctcaaggtatgtcatctggcttccaaataactccttgagctctgtgcttcaaaataacgcacagacagtttggactgcagcgccaagctggcagccctttgacagatggtgcggcagaagggagagctgcctctgtgagtgtctgtccagagcagagctgcaaagtggtcctcgcagccctgagggtgctgtttgaatccttccagcattggttattcttctca

SEQ ID NO: 65406 - DNA, 1121 bp, Homo sapiens
ctgtggagattggagagagaaaccaggccctcccccttcagcctcgcctagcatccccagcagcaggtacctcttctccaaggccccagctcctgcagcaaggaccagcccattgtggtagcagttctgccaggtgacatagccttgccctcgggaaatactccctcatgcctttgcccctcctgcctagggtgatgctggtctctgctgttgccagtttgtgggtggccttactgttcctaatggctttccagctgttccttcagctaagtaaccaattctttgtattaaagtcccttggatttaaatactgaaacagtttctgtttcgtggttaggctttgtctgatacatttgatacccaagtgtgttccacatgcaggctctggactgcactgccagcacttcagaatctgctccattcacataggaagctctcttcttgggtttttctggtctctttgttagaatgctgcctcagtgtgattttcatcctggctaaatttatctcaaactgcagtgattctcttggaactgggaagttagtgttgtgataaatccagccttgacatcaatggattcttgagacccttcatatcggtttcccttttgcgtggctacaatattgtgctgactgcctggtgtttgaagtggtttacaaagtgactactcaatccccctgccctgtgtacctgtaggcttggcttttacaagtcccctatgttttattgctaatgatttttttgaagtgatcctttaagaggaggaatccccagttttttctccattcctgtgttctccttccccaccccagtctttatgcccttttgggtttatctgtcctgcatacgttttggtttctctgttccagcgttttatgaacaattaaagaaaaatgctcaaggtatgtcatctggcttccaaataactccttgagctctgtgcttcaaaataacgcacagacagtttggactgcagcgccaagctggcagccctttgacagatggtgcggcagaagggagagctgcctctgtgagtgtctgtccagagcagagctgcaaagtggtcctcgcagccctgagrgtgctgtttgaatccttccagcattggttattcttctca

SEQ ID NO: 65407 - DNA, 825 bp, Homo sapiens
taatgtaaatgactgaagtttaaattgagctggcgtcttgatattccttctctgggggagtaggagaggcaggatactacagggccatggcaggggtggatagcacaatgatgaaagataacttgtaaccctttcaaaatgttttgactaacaagaaatatagtaaaatgaaattgggattcttttcyggcttaagatgttctgagtttaaatttcatggggaggcatgctttcaaccagcttatatctgttttataatagaatcaatccactgaactttttgtctccagaacattatggcaacctataaaagatttttttctctggctgcctgcagttttccattttgtggagaagatgtgtattgggagtgtaatggattcggaagcagctctcgtaactggggctgttgctcagcaggcttgtaggcgggtcaggtttgtggaacaagtttcctgcggtcctctggattcctgttgtccagggcactgaatcctctggtttctggaaaacctacagacaaagcatgggagagacaacattttttgtggcctctctcgtttaaatgcagttaatctttttttttttgagatggagtctcgatctgtcacccaggctggagtgcagtggcgcgatcttggctcactgcaagctccgcctccggattcatgccattctcctgcctcagcctcccaagtagctgggaatacaggcacccaccaccacgcccagctaattttttgtatttttagtagagatggggtttcaccgtgttagccaagatgatctcaatctcctgaccctgtgatccacccacctcagcct

SEQ ID NO: 65408 - DNA, 1482 bp, Homo sapiens
aacttttaagagtgtaggattctgaaccctccatgggatgcctgctctcaggaacttggtgtcctttgccccaggggcctgtggtctcacctcactgcacctgctgattcttattgacaaagtctaagccatcacagggattctgcctgggacacagttaagtcactgtgtgaacttcctcagagcaggacttaaaagttccccagggaactgtcaagaaaaaatgattctaggtgatggagactagctcaaattcaatcaatttgccagataaggctttacgaaaatatctggtctgttctcatccttttccctaaagttggtgttttcatttgacgaggtagatgggcccttgtgagaaggtatcagtggtccttggctggtgctcacatgtgatgattcaattaaggtgcttttctttctttttttaaaaatatttttaactttttattttgaagtatttataagaatttgcaaaaataatacagagttcccatgtaccttttacccaacttctttgaatgttcttttcttctataactatcttataattatcaaaaccggaaagtaatattgatacaacattatttgaatgttgtatcattatttgaatacaaatctgaatagactttattcagatttctcagattgccccagcaatgtcttttatctggtccaggatccagtccaagataacaaaattcattttattatcatgtaaagcattttttttttgagacaaggtcttttttgctctgtcacccaggctggagtatagtggcatgatcacagctcactgtagcctcagcctgctgggctcaagtgaacctcctgcctcagcctcctgaggagccgggactacaatcatgcaccaccacacccagctattagtaatttaaatttttttttttgtagagatggggtctccttatgttgcccaggctggtcttgaatccttgggctcaagtgatccttctgtgttggccttcccagcatgtggggattacaggcataaacagtctttgttgttgttgttgctgttttgtttttgttaaacccagctgtgtgaaacattcttagttaagactttttttggtattaggggcaactttgcctatgctgataaccatatttagggtaagagtagacggcatttcctccagaatacctctgtccattcaaaagattgaggaattatgcctcctggcatcctttgatggactatggataggcaatttgggctgttaacaccttgattggattaattgtttactttcacttatcaaatgagaygtggggcattttgattcttggtgggatggaaagggttggagtttagagtgagttggaggaagacaggtctcagtggtgtggcaagtattggttttaggcagaattagttaaatatatagtacaagggttgcaaactcaatgcctatagggaccaggcagacctggaataattccacattagaaaccgtg

SEQ ID NO: 65409 - DNA, 635 bp, Homo sapiens
actttctatttttctcaagccaaaccagtttaaaatgtctagcagaatgaactgtatttccatttcttcatgtctacctgccttccccccacaccctaaagttgtacttgtttctagcaaactagaaggaaaagataggaaagcctggcactactaacctcacctctcatacacctctttgaaggccccagctcttytgttcaggcctctcttctcccctagactcactcagcttggtatccatcatcttgagcattcttcagtagattcatctagggttcagattccagactctcagctgaagacagggagccaatttcccccaggtccctgcaggtaatccagggaccccatagggagaacaggctgactggggcattaggaatgtttgtacctctctgcttccctggcagcctggggaagggtgcagggctcagtgcgctaaaccatggtaaacatcttcaatagaactaccctagaatttagtgagtgtgagactgagatattgctcagaataaatttattccatagccatttaggattgcatgttctggaccaaccttgtccagtatgttttctgtttgagctttttcattcttttgttaagccaacaagttgagaatttggccctgctg

SEQ ID NO: 65410 - DNA, 584 bp, Homo sapiens
caacctagaccaattaaatcagaatttctggtaatggaatgaggaaatcagaaaaattgttacagatttcatagataattccaatttatggccaatatgaagaactgctgagacacttgaagaaagtagttactagactgaagaaattttggagtggatctactgtgggaaaaaaaaaaatagaatacycagaagttctgctggaaacctctccatgggaggaggaaatgctggttctggtcactcagagatcattaacagaaggtctgttcaactgcctatccttggagtagtcaaaaagctaactaagttcctgtcggcaagagtggaaaaaaaaaagcctgaggggttcgtgtccacctggtttagatacttataagctaaagattatcaattaaactgaaaaaattccagaagttgagtgtagagaagaggatataacctgtgtgggcaggtaatagagcattgccagaatattagaatacttattattaaaataaaataaaaaatattttgttatcttttatggaataatttggaaagttttcttttttgtcttttattttctttttaagtaagagctt

SEQ ID NO: 65411 - DNA, 2047 bp, Homo sapiens
tgtttctttaacaaaggccagaaagattagatttttgaagggagcattgctcatttctgtcaacatctgattatttatcctccttagttaaacaaaaccctggttatgacaaaggctaaactttgaataaatctgcaaatttaaattatacagctgagggagacaagaaagcataaataatagggccaacttttttcacctgagcagaatcttgttcttcctaattaaaggtgatgctactgagccagtcacaggaggaaatatgcttaatctatttcgaggcaatgagtttctgctgttgcatctatcctttatttcctggtctcccttttgaccttttcatccacagcacatgggacaggtactagggtcccatgagaaagacaaatggccaaaaaacacagatcttacagaacttacattccattctgcaccattgcgttttgattttcatattgataatattgtcatgaggactaaacaaatatatatatgtgtgtgtgtttataggagtatacatatatgtatgtatatctgtgtataaatctgtatatatatacacgtgcaaagtatttagaaggcaggcatcctttagccaaacattacgtatataataattactgctattgtttcatgttccaaattattttgcaattaactctgatatacgctaacatatgaccagtatgttcccttttctcagcttggagtacagaacaagactctatttcctttactgttaaaattatagtaattttttaactctaatgaattaatacagtatttaatactacagggcctcctactgcaaattgccaggatcccacacagttgcttgtgctggtccaagaatcagtcttcctgtgscttcctcatggcaggagaactcagctgtgccagcaaaaccatcgcctgcaaacattgaccctaagtagccctgtgtgccgggcctggttcctctgcactaagcccaagtctggtttcacagccataagcagcttatgggaacaggttagcgcaagtctccatctgcctcaggaatcctctaaggtagcagaggtcactaccaagacaaaattttccctccccaaaccaccacaaaggacaaaagcttaattacaaagagctactctaaacgtcctttctacaccaaagagattcttcccctaaagtaaaacaaaaaattcaattctgaagccccaaagcagggagcaaattttaaatgatggcacagaggtttaacataaataaatcaattgacgattagaaaaatgaataaatgaagtgaggagtaaagtaaaatgtgggacgtaactttccaccgagtaacctgatacacgtgtatcttggttgacaagaaaaatattaaacgaggctcattcttctccattgttctgtcttatatgttgtagatatgtcagtcaggtaaaaaaactatggatatttatgccttttggtggaaaagggattatttccagtttgcatatttcctgcaaatgtctgtattagagttctccagagggacagaactaacaggagagagaaggagagagatatataggagtttattagggagaattggctcacaggtttacaagatgaagtcctctaaatgataggccatctgcaagctggggaaagagagaagctggtgttcgctcagtgcaagtcggaatgcctgaaaaccagggaagcggagagtgcagcctgcagtctgtggctgaaggcccaaaagcccccgggaagccactgctgcagttctcagagtccaagaccaaagaacctagagtctgatgtccaagagcaggaggagcagaagtaaacacccagcaaggaaagaagtctcagcaagcaaaagaatcctaccttcttctgcctgctttggtctagccgtgaggcagccgattggatggtgcccactcacattgagggtgggtcttcgtctcccagttcactgactcaaatgtcaatctcctctggtaatgccctcacagacacacccagaaacaatgctttaacagccacctaggcattctttaatccaatc

SEQ ID NO: 65412 - DNA, 1079 bp, Homo sapiens
ttttataaatgtgtgactatttatatacagggttcctagaaatcagaaaaaaacggggtttaggcaggtgaagttatacattaccataaattattctttgattttgattatgaataaataagattgatgattatgatgcttctgctgctgctgctacaactgtttctgctgctagctagtgtttattaagaatttaatacgagccaggcatttttctaagaacattacatagatgcacaaacacagttaattctcacaactttaggaggtttatcagtgargaaatggaggaagagaaggggaaagtaactagaaaatagtggagagagggttgagacccaaggattctgattctggaggcagtgctataaatgaccatacaatataatttcccaggagtaatggtgtatgcataggtggtaaggaaaaagtcatttaaaactgcttctttggggtgattgctgaattttaaaatgtttaggcatttgtttaaattaaaggcttttaaatccccaaactttataagcaaggatgaaatgacaggtcataagatcaataggtcataagggtgtttatttagtagcaaatatatgttgaatcctttagctctctctcctcattttgcagaaatcctgaatgtttgttaaacagggtaagatttcttaaggtaacttaagaaatgtagaggatagaattaaccactggattttctgtgtgtaagttatatgtgtgcatgcaagtgcgtgcacttgaagccagagaaaaggaagaaatcaattcaggaaagaagggaagggggaacatgaaagaaatttacctggaaatctgagcatagatcaagtggcactgtcgagaatataccccttacacgcactgtaggtaaaaggagaactaagaacaaattaagaacaaaaatgattaactgcaatattaatttaggcaaatacacatgttaaaccaaatatagagctttattgttaattttaacattcaattatccaaagaagatcccttttttttttttttttttaagacagagtcttgctctgtcgtcaggctggagtgcagtgatgcaatat

SEQ ID NO: 65413 - DNA, 1079 bp, Homo sapiens
ttttataaatgtgtgactatttatatacagggttcctagaaatcagaaaaaaacggggtttaggcaggtgaagttatacattaccataaattattctttgattttgattatgaataaataagattgatgattatgatgcttctgctgctgctgctacaactgtttctgctgctagctagtgtttattaagaatttaatacgagccaggcatttttctaagaacattacatagatgcacaaacacagttaattctcacaactttaggaggtttatcagtgaggaaatggaggaagagaaggggaaagtaactagaaaatagtggagagagggttgagacccaaggattctgattctggagscagtgctataaatgaccatacaatataatttcccaggagtaatggtgtatgcataggtggtaaggaaaaagtcatttaaaactgcttctttggggtgattgctgaattttaaaatgtttaggcatttgtttaaattaaaggcttttaaatccccaaactttataagcaaggatgaaatgacaggtcataagatcaataggtcataagggtgtttatttagtagcaaatatatgttgaatcctttagctctctctcctcattttgcagaaatcctgaatgtttgttaaacagggtaagatttcttaaggtaacttaagaaatgtagaggatagaattaaccactggattttctgtgtgtaagttatatgtgtgcatgcaagtgcgtgcacttgaagccagagaaaaggaagaaatcaattcaggaaagaagggaagggggaacatgaaagaaatttacctggaaatctgagcatagatcaagtggcactgtcgagaatataccccttacacgcactgtaggtaaaaggagaactaagaacaaattaagaacaaaaatgattaactgcaatattaatttaggcaaatacacatgttaaaccaaatatagagctttattgttaattttaacattcaattatccaaagaagatcccttttttttttttttttttaagacagagtcttgctctgtcgtcaggctggagtgcagtgatgcaatat

SEQ ID NO: 65414 - DNA, 1079 bp, Homo sapiens
ttttataaatgtgtgactatttatatacagggttcctagaaatcagaaaaaaacggggtttaggcaggtgaagttatacattaccataaattattctttgattttgattatgaataaataagattgatgattatgatgcttctgctgctgctgctacaactgtttctgctgctagctagtgtttattaagaatttaatacgagccaggcatttttctaagaacattacatagatgcacaaacacagttaattctcacaactttaggaggtttatcagtgaggaaatggaggaagagaaggggaaagtaactagaaaatagtggagagagggttgagacccaaggattctgattctggaggcagtgctataaatgaccatacaatataatttcccaggagtaatggtgtatgcataggtggtaaggaaaaagtcatttaaaactgcttctttggggtgattgctgaattttaaaatgtttaggcatttgtttaaattaaaggcttttaaatccccaaactttataagcaaggatgaaatgacaggtcataagatcaataggtcataagggtgtttatttagtagcaaatatatgttgaatcctttagctctctctcctcattttgcagaaatcctgaatgtttgttaaacagggtaagatttcttaaggtaacttaagaaatgtagaggatagaattaaccactggattttctgtgtgtaagttatatgtgtgcatgcaagtgcgtgcacttgaagccagagaaaaggaagaaatcaattcaggaaagaagggaagggggaamatgaaagaaatttacctggaaatctgagcatagatcaagtggcactgtcgagaatataccccttacacgcactgtaggtaaaaggagaactaagaacaaattaagaacaaaaatgattaactgcaatattaatttaggcaaatacacatgttaaaccaaatatagagctttattgttaattttaacattcaattatccaaagaagatcccttttttttttttttttttaagacagagtcttgctctgtcgtcaggctggagtgcagtgatgcaatat

SEQ ID NO: 65415 - DNA, 928 bp, Homo sapiens
tgggccacagcagttgtgagtgagaggaggccatagcgtcctaaactgatcagacttgccaagtattcctacctgtggcaaggggctgaaaagcccgtggactgtaccttaatgttgcttaacaatccctgaggtagagaataaaaggaattgtggaataactctgtgacttgcctcggtttcctgatgcccagaaacatctatctcattggtcatcgagatgaaatgaggactgtcctgggaaatggagtcttcctgattttaacaaggttctgaagcagaagcagagacaagatttactattcaggccttcttccaaagcccatttccactgctcttcaataactgcatctaccaaattctgaatgttctcttctttccccaaattctaactaggttaacttcataccaaaaccagtgtatgacagttgaaatagcagttcttagaggttgtagtttcctgtgttttcttctggttaccattaacatgggtatatgtaaagaatatatattggatatatgtatgctgaataaaaagtagtaattcattttcaccaatgaaatcacagagcatgatgtttcctagatagaggaggctcatgttttataactgtattgtttcagttgaggaaggaaggcaattctccagcaatgccttcttcctccactaggaaaagcttttactttcctggtggtctttttctacttgcccactaattataaagaacataaattatagatttagtaattacttgtttcttccctgttatcccccttttggcaaagagcagaaccaayataattttaccatgctaccactttattcccaaatttatcagcataaaatctagaacatttccagaatccttctttccctggtgagggaaggaacagtagctgaatataagcttaacaagagtgcagtggt

SEQ ID NO: 65416 - DNA, 928 bp, Homo sapiens
tgggccacagcagttgtgagtgagaggaggccatagcgtcctaaactgatcagacttgccaagtattcctacctgtggcaaggggctgaaaagcccgtggactgtaccttaatgttgcttaacaatccctgaggtagagaataaaaggaattgtggaataactctgtgacttgcctcggtttcctgatgcccagaaacatctatctcattggtcatcgagatgaaatgaggactgtcctgggaaatggagtcttcctgattttaacaaggttctgaagcagaagcagagacaagatttactattcaggccttcttccaaagcccatttccactgctcttcaataactgcatctaccaaattctgaatgttctcttctttccccaaattctaactaggttaacttcataccaaaaccagtgtatgacagttgaaatagcagttcttagaggttgtagtttcctgtgttttcttctggttaccattaacatgggtatatgtaaagaatatatattggatatatgtatgctgaataaaaagtagtaattcattttcaccaatgaaatcacagagcatgatgtttcctagatagaggaggctcatgttttataactgtattgtttcagttgaggaaggaaggcaattctccagcaatgccttcttcctccactaggaaaagcttttactttcctggtggtctttttctacttgcccactaattataaagaacataaattatagatttagtaattacttgtttcttccctgttatcccccttttggcaaagagcagaaccaacataaytttaccatgctaccactttattcccaaatttatcagcataaaatctagaacatttccagaatccttctttccctggtgagggaaggaacagtagctgaatataagcttaacaagagtgcagtggt

SEQ ID NO: 65417 - DNA, 659 bp, Homo sapiens
cagtgctggcatcggaattcttcctagcttagaaggatctctctgattcatgatatgctgaagcaatcattctccaccttatcagcatttaaggattacctggaaagcttttggaaacctccagagtctaagcaatttctggacmaatcagatcagaagcttctgagcagggtcctgacaatgacgtcctttgaaaccttccctataggcttctcaccggaagccagggttgagaacctctatgctagagggtttttttttttttttaattttttcagtttatcatcctgatgctcatgagttgtatcttgcattctggacatgatatgagctattttaaaccttaaagagctctaagagacaaagcagattatcataaacactcatctttattatacatttgttttccaacaatttccagggcctctgcctgatctccactctccgcagatttctttcaactacagctagaactacctcagctggattccctttaatgtgcaaaaataaatatcttcatgctatggtccagttttaatatagatttctgttacttaaagctgaaagcaacctaactcatccagtgtctcaggagattccagaaactgctgatgcctttgagagagattctggtggccgcatagagaatgatttccata

SEQ ID NO: 65418 - DNA, 659 bp, Homo sapiens
cagtgctggcatcggaattcttcctagcttagaaggatctctctgattcatgatatgctgaagcaatcattctccaccttatcagcatttaaggattacctggaaagcttttggaaacctccagagtctaagcaatttctggaccaatcagatcagaagcttctgagcagggtcctgacaatgacgtcctttgaaaccttccctataggcttctcaccggaagccagggttgagaacctctatgctagagggtttktttttttttttaattttttcagtttatcatcctgatgctcatgagttgtatcttgcattctggacatgatatgagctattttaaaccttaaagagctctaagagacaaagcagattatcataaacactcatctttattatacatttgttttccaacaatttccagggcctctgcctgatctccactctccgcagatttctttcaactacagctagaactacctcagctggattccctttaatgtgcaaaaataaatatcttcatgctatggtccagttttaatatagatttctgttacttaaagctgaaagcaacctaactcatccagtgtctcaggagattccagaaactgctgatgcctttgagagagattctggtggccgcatagagaatgatttccata

SEQ ID NO: 65419 - DNA, 598 bp, Homo sapiens
ctcctgcgtgtccggtaagaggagggcccctcatcccaggaacaccaccaccttcccaaaggcaaaatctgctctaggcggaaacactggagtcccagcgtgggagccaatgttttcacacaatataagggatatcagtttggctgatcggcgtcggagccttccaaaaacaaccccgcgcccggtggtttccgcagcttgggctctgctcccacacacggaggggagccctggctttcagacccacccgggctgccccagaaaggctgaccggggtcgccagggccccagccacttgaacaccaagaaaacagcttcaaaccgcccactatactctgctgaggagcggcagcagcacattttgcaaaattttccttcctgtgcctcactgagatttttctgcctgggttccccaaaagcccaaaaggtgagagcagatctgwctcctctcggcaacttcgtttggtggaaggcgtcctccaccacgcccaagaaaactagcgccggccctggctgtccgccctcctagcaaggctcaggccccggcctgggagaccgcagggtgcctgactctggggtacactcagttgtccctctg

SEQ ID NO: 65420 - DNA, 553 bp, Homo sapiens
atgctgccactgtactccagcctgggtgtcacagtgagacctccatcaaaggagaggagaggagaagagaggagagggaaagagaaagaaagaaaaggaaaggagaggaaaggaaaggaaggagagagaccgggtgtggtggctcacgcctgtaatcccaacactttgggaggccgaggtaggtggatcacaaggtcaggagttcgagaccagcctggcccacatagtgaaacatcgtcttttgtattttgtaaaaatacaaaaagttagccaggggtggtggtgcgtgcctgtagtcccagctactcgggaagctgaggcagcagaatggcttgaacccaggagacggaggttgtagtgagccgagattgtgccactgcactccagcctgggtgacagagcragacaagaaggcgagaaagcaagaaagagagagaaggaaaatgtagtggtggatacatgacactacgcatttgtgaaaacccacagaactttatagttcagattgaacctaatgtgtgcaaataaaacaaaaataacttaggaggttgga

SEQ ID NO: 65421 - DNA, 484 bp, Homo sapiens
aacatgcaccccagaggagtgggtttcgatgcttttcctcccatcccgccctttgtgatgcacactcactctcactttcgttccagactgaccagactgggtcctattacggaagtttcaggtgctgcttagctaggagagtaccttattcctgccacagcctgctgcagctgtggggcagctcctgtcagctgtatgtgatgccctggttctggtcaatcacacactmgcctcagagcacacagtccgtgctaagagatctgtgtctccccacatcacggccctcccggaaccatctctttcacacacctccccgctcccagttcccgatccttagtcaaggcaggaagccactcttcccattttcagtttctttcctgaccaacttagtgagccactctcgtgtcctgcatcggctaaggtgtaagtttcatctgaatcagtgagctactctcactgtccccagcccctctgggtctgggca

SEQ ID NO: 65422 - DNA, 761 bp, Homo sapiens
attttttctgttaaaaatatttaggtgccttaggctggaattgaacacaattttgcccattttaattaatgggaaaaatttaacagctttccacttagaagcagaatttcaggaatgaattgaaaccactagaagggtgatagctgtattttcatcatctccccaagggctttgggacagctttcccatcctctgtgcctgtcacttttccaattcccatcacccgttgttcttccagttagtcacccctcccttgtctgttacaggggttcagtattaattgtgttagaatgcatctggttgcaagtaacataaaactcaacaaactctggtatatataagatccctcatcccgataagacaggaaggtagtacagggtttgtgtagctgcttgagtatgacttaaacaaacaggctcctgtctttctgctccaccttcctcagcacagccctcctcatggcctctaggctgctgtgctcccaggtgttacccagttccaagcatgaagcaggggaaaagtgaaggacacaaacttctccaagggaagaaggaagggaaggtytcctttgatacttctgcctacatctcagtggccaggactttgtctcactgccacccttagcagcaaagaaagttgagagttgtgtgctttgcttttcagcccctgtagtatagaaaggcaagggagtggttgaaatagatcttgagttagccaactacataatttgtcacactgtgtttaattgaaatgtattgctt

SEQ ID NO: 65423 - DNA, 646 bp, Homo sapiens
ctaatatagcagttgaagtccttaatcatctaacttgacagttatatcattatatctcactacagtgcctgaaacctccctgttacccccctgaccgccctcaaccttagcctatatggtagccacattggagtttgctcttctactatcccttcagtgtatcttggacacttccatcaaattgctttaatggaaatttagttcccgatgtgtcatgcctgtggtaaggttaaactttcttcttttttttttttgtttgagacagggtcttcttctgttgctcargctggagtgcagtggtgcgattttggctcactgcatcctccacctcctgggttcaaacgattatcatgcctcaggttcccgaatagctgggattacaggtgtgtgccaccatgcccggctaagataaggttaaacttttgctcattttctgcctccagttttactgaattaattacaaatattcaatcctaacattcagagtccttcaaaattggtcactgcttacctttgaaaccttaccaccttctacatatagctttctttcctttggctctgggttttcggtttctagtgctttttttttttttgctacctgaagcaagtttcctttcttttatgtattttcttttctttctttctt

SEQ ID NO: 65424 - DNA, 600 bp, Homo sapiens
gaaatttacactctaaagaactaagggctcaccagaatacttaaatatcttggttgctatgctgcatatgcctctgtcacaactaagatcctaatcttcacgataataagaaaaaacacccatggcacccttgtggcacagcaaaggggttaatccaagtgtgacttaagcctgggatgctttaatcctgtaaaacatccattgtcatggggcaggtccctaactttgatgatatctatttgaggctctctggtgaaaaaaaattatgaatataagcatgttggaggagtctcccttctcccttcttgaaacatgtctagtaacaccacacatacacacacacacacacacacacacacacacacacacagagagagagagagagaggaaaaagaaggaaggctggatacatgaggaagaaacaaactaaaagctaacataaaagtccacagtttgacccagctggaaatccaaaatgtaaaaaagaatgtatataacaaagataaaagggcattgactggcttctgtgcttatataaktaactttaatatcagctaaaatgcaccaattggcaaattttatggatttaatcaataccag

SEQ ID NO: 65425 - DNA, 758 bp, Homo sapiens
tacattaccttacaaagttcttattaaataagggatatcaaactgagtcgaaaatcattaaattcatcaccttttcatatttttacagatctgaatatacctcgatttatattctaactctaaaaacatacctaaatacattacagtgaagtacatatgaagtaactgtgataacatttacctctttttgttgaagttgatttcggtaacttgtagattgctgctttatttgaatctctgatgcttcatgtttctcttctagatcagtacaaagtttcttaagcctttcattctagaaaaaaaaagtattttcaacaaaaagactgcaagtaaaacatgtaattagttatgtgcacagcattatgaaaaaygtactgctttccccccccaaaaatgtcaaatataaaaggtctcggacagaattctggactttaaaatatgcttttaaattaaagttaaaaatgcactgaccagccgggcactgtggctcacgcctgtaatcccagcactttgggaggccaaggcagatcatgaggtcaggagatcgagaccatcctggccaacatagggaaaccccatctctactaaaatacaaaaaaaaattagacgggcgtggtggcgtgtgcccgtaatcccagctactcgcgaggctgaggcaggggaattgcttgaacccgggaggcggaggttgcagtgagccgagatcatgccattgcattccagcctggtgacagagcgagactccgtctcaaaaaaaa

SEQ ID NO: 65426 - DNA, 2231 bp, Homo sapiens
gatcccacaagtaactaatctctgagcaatatcattgtctatttaaacagcctgatttgccttgaaagctccctcactctgtcaagatgaataaaaggcagaactatagaacgattttatagagacaattgggaatttcacttcgtaacctcatctacaataaaaaaaaacttacctatgaaatattaactctgaacgaaggcttcttggtctagaaaataaaacatctggacgcagctgctcatggctatattcccaacactgggaggccaaggtgggtgaatcgccctgggcaatagagtaagatcccggtctctacaaaaaatgcaaaaattagctagatgtggtgaagcatgyctatagtcctagctactcaggaggctgaggtgggaggatcacacgatccaaccactgcactccagcctgggcgacagagtaaaaccttgtctcaaaaataaataaataaacacaacaaacaaaaatctttgagtctggaatagtctcttttaaaaactcactaattctcacatctctgccccatgcatctggcaattatcacactacaaattttattagccaacatctacagtaaagattcaaacttctaagcctccatttgtttaacaaattgttcttatctatttaccaaaagatataatatctgtttaccagtatgtatagttcttatctatttaccaatatttgtagtatattaaatattactataatttctgggaaaacctgataatcaaatatgtaggaactccctaattgcaaattttgtcactctagtcttttcaggttaaaggatcacttttttctctctttcacattatacaatgttaggagagccccctgctgtccaaagtaaaattctaatttcagaaaatttaaataaatggagcacaatgcctgccctctcctcacccagtttatcctcttagtatcactgctcttggaactaataggggaagatttaagattagagagaattagaaaaaagctgtgaaaaacaggctttgacttgggagggaaaaaaaagtcagactcctagttagatagatctcagatgcccaatcaccccaacacacacacacacacacacacacacacacacacacacacacagacacacacgcttcagcctctacccaacatttctaacccttcacttctcatttgcattttgcaatgctccactgtctgagatccgttaggttgaaatgaaccagaaactcaggggatgagagcccagcaatctgtgttttaataagcccaccagaggattctgatgcatgccaaagtttgagaaacactaatttacaacattacctcttctgatgaaatgagagatttcatttcagaggcacacaatctaaatgttcataagtgactcaaggagtttgttacaaatccagatagatttgcaggccccacctcaccctcagatattttgattcagtaagtctacagtaggatccagaaatctgtattgaacaagcaccaccggtgattccaatgcaagttaatggaaggaccatacttcctaagtcactaatatagtgagtggggtgggtaattctagagcatggagcacattaggaatatgttagacttgagtgggaaaccacaaggtgggaagcattaaagatagcatgggagtcctggttccttgggagaagggtgcagaaaaggaagctggcactggccaaatataaattgttcttgttttaaaatattttgcctgggttttgttctgcttcataaaaacaaaagaccctacttccttctcatctctattactgcatggctcctttctacaggccccagaaatcaggctacagttattgtgaaagtcattatggtttaattgaacttttgttgactagtcagagaaactaaccatcatatatgatcatttttatgggaatgtgttcctatagaacaaatatttaaaagaaacttttggaacataacccttttataagttgggaattggctgattttatttaatttttcataattttgtcttgaacttatggatatgccaaatagtgagtagggaagagttttaccgtgagtggctgccaaattaaagtttaatttgatttaaactttagaatatgtaatcactgatatatataaccctaagtcttactgagtatatagtagtctttttattgcttgctgtcccacaatatacaataaatggcagctgcatacattaatgt

SEQ ID NO: 65427 - DNA, 2221 bp, Homo sapiens
ttgtgttttccctttattcaactatacatccatacttgtgcaaagaaaaatatcatctttacccagacaaaagggttcttttatgaaaatgccccttgtatttgcatgaagcgtaagatgctatcagattaagggaatccttgaaacttactagccacttataagggtgtacccttaaaaacagaaatttgcctaaatgtactagcttctaatcaaggatggctttgcagctatatcaaaatccaagcctctaccaaacacgcttgtttatatttgtataatcttacaaaaagtcttcacttagtggtatatgcaacctagatctctacaacaaagaattcaacttccaagagtttatatataatgatttctcaacattgaattcgatgtcctaatttctgatgtttcttacaagttgttttctttgaaacatcctagcgtagttatttttatatcactgtaatttcattggctgcaatgagtttctctaactcattagttaaaagttccaagacaagtagccaagtgtgagaaagagccaatatatttagattcttcagaacctggaaacaacagcaccagctagactcacaaacaagcacttttctccttgtgtttaatatcattttataaccttgaaaaaagaatattcaacatattttaccaagtacctattaatgttgactgaattttaattaatagttatgcttaatttaataagtcatataaaggtagatttatgatggaccaaaataagagaagccaaggtttgccttagagtggattggagaaggtgagaagatggatgacgaagcctggaaatcattaagaagaacgaggttttaatttcgaaagagaggtcaaagagggaaaatatctcaaagataactcagtttaaaaaaattcagagctatataaccaccctgtgctatacttatctaaaatactgctcataattgttggtttttagtggggatgagggtagagaaagtgattctcggtctttctaaactaagataactttgttttctttctctcactctaattggaggcttgaatttcactttcaaaatgtttctcttgtgtttagcacatcctcctctctggcctctattttattttatactttattagtccattctcgtgctgctatgaagaaatatccgagactgggtaatttgtaaagaaaagaggtttagttgactcacagttctgcatggctggggagacctcaggaaacaacaatcatgaggcggaaggcacctcttcacagggcagcaggagagagaatgagtacaggcaagggaaatgccagatgcttataaaaccatcagctctcatgagactaatgcattatcatgagaacaacacaggggaaccacgcccataattcaattacccccacttggtaacccccccktgacactgtgggtattacaattcaaggagattttgtgtggggacacacccaagccatatcatgtatctaatatgaaaatgaagccatgagactggaaaatttccaaggacctttctgttttgaaagaccataattctgtcatattagttatttgaaccaaaaaagtatatacaaactgataaggtggcaatgtgggtatgaaagagatagtcagcacctagcacaaacattcccatggtctcttttgttaaaccccatattggccctaagaaaaaaatctgggtgaatttagaacaaaagattcccacggggtccctgctcttttgacaaatttttttattgccacactatactcatctagaattcattcatgtccctaaattacaaaagcataagtagctctgacccaagtagcaaacgttagaaaagacaactaacaagactcaacttttgttacaggtaaatagtgcactagaaaaaaaaattaaatattgaaattacattgaggattatttgccctcaacttcactgaatatttacccatttcttttataatgttataatttataacaatgaattgtatttctcaccttccccttttttgttttgttgttgcttaactcagaaagaaataaaagttttgaaatgtcttccttcgtggaaaccaaaggacttgaacaactcaccaagtctccagtggaatttgtagagtatccttgatttgacgaatgactgcagaatgaacacagctgaagtcttgtgctatttgttcatttggttttttaataaggagaaagatgc

SEQ ID NO: 65428 - DNA, 1707 bp, Homo sapiens
ggatcccagaaaggttttgtttatgtggatgatagttattgatatttaccgtgttgtaagttaaagctgaaaaacatttaaatatttagaaaaatgctataataaatgtgtctattaacatacacaacatcttaacacaaaataactatattttctaaaaacaagaaatttagtaaaagtggcaatgttttatatttttacaaaatctttaacatctgacttagtagaagtcggcttccacatttaatctcttggtatttagttggggtatatggggcttttgttgttgttgttgttgttgtttttgaaacagagtcttgctctgtcatccaggctggagtgcagtggcgcgatctcagcttattgcaacttctgcctcccaggcagtaaatactgacaaatattaagtctgagtaagcatggtgtgtcagccagttgctctttcaggtaaaaactgctttgtgagggaggcagctggttcagctggcaactcaatcatacaagtgcttttccttccacaaccatcagactttggaatgcagccaaagagcttatgtgcatttcccatttcatcaaccagaatgtttagaagacatgtatgcaaaggttgagatttaatcacattatataatttttaatgcttcatcaaggacattcataattgaggctattttttttttctgcacatgcatgactggctagtcacacttataccactgcttggatttgtgctgaaacactagtaaacttacccacgaaataccaatcccagagagagaagcataccatattgatataactctaaaaatagttgtgacctcttaaaacccctgaaagcctcttagcgaccccagaagtccatgaacaacattggagaaccattgttttaagacattccatgaacacaccagatatgtaatacttggtttccagataatgaaggggaagctgataattggccaaaagtcactcgcgggtacccaagtccagaagtgggaggaatcattcagagaggatccaagaaggaattatagaaagtgaccagatgacattgaagcttgatagatgagtcagttatcaatttattgcctttcagctccaatgcacccttgaatatatgctctgtgagaacagggggaatttctttaaacatttctcctttaaagtgagcacaaagttaggctttctcaccagggagaactagaggggcactgcaggaggaagaggctttcttgctggctgtggtgtgggctgggggtgggcmgtgtagctgtgagggcacgcagtggagccaccccagctataggctcagcatgcaacccccctggcacctcatagcctcagcctggcaataaccttcccagcactcttgacacagaaaccaaagtccccattaagcctatgtccagtcggcctatggccagtgtgtccacacagcttggtcaccccctttgcaagccccacgtgtcctgaaggccttcttctccactaacacctagatcctgctgcatgctgtaccgatgctgattgcctgctccctgcctgaactctggggagtgggctattgcttgctcagcgactccagaccagctctggcctgatcaaaccagtgagtttctgtgccaggttccaaaccacttctaagtttgtccttccctggctcctctccctcagccctagggtaccatagagagtttccttatatgt

SEQ ID NO: 65429 - DNA, 1707 bp, Homo sapiens
ggatcccagaaaggttttgtttatgtggatgatagttattgatatttaccgtgttgtaagttaaagctgaaaaacatttaaatatttagaaaaatgctataataaatgtgtctattaacatacacaacatcttaacacaaaataactatattttctaaaaacaagaaatttagtaaaagtggcaatgttttatatttttacaaaatctttaacatctgacttagtagaagtcggcttccacatttaatctcttggtatttagttggggtatatggggcttttgttgttgttgttgttgttgtttttgaaacagagtcttgctctgtcatccaggctggagtgcagtggcgcgatctcagcttattgcaacttctgcctcccaggcagtaaatactgacaaatattaagtctgagtaagcatggtgtgtcagccagttgctctttcaggtaaaaactgctttgtgagggaggcagctggttcagctggcaactcaatcatacaagtgcttttccttccacaaccatcagactttggaatgcagccaaagagcttatgtgcatttcccatttcatcaaccagaatgtttagaagacatgtatgcaaaggttgagatttaatcacattatataatttttaatgcttcatcaaggacattcataattgaggctattttttttttctgcacatgcatgactggctagtcacacttataccactgcttggatttgtgctgaaacactagtaaacttacccacgaaataccaatcccagagagagaagcataccatattgatataactctaaaaatagttgtgacctcttaaaacccctgaaagcctcttagcgaccccagaagtccatgaacaacattggagaaccattgttttaagacattccatgaacacaccagatatgtaatacttggtttccagataatgaaggggaagctgataattggccaaaagtcactcgcgggtacccaagtccagaagtgggaggaatcattcagagaggatccaagaaggaattatagaaagtgaccagatgacattgaagcttgatagatgagtcagttatcaatttattgcctttcagctccaatgcacccttgaatatatgctctgtgagaacagggggaatttctttaaacatttctcctttaaagtgagcacaaagttaggctttctcaccagggagaactagaggggcactgcaggaggaagaggctttcttgctggctgtggtgtgggctgggggtgggcagtgtagctgtgagggcacgcagtggagccaccccagctataggctcagcatgcaacccccctggcacctcatagcctcagcctggcaataaccttcccagcactcttgacacagaaaccaaagtccccattaagcctatgtccagycggcctatggccagtgtgtccacacagcttggtcaccccctttgcaagccccacgtgtcctgaaggccttcttctccactaacacctagatcctgctgcatgctgtaccgatgctgattgcctgctccctgcctgaactctggggagtgggctattgcttgctcagcgactccagaccagctctggcctgatcaaaccagtgagtttctgtgccaggttccaaaccacttctaagtttgtccttccctggctcctctccctcagccctagggtaccatagagagtttccttatatgt

SEQ ID NO: 65430 - DNA, 1235 bp, Homo sapiens
acagaccgcaaacaggcaaagtcctgcccctggagctgggtgacaggctggtagggcagatggacaaccaataaataaagcacaatgccagtgatataaagaaaacaggagaataaggaaacagaaattcagaggtgctatattagatggtgaggaggatgtttgagcagaacggagtgaggaattgagccgtgcccagttaacacttgctaaatgaataaaaggatgaaagtatgtaggtggaagagtgatgtgcacaacctcatattgctcaggcctatactgaacagtgctgctagatgatctctgaagttgcttataatttagaaagtggccttccctcccacccagtaaatgtactttaatcgttgaggtcggtattaatgatttctgggaactcatcacgtcccatgatgtgttggaaaacaccaggcaatgctttatcacagtctgtgcttcttagcaaactatttcctctcagctttcctggaagctggggttttatactatggctatttttagttgttgtcgcagtggctgctgggaccaattgcctaaggagtttgacgagaactttaccctggggagaggcattcctctctgcagtgttgccctgaagagccctgtaattgagatttgaccatttacaacctctgagaactagataccatatcatgaaatgcaagatcaggtagctttgctgtgtgctcagcagtcagcaagaaactgtccaaagttattttgaccagtggatcattcatttggtcagttcctattcaaaacctttgactgagataaagaagcctgttttgctttggaattgatgcttgggaagctccaggtgggggtaggctgggggatgtttgccctcaaaatgatttttcacaagagtaccccagacttgtgtgttccttcacagccagtcaaacgagggaccgactggcattcaggaaagcaacctgaaagatctagttgggatattctggcaggtatctaatctgccagcacttgcccttccttctctgctccaaggcaatgagaacaagactggctataaaacccaccactgccaaaaccatcttcccaaagcacacttctgaccttgcaamgtccctgtttaaaaccctcagattctccctgccacagaccaaacacactctaaaagtcttagctgctactcaaaggcctcctgtgatccaagctaatccctgggtataatttcatttctccagctc

SEQ ID NO: 65431 - DNA, 1328 bp, Homo sapiens
tcctttaaaccacagctctcctgtgaactatcagagcgagaactcactcattaccatggggagggcacaaagtcaggagggaaccaaccccatgatccaaacacctcccaccaggccctgcctccaatattgggaatcacatttcaacatgagatttggcggggacacacattcaaaccatatcagtgggtgtgcagggaattccaagcagatcttcttcatgctctattaggaaaacccatgcagaatttctctagttccctttcttcctccattctgaggaccccagcctagtcacaggcaaagccataaggcagtcaaatgctcatcttctgggggtctctgtgtcttcccaatctgctatctccaccatcatgcatctctaaacccctcagccactcttggccagcatgcctctccccacttgtatctctcaatgccaactctgaaagcattcacatttaagtatgaattgttggtaactgctaagcacttattcctcctggggtacttttatttatcatggcccagatgtaagcaacgagatgaagcttcaatagtggggttgcaggtgtctgccagaaactgattaaagaactgggaaagaaggaagaagggcaacaatagcttcctgggggtcctgaaaccagacatgtaggtttttatctattatctcctatgtgagatcctgccaacttgttacttctgcagctctgaaaaactagctcacacaatggatgccccagaccaaagggcaggcactcttatcacaaaactgccttaatttccatttaaaattttctatttaaaattacttcaaggctggttggaagggcaagacttcaaaaacaacacattcctttttaattaattggaggcgggtgactataggaatgttttagctttgccgttaatatgagtgctatgaatttgtaatagtgacatcttcctatacttgtgcagtaagatgtttgttagcaagaatgtttggagaagcaagatgttccctggtgaactgaattccctgggtagccctttaagcaatttggggcaatgtaataaaaagcagaagattaagagttctgcgttccagacctagttttggcacaaagagttgtgtgacctrgggcaagtaattttccctctctgggtcttaatcttgttatttttaaagtgaataaattagaaaagatgggcttgaaagacactctgttcctaaaatgtggctaggagaaggtgaaaataactaaatcttttatttgcacctaaaaattccaatggctgagtagagactccacaagctactacagtcctctctcccagcacca

SEQ ID NO: 65432 - DNA, 692 bp, Homo sapiens
ggttgcactgtacttcagttgccattggtctgcagcaatgagactcactgcttgtgttctcaggggtcagctccaacaatcgggaacatttctcttccagttccctgaatgacgacctgctttggaaacttacattttctttcaagaagtatcttggttctgagatgtgagattcagctggtaggactgagcctctgacttcttgtacacatcaagggagggaagcccaagggctttacttttacttattgggctacatggagcctacagagaaagacttactaataggccagatccatactcagcttgaaatgctgacaccaactccatgaaagatgtgctgctgctattagcactgcactggttaaaacaaaaaaaaaatctgtggtccagagaggtcaagcagcccatcctggccaacacactggtgaaccmgagcctgacaccaaagtttcactcttccaccacatctcttgccaccactaacatggggccagcagctgacaactcaaagggaaccaagaatgagaagtttttgacctaactgactgtctaaattgacagacgctttgtcttgcatggagggggccaataaatgcccaaagagacaacacaagtcatcagggatgcaggagctctcaacactggcagtggacgtcagcttctgcagacccagtcctcattcccaccac

SEQ ID NO: 65433 - DNA, 692 bp, Homo sapiens
ggttgcactgtacttcagttgccattggtctgcagcaatgagactcactgcttgtgttctcaggggtcagctccaacaatcgggaacatttctcttccagttccctgaatgacgacctgctttggaaacttacattttctttcaagaagtatcttggttctgagatgtgagattcagctggtaggactgagcctctgacttcttgtacacatcaagggagggaagcccaagggctttacttttacttattgggctacatggagcctacagagaaagacttactaataggccagatccatactcagcttgaaatgctgacaccaactccatgaaagatgtgctgctgctattagcactgcactggttaaaacaaaaaaaaaatctgtggtccagagaggtcaagcagcccatcctggccaacacactggtgaacccgagcctgacaccaaagtttcactcttccaccacatctcttgccaccactaacatggggccagcagctgacaactcaaagggaaccaagaatgagaagtttttgacctaactgactgtctaaattgacagacgctttgtcttgcatggagggggccaataaatgcccaaagagacaacacaagtcatcagggatgcaggagctstcaacactggcagtggacgtcagcttctgcagacccagtcctcattcccaccac

SEQ ID NO: 65434 - DNA, 692 bp, Homo sapiens
ggttgcactgtacttcagttgccattggtctgcagcaatgagactcactgcttgtgttctcaggggtcagctccaacaatcgggaacatttctcttccagttccctgaatgacgacctgctttggaaacttacattttctttcaagaagtatcttggttctgagatgtgagattcagctggtaggactgagcctctgacttcttgtacacatcaagggagggaagcccaagggctttacttttacttattgggctacatggagcctacagagaaagacttactaataggccagatccatactcagcttgaaatgctgacaccaactccatgaaagatgtgctgctgctattagcactgcactggttaaaacaaaaaaaaaatctgtggtccagagaggtcaagcagcccatcctggccaacacactggtgaacccgagcctgacaccaaagtttcactcttccaccacatctcttgccaccactaacatggggccagcagctgacaactcaaagggaaccaagaatgagaagtttttgacctaactgactgtctaaattgacagacgctttgtcttgcatggagggggccaataaatgcccaaagagacaacacaagtcatcagggatgcaggagctcwcaacactggcagtggacgtcagcttctgcagacccagtcctcattcccaccac

SEQ ID NO: 65435 - DNA, 544 bp, Homo sapiens
agtgcccagcaacgggtctcaggaaaggctcgttaaattaatgggctgtcaggttatccaaatatggaattatgatttcagcaaaactcttccccacccattgtttgatcaaaccctagcaaccatcctgtgcagtgcagatctcagactctatttagggggctcaggtgcagcccagagaagagaagcgacttgcacaagagctgagagctccccgttaaggcagaattttcctcccccggcagcctccccagctgaggaggctgagccctatgctcatggaatagggtgggggcactggggtcacctgttcccacctctgggtagtggcttgccttgatcaggggccttccagagacagcatcttcacccagaatcagccatcaggaattgtagcccagtgccaggaagcaccctggggggagtaatgggaagttagttccgatgttgaatgcactttggcatgtttcaagcacctcaagtaagggcttgacttaattattcaytcgtccttttagaagtgtttgtttattaactgtagaca

SEQ ID NO: 65436 - DNA, 252 bp, Homo sapiens
aggaaggaaggaaggaaggaaggaaggaagagggaaagggaaagggaaagggaaagggaagaaattcaaaaacttcaggtattctctcagtttcatcttttttgagccctctctcctggaatcccctaacttgatccagtctgtaccgattgctcttaaggaatgctgctatctgtcaacttgggaactcccttcaytgtcatcctggggttctctttgccttctcttacactgagccctctgttttctgga

SEQ ID NO: 65437 - DNA, 778 bp, Homo sapiens
tcttggatttcccagcctccagaaccgtgagaaataaatatctgtggtttatgcattacccagtttatggtattttgttatagctccccaaacagactaagatagtatttaattatctagaggaaggtacctttgacttagtatgagccattaraagaccagactttagaagttatatgttaatatatagatttctgtccagtagaaaatgccccaaaagttacggacttctggcccatcaggacattaaccagttttgtatctcactgagccattgtattccagtattcttttcccagtattctgtagtgctattcctctacttctcctttgaatcagctttatcttcttactggttccctcattcaggagttaaacaaattttgacatgtgttcaacctatatttgaatgagagttatgcttttactctattttttttgaaattatactttgacagcttacgtgtgccccggaaatagggaactcactacctatcaaggaacttggggatcttagaacagctcctaaaacaggcttagggcttcttccttattctcatagctgcaccctctgtccctggttctccctttgagaaaacctcaggaagtgagccgaacccctaattcccacagcagctcatcaaatttggtaatttcctatcgctttgcactctagactacatattttgtgttcagaaaaagaagtcattaaataaataataaaaattgagatctaaattttacttccatgagttgaagaagaatggatccgagaaaa

SEQ ID NO: 65438 - DNA, 2187 bp, Homo sapiens
tgcatttcaattttttttcagtttctactatatactagctaatggattagctttgtagtagtaagttgaagaatgggaagcagaaatagagttgaaaagataatgagatttattaagtccatgctgtggactaggtgtatgatggactttctgtacatatttatttatacaagaatcttataaattaaaaattatcctcacttaatatataagaaaattgagactcagacaagtaaaataactcattcaaggttacataagtgggttttcaatccttattcgtctagttccagtacccatgacctggctctctggaagggaaacaaactgaggaagagaaaaagtaaaataagcagtgaaggcagaaattgctaaactctgtagtgctatcaggggcacatgggcatcttcctggaactagcactaccagagtgtagccctctccctacatcaacaccatttcttcttagtgagctatagagaaacttagaaggcaagacctcaactgcctaagtggacataaatgtaaaatttttatgtcttgtgcaggtcctgactcagagtgaagaacatgaggcccttgctgcctcaggtgaggaacataaagggatgtcaaataaactcagtaatcaaggtaaatgataatgtaatattttattaaatcaaaattaatgcacgaaatccatgatgaacaacatattaacattttaaataaagacaaaatcaatattactgaggttttcttttgcttcatgcttccatgtggcttggcaatggttctgtgttgttactgatcctatcagaccactgagcatctgctagagatgataataatagagtcaaagggtgagtcaaatagtgcatttaaaattcagataataatcatatttaatgactacagcttgaggttttaaaatttcttcatatgtgtaggtgtagtatctttatctattttaaaaattttcttctttctttctttctacttttcttggaaattgtcaaaagtgtattgtattagccttttcagatatcatactttgaaaatatttatcatgtactcctattttttgtttttatttaataattttatgctcatcaattccacctatatcttttctgctagttagtctacacattagttttcaactacaagttgttttttaaatgtccaagtcctctcacattttgcatgcatattatagtttttcatattctattttgtgttgaaaactcttatttcaagagcctttactcagtaatactggatgatggataaattgtgttgtgggtgttcccatggattttcttttgcatatgtgagttccctattcctctggggcgagtgtagctatgtatgttaataaacaaaaatgattcaagtcattataaacaagataatatgtgaagagtgcaggcaatgatatcttgaaaaagaataattggcactgacattgataactcaaattggaataaaagagaattaaatgttcactatcatgtagtgattccttaaattaaggaaggatttggatgtagatttataggggaaacatgttaccaggacattcttaagaaaataaaaggatggctgaaaaaattatgtaaaacctgaagggtcattcaagcaacaaatagacataggagatctcagataacaccaccccaaaaatctagccaaaggatgggccaaaataaggagaaagtaaaaagagacattttatgaaatgacagatgaaaaataagtcctataaaagcagcacatagattaagcaactaaagaaaacttcttgcagactatagaaaaaaaggcttaaatttaagtaaaacaagaataatgcaagttacaaaactccagaggttgcagaagagaattaaaaaaaactgtcctcacatgatctcttataaaaagatgtagactggagcagtctaaaagtaaaatctgaaggtaaaatagaaaccacaggaacttctaccagtaactgcacatttgtaattgatatcaactctcccatggaacacaacaacaaaattttcttygagacactaagtgttaacaaagccatgggaaattgcaaagcccagatccaagagatgagcttgacattgagcatcactttttagctcaagatttttactgattctaggaagttaaaaaacagatcgcaaaactaaggaatacttttggca

SEQ ID NO: 65439 - DNA, 1060 bp, Homo sapiens
gccatgaagaagcgcttgccaaatgattaacattcctgtcgccaattactactgtcctcaagaggagaagacattcacagaagggcattgtctctgctccacagcacacaaagggtcaagcctcacagatttgctcctagttgggggaaaaaccctcacaggtcaaagtgttcagattacagattcaggaaaatccctttgcagaaagaagacagcaaatccccagtgragttgaaaggacaaaactttcttcacctcagagactctccaatgaataaaccggttaaacatggtttggatttagtgaacatgaaaacaactggattaaagtataatctagctagaaaggaaaggacatgtgctgagacaactagctaagtaatgacaaagctgcagtgtttacatctgtcaagcaggaacggccattccagctttataactgaattctcttaaatgtttaatttttctttagctcaacgtgagcctctgctcgtgttggcctctttgataacactggcaccaaggcaactgtgtgagcacgacgggtgtagagtccaggagtctgcaggcagcagctgtcagggcgagtgttcggcatgggccttggccaagctgcacacggtccagcttggaggcagcatccatcgcacaggtgcaggttttagaatcacaaagacttgggtttaaatcccaattgtactttttactggctgtgtgaccttggacaaattaaactctgtcccatttcctctcttggtaaaatgaagataatacccatccaatagggttgttttgagaattaaatgaggtaatacatgtaaaagcctacaccgaaacctaaacactcaataggtggtcggatcaccaatctctttctgtctctcctgctcctgctcccccttgcacacacacctgaccaccaagtgaacctgttccacgtcagactaactccaggcacttcagatcttactctgtgacaggagcattcagagtttttacattagggcttcttaaacgtgtttgtaaagatccctactcaaatatctgtttgtaaaagtat

SEQ ID NO: 65440 - DNA, 815 bp, Homo sapiens
tcctttctrtgtgatgtaatcaggatctttttagttgtcaacaattaagtaaggtcttgggaatgtacctgtagtgttttctgttgtcacagtgtaaaattggaataatgatcacggttgctgtcatggccaacatcatcatcatcatcatcatcatcatcatcatcatcatccacaccattcattgcagagcagcggtgtgagcattcctggatacttgttagaccaggtgttaaattacatgtcacttcttgatttggtgttggggaaaggacatagtatacataatttcatccaatgaactaaaatgaattgtgtacctttgcttgatattgtgtatcactttatactggagataaaaagatacaaaagtcataggccctgcctttatatttatagttaagaaagagaaacagatacaaatagataattctaataatatatgatatgcactttgggacacagatgaggggatttgggtcagcttggatattgaggccaaactaacttttgaagaggaagtaaggataaatagattaaaatggtaaaaagggtgatggcttaaagaaagcaagcaactatcaactactaaatagaaaaagggagaaattctgtggacagtgacatttaaaagtcctcagagaatagacggatcatgaactctaggcctgttttaaaaattaaatttacgaagctttattgtataagttggagggaaaactaaagatggtgagaacagttaggaaatgtttcattagtccaaacaggagatttagttctaaatggcagagagaataaagagtagagaaagaaat

SEQ ID NO: 65441 - DNA, 815 bp, Homo sapiens
tcctttctatgtgatgtaatcaggatctttttagttgtcaacaattaagtaaggtcttgggaatgtacctgtagtgttttctgttgtcacagtgtaaaattggaataatgatcackgttgctgtcatggccaacatcatcatcatcatcatcatcatcatcatcatcatcatccacaccattcattgcagagcagcggtgtgagcattcctggatacttgttagaccaggtgttaaattacatgtcacttcttgatttggtgttggggaaaggacatagtatacataatttcatccaatgaactaaaatgaattgtgtacctttgcttgatattgtgtatcactttatactggagataaaaagatacaaaagtcataggccctgcctttatatttatagttaagaaagagaaacagatacaaatagataattctaataatatatgatatgcactttgggacacagatgaggggatttgggtcagcttggatattgaggccaaactaacttttgaagaggaagtaaggataaatagattaaaatggtaaaaagggtgatggcttaaagaaagcaagcaactatcaactactaaatagaaaaagggagaaattctgtggacagtgacatttaaaagtcctcagagaatagacggatcatgaactctaggcctgttttaaaaattaaatttacgaagctttattgtataagttggagggaaaactaaagatggtgagaacagttaggaaatgtttcattagtccaaacaggagatttagttctaaatggcagagagaataaagagtagagaaagaaat

SEQ ID NO: 65442 - DNA, 815 bp, Homo sapiens
tcctttctatgtgatgtaatcaggatctttttagttgtcaacaattaagtaaggtcttgggaatgtacctgtagtgttttctgttgtcacagtgtaaaattggaataatgatcacggttgctgtcatggccaacatcatcatcatcatcatcatcatcatcatcatcatcatccacaccattcattgcagagcagcggtgtgagcattcctggatacttgttagaccaggtgttaaattacatgtcacttcttgatttggtgttggggaaaggacatagtatacataatttcatccaatgaactaaaatgaattgtgtacctttgcttgatattgtgtatcactttatactggagataaaaagatacaaaagycataggccctgcctttatatttatagttaagaaagagaaacagatacaaatagataattctaataatatatgatatgcactttgggacacagatgaggggatttgggtcagcttggatattgaggccaaactaacttttgaagaggaagtaaggataaatagattaaaatggtaaaaagggtgatggcttaaagaaagcaagcaactatcaactactaaatagaaaaagggagaaattctgtggacagtgacatttaaaagtcctcagagaatagacggatcatgaactctaggcctgttttaaaaattaaatttacgaagctttattgtataagttggagggaaaactaaagatggtgagaacagttaggaaatgtttcattagtccaaacaggagatttagttctaaatggcagagagaataaagagtagagaaagaaat

SEQ ID NO: 65443 - DNA, 633 bp, Homo sapiens
actttttagtagaaatattaaaaaatccattacaaagagaaaactagacctaggaagaaaagaaagatgatgctcatagacaaagtggataagcatcattttagttgaggaagtttctagtgaggatctgagtatcctaatcatttcagaaacccttcccctggatgtttaagttttttgcaagactgggtctcagtttttctctgaactttcacacctsttactcataatgtagttcatggctggctgttttttgcctcagcttctactgaaattgcaattatcatggtcaacaatgatggcttaaatgctaaaaataagtgaacgtgtttcaaacctcacttccttccatctttctatagcaattagtattcttttatcctcaaaatattttgtgcttaatttttcacaaagtaatctccaagttttacacttacattacaaaatttgttttctgggtaggtcaagtcatctttaacatcaaatttcctttaaatctaatagtcttcaaaacttcgtccttcccctcttttcactttgcttctatatgtaatttcatacatttccaaatctttgattgcttctgcaaggtcatttcctcaaaggcaagtgtattgacagatgtattagtca

SEQ ID NO: 65444 - DNA, 633 bp, Homo sapiens
actttttagtagaaatattaaaaaatccattacaaagagaaaactagacctaggaagaaaagaaagatgatgctcatagacaaagtggataagcatcattttagttgaggaagtttctagtgaggatctgagtatcctaatcatttcagaaacccttcccctggatgtttaagttttttgcaagactgggtctcagtttttctctgaactttcacacctgttactcataatgtagttcatggctggctgttttttgcctcagcttctactgaaattgcaattatcatggtcaacaatgatggcttaaatgctaaaaataagtgaacgtgtttcaaacctcacttycttccatctttctatagcaattagtattcttttatcctcaaaatattttgtgcttaatttttcacaaagtaatctccaagttttacacttacattacaaaatttgttttctgggtaggtcaagtcatctttaacatcaaatttcctttaaatctaatagtcttcaaaacttcgtccttcccctcttttcactttgcttctatatgtaatttcatacatttccaaatctttgattgcttctgcaaggtcatttcctcaaaggcaagtgtattgacagatgtattagtca

SEQ ID NO: 65445 - DNA, 633 bp, Homo sapiens
actttttagtagaaatattaaaaaatccattacaaagagaaaactagacctaggaagaaaagaaagatgatgctcatagacaaagtggataagcatcattttagttgaggaagtttctagtgaggatctgagtatcctaatcatttcagaaacccttcccctggatgtttaagttttttgcaagactgggtctcagtttttctctgaactttcacacctgttactcataatgtagttcatggctggctgttttttgcctcagcttctactgaaattgcaattatcatggtcaacaatgatggcttaaatgctaaaaataagtgaacgtgtttcaaacctcacttccttccatctttctatagcaattagtattcttttatcctcaaaatattttgtgcttaatttttcacaaagtaatctccaagttttacacttacattacaaaatttgttttctgggtaggtcaagtcatctttaacatcaaatttcctttaaatctaatagtcttcaaaacttcgtccttcccctcttttcactttgcttctatakgtaatttcatacatttccaaatctttgattgcttctgcaaggtcatttcctcaaaggcaagtgtattgacagatgtattagtca

SEQ ID NO: 65446 - DNA, 636 bp, Homo sapiens
tttaaagcaaaagattttatcaataaaaagtttcatttgctctttttaaagacttgaaataagatagaaagtgatttgtatcattcagggatcattgacatacctagctgaagaaatagatatgggcttaaagatgatctttccaataagagattatagtctttctcacttggaaaattggtttgttgatctggaggggaatggggggctatttcatggtttctgaaggccaagattccctctgagtggatttatcgtttgagccacctgtgtacttagactcccactcactttcttcaaggagaatcctgctgtctatggatttagccaggtttaaaatatatttatagtaggaactaccaaacattatctcaagctgagctataagaaagcccatcaaagttaacttccaaggcattctgatagttatgccttgattctggatcttgattttcccacacttctgttttcctttttatgtggaaaaaaaaatcagaggaaaactcagtattcagaaagaaaaaatgtacaggaaaataccagcctggacaatgataggtaaaggaatgccaggaactctgccractgctaccaggatgacagaatctagcttcagaatccagttgctggaggctt

SEQ ID NO: 65447 - DNA, 1043 bp, Homo sapiens
atttggacacaggccattaccagttaaatgattctaacaacaccaacataagatatcaaaactaaaaatcttttccctagaaataatgtttcacttcatcctgcatttgaaaatcctttattttatcctgtaagaaattctctcagaaacctaatttatctagaatttcaagggccaagcttaatttctgtaaccatatagtttcgttctgccataattatatgtcttttaagaaacattccatgagttgtccttgtagcccaaatgtatccgtttttgttaactctggaaagtgcaagtctagggtatttcacttttggaaacaggacttgatacaatgagccatgaagatttgacatgctggggttgtgtctcctaagagaaaatcaactctgtaatgtggttccagaccgagacgggaatcacagcgtgtccccttgagctgacagcattgtgagggggagtgtggggagtcaggaagggttcaccattaggctaggaggggtgggttgttctcctgagaatggggctgcaatgtttttggaaataagtgggccccttgggcttgtctccttggttttgtccaggctcagtggagcactgttggctgggaggaaacatggccttcgatgttgcccacttggcagtttccaccattgttgactcacttaggctgatggcagctgcctctgctgggaaggaagcgtttttcccayaacatattaaatgcggcactggaggatggctggctggtccaggggccggatctggctctgttgctcacaatgattctgtttggcaagcgtttttaaaaagccttggtaagttccagatggtgaccacttgcctcatttatcctccatttgaaaaatttcaaaaactattcatttgtttgcataccaaggcagtacagaatcttctacagtggcacttcgatggtaagaattggggtttttttcctgtgattctttcctccgtgttgtggtttatttagcagtgattggcttctttgtctgcttttagaattgggtatatgtttggat

SEQ ID NO: 65448 - DNA, 505 bp, Homo sapiens
tgctacactgtggaaggggagcacacatctttgtcagacatctgactgtctctgacactgtagaatatcactcatgctttgttctcattaaagaatcctaatgtcatgtacttggaatttttttctgaaggatttgaagactctacattcttaaaaagatgctttctcctgcagaatctgccatcttagccctgaggggtcaagcttcatgggcataaccctccacagcttctgctgggtcttgcatccttgacttcttgtgctctagcgactctgtgggaaggagtcagctgctttcacgctacagacagcatttctattayaattgtcacctttgatttctgtgacatcattgatatcattagggagaggcttttcttgggccattaagaatgtcaaatttggttcagtcagaaagcagtgttggagaaattcactgtgaacactgcatgcaacgtaattccacataggcatctaggaagcctccaatattgcgtggttgagc

SEQ ID NO: 65449 - DNA, 588 bp, Homo sapiens
ctccagggagattgtctctcattagaggctgaagtggcccctgtgtgtggttgctcagtagctcagctggatgctgctttgggaggctatataaagaaaaacaacatcagtataattataagccaaaaaaaaaaaaaaaaaaaagaacaaaacaactgtcagagtcagatgcttgtcatgtgattttataaggttggtgtgccttttcttgagayttggtaaatggaaggcttgagatgtgggctgttattgaaataagaaaataatacccttctgttcgatatcactgacacaaccctgaatgcaggagaaaaacaaaaaccaagccctttaaaatacatctgccattttaaatgtgttgctgcactttgctcttcggcaaagccgttttttgactcagttgtgggatctgatttagttcggagctgctgtctgtatcattttgttatggttaatgctatgccagggaccagcgaagcgtaaaaggccatctttgttctcagggcagcaatgatttctatgtccttaaggttgaagaaaaagagtgatattcttattttgttggctggaacaccaaaaagaataaaa

SEQ ID NO: 65450 - DNA, 588 bp, Homo sapiens
ctccagggagattgtctctcattagaggctgaagtggcccctgtgtgtggttgctcagtagctcagctggatgctgctttgggaggctatataaagaaaaacaacatcagtataattataagccaaaaaaaaaaaaaaaaaaaagaacaaaacaactgtcagagtcagatgcttgtcatgtgattttataaggttggtgtgccttttcttgagacttggtaaatggaaggcttgagatgtgggctgttattgaaataagaaaataatacccttctgttcgatatcactgacacaaccctgaatgcaggagaaaaacaaaaaccaagccctttaaaatacatctgccattttaaatgtgttgctgcactttgctcttcggcaaagccgttttttgactcagttgtgggatctgatttagttcggagctgctgtctgtatcattttgttatggttaatgctatgccagggaccagcgaagcgtaaaaggccatctttgttctcagggcagcaatgatttctatgtccttaaggttgaagaaaaasagtgatattcttattttgttggctggaacaccaaaaagaataaaa

SEQ ID NO: 65451 - DNA, 1170 bp, Homo sapiens
cacttctctctgactcccttagttattactcttccatatgcttaaagtcagttctcacaatttttaaatctgtctccctttatgttctaagaaatttccccaactttatttactagattagtaatctatttttacctatatccttttgtgatcaaaattttaatttccaagaattcttcagtttgtgattgctgctttcacgggccagtagtctttagaatttccttcaggatattaattaggaccgatttaatgttttcttcagttctttgaattatctctgttgccaaccattctgttagctcactcagttttctgttcaataccattagtttttatccagtgcctggtgatcctttgttgccagccgttttatgagtaatacactaggttgactaatgtatagacctagcatggctttcctctgtttctcattrtgcgtctccactgcctggaaggggaaaaggaggccccagtcagcctgcctgcttcatacccacaatcctccatggtcctcctctccattggtaaaataagtcatatattagttattcaaggacattagtgtatttgtctctcaccctacctttgttggagatttagcatagatttagagctccttcaggcctttgggcaagcaccctccctccccactcatcccaaagtttgagggatccaggcccattggatttctaagggagaggaaactcagaagcttagttctgaacttgagttgtaataatacttgcggtaatacaatgaaaagactttctggaccagaattactaggtatcctaaagatactaaattttaatacagaaatgtccagctataacagcatgatagctagagcactacctagagcactccttgggcaacatcttcactttcctgaagttggagttacttttagcttggtagcaagcactccaccaccttttgttcagtgtgagagaatgaggagggggagggctagcctaaatattattaacggggcttaaaaaaatttttttcctgattattgtctcactctctctttctcctcttcctatgagtttactgggtgacaacagcaaatccagagaagcatacgttcagagaggttttcttttcagcttgtgttagactgtggcgccctctgctcttgccaaacttattccttctactttc

SEQ ID NO: 65452 - DNA, 811 bp, Homo sapiens
aagaactgtgggaggagaggagaggaaagtggtatttgaatcaggttatttccccacttcttttggtctttattgtcaacttttcatagagtagcagataggtcaccatactaaagcttacccacaatgaatctgacttttaccttttcttgaaaattataacaccaactcctttttcaatactatgtctacttttctcactgtttttttaaaactgctatgcagactctcataccaaaaatgcttagtgatgttagactattctgagattaaccttcctgaaatctggatcaaccttggttttcctcccttcactctcatcccctcacagctttcaaggtaaagtttaaaccgtttaggatggtatcaagttctaactgaggtccaacgggagtcagtgggcgagtggcaggtagctgggaaaaacactcgaggaatcgtaggcagttttgacatagctttactatcttcttgggcatgagtgagctgtatgtacagtgttagcagggtaattttactttttacagacaatagtggctctgagccaagtaccagctcatgtgggtgatcatctaatgcacctcacatggcatggttatgtaatgtgtgaggttgtgcacctctgctccaaacccactgagtcatgctggaccagatgtctgccttagcctattctcgatcacagcacatccattttccttacactccacccactaggctgagggcatcctctgggcagggacacatgctcatagggaagagccctgaatmcataacccaaaacaacaatacagagagcaacagctcacta

SEQ ID NO: 65453 - DNA, 811 bp, Homo sapiens
aagaactgtgggaggagaggagaggaaagtggtatttgaatcaggttatttccccacttcttttggtctttattgtcaacttttcatagagtagcagataggtcaccatactaaagcttacccacaatgaatctgacttttaccttttcttgaaaattataacaccaactcctttttcaatactatgtctacttttctcactgtttttttaaaactgctatgcagactctcataccaaaaatgcttagtgatgttagactattctgagattaaccttcctgaaatctggatcaaccttggttttcctcccttcactctcatcccctcacagctttcaaggtaaagtttaaaccgtttaggatggtatcaagttctaactgaggtccaacgggagtcagtgggcgagtggcaggtagctgggaaaaacactcgaggaatcgtaggcagttttgacatagctttactatcttcttgggcatgagtgagctgtatgtacagtgttagcagggtaattttactttttacagacaatagtggctctgagccaagtaccagctcatgtgggtgatcatctaatgcacctcacatggcatggttatgtaatgtgtgaggttgtgcacctctgctccaaacccactgagtcatgctggaccagatgtctgccttagcctattctcgatcacagcacatccattttccttacactccacccactaggctgagggcatcctctgggcagggacacatgctcatagggaagagccctgaatccataacccaaaacaacaatacagmgagcaacagctcacta

SEQ ID NO: 65454 - DNA, 663 bp, Homo sapiens
agccccacatctgaaatgggactcccttgtagagcacctgagacctctacagacagaagagtgctctggtgagacaggccacagaggtccccggggggggggggggatcaggggctggaggattctggaggtttccagccttgggctctgtggttcctcaaagagtttaggtttacctaggactaggcctcccctcccatgattcaaagagtgggtgagtgctatgcatcacgaactctgatctggacctattttttcatttaggtcaccaagagacaacccctaacccccmagctagggatggtccaagctctggcatgagattctcttccagcaatgtgatgcttgcagggacagggagaaaagccggtgaccaggcctgctgtcccccaggtaaggacagtgtgctacccaccctctgagaggcaggtggtgccaggtcactgcactgggtgcctgtacccctggctctgcagacaccagtcatggaggtcctcccctctccacattaccttcttgctgctcccagatttcttctggtcattaagcactttgagccatttttctgtgcagccgatctgatatttttgctatcagatgaaacatgacaaagtaagccgagccaccaggattcctggagggaaccttggatgctgcgtcttg

SEQ ID NO: 65455 - DNA, 663 bp, Homo sapiens
agccccacatctgaaatgggactcccttgtagagcacctgagacctctacagacagaagagtgctctggtgagacaggccacagaggtccccggggggggggggggatcaggggctggaggattctggaggtttccagccttgggctctgtggttcctcaaagagtttaggtttacctaggactaggcctcccctcccatgattcaaagagtgggtgagtgctatgcatcacgaactctgatctggacctattttttcatttaggtcaccaagagacaacccctaaccccccagctagggatggtccaagctctggcatgagattctcttccagcaatgtgatgcttgcagggacagggagaaaagccggtgaccaggcctgctgtcccccaggtaaggacagtgtgctacccaccctctgagaggcaggtggtgccagstcactgcactgggtgcctgtacccctggctctgcagacaccagtcatggaggtcctcccctctccacattaccttcttgctgctcccagatttcttctggtcattaagcactttgagccatttttctgtgcagccgatctgatatttttgctatcagatgaaacatgacaaagtaagccgagccaccaggattcctggagggaaccttggatgctgcgtcttg

SEQ ID NO: 65456 - DNA, 663 bp, Homo sapiens
agccccacatctgaaatgggactcccttgtagagcacctgagacctctacagacagaagagtgctctggtgagacaggccacagaggtccccggggggggggggggatcaggggctggaggattctggaggtttccagccttgggctctgtggttcctcaaagagtttaggtttacctaggactaggcctcccctcccatgattcaaagagtgggtgagtgctatgcatcacgaactctgatctggacctattttttcatttaggtcaccaagagacaacccctaaccccccagctagggatggtccaagctctggcatgagattctcttccagcaatgtgatgcttgcagggacagggagaaaagccggtgaccaggcctgctgtcccccaggtaaggacagtgtgctacccaccctctgagaggcaggtggtgccaggtcactgcactgggtgcctgtacccctggctctgcagacaccrgtcatggaggtcctcccctctccacattaccttcttgctgctcccagatttcttctggtcattaagcactttgagccatttttctgtgcagccgatctgatatttttgctatcagatgaaacatgacaaagtaagccgagccaccaggattcctggagggaaccttggatgctgcgtcttg

SEQ ID NO: 65457 - DNA, 501 bp, Homo sapiens
tctaataaaaatacaaaaattagccgggtgtggtggcacatgcctgtaatgccagctactcaggaggctgaggcaggaaaattgcttggaggcataggttgcagtgagccaagaccgcgccattgtactccagyctgggaaacaaagccagactttttctcaaaaaaaaaaaaaaaaaaaaaagaatattttggcattcaaaaaaaatttcaccttgccccagcagctcagctgactcccacccccatgacacacgtctaaaaagttgtgctgtgagtttctgaaatacattttaaaatagaattcatttaattatgaaaatgcaaacataaaatgaatttgtatctaggttttagtcaagtaaaattagagttaaatcaattaataaatggctaacatgttctacaatatgaaaaccatacccagttgcctcttcttctaattcatcatttttctttcttattcgattcacattatatttcagtgatgatattaactcaa

SEQ ID NO: 65458 - DNA, 501 bp, Homo sapiens
tctaataaaaatacaaaaattagccgggtgtggtggcacatgcctgtaatgccagctactcaggaggctgaggcaggaaaattgcttggaggcataggttgcagtgagccaagaccgcgccattgtactccagtctgggaaacaaagccagactttttctcaaaaaaaaaaaaaaaaaaaaaagaatattttggcattcaaaaaaaatttcaccttgccccagcagctcagctgactcccrcccccatgacacacgtctaaaaagttgtgctgtgagtttctgaaatacattttaaaatagaattcatttaattatgaaaatgcaaacataaaatgaatttgtatctaggttttagtcaagtaaaattagagttaaatcaattaataaatggctaacatgttctacaatatgaaaaccatacccagttgcctcttcttctaattcatcatttttctttcttattcgattcacattatatttcagtgatgatattaactcaa

SEQ ID NO: 65459 - DNA, 676 bp, Homo sapiens
tccagtgagcacaaattgtctagtggtttttttagatggtcttcctccttggctcatttctctccaagaacgaagatatcaaggtgttcatttaacagcagctcctgaaagacaatccagcttggtttaaatctttaacggttttcattataatagaaaatataatagcaacagtagcatcctctgttacattgaaattaaattgcaattctttcactgttggggtggcaagtataattcctatcacttctttggaaagcaatacaatttactaaagatcaccaaaatgtttatactttttggaaccaaaaacctcactgaaaaattttattccaagagtatgattcaacagaaaaaaaaaagtaatatacatgtgcatgtttctccctgtgaaaacaacagcacagaatttactagacaagttttgaaacagttggctatgtggtaacgtggaacaacattctcctataatgttgaaggataaaagcttagagaayagaatatattctatgactgcaactatgaaagaaaacatagatctacatagggacaaagatgataaacatgcgaaaacaggtgttagattcatggattatgtgtatttttcctgcattcaaatttatctttattattgcttttttatgttcccctctcctcccccgaaaaaatcctaaag

SEQ ID NO: 65460 - DNA, 946 bp, Homo sapiens
atcattaatttggccagcggaaggagggtgaccaaaatttcaaaggatttgctctgtttaagtaatctccaaatatttgttatgttgaagtatattacaggtaaatggctggatctrattttcagcattggagatgctcagtgattacagtcgtaattggacttcaggtgacaaatagtgggcaattttgccaactcatgctttaccttgtcttaattaaagtgatgttgtgccgttgtgcctcagccagcctgacccagtcacggtgaacacagatacccaatcatttactgctggggaaagttcaggtttgctattccaaaagactgaaagcccattctttcaatttctcccttcttccctcaaagctttatactgtatttgagccatacaatggcaaccagattcttaatcttatttaaaaattgttgatactctgaagggcagtgtataagctaattttataatttggaaattggaatagacaaaatttgggggcaaagtttatggcccaattagggaaacaattaggttatcctgccctctcatcagtatttgaagaagtatatttgtacgcatctacaatatacatctattattagatggaaagtattcacgtgtaatcaaatctttatgatttaaaaatttggaattcaaattgaagaaagttttaacttgcatttgccaaagatttcgtctaaacaacaattttctaagagtatctttatatatgttaacaatatcacagtggtgtccactatatatcattttgttccatgtgtcctggcacaggccacacagtgtcatgactgctagttattgctgtcattcaaaaactcagttattaatgtattcttgaatcagaaacagtgattcatagtttgataaaatattctgttgccattgagcattcctttatttctaaaatgtagcatcaattcgatgc

SEQ ID NO: 65461 - DNA, 946 bp, Homo sapiens
atcattaatttggccagcggaaggagggtgaccaaaatttcaaaggatttgctctgtttaagtaatctccaaatatttgttatgttgaagtatattacaggtaaatggctggatctaattttcagcattggagatgctcagtgattacagtcgtaattggacttcaggtgacaaatagtgggcaattttgccaactcatgctttaccttgtcttaattaaagtgatgttgtgccgttgtgcctcagccagcctgacccagtcacggtgaacacagatacccaatcatttactgctggggaaagttcaggtttgctattccaaaagactgaaagcccattctttcaatttctcccttcttccctcaaagctttatactgtatttgagccatacaatggcaaccagattcttaatcttawttaaaaattgttgatactctgaagggcagtgtataagctaattttataatttggaaattggaatagacaaaatttgggggcaaagtttatggcccaattagggaaacaattaggttatcctgccctctcatcagtatttgaagaagtatatttgtacgcatctacaatatacatctattattagatggaaagtattcacgtgtaatcaaatctttatgatttaaaaatttggaattcaaattgaagaaagttttaacttgcatttgccaaagatttcgtctaaacaacaattttctaagagtatctttatatatgttaacaatatcacagtggtgtccactatatatcattttgttccatgtgtcctggcacaggccacacagtgtcatgactgctagttattgctgtcattcaaaaactcagttattaatgtattcttgaatcagaaacagtgattcatagtttgataaaatattctgttgccattgagcattcctttatttctaaaatgtagcatcaattcgatgc

SEQ ID NO: 65462 - DNA, 697 bp, Homo sapiens
agattagagcagaaggctgggtgcagacaaaggcctgctcactttgggttggagaattcattcagggaagacttcttgaagagcctgaatcaattgtgttgccttccaagggaggtaacattttgtgaaacttgtccaaagcaggggagaagtgtgaagagggagagccctagaatctagctgcctgggttgacggcccgccttgctccttccttrctggctgtgtgagcctggggaagtcacacatcctctctgagtctgttttaacatctgaaaattagctaataatggtaaccacttacagaagactgggggtggatctaattagataataccgcgaaaacattgagcccgtgactggcacacactatgcctgcaatacattttagcttttaaaaacttttgttgtgtgaggtacccacgcataggtaacttggtgtacacctggggcaagtcacttcacctctctggccccgggttgcttcatgtgtaaaatgaggaactcaaattcagttcttcccagctttcacattctatcactgcctgggtccttacgttgtgggttggaagtcagctggagtttttctttaatctagtctttctcccttataccttctcgatttagctcctgggaaaccttgttagctttcgttgaaaacaagaaagacaaatccagttgggtgttaggaaggcaagg

SEQ ID NO: 65463 - DNA, 562 bp, Homo sapiens
tgagctgcagtgagccatgatcgtgccactgcactccaggctgggcaactatctatctaagttcctatctaaaagagtaagatcctatcgaaaagagaaaagaaaagtcaaaacgttaaaaaargtttataaagtaaaaagcttacagtaagttaaggttaacttattattaaaaaataaaaaatcttttaaaataaatgtagtgtagccttactgtacagactttataaagtctacagcaatttaaagtaatgtcctaggccttcacctttactcaccactcactcactgactcacccagagcaatttccagtccagcaagccctgtgcattgtaagtatcttaaacaggtataccattttttatcttttatatcatgtttttactgtaccttttgtatgtttagacacacaaataattaccattgtgttacaattgcctacagtattcagtgaagtaacaagatgtacaagtttgaagcctaggagcaataggctgcaccatacagctaggtgtgcagtaggctataggtttgtgtaagtatactctatgatgtttgcgc

SEQ ID NO: 65464 - DNA, 1015 bp, Homo sapiens
gatcactatttgtttattagagattcttgattgagaaatattgagttgtttaaagatatcgatgcttcataattatgttgtattttaatttaaattctgcttaaccttgtgaagaagaaagctgtagttttatcaggtatttgctttatgcaagggcaaccaagacactgaaagtttgtgtctgtccaaagtcacattcttaaataaacttggaaagaatcatgatgccttccctgttaggctagtagtgattattttcccaatacatttcactactgtatccttaatttgtcttggacatatctctatagaatcagacagaatttagagatgatactagattttgaaagcattccacattttagtctaggcccagatttaattgataacataaatgttgaaacaattcaactttttttttaattgcagagaagccttaaaacataasattattttagtctaggcacagatttaattgataaaataaatgttgaaaacattcaacttttttttaaattgtagaaaagctttaagacataacattttttaaaatacaacagcgtgaaatccagtaggattttatggtttgaaaccaggaaagacatctaacagctggagaacagaaattataaaaatattctcatattcccagaaagggaatcatagttattgtattactttaaaataagtaatttataatgttatttatattaatactttgttggttatcatagtttcttagtaagtacaaacttttttgagacttgttatattagaaataaagaatcataatgcccattgtaaagatttttaaaaatgatgccctaggattaattagaagtagtaggaagagctatacacttcttttatacctttcataaagtattgagactctttgataatgtgccaagaaaaagcatatgtactcaatatatacggtgtcatctatcaaacctcatgtcatcctagctgagttatagaattttatatttaaaatgttattaatattactgct

SEQ ID NO: 65465 - DNA, 703 bp, Homo sapiens
gatccatttgtttaacagtggcttcttgatcaataattgcatgcatgaaacaaagtatcagaaatagtttgctctttacactatcaattggctgatatttaaacaaattgtctttaaagtcactgccgcaattttgtttggcaatggcattttatttaattcatttattaaatgagtttccaaaaattaagacctgaataatttatgacttcttctaatctcaacagaaataagtcaatgctggctgggtgcagtgactcacatctttagtcccaggtacttaagagggtaaggctagatgatcgcttgagcccaggagttgaagactgcagtgaactctrattactatttcactccagcctgggcaacggaaggagaccccgtctcaaaaaaataaaaataaaaagtaaaagaaaagagaaagaaataaaacaatgttaatctgtgtcttggcacaaagtttcacacttccatcaaatgggcatcattttgtgctgctaatgtctcttagggtgattttaaaacaaactaaaaatatgaaacactggatagtgttagccttacctagcttgattttctttgggtgtacatgaatgcaaataaattctacaatttcttaaattcatatatatgtatatatgcacatacatatattcatatatatgtttatgtgtgtgtatatacatgtataggtatggtgagt

SEQ ID NO: 65466 - DNA, 703 bp, Homo sapiens
gatccatttgtttaacagtggcttcttgatcaataattgcatgcatgaaacaaagtatcagaaatagtttgctctttacactatcaattggctgatatttaaacaaattgtctttaaagtcactgccgcaattttgtttggcaatggcattttatttaattcatttattaaatgagtttccaaaaattaagacctgaataatttatgacttcttctaatctcaacagaaataagtcaatgctggctgggtgcagtgactcacatctttagtcccaggtacttaagagggtaaggctagatgatcgcttgagcccaggagttgaagactgcagtgaactctgattactatttcactccagcctgggcaacggaaggagaccccgtctcaaaaaaataaaaataaaaagtaaaagaaaagagaaagaaataaaacaatgttaatctgtgtcttggcacaaagtttcacacttccatcaaatgggcatcattttgtgctgctratgtctcttagggtgattttaaaacaaactaaaaatatgaaacactggatagtgttagccttacctagcttgattttctttgggtgtacatgaatgcaaataaattctacaatttcttaaattcatatatatgtatatatgcacatacatatattcatatatatgtttatgtgtgtgtatatacatgtataggtatggtgagt

SEQ ID NO: 65467 - DNA, 703 bp, Homo sapiens
gatccatttgtttaacagtggcttcttgatcaataattgcatgcatgaaacaaagtatcagaaatagtttgctctttacactatcaattggctgatatttaaacaaattgtctttaaagtcactgccgcaattttgtttggcaatggcattttatttaattcatttattaaatgagtttccaaaaattaagacctgaataatttatgacttcttctaatctcaacagaaataagtcaatgctggctgggtgcagtgactcacatctttagtcccaggtacttaagagggtaaggctagatgatcgcttgagcccaggagttgaagactgcagtgaactctgattactatttcactccagcctgggcaacggaaggagaccccgtctcaaaaaaataaaaataaaaagtaaaagaaaagagaaagaaataaaacaatgttaatctgtgtcttggcacaaagtttcacacttccatcaaatgggcatcattttgtgctgctaatgtctcttagggygattttaaaacaaactaaaaatatgaaacactggatagtgttagccttacctagcttgattttctttgggtgtacatgaatgcaaataaattctacaatttcttaaattcatatatatgtatatatgcacatacatatattcatatatatgtttatgtgtgtgtatatacatgtataggtatggtgagt

SEQ ID NO: 65468 - DNA, 716 bp, Homo sapiens
aaaccatcataaaatgctgaatctttctagtcaattttattgcaaataactactgctaaaataaagtagaattaggtaagtaacttttttgataagcatttacattcttaagatgtgctactgttcagtatgtgtgaactcctaagttgccagtacagtgggtgctattgctatactaacgcatttcacctgtcctttacctcctcttccagaggtgcrtactacgtgaagttttccaattgctgctgctttatttgcatttagtcacccagccaaaggttctcacattttatgatgctttataaaaagcttcaagagcatattttaaaagcaccctgtcagaccccatgaatacacactctgaatcaattgttacagattgaggccaacaaatattcattttttcaagctttcctggtagctcttactaattcatccaagaacatcttgttgaggaatacacaaaagattttgactgcaggattaacctatttataccaaagctttgtattcctggaatggagcagttgcaaatgctgatgactattgcattaattgatgctttgagatgtagcagtactcaacctgttctctaacatctgacactctgtgggaaaacaaaccaacaaacaaacagcaagaaggagtggttgaaatagcaaatagtcaacctggacagtatctggcctcccaagggaggcagaagtagtcctgag

SEQ ID NO: 65469 - DNA, 636 bp, Homo sapiens
tggcattaggcccttgtttccagttttatcttccattacttggtttacacggaaagaaagactggcatagatacatacagaaatattagtcttaacccactgtgcattgggcctaacctggttcatctaggaaacctcctcacactctttctattcagcctgagaaactatggggagtgataaggtttgctgaattttgaaacaacatatgagaaataacaacagagagggatggagctagaacaatctatctgagaacaattttagagcaggacagtcgattttagattatacacaggaaaaaggtctcagaaaaagtagtaagacacagaaggccacctaatgccaaggtacagaaatttaaaggaagtctccaaagctaagataaggtaaaataaataaataagattacagaaacagcccacagctaaagagagtaggaagtttgccctcagaacttctgagttctgacagtccacagctaaagagagtaagtttgccctcagaagctggggcaaactttcacgatatgttgcagccttccattagatcctctacattaacccattgccttcagagcccttttagaagctggaargtaaactcaaaattctcccatcacattttgtccttgga

SEQ ID NO: 65470 - DNA, 681 bp, Homo sapiens
atagcccagctctctctggaagatggtgggatgaaccaaatcctaatttggctaaacagtcaaagaacaaatcagttcaagcttacccaaatttctactccacagtggagaaacacagtcaacacttaccagtttaccttattcggttagcataagctkgctaatcagatgatgacagtacaataaagaaaactttcaagtcaattttacccatgagcatagattccaagaattcttgaaaattattagcacagtgaattcagcaataataataaaaaatacagtacaggccgggtgcagtggctcacgcctataatcccagcactttgggaggccgaggcaggtgaattgcccgagctcaggagattgagaccacctgggcaacatggtaaaacccgtctctactaaaaatacaaaaaattagccaggtgtggtggcaggcgcctgtagtcccagctacttgggagactgaggcaggagaatctcttggaccctggaggcagaggttgcagtgagccgagatcgtgccactgcactccagcctgggctacagagtgagactccatctcaaagaaaaaaaaaacaaaaacaaaaaaccccagcatattatgatgaagttatgtttatcttatgaatgcaattcctattattaggaaattaattaatataattcattccatt

SEQ ID NO: 65471 - DNA, 681 bp, Homo sapiens
atagcccagctctctctggaagatggtgggatgaaccaaatcctaatttggctaaacagtcaaagaacaaatcagttcaagcttacccaaatttctactccacagtggagaaacacagtcaacacttaccagtttaccttattcggttagcataagctggctaatcagatgatgacagtacaataaagaaaactttcaagtcaattttacccatgagcatagattccaagaattcttgaaaattattagcacagtgaattcagcaataataataaaaaatacagtacaggccgggtgcagtggctcacgcctataatcccagcactttgggaggccgaggcaggtgaattgcccgagctcaggagattgagaccacctgggcaacatggtaaaacccgtctctactaaaaatacaaaaaattagccaggtgtggtggcaggcgcctgtagtcccagctacttgggagactgaggcaggagaatctcttggaccctggaggcagaggttgcagtgagcygagatcgtgccactgcactccagcctgggctacagagtgagactccatctcaaagaaaaaaaaaacaaaaacaaaaaaccccagcatattatgatgaagttatgtttatcttatgaatgcaattcctattattaggaaattaattaatataattcattccatt

SEQ ID NO: 65472 - DNA, 748 bp, Homo sapiens
tttcttgggatgaaatcttccctccctcaagtatccctctaatgaaaagcacccttgtcttacccctggaaactctctttctctatttcttcctccacccccaacccttggcttcaccctcctgtggccctttgtcccaggcctcagcctccagccctttcccagcctgggccgggccactgccacccctctattccccactcccctttcccctgctgggcccctctcaggaggcccccggtgaggtcatccctgtgtcaacaggagctgcacaatggggccggcctctttctgctgaagagggagaattggggtgggggagaaaaaggcaggagactctgcaattacagggtccacaatggggccgtagtcgagggggctggactgggtggcgggggggggacctctgctaattagagccgctgcatggggactctgtggtgggggaggggctgtgggccaggcagggcctgggaagatcagcccaggtgggtcctgacgttcctagttcaattgttckttcgttcatctgtgccgtaaatattgcctgagcacctactatgtgtcaggcactgtgtgaaacaccaaggacacagcagggacctcagggatggggccctaccctgatggagccaaccccgtagagggtaagacagaaagtaaacagataaacacacacaacagataaatgtgtgccagactttcaagacgagtcgagtgccatgaaggaaataaaatatcatgaaat

SEQ ID NO: 65473 - DNA, 601 bp, Homo sapiens
tgtttacyttattgtcccccctccaccccgtcccatgttcctcaagggcaggagcctctttgtttttccattgccctttctggcacctggaacagggagagcatgtagggccttggctaatggttgttgaataagtcatgcgttcattcattcattccatccatccatcctcccccgtagttccattttggggaggcatctgcagccccatcaggatgcatgacttgcttaaggtcactccgctggactgagagccaggctgggagcccaggcggtctccctgcggcgggtcccggggcaccactgcatcgctcgcgtgctgtgctgttttgaggaccgggtgtaaacgcttcctagctcaaagctgtttgtttgggagatgctgcgcctcctccgtggatcggctgcacggcggagaatgctcgcctcctcgcacggtggctaacgtgctgctgcggctccataaatattaaatgggcattaaaagaagccgttgcgtttccagtttcccggatttctctgagcagggcccgttgcgaaccccctttatgtgaaatgcagcatttcagcgcggagcgcctccgggagccttgccgcctgc

SEQ ID NO: 65474 - DNA, 572 bp, Homo sapiens
cttckcactgaagaaatattcttcagccaccgaagactgattagtcctccaaatatctattcctttgcatgttatgtgttcttgaagatgtatcaaaaactcactaacgaatatacagtatccatatattttgtgatagattaaatattaattttgagcatgacttgtaaattaaaagtataattgcttgattaattttgatcctataattatttaagaattgaggcagctaagtatgccactatcacataaaaacagaatttctgaatcctttgacctctaatgattatattgcctgccctttaaaattaagaatttggattaaagaagagttatttctcccagattcatatggttcttaatcatcacctatggcttaaaatcaaatctcaattctcaacaaattaattacctactaggcattatccaatttcatcacttgctaaattcttaccggctgacttgggtacacacagcaagagagttatcatctgaagatatctatgagtggttatttcactccaaaaacagacgataataaattttgcattattcatttattgtatctaaca

SEQ ID NO: 65475 - DNA, 572 bp, Homo sapiens
cttcgcactgaagaaatattcttcagccacygaagactgattagtcctccaaatatctattcctttgcatgttatgtgttcttgaagatgtatcaaaaactcactaacgaatatacagtatccatatattttgtgatagattaaatattaattttgagcatgacttgtaaattaaaagtataattgcttgattaattttgatcctataattatttaagaattgaggcagctaagtatgccactatcacataaaaacagaatttctgaatcctttgacctctaatgattatattgcctgccctttaaaattaagaatttggattaaagaagagttatttctcccagattcatatggttcttaatcatcacctatggcttaaaatcaaatctcaattctcaacaaattaattacctactaggcattatccaatttcatcacttgctaaattcttaccggctgacttgggtacacacagcaagagagttatcatctgaagatatctatgagtggttatttcactccaaaaacagacgataataaattttgcattattcatttattgtatctaaca

SEQ ID NO: 65476 - DNA, 543 bp, Homo sapiens
gaatcacctactctggagtgacttgctaagtgctgtggaattgcaaaggcaaagaacctttctcttaatcagctcagactcttagtggaaagcaagttacaggcattgagaattttaataacaaacaatttttttgattgaatttgttttaattattatacttgaagttctggggtacatgtgcacaaggtgcaggtttgttacataggtatacatgtgccatgtttgtttgctgtgcccatcaattcctcatttacattaggtatttctaagagaaaaccaaacactgcatgttctcactcataagtgggagttgaacaatgagaacacatggacacagggtggggagcatcacacacaggggcctgtggggggcgggtgagggttaggggagggatagcattaggagaaataacaaacaatatttatcgagtatttgctatgtgccagggaccatactcagtgttttataaacatgattgttaacccrtttagttgttccaataatcctatgcctcaaataaaatcataatccccatttta

SEQ ID NO: 65477 - DNA, 785 bp, Homo sapiens
atccatctgtactatggattttcatgrtatcacttatggatttttttaaaaaccatgaaagtattatttagtctatctgatgtgttgttgctagctcaacattgggtgggcaaaacactatattccttgtatttctgtgctgttttgctcttcctctaaaagaatataatgggtatttcttggttataatgatgaaataagattaaactacatataaggcacttaaaaagtaggctctaagttatgttatacaaatatgagtactgtatttacttaccttaaattaatttggactatttcttcagagataatttgaagcttgagtttttgtgaggatcaaatgttagcgtacttactaacttactgctctttgaagtgtatcacatctgaaaatccaagtttgttttctcttgcttatggaacataaataggaaaataccagaggaaatgctgttttgctatcattgccagaccagtcacaagaaagcattatttgtagcagttaagattcaaaaatgaacagagggctgggcacggtggtttatgcctataatcccagcactttgggaggccgaggtgggtggatcacctgaggtcaggtgtttgagaccagcctggcgtttaagaaagaaccaaacgactcttctgaaaataaaaatgtataataactttaacatggtaaaacctcatctctcctaaaaatacaaaaattagctgggtgtggaggcaggcacttgtaatcccagctacctgggaggctgaggcaggagaatcgcttgaatcca

SEQ ID NO: 65478 - DNA, 524 bp, Homo sapiens
cttactgctcacagaaagagtgtcaacaacacaatgtactatttagaaagaaaaaggactgaaratattgagcctttaaacaatcttctctccctccttgctgcatgcagaatggattccgtcaccttccgggcccggccctgggctctcacccatctttgtgatctgattatcatcctgttacagcagtgaactcaatataccttgtgttaaattaaaatagaagtgttttccccactacaatgcaaattccttgggagcagcaatcaccacttgctagtctttatattcccatacaaagaaacttagtccattttctgttgcttataacagaatacctgaaactgggtaatttatagagaaagggaatttatttcttacagttataaaagctgagaagtctaaggtcaaggtgctgcatctggtgagggccttcttgctggtggggactctctgcagaatcccgaggcaacacaagtcatcatgtagtgagggggctgagtgtgctagcttacatctctctt

SEQ ID NO: 65479 - DNA, 557 bp, Homo sapiens
cgttgtctacacttggttcagccagtcagtcagcctcagcaatgagtgttccaggttacttttcagttgctatagcctgcaattttgctatccctaacactgtaagtgttaggaacttgcagagggaacttgcttttttcttcatgaaaatttagtctagatgctcctaggtgggcaatggagggggaaacgtccacatggagagtagtaactagacctcacgggacaacatctaccttctttgagatttctccctgccaccaccactatccaatacwtttggtgttgagggacagtgccttgcttaacttcctctacatagctgagatcatgttggaacatttaaacgaagtttcatggagaatttgggggttacaacatggaaatggccacacaatacaatatagagaatctggtttacaaaacataactcactcatctctggttcaggtgctcctacaaagatgactgcgtgacctgtagtccacttctgtgaggcagaggttatctgtaacccctgcccactgtggagggagagagagaagaaagaaaagggg

SEQ ID NO: 65480 - DNA, 728 bp, Homo sapiens
tgcattagtagtattgagttttctccatcatgggaaggaaacctacttttaagaagtgacttccagctcacgcctataatcctgtaatcccagcactttgggagtctgaggagggtggatcacctgaggtcaggagttcaagaccagcctgggcaacatggtgaaaccccatctctgctaaaaatacaaaaattagccgggcctggtggtaatcccagctacttaggaggccgaggaatgagaatggcttgaacccaggaggcagaggttgcagtgagctgagattgtgccattgcattccagcctgggagayagagtgagactccatttcaaaaaaaaaaaaaaagaagtgattttcgctttagcctacacttttttgttcaagaaacatgtaactggggtttggaatcctttaatatcattaaccacatttcattgtcacattaacagtattctcctgtcagtggactctatctactcttagaataaaatcccaaggcctttcctgacttgaaacatccacataatctggcccctgcctgcgtttccagccatgttgtgacattctctccttccttactctgcaaccacacactcttccttcagttcccgagtgtgcaacctctctcaaaggccttagtctagtcatttctctctgtctggaatgttttcccctcatgctctttacatggtctagctctttcttttcctacagaactcaagtattt

SEQ ID NO: 65481 - DNA, 510 bp, Homo sapiens
ttgtaaaagctaacatgtattctgtacttacatggacaaagcactctaggtatttatcatatactatattaactcatttaatccttgcaacaactgtatgacatgagtacaattataacccccgttgaacagataaagaaactaaggaacaaagaggctaaatgtttttccctaagctcagtaagctgggaagtagcaaagtcagaattcaagcccatctgtctgccttactcttaaccatatgtggtatttcttatttaccttargaactttccatcttacctactttttggactttaagaccataaaggacttcctctgctgaggacccaaactgaaccccaaggccagacagtattcttgatataccactgtatgctgcacaggtatacctcatcccctcaccccaactcagtgtccccaagtggtgctatttgtatcatttgtctattttaaagactattatttagttacataatagaattaggtaattctatacatgtcattctt

SEQ ID NO: 65482 - DNA, 531 bp, Homo sapiens
tctcacattcctccaatggctaacttttgcattttaaaaaatttctttgatttaaggaatgctcacttccaaacatgtattttatgagtgatgcttggcccagatgcctgagtttcagctgcaaaatacagaatatctatataacataaattacaattatacaaacaccaaccaacaagctattgttaaaactaccttcagaacaaaatgccttaaaataatttaatttttttatattgcaaggataaattaataaaactataggaaacattcaattgaagaggtaagagaaaaggtaaatgcaagaaatctaatagaagctgaggcagacaaaaggaatgcaaatgataaaaacaaaaagtaatgaaattgaaaatagaaaatgatagaaagaataartacatttaagagcttaacaaccaataatttttttaaaaaaccttaaataagatagtcaagaatacaaatctttctttgaaagtataaatacctacatgaaaatatgaatatcaaaaaacccagaaaaataat

SEQ ID NO: 65483 - DNA, 698 bp, Homo sapiens
cttcccaaggggctcctgtttatctgggaccattatcatctttacattagttttacacggcccatgtgtgtgcacctgtgtgtggctgtatgcatatgtgcatgtgtgtattcatttgtgtgcgtgtgtgcgtgcatgcctggggatgcctgtgggcatatggtcatgcgtgtcagtgtgtgcccatggtagggcatatgatcatgtgtgtttgtgcattcctatggtaaggcacatgatcgtgtgtgtcggtgcacgtccatggtagggcacatgatcacgtgtgtcggtgtgtgcccatgttagggcatatgatygcgtgtgtcagtgtgtgtccatggtagggcacatgatcacacatgttcggtgcatgcccattttagggcatatgaccatgcatgtctgtgcgtccccatgttagggcatatgatcacacgtgtctatgcctgctcatgttagggcatataatcacgtgtgtcagtgtgtgcccatggtagggcatatgatcacgtgtctgtgtatccccatggaaggacacatggtcatacatgtcggtgcatccccatgttagggcacatgatcacgtgtgtcggtgtgtgcccatggtagggcatatgatcacgtgtgtcggtgtgtgcccgttatggcatatgatcatgtgtgtcagtgtgtgtccatggtagggcatatgatcatgt

SEQ ID NO: 65484 - DNA, 686 bp, Homo sapiens
ggatcccctgggtttcagacataccccttcttccctggactgtgaaaaagtaaccatggtttcccttgataaccaggatcatttactcctgcctacatgtaattctctttttggcttgttctgtggcatgaggggtccaaaatggccagatagcagcctcaaatttccaattcattagcaccatggttgtgtttcttactctaagcattttttcctgtgtactaacaccaacaaacagaagtcacaggaacacagaagcaaatatttttgagcaggttatctggaataataatgatgccacttctgctttttggtctagaacctgcgtagtctgtctatgagagaaactgaatcatatttatatctctgtatctaccttgcttaaatcacttactaattctttttttttttttttttttttttttttttttgagacggagtctcgctctgttgcccaggctggagtgcagtggtacsatctcagctcggtgcaacctctgcctcccaggttcaagcgattctcctgcttcagcctcccgagtagctgggattacagatgtgcaccaccacgcctggccaattttttttttttttttgatggagtctcactctgtagtccaggctggagtccaatggcatgatctcggctcactgtaatctctgccgcctgggttcaagcaattctc

SEQ ID NO: 65485 - DNA, 744 bp, Homo sapiens
cctctgtcctggtcagggaggtgcccgggcagcagcccctactccaccatcctgcccgggctgttctgggcctggggcctggggacggagaacgcagagcacagccggccttgttcccgttgtggcctgttgcatgcaaacagagctccgtccacctagcaccagctggggccagagagcagggccagcctgtcccaagccagccagggctgggtctgagaggttgacgtgtgctcgggcagcacagtgggcaggcgtagctggtggagggcacagctgcgagaagcagaggccaggggcctgggggcaggcagcccctgaggctggtagaggcctgggaggagctrgggcttcccagtcttcttcagggcaagcacaggctgacctccagccactctgccttcctggccgcctctagcaaccgtctcccagtccctacccagggggcccagaaccttccagcagcagctcctcctccgtgagggtgtctgtcttcccaggcgtcactgcgcagcgcatttcaggggctcttgagcagcccctgcgtgtctgtctggagccctccatcccagctaaggggggcagagtcccaccagcactccccctttcctgggcattgcacccatgctcagtcctggcctggttcctcctgtgtctgcaggacatattcccaggcctctgcaggtgcagcctggggacctgcgagagaaggaaggggtttctgggggtggcactgggcgtttt

SEQ ID NO: 65486 - DNA, 744 bp, Homo sapiens
cctctgtcctggtcagggaggtgcccgggcagcagcccctactccaccatcctgcccgggctgttctgggcctggggcctggggacggagaacgcagagcacagccggccttgttcccgttgtggcctgttgcatgcaaacagagctccgtccacctagcaccagctggggccagagagcagggccagcctgtcccaagccagccagggctgggtctgagaggttgacgtgtgctcgggcagcacagtgggcaggcgtagctggtggagggcacagctgcgagaagcagaggccaggggcctgggggcaggcagcccctgaggctggtagaggcctgggaggagctagggcttcccagtcttcttcagggcaagcacaggctgacctccagccactctgccttcctggcygcctctagcaaccgtctcccagtccctacccagggggcccagaaccttccagcagcagctcctcctccgtgagggtgtctgtcttcccaggcgtcactgcgcagcgcatttcaggggctcttgagcagcccctgcgtgtctgtctggagccctccatcccagctaaggggggcagagtcccaccagcactccccctttcctgggcattgcacccatgctcagtcctggcctggttcctcctgtgtctgcaggacatattcccaggcctctgcaggtgcagcctggggacctgcgagagaaggaaggggtttctgggggtggcactgggcgtttt

SEQ ID NO: 65487 - DNA, 678 bp, Homo sapiens
aaatgagtgtggcgtaggggtgcatgtgtgcctgtgaggagtgtgagctcatggtggcatgtgcacacatgtgcacacatgtgcccatggcaggaagcctggtgtggctggtctccgccccggagctctgatgtctcagytcgaaagcggttcctgctaacgcctcctcgcctgtctgcccttctcaccttgtctcttggcctcggtccacactggctggctagtttcacccaaaataaaagcggtaataatagtaacatcctaattgatgtgcggagccagcgttatcggcagcaaagtgcctttacccctgtggtcatgaggcggccttgccagcctgagctctgccgttatccctgctggtctcgtatctgtaatgaaatcccgcaccctcgctcaggtgtgtggtttgtgtgtttcgggtgtgcgcatctgtgtgtgcacgtgtggggcatgtggtgtgtctgggacgaggcagagtagaactcacagcctctgtccagcccaaaccatcgacgtccccaacactttcacagccactcccgcccaccgagcacagccgagccatttcccacacccgcagaaactctccttgaggcctttctccttccggtttatgaataggtcttctcctgtgtaaagccttgaaaacagagccgagcacagatttgggacctg

SEQ ID NO: 65488 - DNA, 678 bp, Homo sapiens
aaatgagtgtggcgtaggggtgcatgtgtgcctgtgaggagtgtgagctcatggtggcatgtgcacacatgtgcacacatgtgcccatggcaggaagcctggtgtggctggtctccgccccggagctctgatgtctcagttcgaaagcggttcctgctaacgcctcctcgcctgtctgcccttctcaccttgtctcttggcctcggtccacactggctggctagtttcacccaaaataaaagcggtaataatagtaacatcctaattgatgtgcggagccagcgttatcggcagcaaagtgcctttacccctgtggtcatgaggcggccttgccagcctgagctctgccgttatccctgctggtctcgtatctgtaatgaaatcccgcaccctcgctcaggtgtgtggtttgtgtgtttcgggtgtgcgcatctgtgtgtgcacgtgtggggcatgtggtgtgtctgggacgaggcagagtagaactcacagcctctgtccagcccaaaccatcgacgtccccaacactttcrcagccactcccgcccaccgagcacagccgagccatttcccacacccgcagaaactctccttgaggcctttctccttccggtttatgaataggtcttctcctgtgtaaagccttgaaaacagagccgagcacagatttgggacctg

SEQ ID NO: 65489 - DNA, 1036 bp, Homo sapiens
tttcaagattgtcacaaataagccatagagcaaccagtgtcaatacatggaaataatccctacatgctcagccatggcatgaacacattttctagaacacttagaaatattaaaattcttatggttgaacataatcaataaaaaggtatagtttattactttagaaaaatctgaatgagaaaaatcatttctatcctcaactactgataattaagtaatctttcaaaaatttttctttccattataaagataaattagaatacctgtaatttctaagatgcttctcattacaattacctatgggcaacagttcagctatamgttataaagtctaaaaggttaatgttatactttaaatatatttaatgaagacggatctattgaaagatttactatcttgatacgtagtgtccagtcatcacagataacagacactaagtggtacagatcagctgactagagaaaactaagggttgatcctgtgaactttcttgagaaatagaaatattccaaaataactttttgacaccactgggaaactgtgaactcattttctagaaaattccgtgttattaagtttgaatattctcatttattatagcaatctgatatatacaataatgtttaatatatagacttttttgtaattttcatatacaagaaactaccagaaattgaatcaaaagagaaccagacatttggagatctagtttgctatctattccttaaaagtatagcattcctattgacacagtcatgcgaatctataatgagaaaactacatccattgaatgactttcagtttggtttaataaaaatttcagacagttatttaaaaatcagtgtaattagaaatatcatgttcattttctcttctttatgcaaaatccaggtactcattcagattaatccttttcatttgaatttcattaactctgccttgaataattttatccttctgagttctgatgtgtacaaatcccgtctaaccttttgaaaatcaacttgcttttgttaatgttctttaccaccttat

SEQ ID NO: 65490 - DNA, 1036 bp, Homo sapiens
tttcaagattgtcacaaataagccatagagcaaccagtgtcaatacatggaaataatccctacatgctcagccatggcatgaacacattttctagaacacttagaaatattaaaattcttatggttgaacataatcaataaaaaggtatagtttattactttagaaaaatctgaatgagaaaaatcatttctatcctcaactactgataattaagtaatctttcaaaaatttttctttccattataaagataaattagaatacctgtaatttctaagatgcttctcattacaattacctatgggcaacagttcagctatacgttataaagtctraaaggttaatgttatactttaaatatatttaatgaagacggatctattgaaagatttactatcttgatacgtagtgtccagtcatcacagataacagacactaagtggtacagatcagctgactagagaaaactaagggttgatcctgtgaactttcttgagaaatagaaatattccaaaataactttttgacaccactgggaaactgtgaactcattttctagaaaattccgtgttattaagtttgaatattctcatttattatagcaatctgatatatacaataatgtttaatatatagacttttttgtaattttcatatacaagaaactaccagaaattgaatcaaaagagaaccagacatttggagatctagtttgctatctattccttaaaagtatagcattcctattgacacagtcatgcgaatctataatgagaaaactacatccattgaatgactttcagtttggtttaataaaaatttcagacagttatttaaaaatcagtgtaattagaaatatcatgttcattttctcttctttatgcaaaatccaggtactcattcagattaatccttttcatttgaatttcattaactctgccttgaataattttatccttctgagttctgatgtgtacaaatcccgtctaaccttttgaaaatcaacttgcttttgttaatgttctttaccaccttat

SEQ ID NO: 65491 - DNA, 1036 bp, Homo sapiens
tttcaagattgtcacaaataagccatagagcaaccagtgtcaatacatggaaataatccctacatgctcagccatggcatgaacacattttctagaacacttagaaatattaaaattcttatggttgaacataatcaataaaaaggtatagtttattactttagaaaaatctgaatgagaaaaatcatttctatcctcaactactgataattaagtaatctttcaaaaatttttctttccattataaagataaattagaatacctgtaatttctaagatgcttctcattacaattacctatgggcaacagttcagctatacgttataaagtctaaaaggttaatgttatactttaaatatatttaatgaagacggatctattgaaagatttactatcttgatacgtagtgtccagtcatcacagataacagacactaastggtacagatcagctgactagagaaaactaagggttgatcctgtgaactttcttgagaaatagaaatattccaaaataactttttgacaccactgggaaactgtgaactcattttctagaaaattccgtgttattaagtttgaatattctcatttattatagcaatctgatatatacaataatgtttaatatatagacttttttgtaattttcatatacaagaaactaccagaaattgaatcaaaagagaaccagacatttggagatctagtttgctatctattccttaaaagtatagcattcctattgacacagtcatgcgaatctataatgagaaaactacatccattgaatgactttcagtttggtttaataaaaatttcagacagttatttaaaaatcagtgtaattagaaatatcatgttcattttctcttctttatgcaaaatccaggtactcattcagattaatccttttcatttgaatttcattaactctgccttgaataattttatccttctgagttctgatgtgtacaaatcccgtctaaccttttgaaaatcaacttgcttttgttaatgttctttaccaccttat

SEQ ID NO: 65492 - DNA, 1036 bp, Homo sapiens
tttcaagattgtcacaaataagccatagagcaaccagtgtcaatacatggaaataatccctacatgctcagccatggcatgaacacattttctagaacacttagaaatattaaaattcttatggttgaacataatcaataaaaaggtatagtttattactttagaaaaatctgaatgagaaaaatcatttctatcctcaactactgataattaagtaatctttcaaaaatttttctttccattataaagataaattagaatacctgtaatttctaagatgcttctcattacaattacctatgggcaacagttcagctatacgttataaagtctaaaaggttaatgttatactttaaatatatttaatgaagacggatctattgaaagatttactatcttgatacgtagtgtccagtcatcacagataacagacactaagtggtacagatcarctgactagagaaaactaagggttgatcctgtgaactttcttgagaaatagaaatattccaaaataactttttgacaccactgggaaactgtgaactcattttctagaaaattccgtgttattaagtttgaatattctcatttattatagcaatctgatatatacaataatgtttaatatatagacttttttgtaattttcatatacaagaaactaccagaaattgaatcaaaagagaaccagacatttggagatctagtttgctatctattccttaaaagtatagcattcctattgacacagtcatgcgaatctataatgagaaaactacatccattgaatgactttcagtttggtttaataaaaatttcagacagttatttaaaaatcagtgtaattagaaatatcatgttcattttctcttctttatgcaaaatccaggtactcattcagattaatccttttcatttgaatttcattaactctgccttgaataattttatccttctgagttctgatgtgtacaaatcccgtctaaccttttgaaaatcaacttgcttttgttaatgttctttaccaccttat

SEQ ID NO: 65493 - DNA, 1036 bp, Homo sapiens
tttcaagattgtcacaaataagccatagagcaaccagtgtcaatacatggaaataatccctacatgctcagccatggcatgaacacattttctagaacacttagaaatattaaaattcttatggttgaacataatcaataaaaaggtatagtttattactttagaaaaatctgaatgagaaaaatcatttctatcctcaactactgataattaagtaatctttcaaaaatttttctttccattataaagataaattagaatacctgtaatttctaagatgcttctcattacaattacctatgggcaacagttcagctatacgttataaagtctaaaaggttaatgttatactttaaatatatttaatgaagacggatctattgaaagatttactatcttgatacgtagtgtccagtcatcacagataacagacactaagtggtacagatcagctgactagagaaaactaagggttgatcctgtgaactttcttgagaaatagaaatattccaaaataactttttgacaccactgggaaactgtgaactcattttctagaaaattccgtgttattaagtttgaatattctcatttattatagcaatctgatatatamaataatgtttaatatatagacttttttgtaattttcatatacaagaaactaccagaaattgaatcaaaagagaaccagacatttggagatctagtttgctatctattccttaaaagtatagcattcctattgacacagtcatgcgaatctataatgagaaaactacatccattgaatgactttcagtttggtttaataaaaatttcagacagttatttaaaaatcagtgtaattagaaatatcatgttcattttctcttctttatgcaaaatccaggtactcattcagattaatccttttcatttgaatttcattaactctgccttgaataattttatccttctgagttctgatgtgtacaaatcccgtctaaccttttgaaaatcaacttgcttttgttaatgttctttaccaccttat

SEQ ID NO: 65494 - DNA, 1036 bp, Homo sapiens
tttcaagattgtcacaaataagccatagagcaaccagtgtcaatacatggaaataatccctacatgctcagccatggcatgaacacattttctagaacacttagaaatattaaaattcttatggttgaacataatcaataaaaaggtatagtttattactttagaaaaatctgaatgagaaaaatcatttctatcctcaactactgataattaagtaatctttcaaaaatttttctttccattataaagataaattagaatacctgtaatttctaagatgcttctcattacaattacctatgggcaacagttcagctatacgttataaagtctaaaaggttaatgttatactttaaatatatttaatgaagacggatctattgaaagatttactatcttgatacgtagtgtccagtcatcacagataacagacactaagtggtacagatcagctgactagagaaaactaagggttgatcctgtgaactttcttgagaaatagaaatattccaaaataactttttgacaccactgggaaactgtgaactcattttctagaaaattccgtgttattaagtttgaatattctcatttattatagcaatctgatatatacaataatgtttaatatatagacttttttgtaattttcatatacaagaaactaccagaaattgaatcaaaagagaaccagacatttggagatctagtttgctatctattccttaaaagtatagcattcctattgacacagtcatgcgaatctataatgagaaaactacatccattgaatgactttcagtttggtttaataaaaatttcagacagttatttaaaaatcagtgtaattagaaatatcatgttcattttctcttctttatgcaaaatccaggtactcattcagattaatccttttcatttgaatttcattaactctgccttgaataattwtatccttctgagttctgatgtgtacaaatcccgtctaaccttttgaaaatcaacttgcttttgttaatgttctttaccaccttat

SEQ ID NO: 65495 - DNA, 551 bp, Homo sapiens
tatatataatagtttacattatgtatctctgctttaatttgtttagtcataaatctgaactatcagtacttattttagtattaccaaaaaataaacctgacagtaggtaattgtttttatggaattagaacaaaaattgggtttaatttctcttttcagtttaaaagtaatgtctaaaaaaaagcattttgtaaaggctggacaattatctgatcaatgctacatgtatatttccatattaatcctctttgacaamtgatgttaacattccttcatcactaataattatgacttttgtctgagtttcccagatgatattatttacttcattttacttttttcttagaagatataaaaatatctgtgtatctggaaacactgaaattaattattatgttggaaatcaacgatgctaatttggaatcagagatttttctaaattatttactctctgaacttcaaaaaatataaatgctttattttgatgaagaaagttccctcaaggtaccgttagccattaacattgtttcattcaataggcaagtaaaata

SEQ ID NO: 65496 - DNA, 551 bp, Homo sapiens
tatatataatagtttacattatgtatctctgctttaatttgtttagtcataaatctgaactatcagtacttattttagtattaccaaaaaataaacctgacagtaggtaattgtttttatggaattagaacaaaaattgggtttaatttctcttttcagtttaaaagtaatgtctaaaaaaaagcattttgtaaaggctggacaattatctgatcaatgctacatgtatatttccatattaatcctctttgacaaatgatgttaacattccttcatcactaataattatgacttttgtctgagtttcccagatgatattatttacttcattttacttttttcttagaagatataaaaatatctgtgtatctggaaacactgaaattaattattatgttggaaatcaacgatgctaatttggaatcagagatttttctaaattatttactctctgaacttcaaaaaatataaatgctttattttgatgaagaaagttccctcaaggtaccgttagccattaacatygtttcattcaataggcaagtaaaata

SEQ ID NO: 65497 - DNA, 613 bp, Homo sapiens
tgcacacataatttttatatgctgagttttggactcaacaatgtatttgttattttggatgtatgatttggagagaagaggtgcatttattatttatttgtaacacttagtgacctatacatttcaaagtttaatcttttaaaaattaagttaataaaattaattttaccaacacatactaaataaaattgattttgcatgatataattattcagctgatattgactgaaaccatttttgatggataatgttatttcttctttgcttttaaggcccgtttcctcctttcaaaagtcaacccttcacagactcataataatatgtatgcctgggggcaggtaagtttaaatagcaggtcttggaaattatttctttgtgtatttattgtttattattttagtgaaagctacatttttttcctgtgtatttagtaatggtttctgttggaaaagtaatgtaaaaatgagagtagaaaacagaattaatatttggcgacaccataggamaaaagtgatcctatcaaatagactccaagtttagcactatacccttgagacaaaaagcaatgaagtgtgtaagacaggaagtggtgactccagtttaatgctaggtt

SEQ ID NO: 65498 - DNA, 860 bp, Homo sapiens
tttatcacaggttttgttcaaaccaacatatttagtaaagtaccagtagtttcagcatgagtaaagtccaaaggaaatcttacctcagtaataaactaccacgtcctctacctccaccaggaccagaaagggccagcaatctggcttggatgggcctgtaaaagatttacaaatcagtgcaaaatcatatgtagacacacacagtcgcacccaaatactttcagagatgtggatcataaggagaaaaaatcacaaaagttccaaaaagatagtttcaaataaatctaaatgtctgaaacaggacaggaagtactatttcatttaacttcctcgtttctccaggacctgtgtcacagaaattatattcacctcgatgcccccacacattaacaagcctggatcaggtccccatcccgccatccccgaggaggctgcacgtggacaggaagctggggtaaggcggcttgttgcgtcccggcagggtctcggggccagcaacrggccgggtgtccgccggagcgggaaggggctttgtgctgcagttccgggcctgcagggccgagagcgggaatcagcagtccgggtcttctcacaggccaagaaagcatgccggcgcacccaggcctcgctctccttcctcagggacctgagaccagcgctctacggaggggacctggggcctctccacctcggcgacaacagggttttacccgccgccccgcgaacaggcctcgaggttccagtcttcttaaggctggccgccctccccgcccccaattcaccccgacctgagggctgcctctccgagctccgagttccgagttcccgttaggcccttacctcacgtcattcggatcccg

SEQ ID NO: 65499 - DNA, 860 bp, Homo sapiens
tttatcacaggttttgttcaaaccaacatatttagtaaagtaccagtagtttcagcatgagtaaagtccaaaggaaatcttacctcagtaataaactaccacgtcctctacctccaccaggaccagaaagggccagcaatctggcttggatgggcctgtaaaagatttacaaatcagtgcaaaatcatatgtagacacacacagtcgcacccaaatactttcagagatgtggatcataaggagaaaaaatcacaaaagttccaaaaagatagtttcaaataaatctaaatgtctgaaacaggacaggaagtactatttcatttaacttcctcgtttctccaggacctgtgtcacagaaattatattcacctcgatgcccccacacattaacaagcctggatcaggtccccatcccgccatccccgaggaggctgcacgtggacaggaagctggggtaaggcggcttgttgcgtcccggcagggtctcggggccagcaacgggccgggtgtccgccggagcgggaaggggcwttgtgctgcagttccgggcctgcagggccgagagcgggaatcagcagtccgggtcttctcacaggccaagaaagcatgccggcgcacccaggcctcgctctccttcctcagggacctgagaccagcgctctacggaggggacctggggcctctccacctcggcgacaacagggttttacccgccgccccgcgaacaggcctcgaggttccagtcttcttaaggctggccgccctccccgcccccaattcaccccgacctgagggctgcctctccgagctccgagttccgagttcccgttaggcccttacctcacgtcattcggatcccg

SEQ ID NO: 65500 - DNA, 860 bp, Homo sapiens
tttatcacaggttttgttcaaaccaacatatttagtaaagtaccagtagtttcagcatgagtaaagtccaaaggaaatcttacctcagtaataaactaccacgtcctctacctccaccaggaccagaaagggccagcaatctggcttggatgggcctgtaaaagatttacaaatcagtgcaaaatcatatgtagacacacacagtcgcacccaaatactttcagagatgtggatcataaggagaaaaaatcacaaaagttccaaaaagatagtttcaaataaatctaaatgtctgaaacaggacaggaagtactatttcatttaacttcctcgtttctccaggacctgtgtcacagaaattatattcacctcgatgcccccacacattaacaagcctggatcaggtccccatcccgccatccccgaggaggctgcacgtggacaggaagctggggtaaggcggcttgttgcgtcccggcagggtctcggggccagcaacgggccgggtgtccgccggagcgggaaggggctttgtgctgcagttccgggcctgcagggccgagagcgggaatcagcagtccgggtcttctcacaggccaagamagcatgccggcgcacccaggcctcgctctccttcctcagggacctgagaccagcgctctacggaggggacctggggcctctccacctcggcgacaacagggttttacccgccgccccgcgaacaggcctcgaggttccagtcttcttaaggctggccgccctccccgcccccaattcaccccgacctgagggctgcctctccgagctccgagttccgagttcccgttaggcccttacctcacgtcattcggatcccg

SEQ ID NO: 65501 - DNA, 496 bp, Homo sapiens
agatgaggggaaatgatttgcccagacaccaatcaaattaagggaagaattgggaccaggataagttcttttggttctcagtccagtgctcagcacaagtctgtctttctgtgggcagcaaggacttgaggcaggacgtttactggagccctgagccctggcagcagcaactggttattgcttctgttctcagcagtgatgacagagagtgtcaaaaccgaatattcactggaggcagagtctgaacacttcacataagatgtggtgaatcatatggttgaagggaaatccctgcaggttatacactgatagcctagctaattttagggagatagacagggagagcttctggtgtttatgttttgaratttccctttttttttttctccataaaggaaaaataaactttgtccttgggtggtgaagccgaggaggcctctggaagctgtgctcagttagtgacaatgccaaagtatgaacactcctgtagattgcc

SEQ ID NO: 65502 - DNA, 716 bp, Homo sapiens
gctacaacacctctctggtatacagctaccatggatgtcaggtacaagtgaaaaccaagtaaaaaaatatgaccagcgtgagtcagagtttttaacaagccaagccacccccttggtgttcggcactggaatgctttccttatacataacatccagccacaatcagagccaggcttggagactctgagttccacagggagagacagctgcagtcaggctgcgatcctggagagccgagtggctcctgcgtgtgtgggcaaccccttcttggagaaaacctgttaatatcctctgctcacagacatgacttcatgcaccaagcacacagtctctccagttttccaagggctgaggggctcgctccctactctgyaactctagaaagaagacccctggggtgtctgcccactccagagagggactgtaacaggaagtcagatgggcaggttgctggaatttggaagacacgggggcttctcccaagagtgccctgaaagagactagcgtggacaaggtctaggcaacacggagcaacccaagccctcctctgccagcgtcactcctgccaggtcctctcttctacccttagcaaccagtggacacagagactttggaagggcctccaggccttggcctggatgcagagggccctgagaagagacacaggtggcagtcagtctgactatcctctcgccctgtcctcatttcccacagct

SEQ ID NO: 65503 - DNA, 943 bp, Homo sapiens
gcagtacttaatctgtgccaggcactgttctaggcacttcacaaatactaactcatttatcttcacaactctatgaggggagtactattacctccatgttgcacgtggggacactcggggccaatgacagtttggcacattggtcagccgactgaaagctgtgatttggctcctgccttcctgactcactcygcccccaccaggcttcactcgggctaactgcggttctcagaactcccttggaggccttgttctctccagctctgtgcttttgcgcatgctgtcttcctggactgatcttttccgcctgggctccgtcttctagaccagatcaggcccctctccttagcaatgccttttctggttaaggcagtcaggccaggcacacctgtctagcacccagcccttctctcctcaccctatttgcttacagatctgtctccaacaccagagactgtggttctgggcctggctgtctcctcattgttgagtccctggggcttgctactatgtctggcctataataggcactcaaagttttgctgaatttatgcataagctctccgaattttgctttcttgtctcccccatactgtctgccaccacatattgtagacacttagtcaatggaagtgggagtctgattttcctgccaacagcctaacttaataagaacaaagcaaaacaaaaaccgcccccttcccctttctcccatctccacatcataattaagatcccgaaaatttgggatccttccaagccctccgatcagtggaacccggcaggacatgagaagtcagactccctccactggccggctgggttgagggcagcccacaggactcagggcgccgcctcccgcaccctctctcagttcttgcctattaaggtaagcctcccccgaggaggggggaggggccggagggagggtcccctagaagct

SEQ ID NO: 65504 - DNA, 634 bp, Homo sapiens
tgaacctgtgaatgcaaagagataatcaatgtcaaggcacttcagaaagttgctaaattaatacataatgtaagaagtatttattattactttacacctgaatgtttgtgtcccccccattcatatgttaaaatcgaaacctcaaagttgatagtattaggagatggggcctttgggaggttattrggttatggggtggggctctcatgaatgggatgagtgcccacatgagagaggtctgaaagaaaaccccttccccttctaccatgtgaggacacagaaggcactatccatgaaccagaaagcgggccctcaccagacatcgaatctgccagcaccttgatctcgcactttccagcctccaggacttcgagaaataaatttctgttgtttaaaagctatacagtttacggtattttgttgtgagccggagtgtactgagaggatacctttctgatattcatcataagatttggtttctggtaggcactctccaaatgctatatagtgctttattgtagctgcccttacttcagatagtgagtgaaataagatgtgctactagttacgctgagtacgtaccaagagccaggcacggagctaagggcttcgcatgtgatgcttccgtggatcc

SEQ ID NO: 65505 - DNA, 591 bp, Homo sapiens
agcgagctaacaaatataaatatgaaatggcaagtcgttagtcagggttacctaaaaggatagacctaataggatagatgtgtatatgaaagggagtttattaaggagaattgactcacacgatcacaaagtgaagtctcatggcaggccrtctgcaatctggggggcaaggaagccagtttgagtctccaaacctcaaaagtagggaagctaatagtgcagccttcagtctgtggccaaaggcctgagagccctggcaaaccactggtgtaagtccaagagtccaaaagctgaagaacttggagtctgatgttcaaaggcaggaagcaagatctgagaagaccttaagtatttgcctcagcctgatccctgcacaaagacagcctatgacaaatttttaaaaagcaaaccctgaaggagagaatctgatttccagagttactacactataagattcaaatgtttaattttcaacaaaaaacttcacagggcacgtgaagtttcctggatatgtgtggtgactttctaaattcctttgtatatgcaatcgcatcaaaatgtccacatccttaaacgtctggctccataaaa

SEQ ID NO: 65506 - DNA, 705 bp, Homo sapiens
aaatgataacattcaaatctaagagtcttaagtctgttttgtgaaaccagcccaatctaatgatatggcaaataagatagaagaaaaaaataaaataaactttcaatggcctcaattttatttaaaaaaaaaaaattaaaaaaagtcatagtgatattaaacttatgtcttcatgtgattcattaaatttaatataaaatattgctagttcatctgtgacctcttgtgataaggaaagcaactcctgttattaacagaactgtgcatcatatattctaaaaggcaaaaacttctttttgttttttttgagacagagtctcactctgtcacccaggctggagtacagtggcacaatctcggctcactgcaacctacaccccttgggttcaagcgattctcctgcctccgcctcctgagtagctgggatacaggtgaataccaacgctgccagctaattttcatatttttagtagagacagggtttcaccatgttcrccaggctggtctcgaactcctgacctcaggtaatctgccctcctcagctgcccaaagtgctgggattacaggcatgagccaccacgcttggccataaaaggcaaaaacttaataaagagatatttaatgtttctctcccatgattaaatattgtaatcccattagagatcctatgttgaacaaataccatgatccctctcaaatggtact

SEQ ID NO: 65507 - DNA, 705 bp, Homo sapiens
aaatgataacattcaaatctaagagtcttaagtctgttttgtgaaaccagcccaatctaatgatatggcaaataagatagaagaaaaaaataaaataaactttcaatggcctcaattttatttaaaaaaaaaaaattaaaaaaagtcatagtgatattaaacttatgtcttcatgtgattcattaaatttaatataaaatattgctagttcatctgtgacctcttgtgataaggaaagcaactcctgttattaacagaactgtgcatcatatattctaaaaggcaaaaacttctttttgttttttttgagacagagtctcactctgtcacccaggctggagtacagtggcacaatctcggctcactgcaacctacaccccttgggttcaagcgattctcctgcctccgcctcctgagtagctgggatacaggtgaataccaacgctgccagctaattttcatatttttagtagagacagggtttcaccatgttcgccaggctggtctcgaactcctgacctcaggtaatctgccctcctcagctgcccaaagtgctgggattacaggcatgagccacyacgcttggccataaaaggcaaaaacttaataaagagatatttaatgtttctctcccatgattaaatattgtaatcccattagagatcctatgttgaacaaataccatgatccctctcaaatggtact

SEQ ID NO: 65508 - DNA, 552 bp, Homo sapiens
accccttccttcctccttcctaatacatccttaaacagtgtgcattaaaacgtgaaaggaaatagagtatgcaagtacatgcatgtgtgtacttcgcacactgttatctattttaggctcaaatagatgtatctatggttgagaaattcccattaaatattggggcgaggttcagatgctgtagatatttgtttacattttatcaaatgctttcttacatgtgaacccctcaatctctgagaaatcacctaagggaagccatggrtctgcctcctccaggtttcattattgcatggaatgtgaggggatttctgtcttaattaatgcataagccagctcttctgagtttgggtggatatccttgaggagaaaggtagctaaaattagcagcctctactctcttctgtgttccttataaaaaaaaagagaaactgtctcatctttaagaatggaccagttatgaacttccaacctttccattaatgctttgaagcaatgatggtgctggctgatgtgcttaagtaggaccattaaatttgggaaataatgaga

SEQ ID NO: 65509 - DNA, 552 bp, Homo sapiens
accccttccttcctccttcctaatacatccttaaacagtgtgcattaaaacgtgaaaggaaatagagtatgcaagtacatgcatgtgtgtacttcgcacactgttatctattttaggctcaaatagatgtatctatggttgagaaattcccattaaatattggggcgaggttcagatgctgtagatatttgtttacattttatcaaatgctttcttacatgtgaacccctcaatctctgagaaatcacctaagggaagccatggatctgcctcctccaggtttcattattgcatggaatgtgaggggatttctgtcttaattaatgyataagccagctcttctgagtttgggtggatatccttgaggagaaaggtagctaaaattagcagcctctactctcttctgtgttccttataaaaaaaaagagaaactgtctcatctttaagaatggaccagttatgaacttccaacctttccattaatgctttgaagcaatgatggtgctggctgatgtgcttaagtaggaccattaaatttgggaaataatgaga

SEQ ID NO: 65510 - DNA, 1794 bp, Homo sapiens
catgcatgcaatgctcttagctcagtgtctgtcccatggtaagggttcaacgaagactccatggcagctttctaggggaagacaagagggaaggttggcggagaggaaagagaggtctgtcctggccagtgttgctcatgggccgaatcagagaatactgaaattcatggtggcatttccaagagggtagagatgattttgaagtacctaatatatgttgcctttattatttcaccgttcaaaaactttaattctatttctcattgaatttcaagttcctctaaagcggagacagttcaacccccagtgaattaatgggtctcagctataagtatcaatggaacagctactaacatcacaaaaagagaggcagccagctgttatgtgcctccagatgaagaacacagggccgggcgcggcggctcacgcctgtaatcccagcactttgggatgccgaggcgggcggatcacgaagtcaggagatcgagaacatcctggctgacacggtgaaaccccgtctctactaaaaatacaaaaaattagccaggtgtggtggtgggcgcctgtagtcccagctactcgagaggctgacgcaggagaatggcgtgaacccgggaattggagcttgcagtgagccgagatcgcgccactgcactccagcctgggcaacagagtgagactccatctcaaaaaaaaaaaagagaagaatacacaccaccacctatagtcttcacaaaaggattgattcttttctgtggcggcatagtattccaaggtgtatatgtaccacattttctttattgatgggcatttaggttgattccatatctttgctactgtgaatagtgctgcaatgaatacatgcatgcagtcctttgcaggaacatggatggagctggaggtcattattcttagcaaactaacgcaggaacagaaaaccaaatgccatttattctcactgctgagtgagcgctaaatgataggtaagtacacatggacacatagaagggaacaatagacactgagccctatcagagggtgaacggtggaggggagagggaggatcaggaaaaataactaatggatactaggcttaatacctgggtgatgaaataatctgtacaacaagcccccacggcgcttcgtttccctatgtaacaaacctgcacgcgctgcacatcttcccctgaacttaaaataaaagttaaaaaaaaggattgattctgagactgatcaagtctcactatctctgtcaatttgtagaaaatacaggagaaatgtgtggaactgcaccatgagtaaactccagactgtgaaaaactctgcatatcaaacagctcaagtctttcaacagataatctgygagtaaaagatgtaagggaaatgtgtagattaaaagagacatctttttaagtgagtaagactataatgtttacaaatacatagttgggtgatgaaaccataaggaaatagaggcagacattattataaaagctaggattagtgaggtggtagtctgttaccagggtagcccttgcataggtgttcatgcctgtgtgtagtcctctcttgaatctgggctggctctgagaccagctttaaccaacaaaatgtggcagagtaatgtggcgccattccaggcctaagccacaagaagtcctagaagcttctacatgcttttacactctagcaatgtaagatcctgacccaccatttaaacagttcagtatcctattggagaggtcatgtagaaaggccacctggagagaaagaaagccttgtcagctaagtcca

SEQ ID NO: 65511 - DNA, 1794 bp, Homo sapiens
catgcatgcaatgctcttagctcagtgtctgtcccatggtaagggttcaacgaagactccatggcagctttctaggggaagacaagagggaaggttggcggagaggaaagagaggtctgtcctggccagtgttgctcatgggccgaatcagagaatactgaaattcatggtggcatttccaagagggtagagatgattttgaagtacctaatatatgttgcctttattatttcaccgttcaaaaactttaattctatttctcattgaatttcaagttcctctaaagcggagacagttcaacccccagtgaattaatgggtctcagctataagtatcaatggaacagctactaacatcacaaaaagagaggcagccagctgttatgtgcctccagatgaagaacacagggccgggcgcggcggctcacgcctgtaatcccagcactttgggatgccgaggcgggcggatcacgaagtcaggagatcgagaacatcctggctgacacggtgaaaccccgtctctactaaaaatacaaaaaattagccaggtgtggtggtgggcgcctgtagtcccagctactcgagaggctgacgcaggagaatggcgtgaacccgggaattggagcttgcagtgagccgagatcgcgccactgcactccagcctgggcaacagagtgagactccatctcaaaaaaaaaaaagagaagaatacacaccaccacctatagtcttcacaaaaggattgattcttttctgtggcggcatagtattccaaggtgtatatgtaccacattttctttattgatgggcatttaggttgattccatatctttgctactgtgaatagtgctgcaatgaatacatgcatgcagtcctttgcaggaacatggatggagctggaggtcattattcttagcaaactaacgcaggaacagaaaaccaaatgccatttattctcactgctgagtgagcgctaaatgataggtaagtacacatggacacatagaagggaacaatagacactgagccctatcagagggtgaacggtggaggggagagggaggatcaggaaaaataactaatggatactaggcttaatacctgggtgatgaaataatctgtacaacaagcccccacggcgcttcgtttccctatgtaacaaacctgcacgcgctgcacatcttcccctgaacttaaaataaaagttaaaaaaaaggattgattctgagactgatcaagtctcactatctctgtcaatttgtagaaaatacaggagaaatgtgtggaactgcaccatgagtaaactccagactgtgaaaaactctgcatatcaaacagctcaagtctttcaacagataatctgcgagtaaaagatgtaagggaaatgtrtagattaaaagagacatctttttaagtgagtaagactataatgtttacaaatacatagttgggtgatgaaaccataaggaaatagaggcagacattattataaaagctaggattagtgaggtggtagtctgttaccagggtagcccttgcataggtgttcatgcctgtgtgtagtcctctcttgaatctgggctggctctgagaccagctttaaccaacaaaatgtggcagagtaatgtggcgccattccaggcctaagccacaagaagtcctagaagcttctacatgcttttacactctagcaatgtaagatcctgacccaccatttaaacagttcagtatcctattggagaggtcatgtagaaaggccacctggagagaaagaaagccttgtcagctaagtcca

SEQ ID NO: 65512 - DNA, 612 bp, Homo sapiens
tggatccccactgatgatgcggtaaacggcattccagtttggagagtggggctgatctcggtccatcaccgtgaggtttgcgaccacggtctccacgcggttttcggggacctcccctgcaaactgcaaaatggaaggaaagaatgtcacaaacccgtgttaagtgtaaatatgcacagagaagtgcacgtagcatatgtgcagctcaacgagtgttcacaaacagaacacaccgtgtcagcccagctcgagtgttcacaaacagaacacaccrtgtcagcccagctcaacgagtgttcacaaacagaacacaacgtgtcggcccagctcaaggagtgttcacaaacagaacacaccatgtcagcccagctcaaggagtgttcacaaacagagcacaccgtgtcagcccagctcaacgagtgttcacaaacagaacacaccgtgtcagccacgcccagatcaggaatcagagaagacaggctgctcaggggtgcacgggagtgcacgcctcatagcacggctgccggggccccactgaagcaggcgtgcagacctgcccggcaggtgcgtcagccctgcagccacggcagagggccactgatggagcggctt

SEQ ID NO: 65513 - DNA, 612 bp, Homo sapiens
tggatccccactgatgatgcggtaaacggcattccagtttggagagtggggctgatctcggtccatcaccgtgaggtttgcgaccacggtctccacgcggttttcggggacctcccctgcaaactgcaaaatggaaggaaagaatgtcacaaacccgtgttaagtgtaaatatgcacagagaagtgcacgtagcatatgtgcagctcaacgagtgttcacaaacagaacacaccgtgtcagcccagctcgagtgttcacaaacagaacacaccgtgtcagcccagctcaacgagtgttcacaaacagaacacaacgtgtcggcccagctcaaggagtgttcacaaacagaacacaccatgtcagcccagctcaaggagtgttcacaaacagarcacaccgtgtcagcccagctcaacgagtgttcacaaacagaacacaccgtgtcagccacgcccagatcaggaatcagagaagacaggctgctcaggggtgcacgggagtgcacgcctcatagcacggctgccggggccccactgaagcaggcgtgcagacctgcccggcaggtgcgtcagccctgcagccacggcagagggccactgatggagcggctt

SEQ ID NO: 65514 - DNA, 962 bp, Homo sapiens
atatacatatgtacacatgtatgtatatacatgtgtgtatatatgtaaatatgtatatatacacgtatatttcagcatatatatatgctgaagtaaaagttattaatagtattaggcccattggccttaagaaacattaaaacattataaacattttggtactacagaagaatctacgcaggatgcaatccagacaccataaaaagattggtttgattgcataaaagttaaaattttttgttctttccaacataaaaagcatcatgaactaaaaaatcaatgtcaaactcagaaaatctatttggaacatacatgacagaaaaatggtaattcccatgagctcatccaaatttaatcagaaaaaaaaacatgaaaaatacaatggaaaaataagcatagggtataataaggaatgtgtaaaaaaaaaaaaaaaggtggtcaaatggaaaataaacatgaaaggatgctcaacctcacctataattaaagaaacatatttcaaaacaaaataccacttttttagccttatattggaaaaatactatttaaactttatttgaaaaatattcaaatttataggaaatcacaggaataagacaaaacttttatgtacgctttgtccagattcaccagttgttaacattttgcctcatttaccttgtcattctttccttgctctatgaatatttttatctgggtaattggagagtatattgccaatatcatattcctttactcctgaattctcctatactccttttatattcctttactcctttactttcatattcctttattcctgaacacttactatgatggttgcaaagtggtgattttwaaaaaaaaaaaactccattttctgtctacattctgctataagaaagaatttttcttaacccgtattcattgattagcactgtggactcatggcttattctattcagtagattagtgtcctttgt

SEQ ID NO: 65515 - DNA, 865 bp, Homo sapiens
atattaagtgaacctcccgtgccttttaaaaaataccaacattatgaaatttaaaagcttaaatatatttgcctagttgataaagaggctgtggaacaactgaaggagaactttcagaccctaaaacagttatattacttagatgttaaaattttctagtgggctgtgcaattgctgggttgtccccccaaacatattttaatatgttatttaaaatgattttacccaagcctaagtattaaagtatatgtgcaaaaacagttgtgagccattctattatgcttcagtatgtttttcttgtggcctaattacagaagaccaagctttagaaacttcttgtctaaatcatttcacatgcaagtcttatcctttctacaacactgataaacgtagagccttggcaaaaataaattttgtcattgtgcctcagcgtcagtagcagagttgttgtatgtgtctttgagaaaaggaaatgcaattttatatgccaggtcagcatgaggtatgaagaaagctctaggggaatacagggaatgtgatcattaatgtacttctcttacaacagttaatgacactgtgcaggcagtaatgagtgtctgtctgtctgccttccggatcgtgaccctcacctaagtacaaagtcttgcacatgggggaagaaaacttacatttattttgtcttcccttatttgcttggccacagtgctaagtgctttaaatatgtgatttcatttaattctgaatgttatgctacctggtagacaatatcccctttttcttagctgaaaataaagctcagagtggtgtaagtacagccataggccacataacatttcactcaacagggtaactgtatatatracgt

SEQ ID NO: 65516 - DNA, 797 bp, Homo sapiens
gtgtctcaggcctgtaatcccagccctttggaggccaaggtgggcagatcacttgaggacaggagttcgagaccagcctgggcaaaatggcaaaaactggtctctacgaaaaatacaaaaaattagacagggatggtggcacacacctgtggtcccacctattgagaaggctgagatggaagaatggcttgagcctgggaggtcgaggctgcagtgagccaagattgtgccactacactccagcctgggtgacagagcaagaccctgtctccaaaaaaaaaaaaaagttccttaaaatcaacttggtctgttgtgtaaatagatgttagacatggagaacatgtgtcttataacaaaactcaatggctccaggcaatataaaaagtattatataaatcccctttaaaaattggtactttggccggtgcagtggctcacacctgtaatcccagcactttgggaggctgaggtgggcggatcacctgaggtcaggaggtcgagaccagcctgggcaacatggcaaaaccccgtccctactaaaaatacaaaaattagccaggtgtagtggtgcgcacctataatcccagccactcagaaggctgaggcaggagaatcacttgaacccgggaggtggaggttgcggtgagccgagatcacgccactgctctccagcctgggtgacagaatgactccatctcaaaaaaaaaaaaaraaaaaaaaaggtacttcaggccaggcatggtgactcacgtctgtaatcccatgtaatcccagcactttgggaggctgaggcaggc

SEQ ID NO: 65517 - DNA, 601 bp, Homo sapiens
aaataaataaatcaacaaatatgtaaagtgaattttaaactttattttaattactttaaatttaaatagctacattgggatagtggctactstgttggccagtgcagctctgtatcatcagaacctaaagctgcagagtacaatgcccaaactccccacctgggtcactggaggtgatggtgagtagggccacgccttaatatccatgccttggctctatcaataggggacatggcaccatgccatggtctttgattcagggcatatactacatcccagagaatgccaccctataccggaagggcatcatctccaagctggagccccagctgtgccttcagaaggctctggcatcactttctcaggcatcagcttgtgagtgctgcagagaggactactagacccatgaccaagtatccctcctctgctgtgaagtgggttgcttgatccgaggtggtggtgagtaagcggagctccatgttggtggatcaaatattataagatggattgtggtgctggccaacactctacaggcagggaagcagaatgtgtgttgcctccaagcaagatgaattgctcccccttccagagtgaagggatc

SEQ ID NO: 65518 - DNA, 601 bp, Homo sapiens
aaataaataaatcaacaaatatgtaaagtgaattttaaactttattttaattactttaaatttaaatagctacattgggatagtggctactgtgttggccagtgcagctctgtatcatcagaacctaaagctgcagagtacaatgcccaaactccccacctgggtcactggaggtgatggtgagtagggccacgccttaatatccatgccttggctctatcaataggggacatggcaccatgccatggtctttgattcagggcatatactacatcccagagaatgccaccctatacyggaagggcatcatctccaagctggagccccagctgtgccttcagaaggctctggcatcactttctcaggcatcagcttgtgagtgctgcagagaggactactagacccatgaccaagtatccctcctctgctgtgaagtgggttgcttgatccgaggtggtggtgagtaagcggagctccatgttggtggatcaaatattataagatggattgtggtgctggccaacactctacaggcagggaagcagaatgtgtgttgcctccaagcaagatgaattgctcccccttccagagtgaagggatc

SEQ ID NO: 65519 - DNA, 601 bp, Homo sapiens
aaataaataaatcaacaaatatgtaaagtgaattttaaactttattttaattactttaaatttaaatagctacattgggatagtggctactgtgttggccagtgcagctctgtatcatcagaacctaaagctgcagagtacaatgcccaaactccccacctgggtcactggaggtgatggtgagtagggccacgccttaatatccatgccttggctctatcaataggggacatggcaccatgccatggtctttgattcagggcatatactacatcccagagaatgccaccctataccggaagggcatcatctccaarctggagccccagctgtgccttcagaaggctctggcatcactttctcaggcatcagcttgtgagtgctgcagagaggactactagacccatgaccaagtatccctcctctgctgtgaagtgggttgcttgatccgaggtggtggtgagtaagcggagctccatgttggtggatcaaatattataagatggattgtggtgctggccaacactctacaggcagggaagcagaatgtgtgttgcctccaagcaagatgaattgctcccccttccagagtgaagggatc

SEQ ID NO: 65520 - DNA, 601 bp, Homo sapiens
aaataaataaatcaacaaatatgtaaagtgaattttaaactttattttaattactttaaatttaaatagctacattgggatagtggctactgtgttggccagtgcagctctgtatcatcagaacctaaagctgcagagtacaatgcccaaactccccacctgggtcactggaggtgatggtgagtagggccacgccttaatatccatgccttggctctatcaataggggacatggcaccatgccatggtctttgattcagggcatatactacatcccagagaatgccaccctataccggaagggcatcatctccaagctggagccccagctgtgccttcagaaggctctggcatcactttctcaggcatcagcttgtgagtgctgcagagaggactactagacccatgaccaagtatccctcctctgctgygaagtgggttgcttgatccgaggtggtggtgagtaagcggagctccatgttggtggatcaaatattataagatggattgtggtgctggccaacactctacaggcagggaagcagaatgtgtgttgcctccaagcaagatgaattgctcccccttccagagtgaagggatc

SEQ ID NO: 65521 - DNA, 1895 bp, Homo sapiens
atatagaaaatatatgataaaaataacatttataatactacaacaacaacaagcatagaacacacccaatgacaagctttacaatgacttcaaggagggaaaactgaacttttattgatggaacaaaagatctggcaaaatggagagacagataatattcctgacaggaagatttaacattaaatatgtcacaagtactagtttccccaaagctggggaggtcaggagtttggggtgctcaccatggctgctcataggagggcaaatggaacctgcaatcaggaggtattctggagctggaggacttccccgtgctcagaccacacatggctactttgagaattgccctgtgactaccttttcttgattggggttccttgaattttgaatttgaagctcttttgcaattgttacaggcaatctccatgtctaagatgaccgtaacgcacccctagataaatagctctggtagatcccacaggcaagaagcattctttttttttttttttttttttttgagatggagtcttgctttgtcacccaggctggagtgcagtggtgcaatctcagctcactgcaacctccgcctcccaggtttaagcgattttcctgcctcagcctcccgagtagctgggactacrggtgcccgccaccatggccggctaactttttgtatttttagtaaagacggggtttcactgtgtcagccaggatggtctggatctcctgacctcatgatctgcccacctcggcctcccaaagtgctggggttacaggcgtgagccaccgcgcccagccacaagaagcattcttgactgagtcttctaaatggacaaagatatatggaacaactgctaattttagaaagtaggagaggaaaaaaaaaaatcacaccccagccaagggctgcttttatcttgcaaacccaacccactattgaagaatgagaaagagtggggttgagcatggggccacacatggtctgatttgccccgattctggctcattccctgaggaacgcccttactgaggtggatccagtggaaaatgagatgtcctccattagacttgctgcacagatgtgggccatggatcagcagcatcagtggcactgggagcttgctagcaatgctgaatctcgtgcccatcctggacgcactgactcgaaatctgcattttaatgagatcccaggtggtttgtgtgcacattaaagcttgagaagaactgccctcaagtcttaaaaatttctgctgaatgtcaatggtaaaccacctaattctgtacattaacatgcaggacaattgatatgttaagaatatttaatacattaaagtatttaaatctcctagttttttttttttttacaaagatcctgtataccattttgctcctaaatagcttccaaatggtttttagttgttgctgtaagtagaaattttccccagttgctggtagtttgtactggagaatgttgtgaatctgactacattataacattttgccacttttcttacttgctggaataatttaagtgaaatactcattaagtcctttgatggcaaatcaaggggcttagggctcactgggaaacaagacggacacaccgggaaacacagcatgcctatgcgaggacaccaacacagacatggtgagggtgggtgctgtgggggtcctagactcctccttcaggtgcaggcttgcctgtaggtgtgtggacagtgaccgaggtccacagcttcgctttcttttgggacctaccagttttatagaaaagcatggtttgaagaagtcccattccccattcctgaagcttatgaggattccatggttataggattttagaactttctataccccatgttctgaatttcaagacacctcctccttttgtcta

SEQ ID NO: 65522 - DNA, 518 bp, Homo sapiens
cacttgacacggagaccatcctagcgtgacttccagtctcacttgcacccagtcttccacagagtacttgagacctccccggatctcccccctagcacccgggcgctgcagactgcctccaccacaccctgcgcccttccgctcccagaggagggggagcaccattgttcttggtggagaagtgggtgctgggatggttggcttcgtgagaagggggaggacagataggtcccactgagatggactccatatcccctgctttgcaccctagcctctgagctatccagccttcagacatcagcttcctgctgctaatggtggtggcatttcaatttttattttttagaacggggtctcgctatattgcccaggcaggttttgaactcctgggcccmagctgttttcccgcctctgcctccctaagagctgggattacaggcatgagcccccttgcctggcccggtggtggcatttcaacacagagaatgagcccagcttcaattccctaggtattgata

SEQ ID NO: 65523 - DNA, 632 bp, Homo sapiens
tcccctatagcctctggagggagtgtgactctgtctacaccttcattgtggacttctggcctccagaactgtgagagaataagtttcaagcaacgcactttttrgtgacttgttacagtagacatgggaagctaatacaggcaccataaattgctattattattcttattccacttgtccttcaaccgaagtgcacatccccatctcagctgagtgtagcacagctgggctgtgtgcaaattccccgtgaccaatgacagtgcaatgttaacatcttcctacactcaggggcctctggctctgccggctgccttcctgcaggccctgtccctggcgggtgtagcgcccccatcgctacctcccttgctacatgatctttgaggaaacttttctgacatcctgcaatctgccttgaccaatttcctggatgaaattagacctcgtcacaaacattgaaccatgcagctgcctgagttcctggaggctgtgcctcccccactgggtgtttagaaaaccgtcaggctcggccgggcacggtggctcatgtttgtaatcccagcactttgggaggccgaggtgggtggattacgaggtcaggaattcaagaccagcctggccaacatagtgaaacc

SEQ ID NO: 65524 - DNA, 1613 bp, Homo sapiens
gatccagcggacttacgggtgagtggacatggctggcttggggtgggtagtccgtggagatgaagtggagagggccttgggcttcctgggtctggaaggctggggaaatgacagttttcagacatttgattgcgtttaagccaagggagtgaagagaaggcagattgcacttctccatccctggcagaggccataccacctaggggatggtgagccttggagcctgcctgccttggtacacaccccagctcccttcgctaggtgtgtggcctcagtttcctcacccgtaaaatgggagtggtcacagcacatctgagttctctgaatggagggcctagggtgggcctggtgcaggtaacgccctcttgaagtgtttgctgatgactcttagggactggcaggctgagttcttccccaggcactcctctcacctgttctagtgctggggcaggtggtggcagtaggtcattgctaccaaggtctgatgtttgtgaacgttgctgtagatacgatgtgtttggggtggaggccacctgcctgagtggcctggcctatgggcttctagtctgactcatttacaagcagcgcagcccactcttctccatcctaaaacgcctcccacctccctgcccttttttaaaacatctagtaagtcctggcagctgcytggggagggacacacacacttaagggatacaaagagtcctgccttgcggcctgcctccccacccccatgatggatggaagctgtctgccctagcgccgtggcatattgatggggttggagttggaggggaaggcagctcagagaccaccacccctttcagggcattggcacttcatgaactttctgaatccaaatccctaatgccagttgatcacgtgtgtgtgctcacgcatgtgcgcaccacgtagattccattgagagagacacagcttgaggagtaacctgcctgactggggcagtgtggacaaggatcctgtggaacccggctgagcctggctcccaggtgaatgggtcccctggggcctggctcccaggtgaatgggtcagaggccccagcagaagttgctgtgcccactttttgggaacgcttggggtgactcgggggctccctgccggcttccgtgtgtattggtggatgtgtgcaagtgtagcagtgggaggagccgctggctgaggggtgctggagggtggccggggcccttctagcctgtgcgagtggccgggcagctcaggttcctgccggggtgcctctgtcctcctgggaagggagcgtgtagggtggtgggagcaggcggccctgtccgtctcgtcctggaatctgttttgtagatgtctagagtcgtcttagagggtgtttggggacactgtagccttcatgccttcaccgagattcttcctatggggttcaggccacatgaagagggtgttccttgttttccagaaccttggctccattccccaggcccacagcaggcgcctgggggcatggactgggcgggagcagctgcccagaggtgagggtgtgtgcctccagtgcctgcagctcttttctgcttacagtgggataaggccttcccacgtgcgtctgggctcgctctgatccaca

SEQ ID NO: 65525 - DNA, 1613 bp, Homo sapiens
gatccagcggacttacgggtgagtggacatggctggcttggggtgggtagtccgtggagatgaagtggagagggccttgggcttcctgggtctggaaggctggggaaatgacagttttcagacatttgattgcgtttaagccaagggagtgaagagaaggcagattgcacttctccatccctggcagaggccataccacctaggggatggtgagccttggagcctgcctgccttggtacacaccccagctcccttcgctaggtgtgtggcctcagtttcctcacccgtaaaatgggagtggtcacagcacatctgagttctctgaatggagggcctagggtgggcctggtgcaggtaacgccctcttgaagtgtttgctgatgactcttagggactggcaggctgagttcttccccaggcactcctctcacctgttctagtgctggggcaggtggtggcagtaggtcattgctaccaaggtctgatgtttgtgaacgttgctgtagatacgatgtgtttggggtggaggccacctgcctgagtggcctggcctatgggcttctagtctgactcatttacaagcagcgcagcccactcttctccatcctaaaacgcctcccacctccctgcccttttttaaaacatctagtaagtcctggcagctgcttggggagggacacacacacttaagggatacaaagagtcctgccttgcggcctgcctccccacccccatgatggatggaagctgtctgccctagcgccgtggcatattgatggggttggagttggaggggaaggcagctcagagaccaccacccctttcagggcattggcacttcatgaactttctgaatccaaatccctaatgccagttgatcacgtgtgtgtgctcacgcrtgtgcgcaccacgtagattccattgagagagacacagcttgaggagtaacctgcctgactggggcagtgtggacaaggatcctgtggaacccggctgagcctggctcccaggtgaatgggtcccctggggcctggctcccaggtgaatgggtcagaggccccagcagaagttgctgtgcccactttttgggaacgcttggggtgactcgggggctccctgccggcttccgtgtgtattggtggatgtgtgcaagtgtagcagtgggaggagccgctggctgaggggtgctggagggtggccggggcccttctagcctgtgcgagtggccgggcagctcaggttcctgccggggtgcctctgtcctcctgggaagggagcgtgtagggtggtgggagcaggcggccctgtccgtctcgtcctggaatctgttttgtagatgtctagagtcgtcttagagggtgtttggggacactgtagccttcatgccttcaccgagattcttcctatggggttcaggccacatgaagagggtgttccttgttttccagaaccttggctccattccccaggcccacagcaggcgcctgggggcatggactgggcgggagcagctgcccagaggtgagggtgtgtgcctccagtgcctgcagctcttttctgcttacagtgggataaggccttcccacgtgcgtctgggctcgctctgatccaca

SEQ ID NO: 65526 - DNA, 1613 bp, Homo sapiens
gatccagcggacttacgggtgagtggacatggctggcttggggtgggtagtccgtggagatgaagtggagagggccttgggcttcctgggtctggaaggctggggaaatgacagttttcagacatttgattgcgtttaagccaagggagtgaagagaaggcagattgcacttctccatccctggcagaggccataccacctaggggatggtgagccttggagcctgcctgccttggtacacaccccagctcccttcgctaggtgtgtggcctcagtttcctcacccgtaaaatgggagtggtcacagcacatctgagttctctgaatggagggcctagggtgggcctggtgcaggtaacgccctcttgaagtgtttgctgatgactcttagggactggcaggctgagttcttccccaggcactcctctcacctgttctagtgctggggcaggtggtggcagtaggtcattgctaccaaggtctgatgtttgtgaacgttgctgtagatacgatgtgtttggggtggaggccacctgcctgagtggcctggcctatgggcttctagtctgactcatttacaagcagcgcagcccactcttctccatcctaaaacgcctcccacctccctgcccttttttaaaacatctagtaagtcctggcagctgcttggggagggacacacacacttaagggatacaaagagtcctgccttgcggcctgcctccccacccccatgatggatggaagctgtctgccctagcgccgtggcatattgatggggttggagttggaggggaaggcagctcagagaccaccacccctttcagggcattggcacttcatgaactttctgaatccaaatccctaatgccagttgatcacgtgtgtgtgctcacgcatgtgcrcaccacgtagattccattgagagagacacagcttgaggagtaacctgcctgactggggcagtgtggacaaggatcctgtggaacccggctgagcctggctcccaggtgaatgggtcccctggggcctggctcccaggtgaatgggtcagaggccccagcagaagttgctgtgcccactttttgggaacgcttggggtgactcgggggctccctgccggcttccgtgtgtattggtggatgtgtgcaagtgtagcagtgggaggagccgctggctgaggggtgctggagggtggccggggcccttctagcctgtgcgagtggccgggcagctcaggttcctgccggggtgcctctgtcctcctgggaagggagcgtgtagggtggtgggagcaggcggccctgtccgtctcgtcctggaatctgttttgtagatgtctagagtcgtcttagagggtgtttggggacactgtagccttcatgccttcaccgagattcttcctatggggttcaggccacatgaagagggtgttccttgttttccagaaccttggctccattccccaggcccacagcaggcgcctgggggcatggactgggcgggagcagctgcccagaggtgagggtgtgtgcctccagtgcctgcagctcttttctgcttacagtgggataaggccttcccacgtgcgtctgggctcgctctgatccaca

SEQ ID NO: 65527 - DNA, 1315 bp, Homo sapiens
gtgtgtggagggcctggccctgggaagtcacggtttgtcagtgacgcatctcttgccggccctgcttcagggtctgttgattgattacctgtgcaaaaccgaggcttagagcaactgagagacttgctgagttcacacatcccaggatggtggggcctgagctgtgggctgcgagactcttgtccctcccacaaggactcaacgcctccctctggctagatggcagctcttggatgattcagagcacaaggcctcgagactgatgatgaccgtgagaccctctcccaggcatgtgcctgccccactgcatgtatagtttcagggacccctacgtcctttgtgtgaaggtctctggtgcccactgggtagtagatggctgcccttaccatcacggggccttggtgtgtgcacaccacggggcctggacagagcacctgggtccccagagcaagaggacgtactggggaggcagtgatgggaagatgtctrtctccttgagagcatgggatgcacaagctggggagaatgtcgacagctactcccagcatcattcattcatcaggtgtttattgagtgcttgctgtatgccagacctggtgccagggatcctttgaataagaaagacacggtccccgatctcgtgctcacattctgtttgtgcactcgtgggcccacatggtgatgcgtgcagttaaacaggaagctggcggaatgagtgcctgcgtggggacggaacagttccgcgtctcgagtacagtggtggggagatgtgtctgtgtgtgtgataaagcttcacagtttgtgtgtaactacacatgacatgtaagaatgttggtgtgtgtagaagatgatgcagcgtgctgaaggcctgcagtccaggtcatagcagtgtgcctgggttagtgtcctggttttgctcatgtccttagttactctgatgtgcccttgggggatggaggaggtagggtacacaggatctctctgtactgtttttgcaacttcttgggagtcttttattattttataatacaaagtgaaacaaagccagaggagctgtttgcaggtgatggcgtgtgtgtgtgtgtgtgtgtgtgtgtacgcacgcacacgtgtgcgggcgtgctggggaaggctccactgaggatggcggaaatgggccctgttggcttctggggaagagcgagcagcccaggcccagggtgacaggccagctgcaggtcgccgtggcgggcacagggtgagcaccgcagggcaggggcagaagctgaggtcagagccaggcggcatgggggctgggaggaagtgactcccccca

SEQ ID NO: 65528 - DNA, 653 bp, Homo sapiens
agtcatttaggccaagtctttaatttgatgaggacttactggagagccagataaatgaagtcccttgcatatggtcatatgaatatttattggcaaagcttggcctttgtcctcctgacttccagatctcatttcatcttgtggtgcttccagcatctggccaccttgctagacctgagtcataaaagcaatggggcgctaagaccagccatactataggaagtggtgacagtttcctcatttaaagttgggttgtctttctagaatcttagagttggaactcaactcagaaatcacctgtttgatcctcccacaaaggcaggtgtctctcttgcaatattcttgagacaatcatctggcttctgcctccttattttctattatcgggagccagcttcaggaaataaaacatttcactagaatttttgtgttgttacatttagctaaaatttaccttctcttcacttctgtccttacatcccaacactgccccatgcagtaacaccaaatgcaaagacagactgtgctttcgaccacagggcactcctctagaagtgttaaaatacttatccagtatttcstcaagcttctctttttttctcaaagctaaatatctgatttttctaaactgtgccttataggttacagttgct

SEQ ID NO: 65529 - DNA, 1607 bp, Homo sapiens
aaagatctcaccattgtttacacagagaaaacatgtgcaaactgaacctgctcatatcatccattaggctggatatactagacctcctctgtacagtgaatgtccatccatgtgagtggatctcctgacttgaagccctgcagtgtcggaaagggtagctgttagtgcccaataaagaaataatctgcttctgggacagatactgttcgtgtcccctccaccccaccctactggcactaactattcttgtatgtggcgytgcatccacctgcaagcccctctgattcttcacctaggggctttctcttggtaggcatgtgtttggggcaggccagatgtgttaattttgggagcatccatccaccaatgacaaatgggagttggagaaaaaataccccagcttcctcgcctcttgggtgggtgaattctgaggcatgctcacattgtcttccaaagttctcaggagcactcagtcccagtggcctggagctgtcacctgcttattaatgcatgctgcattggcctttctttcttgatattgcttcctcacattgcttagcagtatgaacattatttcccagataaaaccctctatccaagtatttgtctcaggtttgcttttgagggaacctagcctaaaagccttccaaatattcatttggtaaagatttgtataacacaatgccagccttatctttacgtgaacaaaatagttgtgcagtgttatcaatggatgcctcaatacaactggcatgcaaggattattcccagacagacttttggttctgatgatcctgaattagaaaaaaaatgcagtgattaatacaatcttatacagcatgcttgtgagaatggctgttccttacattagcattattaaaactgaaatacagaaccagattgagtattcaaacaaacttgagactatattcttcctctattaagccaaatatcagtgattttgttccagcaaaataacatcatgtcacattaaattaatgttgggaatttaaattttattggttctctagttgtgcttgaatataatttaaaaatttattctagatttgtagttatatcaaagctgtcagaataaagagtttatgactagttttatatttatacatattgaaattaaattataatgaatttttaacattacattgagggtccataaaatatacgtgtgtgtgtgtgtgtgtgtgtgtatatacacatgtatatattcacacatatacacacacacatatacatatatgcacacacacacacatatatatatcttttaacccctttaataagagaaactcctcaggcctaaagaaaaacttctttaggtgactgagagacactaaaaggtttcgatcactgaggtgacctcatgaaaatggtgtttcaggacaaattaatggaaaatgaatttaaatcaagatcttagaatatagtagacagacaatactatttgctgaataaatgaattaaataaaagtaaaccgagttagaattctgttgcagcaaactataaaataaaacatacgtatgtaacctagagtgctggaattagaaaacagagacttagagaaccttgtgattatatacgggacatg

SEQ ID NO: 65530 - DNA, 639 bp, Homo sapiens
tctcagatcatcacactcctctggccacaattgctgtaaacatgggcatctggtcctgatcagagacaatgaattatggtgtgataaagcctatctggatacttctgggaaagggactttgttattccctcagctatgcacttgtgaggacatgcgcggctgtagtcatcttgtagtcacgagaagagaccttgcctcagagtggagccccacggcagacctttccttttgcagctcattctaagctcattctctctccatctaaaggtagagagagaggtatcggcacttggtaccattatttatgtcttgatcaaatcatgcctgaagttcctacttctggactttgcagtaatatgaagcaataaattcccattatattgaagccagttgggttgagtttctgttatttgcaaccaaagaagtcctaagtgataacactgcttaagcagtcaactttagtttttacagtgtaacccaacrtacgtaggacacaatcagctcatcacaggtgtgagaatgaatggtgagaaaatggaaactgaaagccaagatgtgcagttgaagaaaggaagagaaatttcagatagaaaccaaaggaagaaataggatcagtgaagacagtgattctcaaaccag

SEQ ID NO: 65531 - DNA, 639 bp, Homo sapiens
tctcagatcatcacactcctctggccacaattgctgtaaacatgggcatctggtcctgatcagagacaatgaattatggtgtgataaagcctatctggatacttctgggaaagggactttgttattccctcagctatgcacttgtgaggacatgcgcggctgtagtcatcttgtagtcacgagaagagaccttgcctcagagtggagccccacggcagacctttccttttgcagctcattctaagctcattctctctccatctaaaggtagagagagaggtatcggcacttggtaccattatttatgtcttgatcaaatcatgcctgaagttcctacttctggactttgcagtaatatgaagcaataaattcccattatattgaagccagttgggttgagtttctgttatttgcaaccaaagaagtcctaagtgataacactgcttaagcagtcaactttagtttttacagtgtaacccaacgtacgtaggacacaatcagctcatcacaggtgtgagaatgartggtgagaaaatggaaactgaaagccaagatgtgcagttgaagaaaggaagagaaatttcagatagaaaccaaaggaagaaataggatcagtgaagacagtgattctcaaaccag

SEQ ID NO: 65532 - DNA, 970 bp, Homo sapiens
atacacaaccataaaaagaatgagattatgtcctttgcaggacatagatggagttggaggtcattatccttagcaaactaacacaggaagagaaaaccaaatactgaatgttcccacttacaagtgggagctaaatggtgagaacacatgaacacatagaggaaaacaatagatatgggggcctacctgaggatgaagggtaggaagagagagaaratcaagaaaaatgactattggataataggcttaacatttgggtgatgaaataatctgtacaacaaacctctgttacacaaatttacctatatgacaaacctgcacatgtacccctgaacttaaaataaaagttaaaataagtaaataataaataaaataaagcataaccaaaacaattgttgataaaactaccattacagaaacataattgagaacatttattgcaactattatatatcagtattttacactattttccgactgacttatttatcctaaataataaacagttcatgaagtttgtaacaaaacttctgctatgttttatatgagttatatattataatatctaatttaatttaaatatatgaaaatataatcttgtcatatacaatgttttcaccattctgggaacctctaattttgtttatctttaaaaatgagtattgtctttctcaaagatgaaagtaaaataaaagtaattgttaattgagttttaaaatttgtattcataattcaaatattatgtaaaatttgataaatatttctagaacaagaagtatttcataatggtaaaagtccgagttatcaagaatatatcataatctcaaatatatcaaatatataacagaattttttctagtgtgcataagataaaatccattaaaatatattttttaaaactttaagtatctagtattatagctagtgatcataaccatctctctcagtaactgatagaacaagcagacaa

SEQ ID NO: 65533 - DNA, 970 bp, Homo sapiens
atacacaaccataaaaagaatgagattatgtcctttgcaggacatagatggagttggaggtcattatccttagcaaactaacacaggaagagaaaaccaaatactgaatgttcccacttacaagtgggagctaaatggtgagaacacatgaacacatagaggaaaacaatagatatgggggcctacctgaggatgaagggtaggaagagagagaagatcaagaaaaatgactattggataataggcttaacatttgggtgatgaaataatctgtacaacaaacctctgttacacaaatttacctatatgacaaacctgcacatgtacccctgaacttaaaataaaagttaaaataagtaaataataaataaaataaagcataaccaaaacaattgttgataaaactaccattacagaaacataattgagaacatttattgcaactattatatatcagtattttacactattttccgactgacttatttatcctaaataataaacagttcatgargtttgtaacaaaacttctgctatgttttatatgagttatatattataatatctaatttaatttaaatatatgaaaatataatcttgtcatatacaatgttttcaccattctgggaacctctaattttgtttatctttaaaaatgagtattgtctttctcaaagatgaaagtaaaataaaagtaattgttaattgagttttaaaatttgtattcataattcaaatattatgtaaaatttgataaatatttctagaacaagaagtatttcataatggtaaaagtccgagttatcaagaatatatcataatctcaaatatatcaaatatataacagaattttttctagtgtgcataagataaaatccattaaaatatattttttaaaactttaagtatctagtattatagctagtgatcataaccatctctctcagtaactgatagaacaagcagacaa

SEQ ID NO: 65534 - DNA, 970 bp, Homo sapiens
atacacaaccataaaaagaatgagattatgtcctttgcaggacatagatggagttggaggtcattatccttagcaaactaacacaggaagagaaaaccaaatactgaatgttcccacttacaagtgggagctaaatggtgagaacacatgaacacatagaggaaaacaatagatatgggggcctacctgaggatgaagggtaggaagagagagaagatcaagaaaaatgactattggataataggcttaacatttgggtgatgaaataatctgtacaacaaacctctgttacacaaatttacctatatgacaaacctgcacatgtacccctgaacttaaaataaaagttaaaataagtaaataataaataaaataaagcataaccaaaacaattgttgataaaactaccattacagaaacataattgagaacatttattgcaactattatatatcagtattttacactattttccgactgacttatttatcctaaataataaacagttcatgaagtttgtaacaaarcttctgctatgttttatatgagttatatattataatatctaatttaatttaaatatatgaaaatataatcttgtcatatacaatgttttcaccattctgggaacctctaattttgtttatctttaaaaatgagtattgtctttctcaaagatgaaagtaaaataaaagtaattgttaattgagttttaaaatttgtattcataattcaaatattatgtaaaatttgataaatatttctagaacaagaagtatttcataatggtaaaagtccgagttatcaagaatatatcataatctcaaatatatcaaatatataacagaattttttctagtgtgcataagataaaatccattaaaatatattttttaaaactttaagtatctagtattatagctagtgatcataaccatctctctcagtaactgatagaacaagcagacaa

SEQ ID NO: 65535 - DNA, 971 bp, Homo sapiens
aatacatgtacattattttggagtacatgtaataatttaatacattcatataaattgtaaagatcaaatcagtgtacttggggcatccatcatcttaaatatttgtctttttttatgccagaatcatttaaattattttcttctagctattttgaaatagaccatacattattttataaaccacagtcaccctactgatctgagttttatttcttctatcacaccatatctttgtacctgttagtcaatttctctttatctccccctcctccctaccttttctagcctctggtaacaaccaatctactctcccttcatgagatctgcctttttagctcccaygttataggtaaaaagaaatgtgatatttgactgctgtgccttgcttatttcacttaatataaaggcctctagttccatccaaattgcttcaaattacaaggttttctttctttttctttctttatgttgaaaacaatgcaagttaataagaaagaaaatatatgatttgggccagacctaaggcccctccagcactaggataatttttttttttttacatttgggaaaataaaactttattaaatcaaatgaatgggcatgtctgtttcctaagaaagacaatgataatgaacttggtggaaggaataatagtgggtaggagtttgttgactttgcttttagcctcacggtagttggtagagcatcagggaatgattaacatttttttttaatgtgactgcttatctgcttgttcattgctgcagcttcagttctgagttgacgcctgaactgccaacagtatccattattccagacacggtccaaagagggcagccagcctgcactggtcctggagctgtgattaaagttggccccaactcagtttggggaaagttccttcaacttctctttttccttttctttaataaattctttataggacggtcctgtttgttggttcccagaga

SEQ ID NO: 65536 - DNA, 740 bp, Homo sapiens
aaattagctgggcatggtggtgcatgcctgtagtcccagctactcaggaggctgaggtaggagaatcattgaacctgggaggcggaggttgcagtgagccgagattgcaccactgcattccagcctggcgacagagtgagactccatctcaaaaaaaaaaaaaaagccaatatgaatgtggcttcattcttctaggcacactggcaggacagtgtggtagtcaggagcacagggtcaagaggcaggcagccttgggacaaacacctggtgctgccagctctaatatgtgtaaattactcaagctctgagcatagttcttctacctataaaatggagagactacaggtacctcctcagaggtgtggggagggtctagtgagccccaggctgtaacatccctagagcacagtgccaagcacacagtgagcctagtggctggcccagggttacacagctgagacttcacctctggtcttcccactgaggtcattgttgtcctcacctgcactgactcttcacccacaaaattctattctagctagcttgggagaattctagtccagccccgcatcctgaaaaatggaggcccagggaacctgagtgacttggacccaaccaagataatggcaggcccagtcgcccttgctcacaggacaaaccaktcctttcgtggtggacctggggtggggtgggggcagtcacttgcagacattgggtgtcctcctttcccatgctgatta

SEQ ID NO: 65537 - DNA, 661 bp, Homo sapiens
tgctggtgagaagtctgtttctcatgctcatagatccctcctggattcctcctgggtgcacaccaagaaaagggagctggaatgacctgatactgtggattacgtttacatgaacatggtggcattttgggtggctttgatggtacacctactagaggcattatctttttttacctggtctggtgtgatattgtctgattaagggattcactagcagggctgcaggatttcctgccctctgtggatgccagcagtgcactatccactatcgtcatggccccagagggctcccacccaagtgatgctttaccatcctcagactggcaacgctaaaagataagttgtgttcatttcaccgctgtccagtttggcaccaggcagcagtggggttgcttgctggggccactcaacaggacctcactgcaacrtcagtgccccccaatatgaagttggggcttttgcaccccaggtggaattttcttttccttaggtttatattcaggaatgtcctcagaatttggcagatgtctatgaggccaatggcaaacagtgctcaatggcaaaggggtatttctatagaagagtggccaatatttgtacttggaaggaggggctgtgagcccgcggggatggggaagatggaaagggagaagagaataca

SEQ ID NO: 65538 - DNA, 689 bp, Homo sapiens
tatgatcacagagatgatcaatgatctaaatgcctcacctattttcagcagagccatggatacaagtaatcacaaggcagaagatattttccctttgcttctgaactgcttttggtggcaatgatacaaatacaaattgtggttgatgtttgcataagggcacagacatgcttggtccaagctgaagtaaagattccaagttgtggaccgtcctgcccacattctgcatcatgatgtcaaaatagcatctgatgttctttgcattttcattgaagtaattatcacaaaattgttctcttacttcagcatttacactattagaattgagtgattaaaggattgtgtgattttttttttggcattcgatattcttcatttcctttgcagttagaaactcattggctcctgtaactaacacagttgataaagttgttagtttaygtaaagtcttgaaataataattttaattttcaagaaaagactccaaaatttttgtttactttaaaaatactccattgagtgaagtttacttgttttttattcatagtttttttttttcactaggaaacaaatattttattccttttttctgttgctcagaggacagatcgtgatacagaaaacagcagtctagccacagaggctgggtttggttgatttccacaggcacatggaggacaggaatggtg

SEQ ID NO: 65539 - DNA, 748 bp, Homo sapiens
taacacgttgctaaacatccaaaggcagccagtagatttccaaaaccggaactctccgtttgctatcacctctgcccttctccagggtattgcattgattcaaatgctataaatcaggggtccctaaccccaggccatggaccggtaccttcacttgcttacccaccactcacttcctgttctgtggcctgttaggaatcgggccacacagcagagggtgagcagcargcaggcaagccagccaagcttcatctgtgtttacagccgctccccatcactcacattactgtctgagctccatcttctgtcagatcggcagtggcattagattctcataggagcatgaacctggtgagctgcacatgagagggacctaggttgcatgctctttatgagaatctaatgcttgatgatctgtcactgtctctcatcaccccaaatgggaccatctagttgtaggaaaacaagctcagggctcccactgattctacattatggtgagttgcataattatttcactatgtattacaacgtaatagtagaaataaagaacacaataaatgtaatgcacttggatcatcctcaaacgatccccccacctcccactgttcgtggaaaaatggtcttccacaaaaccggtccatgctgccaaaaaggttggggactgctgctataaatgacatcctgaaagtatgggagtagaccctctcaattatctaaaaagtattaagctattctgagtaccctt

SEQ ID NO: 65540 - DNA, 1108 bp, Homo sapiens
ttctcaccctcacttgacagataagttcttggaggttgaataactcacccaaggtcacctgtcgttaaagtgactgactctctaggcctcgtcttgagcaagatgggtgtatttcgattcagatggcccacgtcaggctggacacgcgggcccctggtgaggcctgagtccctggccggggagctccgctaagctgcccgacctcccatgtgcagagggcgctgctggggccacaggcgaggctgcgtggggaagcggagcgtggattccagcgctttcccctagatccaactctgagctgctttgctatgtgaactcaggaaatgacctgccacaactagcaggtgggcacccagccggggctggggtttgcacccggtttctctccaaccaggccggggctggcggcctggggagttcggctgtggcgcctggcgccctctggcggcgcggggaggtcctcctcggccgcgggcggccgggaccgcttggagccgcgaagggacgttttttaggaaccactagccaggcgcgggggctcacgcctgtaatcccagcactttgggaggcctaggcgggcggatcacgaggtcaagagatagagaccatcttggccaaaatggtgaaaccccgtctttactaaaaatacaatgctgtcctcaagggtcttcttaggaactcttctgtgagctgagtggggaaaacgggaaagaagactcgagtctggaggctgagattttgacaccggcttccccagtcatcttggatgggtgccttgagttcttcctatgggggacgggaatggcgatggggacagggatggggatgccccctccctacgtgcctccagatcgccgtgggactcctgctggatgcgacgagtgacagccccttgtcagcccagaagcgctactatagagcaaagacttgtgttcatgagaaaataactgacagtccaggatgccaaggaccaatggcccaggaaggagctggggagagaagaggcagccccggagakggggcgtgagcaagacagcggggcactggggaaggccgtggggttcagcagaaagatacactgtttagggcaaagggagcattatgcggg

SEQ ID NO: 65541 - DNA, 1367 bp, Homo sapiens
agcctgggcaacagagtgagaccctgtctcaaaaaatatatatatatattttgatattttgctcattgtgattttttggtgttaattttcacttaaaaaatgttaaattaaaatattgtttatcatgattactcaattctttggtgccctcttagattttgcatccaaggtgagtatcccactgaccccacctgggcccagttctagggagartggagggtcccagctggggcctgggagaatagcaggaaagtgagaaaacaaagtcgagagaggaaagggtttcagaaagaaggcatggtcaatgaagacacagcagcggagatgggaccgttccttcctctacctttgccacgtcactgtggttttttcttaaatttatcaaaggtgggaggagaatttagaacttcctagagtccagcctcaggcagtgagagatatttccaggcagatccccagggagctttgtggcttcgatgcctgcctcccagaggttgcaacactatctaaagagcagagccccctctaagaaaatcatttttgaggagggggaaaaagttaaccctgaagcttcaaatggtgtcacctctcttcagaaggaccaagaatgcgagtgaactgggtacagtggctcacatctgtaatcacagcacttttggaggccatggcaggaggatcccttgagcccaggagttcaaggtcagcctggccaacatagtgagacctcatctctaaaaacaaaataagataaaataaaaaataaaagaatgggaatgaacgaggaacgctgtggctccctgatccccgtttaaggctcagtgtgcagcgtttgcatctacatctacccgggctgggtctccttgctgtcacacatgttctatttctaccctcaaaacaatggaggactttggaagggaaactgaggccaaaacgcacaaactaattcatccaaggccttgcagtgtgactgccatgtcaacagggtcagggtgtcctgctgggatttgaacccacgccccctgaccagtctaggctgcacctttggccccttaatctaatgggtaaacaatctcctaatcctagtagatgggctacttctgggcagcaggctaatcccatccacagttcattcatgcaatccacatctactgagcacctatccatcatcagccacctcagagctggggatacaaagcccgggtcccacccttgaggagctcagtgtttagttaacaggatgatagtggacaggatacgaagtgtggctgggcccaggccatgctaatgtggatttccatcagcttcccactgagcagctgatttcagaatttccttcttttggggtcagaggcccttccacgttgact

SEQ ID NO: 65542 - DNA, 623 bp, Homo sapiens
tgaatcttggggagaaaactccttgcattgtacatattgggctggttacatggctgaagttcaccgtgtcattttaggcctgtttctggcttccacactggtttgcaatgtcatcctagggaagtcagcttgtccttggtaggatatattcattggtgagttcactcaagagactcctttttgcgtttctttaccttcaacgttcgtttcctaaaattgattattccttcataaagttgccagcattttcaacatgcttcctagatgctggatattttattatcgtttgtcacggatcaatttatttttttggcccttaaactatcacattttctgcagttaaatttgcttaactttctaatgcaggggcagaatgtaacctgcaggttgtggctttagaaagcaatgtggaactcggggccatggtaagcaagttggtggtggttttttttaatagcacayctcatcctttgatgtcagaacactgtctacacactctgattcatttcagtcagtccctaaaatgtgaagatgaaatgttggggagacagatcctctggcctgaggaagctagccgtcttgtttgggagataagaaacatcaactgttttgaaaatactttg

SEQ ID NO: 65543 - DNA, 586 bp, Homo sapiens
tgcacacgaggtcgtgaatagctggcaacaaagaggattgaaccttggacctagtgtgtctgagcagtgccccagcccccatgccgctttggatttcagtggcctctgcagcaatttattattcttacatcagatgtttgaagtaggtgaaggggcaggtggcatgtgtctggtgaggttgctgacactgcttttggatgagagagagagtagtggttgaaacagagcattcaaaaaagcgtacactttaacctgtaatccgcaaacattcctttgagtttacccagccgtgggaaaggacgctgtacccctgccctattggctgcaccctttgctgttgatgtgaggctttatttacctgggaattgacagggttttggtcmatgattgctcctttctccgcaatcacatttaatgcccatgatatctcatctttgcacacgaaggcaaagccttctactgctttttctcttaaagtgttcagcactcccctgagtttattagaaggatcagaagaaagagaccctgagtgtgaggctaggtcaaccggagaaattcacccaattatttcgtttctttgtttgga

SEQ ID NO: 65544 - DNA, 1225 bp, Homo sapiens
gtcagaatggggatcccagtagtgggcagccatcgggaatgtgggtggagggtgcagcttgccttggcggttaggcagttgtagtgtccaacagtggacagacgtgtccctgaacgaggggttcctgtggtgggatcccaggttctgagctccactgctctccctctgtagccctgcccctcttgttagaagggcaggtcgctgtgatccctggaagcatgcatgacttgaggtggagcatggggccctcacgtggtttaatgggtgccaaaaatctgtgagcatcttggtggatgcggaggggaacacccataccactccttgccacctatcatcagtttggagtttaaagaaagtccacttcaaatgagagtttgargttgacacagggaggacagtagcagggaaaaccactgtatagccagataatccgacagtggcactgtaacataaacttctctctttaaagaaaataaagtttcccaattctggagtgaagctgtggctgcctctgggtcagcaaacataatggaaacagattgtgtgactgctgaacagtgcaaaagtaacgagctcttccctagacccttgagcaaaaatgaaaaagcaactgctttacccagcactgagtggggtcagcttgcccaggctctgttggaccttggggtgggggacacctgggaggctggtgaaggttttatgagtcttcagacccgctgtcagtttccccaccctagctcctgtttggatgaatgatgggtgagtggttggtctcctgtttggaacagaggaagaggtggtcagaaaaatgatgggagagggggtgggggagattgggttggggaagacataatttcttcttgctactgctcatgtttcttagggctttggggagagggaagtcagtttgggaagatactgattttagtgtcaaagcaggcaaggccactgtcctgcctaacttctagcaagtccagaggcagtgggcttagtgaaagcaggtgtggtggggcgggggtggcggggggtgcggtgaggctgcctgggacagagacacaggtgtaagcaggagtcgactgtgaggctctggctgagatcccaggaagggaagctaggtattcctgggaaaagcctgtgaagtctcctggagtgcccagcagaattcacgtgatgagaaaacacacaaacctggccaagtctatgctccctgttggtttttgtgctt

SEQ ID NO: 65545 - DNA, 669 bp, Homo sapiens
gcctggctaactttttcattttttttttttttatagatgggggtctcactgtgttgcccaggctggtcctgaactcctggtctcaggcgagctccccacctccgcctcccaaagtgttaggattacaggcgtgagctgctgtacctggccaagtgctctctttctgatccttagttttctcttctgtaaagtgaggataaaaggatatattctggagcgttgtcaggagaattgaatgagctgcatgtgtaagccctagcagagtttcctgggtatagaggaggcacttagtcagcgtcacctccttcccatcttctcaggagttggagggtgacagagcagaggaaatttaggttttcactcttctgggggtgggtcaggtaactatgatcgaacctgcacgcattgttttagtgccacgttgattgggtcgcgcctgatcatttgcttctggtctgactgtcccagatcccygtcagcacatgtctggcaccagccatcctctgataaccctgccatagagctccaggagagagtggggcctgttcctggtggcctgagttgttgaattgtactctttagacatcgaacctaatgtttcaaaacacacattcattcgtgaggcctgtctgccgcgctttctctcccggatgtgagttccagcacatg

SEQ ID NO: 65546 - DNA, 707 bp, Homo sapiens
atgggagagcagcgagcgtgggaccaggtgggttcctgccaggggagcccaaggtaacaggggtgcgatgggctcctcaggcccctcaaacccagcatgtgcaacgctggctcagccctgaccttctacattcctatgttccctccatgcccttcccagaacctcatttggaaatatggggtcattcccatgcttgaggatgagaatgcttgtgaggattcccatggcctgcctgcccaccaagcctcagggccagtccccctgggctccaggagcagctagagaacagttctctctctcctcctgccagcctgagcgtgtgtgtgtgtgtgtgtgtgygtgcgtgtgtgttgtgggggtaagaggacacattctcctccccaattttcaaagatacagtcatggccgggcgtggtggctcacgcctgtaatcccagcactttgggaggctgagaaaggtggatcacttgaggtcaggagttcaaaatgagcctggccaatatggtgaaaccctgtctctactaaaaatccaaaacaaacaaaaattagccaggcttggtggtgcactcctgtagtcccagctacatgggaggctgaggcaggagaatcacttgaacccgggaggtggaggttgcagtgagctgagatggtgccactgcactctagcctgggcgacagagagagactctgcctcaaaaaaaaaaaaa

SEQ ID NO: 65547 - DNA, 2164 bp, Homo sapiens
ttgagtcagatgaggatgagagacttgatctcatttctgccaaggccacagggctggatcctgagaactcagcatgacttggacctcccgaggcctctgggtgagtgatagggctctggaatctgaagtcccaaagctcagtgggcagaatggccttggccctgaagctcagtgttttccctccttttctctccaaggatcaaaagccagtgactttcaaacccgaccagatcccaggtgtccttggagatttctcaggactgcccccgggatggaaaagcctccttccaccttttgtggcctcagtttccatgtccttgagatttcagcagggacagcgccaggatccttaactaggagacacgttgtagacatacctagggggaggcctgggcatccgtcttaaagctgcatttatttgcaaaataagctcagtgtttttatttgtaggataagctaagtagattatgtaaaatctccacgtctcccatccatattgccagtgttgtgtggttctgggtatgattgcaccctgaaaaaaagtgttctatgccgaggaatgaaaattaaaacccacaaatctaacctctcgagtgcacgcacgcacggtagtcacttagcgcctcccatgagccagagctttcatttcccatccaactctggaagtgctgcttttcttgttatccccacttgcagatgcagaaacggaagctctgagggatggcctcgcccagcacacacctttgcagaatttgctttcaaagccaggtctctactaccatctccagcacgctgctgagcctctatgtgcattagaaagtaaaatcacagatgaatttctcagccatctcaacgcgccccatctcaacgcgccccatctcacattcattatcatttgctttgaaggatttttttctttttgaacagaaggggcacctggctttcctactctgatttgcagatgtgtgttgaaggaatggagagagtagattttgcagttattccctctgggccctccgaccttcttggagacctgtcatgcagggttagcaaagccatttcaacacactactgtggtgtggacaaccaacacagactttgctgccccggaacagctccccacygccacctccaccccaattctctagcttttaaagcctttcacttggcaggaaaacgctgcccccttctggcttaaatggacaggcacgtccagggcaaggattcagattcctgtgaacgtcattcaatgtgaataataggcgcactgaagaccaaaggataaatcggggtaaacggggcagggcaagacaatgccgctgggcggagatgaagattttgcgataccctcttcacttaacgagattcatgcagtcccttcggggcaacaatagcattgccaccagttgcacaacccaagatgttgctgacagactgtcctctgtggaagaggttataaaagcatctatgatttcagaaggggcaataactccaataactaacacagtctccaggggtgactctcaagccgtgaaagtcaggacagcggcaggaagccccacaccgccagcagggatccttggctgccagtggaagctgggcttggctttgtgtgggttctgcgctccttcgcccagtttcaaaacctcccgcacctgtgtctttctccatgcaaatgagcccaacaggaaaaacaggcgcctgtggaggtttcacaacaacctagaagctgtcccatgccagatctctgtcggtgagaaaatgtgtgtggatgctgacttctagaagactccaaagcgcttgtcttccccactccccatttccaaaggctgagactcctctgcactccgagtttcctcccacgcttcgtctgaagagtgggttttggggagtgaaggatagaaaatatctgaagactcttccctatgacttaagacatgaattttcttctcaagtcttgaactaaagtcagaaagtgtttgcaagaaatgttcttctaggtcccacatccacgggaccagatgatgcctgggtgagcatgttttttatgtatttatttatttttgagatggagtctctctctgtcaccaggctgcagtgcagtggcgtgaccttggctcactgcaacctccacctcccaggttcaagtgattctcctgcctca

SEQ ID NO: 65548 - DNA, 707 bp, Homo sapiens
ccccattctctcccaatgtggaaactgaggcaaaaggaggtcaaggctatggctcctcagccaccaagagacccacagatctgctgtgacttccctgtgcccagaattccagccttgcggggaagccgtgggaagttcactcaggccatctcaaatcccaaatgtccaccaccttgaacacccatctttggacagtgggaaagctgtgatccagctccatctggatcctttagttaccctaaaccttgagcggccatggagtcccgacttctgacctatgagattacacaaaaacaatacaaaacagcaaaacacatgatagaacagtgaaacgcgaatgctgcgttgcttgggtaacccacgtgtccgtctcaccaggttgtgagctctcccaggcagggaccacgtcgccatatcagggtcagtgcacgggcacaggatgccacctgccgtgagcrcctgctgtgtgtttgatactattccacaccataaggatccagagatttccaccggggactttgccaagctgttatctcccctcatgactgagtgtagaacagagtcccaggctgggcgcagtggctcgcgcctgtaatcccagcactttgggaggccaaggtgtgaggagcacttcagctgaggagtaagagatcagcctgggtaacatagtggggctccatctctacaaaacacaaaaagatatactt

SEQ ID NO: 65549 - DNA, 790 bp, Homo sapiens
agagacaaggtttcaacatgttggccaggctggtctcaatctcctgacctcaggtgatccacctgcctcggcctcccaaagggagggattataggcatgagccaccacacaagcctatctcttccatttcttaacttaacacgttcaatcttttttctagcttcttgaacacatggaatacagttgtaataaccattttcatgtctttgtctactaaatatattgtctgtgtcagttctgggtcagtttcaactgactgattttccccttcattatgggttgtgttttcctgcttgtttgcatgactggtgatttgtgattgaatgccagacaatggttgctggatattttgtattcctataaatatcatcaagctttgttcagggacacagttatttgaaattagtttgatccttttgagccttgcttttaagttttgttaggtgggaccacagcagcattttagtagttttcattttccccacaactggactcacccggaaaattcagaaattcagaaaatctgcctattttaaggtctataaccttaattacatatcaaaatcccttttttccagataacataatgcactcacagtgggattagggcatgaataatttaggggsccattagtaggccttacacagttcaccctcaggctccctcccccctgtaatattcatgtctgttccatacacaaaagagagtggtgctcctgagtttgtactgctgcatggttgaaggtgccacagagattggaaattgtcaaaaagatactacctttgtcca

SEQ ID NO: 65550 - DNA, 566 bp, Homo sapiens
ttccttttccctgccagtttgtggtgccattttgattgtaaattaggttcccaaagatacatggctttgtccctgagctctccatcctgtttcattcctctagttgtctgtccttgtaccaatacccacaaactgtaattccatggccctgtaacatgttttcataacacagcaagccacccctacctcacttctttagtgaactatttctctgtttataacttagagtaatttatcagatttctcaaactatccaactggaatttttattaaagttgcactaactctcgggaggctgaggaaggagaatggcgtgaacccgggaggcggagcttgcagtgagctgagatygcgccactgcactccagcctgagcgacagagcgagactccacctcgaacaaaaaaaaaaagttgcactaactttatgaaattatttgggaagaagtaactttttttatattgttttcccatccaggattattcagatcttcttctaatttttctatttaacttttagggttttccttaaagaagtctttgcatttacgttgattcctggacactg

SEQ ID NO: 65551 - DNA, 1578 bp, Homo sapiens
cttgagctgaatcccaggtgcagagactggggggaggtggagaatccaaaatcatgctcaggtttctcctgaaaagtgtgtattttctaaaaaataaatataaactcctggtttgagaaactccctcatgatgaatgggaggaaaatcatggcaaatggagagctaagaaaccatcttcgcatagactttgcccaaggtgtagaggaagatctgccggtcaggcaggatgaagacccacacakgagcctgtgtcctccaggtcgtcccttcttccaaaagcacagcaaagcaatacaacttgaggactccctccaagatttcctaatttttgattttacatttaatctcaggaggctataccattaagaaacattattagagttattgctgggtgctgggccccagacgatactaagtgaggcagaagctttcaataattcctacagccctcagcaccaagaagaacttggagggaatattgggcttgttgagaaagtgggaaagaaattagaatttctcccaatagaagaggcagatcaccttggcctactctctaggacacaggtctttcttctgtgctacaccaacactacagaatacaaactcatacatatacatttgctaccataggttctacaacagccccatgccctccaggcagaaggtggaggcaggtggccgctgattctgaggatccctgtgtgaacagtgccgttagccctgaggggagctggcgcttgcccaggctgtgccaactgggatttctaagctcctttttccctcaccaccatgctgaaacctttttttgcctcacatatatcaactatacttaaatggtacagaaagaaccaatatttgaaaagttacagtaaatcactgaagcagaaagataaaactataccccaaggatccaaatgaggtttagggacataaaacaattggcaagaaccaaatcaaaagttggctatgccacagctttggcagaaactttcctggagatgatgaggggttgaggtgagttgctatgtgctttattttggagccagataaaatattctggaaatcatttcagaaggtcctatgaaacaggcatttaaaaaaaaaaaaaaaagaagaagacacactttggtattgaaaccgagcgctcactggcaggtgtcgcaaagattaaggcttcaggtgagaacgcagtgatggcaacatggagatggcgccataccgggcttgaggctctgctcagacgcctcctgcaggctcacacggctcaggggccactgggcaggacagcctctgagtgcagcagcttccctaggggaggtggaccacgttgtaccactgggcagccttggtgtctgcaccagctccaagagatactgctgctctgacaccacgcaggtctccatgggcactgctgagttgaccgcaaactccactcttccacttctggtggtggtcagggctggggaaggtccgtcatgacgcaacctggctagcccttgggataaagaatgcccactgctcccatcagtcccatgctggaagactctaacacaactaagcagaagagccctgacctc

SEQ ID NO: 65552 - DNA, 1578 bp, Homo sapiens
cttgagctgaatcccaggtgcagagactggggggaggtggagaatccaaaatcatgctcaggtttctcctgaaaagtgtgtattttctaaaaaataaatataaactcctggtttgagaaactccctcatgatgaatgggaggaaaatcatggcaaatggagagctaagaaaccatcttcgcatagactttgcccaaggtgtagaggaagatctgccggtcaggcaggatgaagacccacacaggagcctgtgtcctccaggtcgtcccttcttccaaaagcacagcaaagcaatacaacttgaggactccctccaagatttcctaatttttgattttacatttaatctcaggaggctataccattaagaaacattattagagttattgctgggtgctgggccccagacgatactaagtgaggcagaagctttcaataattcctacagccctcagcaccaagaagaacttggagggaatattgggcttgttgagaaagtgggaaagaaattagaatttctcccaatagaagaggcagatcaccttggcctactctctaggacacaggtctttcttctgtgctacaccaacactacagaatacaaactcatacatatacatttgctaccataggttctacaacagccccatgccctccaggcagaaggtggaggcaggtggccgctgattctgaggatccctgtgtgaacagtgccgttagccctgaggggagctggcgcttgcccaggctgtgccaactgggatttctaagctcctttttccctcaccaccatgctgaaacctttttttgcctcacatatatcaactatacttaaatggtacagaaagaaccaatatttgaaaagttacagtaaatcactgaagcagaaagataaaactataccccaaggatccaaatgaggtttagggacataaaacaattggcaagaaccaaatcaaaagttggctatgccacagctttggcagaaactttcctggagatgatgaggggttgaggtgagttgctatgtgctttattttggagccagataaaatattctggaaatcatttcagaaggtcctatgaaacaggcatttaaaaaaaaaaaaaaaagaagaagacacactttggtattgaaaccgagcgctcactggcaggtgtcgcaaagattaaggcttcaggtgagaacgcagtgatggcaacatggagatggcgccataccgggcttgaggctctgctcagacgcctcctgcaggctcacacggctcaggggccactgggcaggacagcctctgagtgcagcagcttccctaggggaggtggaccacgttgtaccactgggcagccttggtgtctgcaccagctccaagagatactgctgctctgacaccacgcaggtctccatgggcactgctgagttgaccgcaaactccactcttccacttytggtggtggtcagggctggggaaggtccgtcatgacgcaacctggctagcccttgggataaagaatgcccactgctcccatcagtcccatgctggaagactctaacacaactaagcagaagagccctgacctc

SEQ ID NO: 65553 - DNA, 677 bp, Homo sapiens
agcctaacaccggcaggcatttacctggtgcgccaaggtcttcttgagcaaagaaaccttgactctccaccctccaagcagccggccagcagaaaatgcatacatggcggcaagagcaggcaatgggctaatgggcttgcccttgacacctgtctcaggcccagtttggctacatgtgagactggtgcagagtgaggcaaaacatgcagaatggaaggagtgcaatccagttttccttgttctggtttccttccagtttcttaaatgcagtggcatttcactgtgctttactcagaaatctgttctctcaaaggaatttcatgtgctgtctccwactctccactgcccacacagaaacacgttcctgcttctctttagagtggggactatcacctattttatggaaatacttctttcagaggaagccctcagtgccgagtctcagagaaagagtgctggttagggaggcagggaactgagcctgtctgtaaggaggagctgatgggcaggaggatgtgagacagaaaacagaacggagagatgggcaggtaccggagaaggcaggaaacaagagggctgaaagcactagcttaagaaggtgcagaaacacgaagaggacaggctagagcactgatgtggagccgaggtgggcagaaggtactagcaccgctggatcc

SEQ ID NO: 65554 - DNA, 797 bp, Homo sapiens
acagggagaagaggtccacatggcaatggaggtaggaactgaagtgatgggtttaaagccagggaatgccaaggactgctggcaaataccagaagctggaagaggcaaagaagattcccttctacaggcttcagagggagcatggccccactgataccttgattttggatgtctgttgttccaagccccccacttcatagtastttgttatgacagccccaggaaacaaacacaaactccccaaatccccacttcccagaaacacctagtaccgtcctagccaccagagtgggccctttggatacatccccaggcaaaagcaacctgagtccccttgcacctctggaagcaggaatttgggcttctcacctctttacccttctgtatacccccatcttcctctgacccatccagacaccatttctgtctctttctctccagccaagctcctgatatcccagaaggagaaggtggccttgtagccacccagaagaagcaatgtagcaggtccaaaggctggaatctgtagggcagtgtcctgtcacctttgcaaatggtatgagtgacatctacggaggacttgctctgtgtctgctgtgcagtgaacttcccacatggacactcttatctactcaagcagccccatgggttaaacatcattttgcaaaggaggaaactgaggcatggagggattaagtggtggggcagtcaatggagcagctggaatgtgagcctgggcaattgaattccggagcccagcccattctgcagtctttgcagatgaacaattaggatcc

SEQ ID NO: 65555 - DNA, 810 bp, Homo sapiens
ctgcttccaaccaccgcgctgtgtctccaggacacgtcctgtctcactgggttttctgctcctttccaaatctgaggaccccaaaagaaaaggcctgttttataataacggcttcttttcgaagaggtgtgtgaataatgggggaaacacgactccaaagtactttttctctccagcctgggcaacatggcaaaacaccatctctagaaaaaatacaaaaatcctccaggtgtagtggcacatgcctgtggtcccggctactcgggaggctgacgtgggaggatctcttgagcctgggtggtcgaggctgcagtgagctatgattgtgccactgcactccagcctgggtgacagagcaagaccttgtctcaaaaaaaaaaagtgctttttctacatcctagctaaaccccagctgttgaggctgagagttacaggtgggycctgcgcctgctgcatcctcacccttgtgatggggcgacacttgggagggtgtgggcagctgtaaagggcactggagactgacgggtccagcgttcctcactttccaggtgaggaaacagaagcgcaatgcaggtgagctgaccctgttgagataacacagattttaccccacaaatagaaaaaagcaaagaaaatggacaaatagtgtttgaacaaggctgtcctcaactcacaagcagatcaaacaagagcaaaagaaggaaccgaagctaaaactcatttattgtcttcaaacatatatttatttttaatcaaaaaaagaaaaaagttatgttatccagatcttgcattttgctcagggaagggtga

SEQ ID NO: 65556 - DNA, 810 bp, Homo sapiens
ctgcttccaaccaccgcgctgtgtctccaggacacgtcctgtctcactgggttttctgctcctttccaaatctgaggaccccaaaagaaaaggcctgttttataataacggcttcttttcgaagaggtgtgtgaataatgggggaaacacgactccaaagtactttttctctccagcctgggcaacatggcaaaacaccatctctagaaaaaatacaaaaatcctccaggtgtagtggcacatgcctgtggtcccggctactcgggaggctgacgtgggaggatctcttgagcctgggtggtcgaggctgcagtgagctatgattgtgccactgcactccagcctgggtgacagagcaagaccttgtctcaaaaaaaaaaagtgctttttctacatcctagctaaaccccagctgttgaggctgagagttacaggtgggccctgcgcctgctgcatcctcacccttgtgatggggcgacacttgggagggtgtgggcagctgtaaagggcactggagactgacgggtccagcgttcctcactttccaggtgaggaaacagaagcgcaatgcaggtgagctgaccctgttgagrtaacacagattttaccccacaaatagaaaaaagcaaagaaaatggacaaatagtgtttgaacaaggctgtcctcaactcacaagcagatcaaacaagagcaaaagaaggaaccgaagctaaaactcatttattgtcttcaaacatatatttatttttaatcaaaaaaagaaaaaagttatgttatccagatcttgcattttgctcagggaagggtga

SEQ ID NO: 65557 - DNA, 2252 bp, Homo sapiens
aacaaactctcagtggctccaaggaaatggtcacaaacacatgttaggacctctctgagcagccctgcctaaaacccgtyagagacagagtcttgttcagacaattgtcatttgtcccccaaataatatcctcatcggcctgggagcagtggtttcccccactgggtgtggctatgtgtttttctggtgatactcaagattccatctctctgggtcccccaaaccgtatgttttgtctttcagtgcccagaaaattatgagagaccccaaactcctaccagtaacgttgcttaaattagcaagagacagcttttaatttcttgtaacccagatccctaaatgacagtcaggctacagaaaagccacagcggccacctctaaggagctggcacctactgttccctgaggttaaaataatccattctttcaggagagagacaagagagagatgttattagggaacgtgccagatcttctggctttctggaaaattactgggctatagtctaactattagaaatcaatcccttaagatcccagtagccctggggaataggcagtgtggaaaagggcaaagaagaaattaattgggtggaggacagtactaacatttgctgggcatactctgtgctgagcagttcttcatacactccatttaatcctcacgggaacactgtcaggcagatattcctagccccaggtcacagacaaggaaactgaagctcagagaggtgaagttacttgcccaagacacaaccaaggtctggctaactctaacacccatgttcttctttgccactgccctaccctgtgtggccttaggtgagtctctctctctccttctgagcatcagtttcctctccctgagatgggaatggcttgcctggctcacagaggctttggaaggatctagactcctaagtgcttagaagcatgcccagcacccagcctgggactgggattgccttttttgtcatcctcaaagctgacaaccttggagctctgaaagaagaaaatccaaggccccgctgagggacgcgggtgtgcctctggggcgatgggacagaggaaaatcactgggttccctcaggtctccaaaggaggaaggaggagaggaggcagagggaggtaagctgaagggggaggtgcctcgggtgttgctgtttttggtgactgctcagctgacagctttccaacctgagaaacacacatacacaaagtctaacctcctctggcttaaaatagagccactgaaccaaaaatgccaagcacagggcagagtcatctgcctgacggagccagacagctcccccatggccccagtaacatccacccccagtgggcacacctgaccaagcgcctctcagctgcgcatcatggggccctcacaacagtgggcaagcaaagccagccacggatcctcggccccatcccggagacaaggcaagtgagagccagagaggcgatgggagggggataaagccagcagcatctggcctgacaaggatcatgacctggggaaccggacagccctgagttcaatcctggctcagccacagcctggctgggaggacttggcaggttaagtatctcttggcaggttaagtgcctctgtgtcctgggctgtaaggtgagagtcctgtgagtgatgtctgtgattatgcctcgcacaggcagagtgtttggccctgtccctgcttctggaaaaagaattttcgacatctgcacacagacagttgtgaaaaaggaggagaagcagctactggctaaggggcacctggatagtgacacaaaacagcttctataatcctctacatggtcctatggggtgagggtcattactacccccgtttctcagatgagaaaaccaaggcacagggaagtacaagtgttctgtttatggacacctagtggtatggtttggctctgtgtttccacccaaattgcatctccaattgtaatccctgcgtgttgaaggaaggacttggtaggaagtgattgacttatggaggcagttttccccatgctgttctcgtgatggtgagtgagttctcacgagatctgatggtttaaaagtgtttggcagtccccctcctctctctctctcccgctgctatgtaagacatagcttgcttccctttggtctctgccatgattgtaagtttcctgaggcctcctcaggcatgtggaactgtgagtcaatgaaacctctttccttcataaattacccagtctcaggtagttcttcatgg

SEQ ID NO: 65558 - DNA, 1349 bp, Homo sapiens
taatgacaatgacgatgtgatgataaaagcagctagcattcattgggcacgggtgacaggtgctatgctactcaattaacatggatttgtttatctaatccccacaacaatctgtgaaatatgtcttatattatacccattttatagatagggaagctgaggttcaacaaaatttacgcagcctggaggtggcagggctgggacgggaacaccggccgcctggagccaaagtccactggcttgctgatcacaccctgtcctgttccacatgcaccatgaacaccagtttcctcccctcccagagttcctaaatcttttggactcctttgaaaatctgctgggagctgcttttccccagagaaaagttttggttttctccaggaaaaaaaaaaaaaaatagagatgcacaatgatacaacttgaacgtaatttcaagaggttcaaggttataaactccagccctaaaagtaagcattttataagcatttataacaaaaacaagaattttcagagttttccaaagatgcaataggggaacacaagtgtctgcaataccagctaaaaccacttccatacaatttgtcaagagcctatcaggaataaggcacttgtagaatcgtatctcatttaaacctcattttagtcctgtgaggtgattataattaggatccctttacaaactaggaaactgagacacacaaagtttaagtaacttgcccaggctcacagaggtggtatctggcagaattgaaattaaccacagatctagctggctccagacctcagtctctattccagacattctcttctggcttctccaatggcatttcttcatcttcccagacaggggaagaaacttgctcaaggtctcacagctcagcacatctggagtagccattagccacatgtgaacacttaaactttaaaaaaaaattaagaattcagtcctcagttgcagggatcacatttcaagtgctgagtagccacctgtgactagtggctacagtatcgcacagtgcaggcacagaacattttcatcattgcagaaatgtctattgggcagcgctgggctagaacttggtctcttgactgccaattttagtttttccactgtcaggggctactagaaattagatttgcttgataaatgaagttgaccatgaagaggagacaggaggtgggtgcagtggtccatacttataatcccagcagtttagraggccaaagcaggagggtcatttcagcccaggagttcgagaccagcctgggcaacatagcgagaccctgtctctcaaaaaattttgaaaactagccagtcaaggcggcttgtgcctgctgtacaagctact

SEQ ID NO: 65559 - DNA, 953 bp, Homo sapiens
actcacttatcctttgtacaaatgacttcctagaggctttatgagggcctacgtgttaaacctggcacaacgcaggcagcagctgagactcatttggatcatagactctgtgacagaaacaagagggcctgaagaccatacccaggactgaatttggtacccartgtcccagcatctaagacatcaggagccaggagatatcccacgttggcaagaccccttcagttctctccagccttttcctccaacccagtggttctcaaggtagggtccctggatcagtaccatccgaatctgcatcacgtgggaacttgttagcaatgaaatcctcaagtccctcctgcccccaaactaaataaaagactctgggtgggcccagcagtctgcattaagaagccctccagaggattctgaggctcactcaagtttggcggccctgctctaacccatttaaactgacaacagccactgtgacaactgcagctgctaccaatgactgggaacctactatgtgccgagggttaaacatgcactctcatccattaatcctcatagcaaaggacaccttattccatacgtccagctctgggttaggtgtgttgtgtgcatgatgtcatttactccttactataaccctcttgagtatttactattattatgccccattttacagatgcggacattgaaccccagagggttgaagcaacttgcctacagtcatacaatttagaagtggcagtcaagatgaaaattcagatctgccggattccaaagctatgttctttctgtccgtccatggaagttccccagggtctctcacacctacatcatcagtctgggtcaggtgagattcgaagaggggtggaggcaggcagggtgagcagaaagaacccagcctggactccacagtgccttccagctacagcgtgaaaggaagctgcgttatgcatgta

SEQ ID NO: 65560 - DNA, 953 bp, Homo sapiens
actcacttatcctttgtacaaatgacttcctagaggctttatgagggcctacgtgttaaacctggcacaacgcaggcagcagctgagactcatttggatcatagactctgtgacagaaacaagagggcctgaagaccatacccaggactgaatttggtacccagtgtcccagcatctaagacatcaggagccaggagatatcccacgttggcaagaccccttcagttctctccagccttttcctccaacccagtggttctcaaggtagggtccctggatcagtaccatccgaatctgcatcacgtgggaacttgttagcaatgaaatcctcaagtccctcctgcccccaaactaaataaaagactctgggtgggcccagcagtctgcattaagaagccctccagaggattctgaggctcactcaagtttggcggccctgctctaacccatttaaactgacaacagccactgtgacaactgcagctgctaccaatgactgggaacctactatgtgccgagggttaaacaygcactctcatccattaatcctcatagcaaaggacaccttattccatacgtccagctctgggttaggtgtgttgtgtgcatgatgtcatttactccttactataaccctcttgagtatttactattattatgccccattttacagatgcggacattgaaccccagagggttgaagcaacttgcctacagtcatacaatttagaagtggcagtcaagatgaaaattcagatctgccggattccaaagctatgttctttctgtccgtccatggaagttccccagggtctctcacacctacatcatcagtctgggtcaggtgagattcgaagaggggtggaggcaggcagggtgagcagaaagaacccagcctggactccacagtgccttccagctacagcgtgaaaggaagctgcgttatgcatgta

SEQ ID NO: 65561 - DNA, 953 bp, Homo sapiens
actcacttatcctttgtacaaatgacttcctagaggctttatgagggcctacgtgttaaacctggcacaacgcaggcagcagctgagactcatttggatcatagactctgtgacagaaacaagagggcctgaagaccatacccaggactgaatttggtacccagtgtcccagcatctaagacatcaggagccaggagatatcccacgttggcaagaccccttcagttctctccagccttttcctccaacccagtggttctcaaggtagggtccctggatcagtaccatccgaatctgcatcacgtgggaacttgttagcaatgaaatcctcaagtccctcctgcccccaaactaaataaaagactctgggtgggcccagcagtctgcattaagaagccctccagaggattctgaggctcactcaagtttggcggccctgctctaacccatttaaactgacaacagccactgtgacaactgcagctgctaccaatgactgggaacctactatgtgccgagggttaaacatgcactctcatccattaatcctcatagcaaaggacaccttattccatacgtccagctctgggttaggtgtgttgtgtgcatgatgtcatttactccttactataaccctcttgmgtatttactattattatgccccattttacagatgcggacattgaaccccagagggttgaagcaacttgcctacagtcatacaatttagaagtggcagtcaagatgaaaattcagatctgccggattccaaagctatgttctttctgtccgtccatggaagttccccagggtctctcacacctacatcatcagtctgggtcaggtgagattcgaagaggggtggaggcaggcagggtgagcagaaagaacccagcctggactccacagtgccttccagctacagcgtgaaaggaagctgcgttatgcatgta

SEQ ID NO: 65562 - DNA, 2738 bp, Homo sapiens
gtggtttgcgtccacactctcaccccacccctctacttgaactatgggaacaactggttcaattctccatcatgcttcacttatccaaatctacaagagttctgcccagctctgaaaacattaagaaaatgggaaggggggtgtggtcaggaagaagtgagagaggaagtgtcctgccctggagggtgagggtgggagtggaggcttcaaagccgcaacttcatgcctccacgtggtcctgaccatgaaggatattttaaggcctcctccctcatccaccctgccagcctccttctagggctgaaggattcattcccaccatcttagagggaaggggtgagacagcaggacattttgtttcccagaaaaagctcaggtcaaatttcaaggacaaaagttagcacttggtctgggaaagaaaactctgccaaatggaataaagggggagggggagaactccagtgaggtcattccaggtgcctgggggtgtggagagaaatcggaactctgattctccctgccaggatctgtccggcaggatatgggtatcgccgcctcatcacccagaagtactcagaccaccccctacatttcccctctgtccaaaaatggggagcggggcgctgtggtactagtttttggatcccatccactatcccaccccgcccccagcccaacagatttggtctgagcggaagagggtggtgccaggaagggctttccagcccagagatgtggcccaaaccgctaggagagggactggtagctggctggtgttgccatggcaacctcctccctgcgctggatcgaagcttccatcctatgggcaaatcagagctggctgctccagcttctccgcccttctcccaggcgggagggggagaactggacgctgaaaccacttggtcaggctcaagaacaccaggctcaattccagaccctgatgtaacaaccccctttggcatctgttggaaacttgagacaccccagctccccagctaggccccaaggcagagtgtcagggctgggactgtagatgtgattggtgcaaatgaagtggtcaggaagagcagggaaccagtggctgaaatcctccccaccctcttgactggcaggcgagtctcccaaatccctatgtttaagccacttcaaagaaggagggcccagctctaccttaataactgtaatgatgcaataagattagcctattaaaattataaagctagcattttgagaatcagccttctcccctccccaaacccacagattcttttctacagtcatgttcagaaacaactctttctcagtaataagatagataacagctaacatgtagtgagagcctacctcatgccaggtactgtactaagacttctgcacagcacaaacagcataatggttgattaaaagcrtagatgcttaagtcagattgcccaagttcaaggcttcattccctcacttcctggctgagtgaccttggatgaattaatatgtctgtgcctcagttttctcatctgaaaatggggatgttaacaggatagcagttttataggcttgctatgaggaatgagttaatatttttaaaatgcctgggaatatgtctcgcacaaaggtaatcatttgtaaaatgttaaccctatgcagtccatgttattatttttcttcttccttacagatacgaaaccgaggccacgtgtctaactcctccccgattacaaacccagtgccaacaaggctgggcaacaaaacacacacacaaaaaaacgcctccaagcacatgtttccctaaagccccagcatccttgtgaaagagggcaaaaggagcatctcaagaagtaagttcaaagtgcacgagggaagatgccccttgagaggaattctgggaaccagtaatgaccagcatcctgggcccacggcgggctagaaagaggtgtgaagaaggctcagcttcctgtgcccaccccaatggccaaggatcccaagtccaaatcaggaatgtgctctgccccagttaaggctaatgagaaaaaggctccttctcacaccatttctcaggaaactagcaaaaggatggcaactaaactctgaagatggctctggctcagtctagttggaaaaagatgcatttcaacatgagttggaagcagcaacaaaggggaggctcctagatgagccggaggcctgtcagggacacacttctgagacggagccagcagagacagacaggtattaagaaggccaggggagggaggggagaagaggcaggtagagccacgcctgtgtccagtatgggagagaccattccattgcttttagaaatcagttcagtgcagtgctgttctaaaagaataaatccaaaaaggcttcttttaggagaaaattaatgactttaaggagaacaggagaaattaagcaccaagacaacgctgcctacttctgactttcaccagacattcattatttttccggaaatgaaagttgactttctccctccccctcccaaatttgaagcatccctcaagaacagacagtgagcacaagatgcccaaaccaaactcttggtcgccagccgcacccccaggcctcctcacctgggaaacattttctacacagtaaggtctggatttcttaaaaatcctctttcagagggagggctactggtttaatggaaagagaaccataaacctgattttagtctcagctctgtggctgcctcactagatgaccttggcatatat

SEQ ID NO: 65563 - DNA, 1383 bp, Homo sapiens
ggatgggattctggagcaagaaaaagacgttaatgggaaaaccagtgaagttcacacgggatctttggtttgattaaggctgctgtactgaggttaatttcctggttctgattactgtgctatggctttgcaaattgtgctatggttttgcaagattggggtcaactgctggagggacatagagaagttgcctgtaccaggcttgcaaattttctgctacttttactactagttttctaaaagtgggtcaaaatataaaggttttttaaaaaagcatcaaatgtccagtttttcagcagtatctttattagaaaaggaacaatccccacattgtgttgatgtgagcagtactcaaaactgaggcaacagatctcaaaatattttggcatgtgggagtggggaggtaaaggctgaagcctcctctgtccgaagcatgcccccgaggctgggaggaggcaaaaatgacaaatcacatctgaatctgtttggcagaaaaaatgtccagtgacctgtccgagggccagtcacacatttatcaggagtattagcagctccgcattcccagtgcaggtctcccaggtccacgccctagcctcagcccaggacaggctctgatttctccgaaaatgatgtgcaaatctgtttcaaaccacatgaccttttgccacaacctctttgtggcttgttctattggatcagaagccaggagtattttcggaacattgctaatgctctgagcatctcagttctaggcctgtaggccacatatgatgtgcgttgggccagaggcccaggtcaaggtgtctcgagggaaattggagtcaatggtgaagtgagaaagctcttgtgaggcctttggccccagtgggagggccagggacagaggtgggcctgcctggtgagcccacctgcaggcaagaggcaccctggggaggtgccaggaagcagggcgcaaggcaaggaggcaggaacagccacgtctgctcctgccctttaaacaaataccaggctgttcgagtccagagaagaaataaatattgacaaaggtgcggagcggcaggaaggccaggtggccgaggccccagaaggaacatggcctagatagggtctcctgggatgactgygaggaagcctcagccccgagccaccctccccaggggcccttggcgaggctgcctctacggaggtccttcccccgtctcggcaggtgcttcggcaccttgagggcttggactcaggctgtcaggatgaggagcctatccacgggatcagttgctggtgtttgccaaaggtgtgtcccagaggggccacccgtagcctctgacggtgccacggctggaaggccctggccaaacacctgtcccacttcaacagcgcgttcag

SEQ ID NO: 65564 - DNA, 1383 bp, Homo sapiens
ggatgggattctggagcaagaaaaagacgttaatgggaaaaccagtgaagttcacacgggatctttggtttgattaaggctgctgtactgaggttaatttcctggttctgattactgtgctatggctttgcaaattgtgctatggttttgcaagattggggtcaactgctggagggacatagagaagttgcctgtaccaggcttgcaaattttctgctacttttactactagttttctaaaagtgggtcaaaatataaaggttttttaaaaaagcatcaaatgtccagtttttcagcagtatctttattagaaaaggaacaatccccacattgtgttgatgtgagcagtactcaaaactgaggcaacagatctcaaaatattttggcatgtgggagtggggaggtaaaggctgaagcctcctctgtccgaagcatgcccccgaggctgggaggaggcaaaaatgacaaatcacatctgaatctgtttggcagaaaaaatgtccagtgacctgtccgagggccagtcacacatttatcaggagtattagcagctccgcattcccagtgcaggtctcccaggtccacgccctagcctcagcccaggacaggctctgatttctccgaaaatgatgtgcaaatctgtttcaaaccacatgaccttttgccacaacctctttgtggcttgttctattggatcagaagccaggagtattttcggaacattgctaatgctctgagcatctcagttctaggcctgtaggccacatatgatgtgcgttgggccagaggcccaggtcaaggtgtctcgagggaaattggagtcaatggtgaagtgagaaagctcttgtgaggcctttggccccagtgggagggccagggacagaggtgggcctgcctggtgagcccacctgcaggcaagaggcaccctggggaggtgccaggaagcagggcgcaaggcaaggaggcaggaacagccacgtctgctcctgccctttaaacaaataccaggctgttcgagtccagagaagaaataaatattgacaaaggtgcggagcggcaggaaggccaggtggccgaggccccagaaggaacatggcctagatagggtctcctgggatgactgcgaggaagcctcagccccgagccaccctccccaggggcccttggcgaggctgcctctacggaggtccttcccccgtctcggcaggtgctkcggcaccttgagggcttggactcaggctgtcaggatgaggagcctatccacgggatcagttgctggtgtttgccaaaggtgtgtcccagaggggccacccgtagcctctgacggtgccacggctggaaggccctggccaaacacctgtcccacttcaacagcgcgttcag

SEQ ID NO: 65565 - DNA, 1383 bp, Homo sapiens
ggatgggattctggagcaagaaaaagacgttaatgggaaaaccagtgaagttcacacgggatctttggtttgattaaggctgctgtactgaggttaatttcctggttctgattactgtgctatggctttgcaaattgtgctatggttttgcaagattggggtcaactgctggagggacatagagaagttgcctgtaccaggcttgcaaattttctgctacttttactactagttttctaaaagtgggtcaaaatataaaggttttttaaaaaagcatcaaatgtccagtttttcagcagtatctttattagaaaaggaacaatccccacattgtgttgatgtgagcagtactcaaaactgaggcaacagatctcaaaatattttggcatgtgggagtggggaggtaaaggctgaagcctcctctgtccgaagcatgcccccgaggctgggaggaggcaaaaatgacaaatcacatctgaatctgtttggcagaaaaaatgtccagtgacctgtccgagggccagtcacacatttatcaggagtattagcagctccgcattcccagtgcaggtctcccaggtccacgccctagcctcagcccaggacaggctctgatttctccgaaaatgatgtgcaaatctgtttcaaaccacatgaccttttgccacaacctctttgtggcttgttctattggatcagaagccaggagtattttcggaacattgctaatgctctgagcatctcagttctaggcctgtaggccacatatgatgtgcgttgggccagaggcccaggtcaaggtgtctcgagggaaattggagtcaatggtgaagtgagaaagctcttgtgaggcctttggccccagtgggagggccagggacagaggtgggcctgcctggtgagcccacctgcaggcaagaggcaccctggggaggtgccaggaagcagggcgcaaggcaaggaggcaggaacagccacgtctgctcctgccctttaaacaaataccaggctgttcgagtccagagaagaaataaatattgacaaaggtgcggagcggcaggaaggccaggtggccgaggccccagaaggaacatggcctagatagggtctcctgggatgactgcgaggaagcctcagccccgagccaccctccccaggggcccttggcgaggctgcctctacggaggtccttcccccgtctcggcaggtgcttcggcaccttgagggcttggactcaggctgtcaggatgaggagccwatccacgggatcagttgctggtgtttgccaaaggtgtgtcccagaggggccacccgtagcctctgacggtgccacggctggaaggccctggccaaacacctgtcccacttcaacagcgcgttcag

SEQ ID NO: 65566 - DNA, 1383 bp, Homo sapiens
ggatgggattctggagcaagaaaaagacgttaatgggaaaaccagtgaagttcacacgggatctttggtttgattaaggctgctgtactgaggttaatttcctggttctgattactgtgctatggctttgcaaattgtgctatggttttgcaagattggggtcaactgctggagggacatagagaagttgcctgtaccaggcttgcaaattttctgctacttttactactagttttctaaaagtgggtcaaaatataaaggttttttaaaaaagcatcaaatgtccagtttttcagcagtatctttattagaaaaggaacaatccccacattgtgttgatgtgagcagtactcaaaactgaggcaacagatctcaaaatattttggcatgtgggagtggggaggtaaaggctgaagcctcctctgtccgaagcatgcccccgaggctgggaggaggcaaaaatgacaaatcacatctgaatctgtttggcagaaaaaatgtccagtgacctgtccgagggccagtcacacatttatcaggagtattagcagctccgcattcccagtgcaggtctcccaggtccacgccctagcctcagcccaggacaggctctgatttctccgaaaatgatgtgcaaatctgtttcaaaccacatgaccttttgccacaacctctttgtggcttgttctattggatcagaagccaggagtattttcggaacattgctaatgctctgagcatctcagttctaggcctgtaggccacatatgatgtgcgttgggccagaggcccaggtcaaggtgtctcgagggaaattggagtcaatggtgaagtgagaaagctcttgtgaggcctttggccccagtgggagggccagggacagaggtgggcctgcctggtgagcccacctgcaggcaagaggcaccctggggaggtgccaggaagcagggcgcaaggcaaggaggcaggaacagccacgtctgctcctgccctttaaacaaataccaggctgttcgagtccagagaagaaataaatattgacaaaggtgcggagcggcaggaaggccaggtggccgaggccccagaaggaacatggcctagatagggtctcctgggatgactgcgaggaagcctcagccccgagccaccctccccaggggcccttggcgaggctgcctctacggaggtccttcccccgtctcggcaggtgcttcggcaccttgagggcttggactcaggctgtcaggatgaggagcctakccacgggatcagttgctggtgtttgccaaaggtgtgtcccagaggggccacccgtagcctctgacggtgccacggctggaaggccctggccaaacacctgtcccacttcaacagcgcgttcag

SEQ ID NO: 65567 - DNA, 633 bp, Homo sapiens
ccctagaattagtccccagaccaatggctctgcatgcaaaggcacagacagcatagactgaaagtctactgtgtgcatagctgcagccaggagatgggcaggggcccataagagaacaccaaggtcatgttcattaagcattcactgaggctgtgcatggcctacctcagcgctcacagcccctcctcctagtggcaactacgactctcccctgagataggaccggtattccaaacacctctccggggcaggcaggggtggcagccccttcactaactggactctccttttgtgctcagagtaacccccctcccattttaccaaygtggaaagggatgagcttcaggagcttggccatggtcaccggtgccagggagtgagacagaggcagaaccctgggaggcctgggtgattcaaacacatcacagagtctttaccctaagggagctgcaatccagccggggaaataagaccccgaggaaaatgagcaagagcagttaaaccgcaacataaggcaataatacaaggaggctaccacccagagccggacattccacacccagcagtcggcctcgccgcctcccgcccgcttcttcttgtaagggcctttctcaagaagtggctaaaaaggga

SEQ ID NO: 65568 - DNA, 563 bp, Homo sapiens
gattccttctgatgggaargctgcaagatcacattacagaagagtatacgggactggaaatattgttggaaaatacaacgttggagttggggacatcaaatcacgtagggctttgtagttgttggaaggactggggctttgagtcaaacagggagtcatgaagggtatttgcagagtagggtcacaatctgactcatgtgcgaagaagattcctttggctgttgcaagtgaataaaacgtagggggtgaaggcagagtctgggagtttccttaggttgtacctagccctaaactaaactgaaatcagaccccagcctagtacttggtggtggagttggcatgacgatcccagcttctggaccctatttccctcttccctgcaacaaggacccttgcaagtagcccctcccctcacaccagcttcacctcttgcccccaattctgaggcgagtcacatctggtcagtttcactcccccgccccctcctatggcgacaagtgctttaacagacagtgcaaaaggggtcaaaagcactgcagacatgaaccagactttagaaaaac

SEQ ID NO: 65569 - DNA, 656 bp, Homo sapiens
cacttagggtagcagagctttagacttaattccatcagcagattccttattacctatttctgatagaattcttggtgctctcaggaatctgaagcccagataatagagggagatcccaggtgtcctctgccaccctgttagctgagggagacccaaaaactttggcttccgtgaaaagtcctcctccagttgtccccaaagttgtagcatgagtccttccaaatcttttctcatgattatacaaatacatattcccccatataagattaagatttttatatatagatagattttttttttatttaggtttttttttttgttttttttttgagacggagtgtggctctgtcrcccaggctggagtgcagtggggcaatctcggctcactgcaagctccacctcccaggttcacgccattctcctgcctcagcctcccgagtagctgggactacaggcgcccgctactacgcccggctaattttttgtatttttagtagagacagggtttcaccatgttagccaggatggtcttgatctcctgacctcgtgatccgcccgcctcggcctcccaaagtgctgggattacaggcgtgagccacagcgcccggcctatgttttacatatataacaatttatatataactacatatataata

SEQ ID NO: 65570 - DNA, 2162 bp, Homo sapiens
aaatgaattccacttgtattcaataaatactacaagcctcctaggcagcatggaaaacaaatgacagttttaccttgtcctcaaaattatttcaagtttatctatgagaaaagttttttattaaaaactgggatcttggctgggcgcagtggctcacgcctgtaatcccaacactttgggaggccgaggtgggcggatcacgaggtcaagagatcgagaccatcctggctaacatggtgaaaaacaccgtctctactaaaaatacaaaaattagcagggcgtggtggcgtgtgcctgtagtcccagctacttgggaggctgaggcaggagaatcacttgaacccaggagacgggggttgcagtgagccgagatcgtgccactgcactacagcctggcgacagagcaagactctgtctcaaaaaaaaaaaaaaaaaaaagaaaagaaaactttgatcttatatggcccaayaggaatggatcatgatggaggcagaaaaagatgtaggagagattattttatccagaagagcctctaattcctcagatctgaaactgtagtaaccatgtagatatgaaatccccaatggggatttaaggtcagaagtagctatacagtctcacctctttcatgtgatgagcctattataatatttgcctgccactgataactaagaacttcagaaccattactattctacttcaccaccctgctgctaatcaattctgaaagacacaaaataaagccaacgctgaatatcctttcacattagaaaggaggtgaatctcagtttacttgccactccccattttaatcatctttcttaaataagatctccacagtaatgaccgtaagtcctggtggagactcagctgactgcatatggcatcagtgtaaagaataaagaaaatgccataaaaactaaccactctcacccccagcatttaccaaggactttcttatgaggcattagacagatgctcctgatagccactacaatttggaagcccttagaacactgaagaaatttgtatggtaagtctaaacttcattgaactattttgtgaagcataaagcagttgagtccatgcagaaacatttacaacatagctttatatgctatttgaattaaatgtttagaaacagagtcattttccattttcatttgtttttgtgactatgtatgaatttttagcgtataaaaaaagggtttcccagaaatgacttcccaatttatactattatgcataagggttctaaatgttaactgttcaacttgcaatgacaatccaggagccaattaggttggatggtctctggtacatacagcaaacctaacgatatgtacctaaaaaagatagttctactctaacttagattccagagaaagaacagttatccctacctgtgtaacaaacctgcacatcctgcacacgtacctcagaacttaaaaaaaaattaaaaataatttttaaaaaagaacagttatcccaaataacaattttaagaaattaaaaattgtatcatcagccgggcatggtggctcacacctgtaatcccagcactttgggaggctgaagtgggtgtatcacctgaggtcaggagttcaagaccagcctggccaacatggtgaaaccccatctctactaaaaatacgaaaattggctggacacggtggcgcatgcctgtaatcccagctatttgggaggctgaggcacgagaatggcttgaacccaggaggtagaggtttgcagtgagccgatatccagactgggtgacagagcgagactagtcttaaaaaaaaaaaaaaagtatcaacatattagggtcatcagggtttactgaaaacaatgctgagatgttgcttaagacttttttgtcctggaactagcaatttttatcttacgaattcagtagtatatacagaaggagcaggattgagaaaaaaaaaaggtagtgtaagctgaccaaatgaaagctttctttctgaaaaagaactacaataaatttaatgtgttgctaaaaatctatactatctttgagccgaaataagaagtccccctcctgtaatcctttctgctaatctatatttttttcttcatatttctactcaaccctttctcaaaaacttctacttgattaatcccacatgtacccaatcac

SEQ ID NO: 65571 - DNA, 533 bp, Homo sapiens
tattttcatgtaactgatgatgacacagaggcactgtcactagcagcaaagatggggtttgcactttagtcatttgactccaaaatccacacgcttggctaccatgaaattctgcctctcatctccatggaagaagcacctactatttgctagattagggaccaagtcctttgcatatcttggccctgagctctgcaacaggtccgcagtacagtactgcaggtcccagagaasggaatcacgctgaggacaagatgagctacataatttttagggaccaaggagagtaaaaattcaaggccccttgttaaaaatttattaagaatttcaacacagcagcagcaggtcagaaagccaagtatgggtgctgtgcactgcccacagacatccaccttgtggacttgctggcccagcttttgattgtttcaggacctgaggttcagagggcggagttaaccacactcctcagttcatggccatgggtccccattggccatgctaggttcctgtctggattgatgaattgatcaatg

SEQ ID NO: 65572 - DNA, 533 bp, Homo sapiens
tattttcatgtaactgatgatgacacagaggcactgtcactagcagcaaagatggggtttgcactttagtcatttgactccaaaatccacacgcttggctaccatgaaattctgcctctcatctccatggaagaagcacctactatttgctagattagggaccaagtcctttgcatatcttggccctgagctctgcaacaggtccgcagtacagtactgcaggtcccagagaacggaatcacgctgaggacaagatgagctacataatttttagggmccaaggagagtaaaaattcaaggccccttgttaaaaatttattaagaatttcaacacagcagcagcaggtcagaaagccaagtatgggtgctgtgcactgcccacagacatccaccttgtggacttgctggcccagcttttgattgtttcaggacctgaggttcagagggcggagttaaccacactcctcagttcatggccatgggtccccattggccatgctaggttcctgtctggattgatgaattgatcaatg

SEQ ID NO: 65573 - DNA, 610 bp, Homo sapiens
atgtggttccagctgcagcttcccgtggtccttgggaaggcggcttcagggacggtgtaagttgtcagcgtcacccctgggaagggctccgaagcagaaggatgggggtgtctgtctccaggacccagattgtcctatcgggaagagttgaacgagggtggggagggtctcctggggggacaccagagccgagcctgaaggtgagcagagccttcgccctgggtgagtttcgttctggctgagcagtttctctgtggcccaagggacctgcattggttttttgagttgggttaggggcagagagggggagtgatggggctgtgggggtggaggtgggactttgtttcacttagttttataccctccacgatgttctttcccatcaaggacaggaacacaccacccacaaaatgaccttggagagacttttgttattttttagataggaaaaaacaaaaaaacaaaaaaatccccaaacccaataaccatttgagctactttgatggtggaggcagygaatcccggggaaagccaggctcctaagccccagacgcccctgcctgctgaatcaggtccccgcccagtgctcagatggtcacgggctctggga

SEQ ID NO: 65574 - DNA, 600 bp, Homo sapiens
ggatccagctgagacacagggctgggaaacaaagttaactgttctccctcctgagcggcttgtggttcaggaaacacccccaagcccctgccttgggggatctgtgggtgagagggaagcatatttggatacagcttcaagagagaggtccgactgctctgtgtgtacacgtgtgtgtggattgccctgtgtgcaccagctctgtgagtgcctgcatgggagtgtgtacacacctgtgctctgtgtgcatcctcaaacacaccacaccaacaggggtctggcattgccyccctacggtgctcatggtgaagtcctcggactccaagcccctcttctgcgccagcagtgaccaggctgtggtcagcatggcctgttggtggcctttgacttcctctgttggcagatggcttgaggccccccagttcagggccacaggtgacttccccctttcccaggtggtggggccctgtaggcttgaccagccccaggctccagagcgcacagaggtggctgtccacagagcgcgggaggcatgggagggtgtgctgctgcctgctggtcatccagctcctcgcccattaaggagcccgctttcccctt

SEQ ID NO: 65575 - DNA, 716 bp, Homo sapiens
ggggctcccttgttggagtgtggggcgagcccccacccgtgtgggaagaggagaaggccaggctctaagccccactcagctcctcgtcctcggaggggtcctggccctaagagggcttgttggggtcacgcaagctcacaatggctgtggtcctcagcaggtgggacaatcgggctgttttccgatggtgtttggcagaaagtgggagtcaaagcttagaaaagccctgacagaaatggttccctgaggctggcgggagagtggcactcgggatattaaaacagcgaagtcggtcctggccaattatcagccagctggccttgctccggcgcccagagctcacagggtgagtcaccatctgcggctgagcatccctgttcagtgagggagacagatcctgtcctgktccctcctcccagctgtttgtggcctccctcctcaggctgcctgggaagctgtttcagaaccttccagtcccctcctggctggccctggggctctgtggaagtcctgcttcccccagcagtgcctggccctttgtccccgacccaggaaaaggtgaagtgggggtacttcctgtgcatgacacgcccccttcccttctcccagcctcctgcctcggggctctggcaagaaagagggcctgagctgcaggagaagggcttccttgagcaggaagaagccctggcccagggcagggtgcccggaaggcggaa

SEQ ID NO: 65576 - DNA, 673 bp, Homo sapiens
tgactgagccaaactagttaaagtaggaaaagggcctctggagttttcagttacgtgaaccgagaacggcttcaggcacagtggagtccaggtgccactgytggcacaaagcctgggtctccttccatccctcagctctgctgtgtcctgggctgacttgactctgaggcagtggaaccctcagcgtggcaggagctgccggcagccccggaggaaaacgagcacctcttcctccagcatctgctctctcttggcctggaaattccgtcctgagtctccttcccaggtctcagtcctggcggtttgagtggctgatcagaatctcccgcgccgcccacaggagacccagctgggtccggctggtcagtgccaagccctggacctgcgtggtggcgcccccaaaggctgctcggaaccggcccgtgcaggtggacctctgtctgttggttcccctcttccctcttcacaccctttaggtgcttcctgcaagtctgaaaggaggtgcaccctggcccgggggaggtttgcggggtgaacacttaatccggactagtttcaggagggcttcctggagggggctgcatttgggtggtgtcctgatggagcagagattgtctttttggaggaccgggtcccatgtagaggctgtgagctgcccacacactcttcatgc

SEQ ID NO: 65577 - DNA, 673 bp, Homo sapiens
tgactgagccaaactagttaaagtaggaaaagggcctctggagttttcagttacgtgaaccgagaacggcttcaggcacagtggagtccaggtgccactgctggcacaaagcctgggtctccttccatccctcagctctgctgtgtcctgggctgacttgactctgaggcagtggaaccctcagygtggcaggagctgccggcagccccggaggaaaacgagcacctcttcctccagcatctgctctctcttggcctggaaattccgtcctgagtctccttcccaggtctcagtcctggcggtttgagtggctgatcagaatctcccgcgccgcccacaggagacccagctgggtccggctggtcagtgccaagccctggacctgcgtggtggcgcccccaaaggctgctcggaaccggcccgtgcaggtggacctctgtctgttggttcccctcttccctcttcacaccctttaggtgcttcctgcaagtctgaaaggaggtgcaccctggcccgggggaggtttgcggggtgaacacttaatccggactagtttcaggagggcttcctggagggggctgcatttgggtggtgtcctgatggagcagagattgtctttttggaggaccgggtcccatgtagaggctgtgagctgcccacacactcttcatgc

SEQ ID NO: 65578 - DNA, 538 bp, Homo sapiens
catgcacctgtagtcccagctactggggagcctgaggtgagagaatcgcttgagcccaggagttcaaggctgctgtgagctatgatcacaccactgcactctagcttgggcaacagagcaagaccctatctcccacaaacaaataaacaacaaaaaagaaagttcctgaaggggatcaggagaatggaggatcacgactgtgtcctcagctactcagaaagcaatgtgtgggcagcaggacagtggctggaggtttgatgattggatggactcttcttggagttaagggtggggtatatgcattggagagggctgagccttttccttccccacctctggccaggggtgcctttgatgcacagggtaacactctggcaagagctctgagtsttttaattcagctttgttaactctggagtcccaactgtttgcagatggctggctgatatcctcatttttaaagacctgctttgaatttttatcctcttttcagctcttcattggtattttaaggggagaggtcttataaaggacttca

SEQ ID NO: 65579 - DNA, 1036 bp, Homo sapiens
tgttgtgcatccctgtgtgtctgtgtgcgcccatccatgcacctgcattatgtgtctctgattcaggcagttagtgcttctgtatttgtaggtgcctgtgggtatctgcagtgtattgtgggtgtgtgttgtgtgtctggaatttggtgtgactgtataggagcaggtctgtgtgtgtcacgtctttttttggcaggtgcctggacgtgtgtgtggagtgttgtttgtctgccatgtattttgtgcatgtgtgggggtgtgtgtgtgcattagtctatgttcctgtgattgtggcatggtgacaagttttggggttcctgggggtgcaaaggcatgggaaggagccttcctgcagacccaccccaggccagcagcagcccctccccatggcagcagatacacactcactctgatgccccgggaggaggctgggcaagcagccccagagcagcaggcagcatcaggtggagaatgagggtgggagctcagttcagccaccttttctaggcatttcagggcctgtcagaagctcccatggaagatgtggaggttggggagcagtagacattcacaggcctgggaatgggggtgcttgagtatctggggcacccacgggaaactctggcctccttgggcttaatgggtggagccgggtttttgcacacacgtggtgggggcgactacatgtactgagctcatgccagagtatgagaggagacagtgcccgacgtatgcacagatgaacacatgtatggaaggataagtatgtgttcaagggyggacacatgtgaacacagacacttgtatgtagggacaaacatttgcgtgcagggacagacacacacatccaaatagacacacaggtgcaggagcagacacttatgtacacaaatggatgtgagtgtacatggatagacacacatgattgtcctttgtgggccccagaacctctcctgcacacacttgcacacacatgcacactgactcacatgcactcacgtgtgtgcagggcctggtctaccatgcacaccatgca

SEQ ID NO: 65580 - DNA, 1036 bp, Homo sapiens
tgttgtgcatccctgtgtgtctgtgtgcgcccatccatgcacctgcattatgtgtctctgattcaggcagttagtgcttctgtatttgtaggtgcctgtgggtatctgcagtgtattgtgggtgtgtgttgtgtgtctggaatttggtgtgactgtataggagcaggtctgtgtgtgtcacgtctttttttggcaggtgcctggacgtgtgtgtggagtgttgtttgtctgccatgtattttgtgcatgtgtgggggtgtgtgtgtgcattagtctatgttcctgtgattgtggcatggtgacaagttttggggttcctgggggtgcaaaggcatgggaaggagccttcctgcagacccaccccaggccagcagcagcccctccccatggcagcagatacacactcactctgatgccccgggaggaggctgggcaagcagccccagagcagcaggcagcatcaggtggagaatgagggtgggagctcagttcagccaccttttctaggcatttcagggcctgtcagaagctcccatggaagatgtggaggttggggagcagtagacattcacaggcctgggaatgggggtgcttgagtatctggggcacccacgggaaactctggcctccttgggcttaatgggtggagccgggtttttgcacacacgtggtgggggcgactacatgtactgagctcatgccagagtatgagaggagacagtgcccgacgtatgcacagatgaacacatgtatggaaggataagtatgtgttcaagggtggacacatgtgaacacagacacttgtatgtagggacaaacatttgcgtgcagggacagacacacacatccaaatagacacacaggtgcaggagcagacacttrtgtacacaaatggatgtgagtgtacatggatagacacacatgattgtcctttgtgggccccagaacctctcctgcacacacttgcacacacatgcacactgactcacatgcactcacgtgtgtgcagggcctggtctaccatgcacaccatgca

SEQ ID NO: 65581 - DNA, 871 bp, Homo sapiens
ccaatggcctctccgaggtctgggcctgtgtggaagtcaccgttttgtgtttgtgtcatctgggtaagctggtgtgtctttgtgtgttggggtggatgtgtgtgtgtgtgtgcaggtgtgagtgtaggggcacatctaggaagggtgtcaggcagtgtgagtcagcgtgttgtgtgtggctgtgtgtgtgagcaggggtccgttctgagagtgcgttstgtacgtgtgtgtcagggtttggtatggcgttcactggtgtgtgtgtgtgagttgaaagtctctggtgttagttgatgggagtgaatgtgagactgtgggtgtatttggggacgtggggggtggactgatgtgtgtgtgtgagcacacatgcagcagggttggtgggcggtgtccagtgtgtgtctgtgtgaacgtgtgtggccctgtcaccgccggctccaggcccagccacataaacttcacacccctgcgggcgggctccagcggccccgcagcagccgcgtagggcaatgggaagcagatgggccaggaaggaggccatatggggctgggggtgggggcgcattcctccctcccagggccgccaggaagccccctgcctgccggcccccccatcggggtgggagctagaactgacacagtaacaaatgtcctgtagccagcgtggagtcagcgtggagccggcatggaggcagcccccgccccacagcggggggtagagagagagagtataaatgagggggatccaggagatgccggcggggaagatgctgccctgataagccacacctgaccccacggctgtgcacccttgggcgccgcacataccccctccgggcccatttccttggcagggtggctgttggggatg

SEQ ID NO: 65582 - DNA, 794 bp, Homo sapiens
gctacaactgaatgttccagatcagaaaacagcacatagttttccagaaatgctgggaccttatctcctcaggagtgagagtagcctggacccattaattcaccagaaacacattgtattttaggccagaaacaataataactgtggcctgttaagtggatgtcagagaataaaaatctaatctgaatttgtaactctgtcagaaggaatggggtgaccgagaattccacaggcgagttttcaacatggacacagggtggggggtccctgagcctctctgctgaggttttgcacagatcagggcttgtggagaacaayggggacattctttgagcacttgctgtgtgccaaggcacaaaacaaccctgggaggctgtactgttagaagttccgttgttcagatgggaaactgaggcccagagaggtggagacggttgcccagagttgaacagctaagaagcggctgagatggggcttgaacccagacagtcaggatctgactggagcccaaactctgaaccacgtgtgtctttctcagggaagtctggaaaaatgtggtttagtgttctgcacaatgaagtaacttgttcaactgaggtcactggctgatggtgggagtcactgatggaggaaatggggagagggcccaggaccccccaggaagtgtcccctgtctcctttgctgggtattttccttccctgactcttggcctgtttctttcttggtgagtgtatgtggggtggggttagtgagaaagggagaccccagctctggcgttgcgggagtgttagga

SEQ ID NO: 65583 - DNA, 728 bp, Homo sapiens
ggcagcctggagtgaaggacaaaatgcctgggttctgaaaccagaacagacctgcaaggcttgctgagtcatccaggacagacctgccaggtttgctgaatcatcctccagctatggtccctttctcctagtcctcgaacctaccaagttcttcctgccccagggcctttgcccttgctatgccatctgcctggaacttttcctrtatctttccaggctcttccttcttcttcaggtctcagatcaaatatttgctcctcagagaggccctccctgatcactcatcaagcatcatgccccacctaatccctgcagtttgtctctaatccataactcttccttattttatttgtagcacttgtcaaggtttgaaattatcccatttatgtattaaattatcttttttttttttttgaggctgaatctcgctctgtcgcccaggctggagtgcagtggctcgatctctgctcactacaacctccaccttctaggttcaagtcattcttgtgcctcagcctcccgagtagctgggattacagatgcctacctccacacttggctaatttttgtattttttcagtagagacaggggtttcaccatgttgaccaggctggtctcaaactcctgacctcaagtgatctgcctgcctcggcttaccaaagtgctgggattacaggcgtgagccactgtgccccgccaaactgtcttttgtctgtctcttcttccc

SEQ ID NO: 65584 - DNA, 1760 bp, Homo sapiens
tttatccaacaaatggataaagttaggcttatatttgaagtgcggcttttaagttgggatttggtaaatcattgtacattaacatttacaaaggcagaattagctgctatttcacatcaccaccgaccagcaaatgcatcagagatgttgtgtgccaaatgtctcactaattaatctagagtattactctctaatctcctaaaaccctaaaagctaggaaatgaccttctcttccacttggaatggcagaggaaatattaggcaagtggagaaatgggattataccatttggaaattggccaaggcactagggttttcaccctgtggttgcaaaaggtatcgtgggacttttactgctccctgggtcaaaacgcagtttcaatagcatctgactctcatttgagattaaacatgagcttttgaatgcaggtctgcatttttacccagaagggactcggagagcccacataattaatttccatgggcaaaactgaaggcgttaccatgtaacttcataataaagccatgttattggctaatgcattcgtacaaaatctggaaggaagtgtcctagagtacatttccaattatttcaaaagctctcctctgaaggagtgagagggctctgcactctaagatggaataaagagtaaaagaaagaaaaaaaaattgaaaatctgtcccagaaatttagtactgtgaactgagtttacatttaaatcccacctcctaaagctgtctctctccaaatttccaggataatcatttacattcatatggccaataaatgtcacattgctatgagcttttgaatgcaaatcttgtatacaagcagccacaagccacaaaacttagattaattaatgcagagacattttctgtgtaacatgtcaagttcaagttgaaaactcaaccactgatataaaaaacagagtactattccatgaaccaagtcctctggaagcttcccggggttgcctgtaaacactctgccacaaacctcaggctttttacagaccccgtcacacatccatagtgaaatttctcataaaaaaggaatgattgcaggatcccagtgtgccctttcaattgccctcttgtggaaggggttcttttcttcataaaccctaaagtggtcagttaatattgattagaaacaaagcctcagatttactcctcatatcagaacaaccagccttctcatttttgcattagttcatgactgaatcaattgaaactgaagsctttgaatgaaatagggcgagtatgttagcctggagcaaattgtgtatggcagcgagttacaaaccacagaaaatgggtcatttatagtggaaacactgacaacctttcaaaactataaggttttgctttacctacagtgtttcaattatttctttggtagatagaagaaagttcattctgattttttctttttacatattagcatggtgaaaaaaagagttattcccagatcagcacgtttgtctcaataattctataaatactctcatatactaagaaccgctgaggatgttgataaggcctgccccacacctccatcaagaagaagccattttggaagacattctcctgcttcatattcattattgcaagaaggcagtctttttctttttaaaacatattttactttacaaaaccatttgctattcttttctgaaaatggatgtgctcacatgccattgtttgcaagaggcaaaaacctcacctaacccagacacctttttatatggaaacta

SEQ ID NO: 65585 - DNA, 1760 bp, Homo sapiens
tttatccaacaaatggataaagttaggcttatatttgaagtgcggcttttaagttgggatttggtaaatcattgtacattaacatttacaaaggcagaattagctgctatttcacatcaccaccgaccagcaaatgcatcagagatgttgtgtgccaaatgtctcactaattaatctagagtattactctctaatctcctaaaaccctaaaagctaggaaatgaccttctcttccacttggaatggcagaggaaatattaggcaagtggagaaatgggattataccatttggaaattggccaaggcactagggttttcaccctgtggttgcaaaaggtatcgtgggacttttactgctccctgggtcaaaacgcagtttcaatagcatctgactctcatttgagattaaacatgagcttttgaatgcaggtctgcatttttacccagaagggactcggagagcccacataattaatttccatgggcaaaactgaaggcgttaccatgtaacttcataataaagccatgttattggctaatgcattcgtacaaaatctggaaggaagtgtcctagagtacatttccaattatttcaaaagctctcctctgaaggagtgagagggctctgcactctaagatggaataaagagtaaaagaaagaaaaaaaaattgaaaatctgtcccagaaatttagtactgtgaactgagtttacatttaaatcccacctcctaaagctgtctctctccaaatttccaggataatcatttacattcatatggccaataaatgtcacattgctatgagcttttgaatgcaaatcttgtatacaagcagccacaagccacaaaacttagattaattaatgcagagacattttctgtgtaacatgtcaagttcaagttgaaaactcaaccactgatataaaaaacagagtactattccatgaaccaagtcctctggaagcttcccggggttgcctgtaaacactctgccacaaacctcaggctttttacagaccccgtcacacatccatagtgaaatttctcataaaaaaggaatgattgcaggatcccagtgtgccctttcaattgccctcttgtggaaggggttcttttcttcataaaccctaaagtggtcagttaatattgattagaaacaaagcctcagatttactcctcatatcagaacaaccagccttctcatttttgcattagttcatgactgaatcaattgaaactgaaggctttgaatgaaatagggcgagtatgttagcctggagcaaattgtgtatggcagcgagttacaaaccacagaaaatgggtcatttatagtggaaacactgacaacctttcaaaactataaggttttgctttacctacagtgtttmaattatttctttggtagatagaagaaagttcattctgattttttctttttacatattagcatggtgaaaaaaagagttattcccagatcagcacgtttgtctcaataattctataaatactctcatatactaagaaccgctgaggatgttgataaggcctgccccacacctccatcaagaagaagccattttggaagacattctcctgcttcatattcattattgcaagaaggcagtctttttctttttaaaacatattttactttacaaaaccatttgctattcttttctgaaaatggatgtgctcacatgccattgtttgcaagaggcaaaaacctcacctaacccagacacctttttatatggaaacta

SEQ ID NO: 65586 - DNA, 1760 bp, Homo sapiens
tttatccaacaaatggataaagttaggcttatatttgaagtgcggcttttaagttgggatttggtaaatcattgtacattaacatttacaaaggcagaattagctgctatttcacatcaccaccgaccagcaaatgcatcagagatgttgtgtgccaaatgtctcactaattaatctagagtattactctctaatctcctaaaaccctaaaagctaggaaatgaccttctcttccacttggaatggcagaggaaatattaggcaagtggagaaatgggattataccatttggaaattggccaaggcactagggttttcaccctgtggttgcaaaaggtatcgtgggacttttactgctccctgggtcaaaacgcagtttcaatagcatctgactctcatttgagattaaacatgagcttttgaatgcaggtctgcatttttacccagaagggactcggagagcccacataattaatttccatgggcaaaactgaaggcgttaccatgtaacttcataataaagccatgttattggctaatgcattcgtacaaaatctggaaggaagtgtcctagagtacatttccaattatttcaaaagctctcctctgaaggagtgagagggctctgcactctaagatggaataaagagtaaaagaaagaaaaaaaaattgaaaatctgtcccagaaatttagtactgtgaactgagtttacatttaaatcccacctcctaaagctgtctctctccaaatttccaggataatcatttacattcatatggccaataaatgtcacattgctatgagcttttgaatgcaaatcttgtatacaagcagccacaagccacaaaacttagattaattaatgcagagacattttctgtgtaacatgtcaagttcaagttgaaaactcaaccactgatataaaaaacagagtactattccatgaaccaagtcctctggaagcttcccggggttgcctgtaaacactctgccacaaacctcaggctttttacagaccccgtcacacatccatagtgaaatttctcataaaaaaggaatgattgcaggatcccagtgtgccctttcaattgccctcttgtggaaggggttcttttcttcataaaccctaaagtggtcagttaatattgattagaaacaaagcctcagatttactcctcatatcagaacaaccagccttctcatttttgcattagttcatgactgaatcaattgaaactgaaggctttgaatgaaatagggcgagtatgttagcctggagcaaattgtgtatggcagcgagttacaaaccacagaaaatgggtcatttatagtggaaacactgacaacctttcaaaactataaggttttgctttacctacagtgtttcaattatttctttggtagatagaagaaagttcattctgattttttctttttacatattagcatggtgaaaaaaagagttattcccagatcagcacgtttgtctcaataattctataaatactctcatataytaagaaccgctgaggatgttgataaggcctgccccacacctccatcaagaagaagccattttggaagacattctcctgcttcatattcattattgcaagaaggcagtctttttctttttaaaacatattttactttacaaaaccatttgctattcttttctgaaaatggatgtgctcacatgccattgtttgcaagaggcaaaaacctcacctaacccagacacctttttatatggaaacta

SEQ ID NO: 65587 - DNA, 473 bp, Homo sapiens
ggagtcaggactggtgatccacagcctacctgactccctaccccctgcattttctccccaaagctgcggttacttcatccccctaagttcaggcctccttgtcctgtcctaggcacaatacagaagcccaggggagttggctttcagaggatctggttgctggcgctccactggcctcgtgcttcctttctggtcaatgggcttcctccagtaaccaagcttctatcttacataggattacaacagctgccattctgtgtcataccacgcacttcacrtgtatcttattcaacctcacacaacccggtgaggtaggtctgatgcccccagtttacaagtgaggacattgaggcttaggggtagccctgctggccatattcacaaactggcagggggaatgaaggtaatctgtcctactcaggagcccaagctcgtaaccaccgtgccatggagctgcctcagttccaccctca

SEQ ID NO: 65588 - DNA, 1771 bp, Homo sapiens
actaaatctctcttgtgtctcagtttcctcatctgtaaagcatagacctcatgagcgtattgtgagaattaaatgatttaaaagcatagacctcaaaatggtattacataggataaaagcataggcctcataacggtattacataggataaaagcataggcctcataagggtatcgtgagaactaaatgatttaaaatatgtaaaccactgggctggatgcggtggctcacgcctgtaatctcagcactttaggaggctggtgggtggatcacctgaggttaggagttcaagaccagcttggccagcatggtgaaacccgtctctactaaaaatataaaaattagccaggcgtggtggcacacacctgttatcccagttactcaggaggctgaggcaggagaatcacttgaacccaagaggcagaggttgcagtgagccaagatcgcaccactgcactccaacctcggccaacacccagagctagactccatctcaaaaataaataaataaataaatatgtaaaccactgtagaacaatgcctacggtattactgtcatttaacaaactgtacttattgttattcaattaactatgtaggaacaatttgaagtcatttcagaaaaaaatgcattcaagaggtaaatgaaaaataaactatacatatgttagaagaaaatacaagtaaattgtgcttataaattatgagagactttaagaaatacaaaatacaaaagccacaaaagagaaagtagtaagtttgacaaacaaaaatgtttaattccaatatgattaaggacatttataaacagggttaaaacgcaagccacacaagaggtatgaacaggtagtacacagagaaatgctaatggccttcaaacacacgaaattttattaaataccaataaaactgcataataagagaaactaaaattaaaactaattaaaaagaaaggatataaaagatcagaacaaataaataaccaaattgacctaagtgacacacacagagcactgtactcaacaactccagaatacatattcttttgaagttcaygtggaaatttaccaaaacacaccataatctgggccatacagcaagtctctaaaagcttcaagggattggtatcatacatagtatattctctggccacagtggaattaaactagaaatcaacaaagaaagctaactaaaatgtcttcaggcaaataaatttgacaactcatatgaaatagacaaattcctagaaaaacgcacatgaaaaataaaatataatcatataaatgttaaaaatattgaatcctactttttaaaacttcccacaaagaaaaccccgttaatttgaaataatttatgaattccttcaaacaattaaaaagtaattattccaatcatatacaaaccttttcaaagaatgggggaaaaaaaagtacccaactcatttttgaaagcagccataacagggtacagaaacaaattatcacacagtcacctaatttcccaacacaattctgtgaggaaaagacttcctttcaatagagggcaatggaccatttggatatccatatgaggaaaaaataaataaatgttgacccctatgttacatatacaaaaattaatctgagcttgataagaaagctaaacatgatggataaaaacaataaaattacagaaagaatgaagattatcttcataactttgaacaggcaaaaacttaaaatacaaagagttaatcacaaaagaaaaggttgctaacttaaacttcattaaa

SEQ ID NO: 65589 - DNA, 2701 bp, Homo sapiens
tcattaatgtcagactagataaagaaaatgtggtacatatacaccatggggtactatgcagccataaaaaagaatgagatcatgccctttgcagggacatggatagagctggaggccactatcctaagcaaactaacacaggaacagaaaaccaaataccatgtgttgtcacttatcagtgagagctaaacaatgagaacacatggatactaggaggggaacagcagatactggggcctacctgaggatagagggtgggaggagggagaggctcagaaaagacacctatcggatacttatgcatattacaaaattatctttacaccaaacccgcgtgacatgcagtttagctatataacaaacctgcacatgtacccctgaacctacaagttaaaaaagacgtttgcctgtgtggggcctccttctgtccccagtcctgcttttgctgtacagaaacccagtggcccccgctggtcctacccataacatatcctcatcctccctcctaaagagtccccttgggtcacggatggtgttgtgtggtgaagcgggtgcatgtatcataagatgtggctggaagcaggtgtgcaattctggttcacacaccctctccccaactctcatttaccatttccctcaaaggatagcacagcaccaatgtcccatggccctggatgcctttgtctagggatatcttttatctcttccactgaggatgtctgcgatgggaacagtaaggttttggagctataggctttattcccagttcaaactcaaatgatacagaggccaaaaatgtgccaccagctgcacaatgtgaactcctgaggctgcaagccaccccagcacctcccagctctcatccctaccaaaggatttctgaacttaaatgctagataccttctgttttaaaagacttgcatgtgtgtgattcaggccatttattgggcatgtagtttctcaaaatctactcccagttccctgaacaagctacgcctttggataacctggcatctctcatctccccatccttgccccagatcagctacaccccagccttcacttttcaaagtcttgcaagccacgtgtgttacacagagctggtcctcaaaaacagcatgatgaacttgtcactgcttttaactttctcttcccagcttgtgtgtgtttttagtgatgttttcaactggtagagcttcaaaaaatgtacaaactgaattaaatgtaggagaaaagccccaaaaccgaatgttttacttttaaaatgaaagaaaagcagtcacacaatcttggctgatacacaatattacaagagagaaaacaaaatgcccctctgttgggaagatgttctgctgtttctaggcaggattcattaaggcccatttcttctagtcaatgatttccatcagagtgtttttagttttccttttttttctttttgataggaaacttggtaaagaatgaatactcaaagaagccaagaaagtgttattgataagtggaataagaatctcccggcatggggccaatgcatgtgtattttgaaaaaggtctcaaaacacacaccagtttgagagccgccattacagtctgtcaataccaggccatctgggctggaatgcccttggccccaggggcaagtgtgggtcttgggaagcttattcattcctctcccatttttttccagttcttacttcaataccacactcctcctgaggcaggaagatttcattcaagtcagtgcagtagaagaagcctagattttggagtctggtttgaatcccaactctgccacccaccagctagctgtgtgacatttaaaacttaacctgtctgaatctgaatctgttaggattccttgatagtaagcaacagaattcagctctgagcaaatgaagttaaaaagagaaattactgaagcaataaggtggctcacagaatcaaagcaatgctgaaggagcaaggcaggcagctctgggatccaagacgsgggagctaagtggggggattgcatcatttggacccattcttcacctctccccacatccatgccctttgcaggtcactttgcagcacgcacccatcatgcgtggggtgaattgccccaactcgtgactctagactcaggatgtaaaccctaaccctactccccgccccacaacaataaacatcatcactcaaatctttgtctcaagatctgcttttagggaaatccaacccaagacacctcagggcacaagccaaagtcacgtttttcaaaatattcaagttaattaactcagagctctatgttgctcatagtgaaaatggctttctctctctcctgactcctcccataatgagcccaagcatacccaaagcccgttttgtttgcgttggaacttatgtagtaaagtccaggtaactgggtcacctctcaggggctgcattgtggaaagcgggcaaagagtttgactttttactttccaaatgtctacactatgtgaatttttcccacctgagtgttcccaaacgcccctgcccctgacctcaggcgaaggagggggttctcatcctttcctgagctcagggcaagacagcatgtgaacacctggagagaggggcttcagctggaagaggacaagccagagaagatgaggcttaacataaactgacacccaagtgcctccttataaaactaaaccctttctggccgggcgcg

SEQ ID NO: 65590 - DNA, 2701 bp, Homo sapiens
tcattaatgtcagactagataaagaaaatgtggtacatatacaccatggggtactatgcagccataaaaaagaatgagatcatgccctttgcagggacatggatagagctggaggccactatcctaagcaaactaacacaggaacagaaaaccaaataccatgtgttgtcacttatcagtgagagctaaacaatgagaacacatggatactaggaggggaacagcagatactggggcctacctgaggatagagggtgggaggagggagaggctcagaaaagacacctatcggatacttatgcatattacaaaattatctttacaccaaacccgcgtgacatgcagtttagctatataacaaacctgcacatgtacccctgaacctacaagttaaaaaagacgtttgcctgtgtggggcctccttctgtccccagtcctgcttttgctgtacagaaacccagtggcccccgctggtcctacccataacatatcctcatcctccctcctaaagagtccccttgggtcacggatggtgttgtgtggtgaagcgggtgcatgtatcataagatgtggctggaagcaggtgtgcaattctggttcacacaccctctccccaactctcatttaccatttccctcaaaggatagcacagcaccaatgtcccatggccctggatgcctttgtctagggatatcttttatctcttccactgaggatgtctgcgatgggaacagtaaggttttggagctataggctttattcccagttcaaactcaaatgatacagaggccaaaaatgtgccaccagctgcacaatgtgaactcctgaggctgcaagccaccccagcacctcccagctctcatccctaccaaaggatttctgaacttaaatgctagataccttctgttttaaaagacttgcatgtgtgtgattcaggccatttattgggcatgtagtttctcaaaatctactcccagttccctgaacaagctacgcctttggataacctggcatctctcatctccccatccttgccccagatcagctacaccccagccttcacttttcaaagtcttgcaagccacgtgtgttacacagagctggtcctcaaaaacagcatgatgaacttgtcactgcttttaactttctcttcccagcttgtgtgtgtttttagtgatgttttcaactggtagagcttcaaaaaatgtacaaactgaattaaatgtaggagaaaagccccaaaaccgaatgttttacttttaaaatgaaagaaaagcagtcacacaatcttggctgatacacaatattacaagagagaaaacaaaatgcccctctgttgggaagatgttctgctgtttctaggcaggattcattaaggcccatttcttctagtcaatgatttccatcagagtgtttttagttttccttttttttctttttgataggaaacttggtaaagaatgaatactcaaagaagccaagaaagtgttattgataagtggaataagaatctcccggcatggggccaatgcatgtgtattttgaaaaaggtctcaaaacacacaccagtttgagagccgccattacagtctgtcaataccaggccatctgggctggaatgcccttggccccaggggcaagtgtgggtcttgggaagcttattcattcctctcccatttttttccagttcttacttcaataccacactcctcctgaggcaggaagatttcattcaagtcagtgcagtagaagaagcctagattttggagtctggtttgaatcccaactctgccacccaccagctagctgtgtgacatttaaaacttaacctgtctgaatctgaatctgttaggattccttgatagtaagcaacagaattcagctctgagcaaatgaagttaaaaagagaaattactgaagcaataaggtggctcacagaatcaaagcaatgctgaaggagcaaggcaggcagctctgggatccaagacgggggagctaagtggggggattgcatcatttggacccattcttcacctctccccacatccatgccctttgcaggtcactttgcagcacgcacccatcatgcgtggggtgaattgccccaactcgtgactstagactcaggatgtaaaccctaaccctactccccgccccacaacaataaacatcatcactcaaatctttgtctcaagatctgcttttagggaaatccaacccaagacacctcagggcacaagccaaagtcacgtttttcaaaatattcaagttaattaactcagagctctatgttgctcatagtgaaaatggctttctctctctcctgactcctcccataatgagcccaagcatacccaaagcccgttttgtttgcgttggaacttatgtagtaaagtccaggtaactgggtcacctctcaggggctgcattgtggaaagcgggcaaagagtttgactttttactttccaaatgtctacactatgtgaatttttcccacctgagtgttcccaaacgcccctgcccctgacctcaggcgaaggagggggttctcatcctttcctgagctcagggcaagacagcatgtgaacacctggagagaggggcttcagctggaagaggacaagccagagaagatgaggcttaacataaactgacacccaagtgcctccttataaaactaaaccctttctggccgggcgcg

SEQ ID NO: 65591 - DNA, 2701 bp, Homo sapiens
tcattaatgtcagactagataaagaaaatgtggtacatatacaccatggggtactatgcagccataaaaaagaatgagatcatgccctttgcagggacatggatagagctggaggccactatcctaagcaaactaacacaggaacagaaaaccaaataccatgtgttgtcacttatcagtgagagctaaacaatgagaacacatggatactaggaggggaacagcagatactggggcctacctgaggatagagggtgggaggagggagaggctcagaaaagacacctatcggatacttatgcatattacaaaattatctttacaccaaacccgcgtgacatgcagtttagctatataacaaacctgcacatgtacccctgaacctacaagttaaaaaagacgtttgcctgtgtggggcctccttctgtccccagtcctgcttttgctgtacagaaacccagtggcccccgctggtcctacccataacatatcctcatcctccctcctaaagagtccccttgggtcacggatggtgttgtgtggtgaagcgggtgcatgtatcataagatgtggctggaagcaggtgtgcaattctggttcacacaccctctccccaactctcatttaccatttccctcaaaggatagcacagcaccaatgtcccatggccctggatgcctttgtctagggatatcttttatctcttccactgaggatgtctgcgatgggaacagtaaggttttggagctataggctttattcccagttcaaactcaaatgatacagaggccaaaaatgtgccaccagctgcacaatgtgaactcctgaggctgcaagccaccccagcacctcccagctctcatccctaccaaaggatttctgaacttaaatgctagataccttctgttttaaaagacttgcatgtgtgtgattcaggccatttattgggcatgtagtttctcaaaatctactcccagttccctgaacaagctacgcctttggataacctggcatctctcatctccccatccttgccccagatcagctacaccccagccttcacttttcaaagtcttgcaagccacgtgtgttacacagagctggtcctcaaaaacagcatgatgaacttgtcactgcttttaactttctcttcccagcttgtgtgtgtttttagtgatgttttcaactggtagagcttcaaaaaatgtacaaactgaattaaatgtaggagaaaagccccaaaaccgaatgttttacttttaaaatgaaagaaaagcagtcacacaatcttggctgatacacaatattacaagagagaaaacaaaatgcccctctgttgggaagatgttctgctgtttctaggcaggattcattaaggcccatttcttctagtcaatgatttccatcagagtgtttttagttttccttttttttctttttgataggaaacttggtaaagaatgaatactcaaagaagccaagaaagtgttattgataagtggaataagaatctcccggcatggggccaatgcatgtgtattttgaaaaaggtctcaaaacacacaccagtttgagagccgccattacagtctgtcaataccaggccatctgggctggaatgcccttggccccaggggcaagtgtgggtcttgggaagcttattcattcctctcccatttttttccagttcttacttcaataccacactcctcctgaggcaggaagatttcattcaagtcagtgcagtagaagaagcctagattttggagtctggtttgaatcccaactctgccacccaccagctagctgtgtgacatttaaaacttaacctgtctgaatctgaatctgttaggattccttgatagtaagcaacagaattcagctctgagcaaatgaagttaaaaagagaaattactgaagcaataaggtggctcacagaatcaaagcaatgctgaaggagcaaggcaggcagctctgggatccaagacgggggagctaagtggggggattgcatcatttggacccattcttcacctctccccacatccatgccctttgcaggtcactttgcagcacgcacccatcatgcgtggggtgaattgccccaactcgtgactctagactcaggatgtaaaccctaaccctactccccgccccacaacaataaacatcatcactcaaatctttgtctcaagatctgcttttagggaaatccaacccaagacacctcagggcacmagccaaagtcacgtttttcaaaatattcaagttaattaactcagagctctatgttgctcatagtgaaaatggctttctctctctcctgactcctcccataatgagcccaagcatacccaaagcccgttttgtttgcgttggaacttatgtagtaaagtccaggtaactgggtcacctctcaggggctgcattgtggaaagcgggcaaagagtttgactttttactttccaaatgtctacactatgtgaatttttcccacctgagtgttcccaaacgcccctgcccctgacctcaggcgaaggagggggttctcatcctttcctgagctcagggcaagacagcatgtgaacacctggagagaggggcttcagctggaagaggacaagccagagaagatgaggcttaacataaactgacacccaagtgcctccttataaaactaaaccctttctggccgggcgcg

SEQ ID NO: 65592 - DNA, 1254 bp, Homo sapiens
tgcatgcagcaccaccattttccctccttcctcaccattgcactggcaaggactggagggatgctcctctcaactattcttaggaaaaactataaacttataaataggataaattaagagagctgatgagggaggaagaggagttctagcttgtgaatcaggagaccttgattctagccctgctagctcaataccagttctgaaactgtaggcaagtcacaagctccctgagcctcagcattcttcactacaaaacaaaggactgggcagaaaatcttaatgatcacttcaatcttgtgtgattctgtgaaactcaaaataacactgaagtcaagcacaatgaaaaaaattgtctaaaaggaaagtagacttttttatttttatattttttctttattctcagcccattctccataacaattcaaaataggttttgaagcacatcccaagtattatgtattatcatgctgtttctcaaaccagcaatccacttcctatacacaattaaaataataaaattggagaaccacaaggaataccaaactcagtgtttctttttgatgacaaagaaacacagatgcggagaaatcatgagctaattcttggttgagcctaagtcctttgactctgccccgtgctcttcgaactaacccagctgcctttattaaactgcattttccaaatgggcaaacaggatgacaaaaatgtcacgtttaaagttctctagctgtgttctgacatttaatgaaaggaaaggatgatgtaaactatggtgtttttagtcatttgtgtgtgtgtgtcaccatggtattcctgaatgccagagagtagcattagctttgtagcctccatagcacttcctagaagaagccaaagaaaataacttgctggtgggtttgtggagcccttccccaggccagacttggaacccaccaaaggattggggacatgttccctcaaaggtagacttagagtgaaaagattcaccttgtcaccttttactggtaaaagctttggtgggatgctaaggactgttttaaagaattttccagggaaattggggtggtatacagccactggccacatatatcagtgaatttctcagagtgaaggtaagtggtcttattgcaggaaacactggtttatgtctaaagcaatcaaggaaagaaattttggcagctcactcagcagagccatttctcattgtattagtttcctattgcttctgtaataaattacyagacacttaccaac

SEQ ID NO: 65593 - DNA, 750 bp, Homo sapiens
atcttcgacatacttgtttttcaaattacatttttatatgcataggagtgaaggagagtttggggaactaacactgctttggtatttcctttcttctcctctctgatcctatcctctttcatttcattaaaacgctctgacagcagcttttctaaattgctttcacaacccactaatgggctttgaaaaaaacatgccctgaatgattgttccactccgactctcccttctcaagcctcctgcctcctcctgcctcctcttgccctcctcactctctcgttattttgagacaggatcttgctctgttgcacagaaactagaactaatctgcagaacttccatgactcccaaacactaccaagccacctgcatgccgactgtaggctccagctccctcctgcttccgtggatagaacagatgcgcgctctcagttatgcagtccacccaggcttctctcagatactcaagggcattactgcagcaattgtcccgctctttgctgggtcaccagtttctcaccctgtttcctgggtcatttccatccagctggattcatactgtagtatggcccawctttagagaaccttctcttgactccacttttacttccagctcccacatcttttctcagctttcattttacaaagaactctttacgagtgcatcggtgctcactgtccccaagtctcttcctccacttcttccgttgtaccactctagccaggatactgccccctgaactgattttg

SEQ ID NO: 65594 - DNA, 1442 bp, Homo sapiens
acacattctccctgagtgtcctcacatcgtcctccaggtttcccctttcctgttggattggggctcatctgatgacctcatctaaattagttaaatctgcatagaccccatttccaaataaggtaatatccaatgctastaggggtgagaactccaacatatctctttgtggggacacaattcaacccataactaggtgtaaaattagaaactgatgagatatccaggaagtgtgaccagtgcacacaatcagaaaatagagtcaggcattctcagcagtaaatagctattccaggtcaaagggctgggtgtgagttgcctccatcttgtcttgttctgctgttgttggggaggccttagcaccttctgaggtgggtgaaagcagagaatgggagctgaaggcttaaagaaagggccaagcgaggtgggtggttcctgagctttgatttggtggcgtgctgtctattagaccaccctgactggtttctgtgatctctccatggtactgctgagtgccaggtacatctctttggaggtattgatgcttaatgaacggcagcttctccttcctgctggctgaggtgcatgagaggccaaatgactgtatttgggagatgtgcggtacaatttcaaaatgcctgataatacagtgatctggttacaatcactattaaaatcacatcatggattgtgataataaaaataaaataatatatactagatgataaatattataaaatattatatatatataataaagataaaggaaatatgtttagcttcatataaaaatcaccatcatgcccttgatttgcccctgaccagcacccagttcccatgaccttggagcttcctgcattctgaccctgagcttctgtcccatggagcaactgtgtttatgggctgtcaaccagctaccataggcaggggatggaggcctttataggctcctctcttttatctcacagggaatttttcaagacagagctcaggtttctgaactcaacttacataatgcatctaaaatgacataaatatgaatgtatctcacctatcacccccgagcagccaagtaccagttcactgaatcaggagagagccctgggattgctgaagagggcaggatgatggagttgcataaagaactcaacacaacccaactctgatttatgtctccaaaggaagtcagataggaatgtgaactgggcacatagtatttttcttacaggagcatataataaaagcaatatttttgcaactagagaagaagcgggaaaaagatcaagagtcagagattgcagagaggaattccaagaggaatctttagtcagaaaaagccatgagtctctcttgtcctctgccactgtggcatgtaaaggaattgaaaatgccttgagaaaattattcgtattctagaaaaaggacacaagggagtgggatcc

SEQ ID NO: 65595 - DNA, 1069 bp, Homo sapiens
tgccaaacatcatcgcttagcctaacctaccttaaacatgctcagtgcactaacattagcctaaaattgggcaaaattatctaacagaaagcctactttatcagaaagtgttgaacgtctcatgtaatgtattgaatatggtacattatgttgaaattgtgattgttttacagtattgtaaagtcgaaaaattgtaagacaaaccatcattaagtcaaggactatccgtatatttaaattcttttatacagacacacacacaygcatacatacacacggagaaagaggggaagagagtgacagaaagataaacagtgagacagaaagaaagaccagaaattaccagtgtgagaaattaataaaggagaggacatcgctacagtttctatagacatcaaaacaagtataaaagatttatagtggccccagctagtgggatacggcaattaaaagaagttaaatttgtaaatattgaaaaggaaaggtaaatgctaatttggagatggcatggttatgtacaaatgtcaacaattatctacaaacaattagaaataaaagccagtttggtaaggtgactggatttataacaaatgcacaaaaagcaaaaatcaattgtatacctgttacactttttgtttgataaagtagaaataattcatcacaaacaaggacagaaaggaaagggattaaacatgtccttaaattgtgtaccctagatgcctctcttgcttcacccaaggctcagtccagatgaaaatggctcattatttgttagagaaatttaaattaaaactgtagtgacataccattctacacatactagtttgtctaacattaaaagactaacaataactattacaaatgaagatacagtacaagggaaattctcatagactgttggagaaaaagtaaatggatgcagctacccacttacatatttataccacaagatacaagcaaggatgtacatagcagcattatttgtttaaaaaaagatgaatttttaaaattgcctattgaatattattcagcaatgaaaatgaacaaattagaactacatgtaacaaca

SEQ ID NO: 65596 - DNA, 1069 bp, Homo sapiens
tgccaaacatcatcgcttagcctaacctaccttaaacatgctcagtgcactaacattagcctaaaattgggcaaaattatctaacagaaagcctactttatcagaaagtgttgaacgtctcatgtaatgtattgaatatggtacattatgttgaaattgtgattgttttacagtattgtaaagtcgaaaaattgtaagacaaaccatcattaagtcaaggactatccgtatatttaaattcttttatacagacacacacacatrcatacatacacacggagaaagaggggaagagagtgacagaaagataaacagtgagacagaaagaaagaccagaaattaccagtgtgagaaattaataaaggagaggacatcgctacagtttctatagacatcaaaacaagtataaaagatttatagtggccccagctagtgggatacggcaattaaaagaagttaaatttgtaaatattgaaaaggaaaggtaaatgctaatttggagatggcatggttatgtacaaatgtcaacaattatctacaaacaattagaaataaaagccagtttggtaaggtgactggatttataacaaatgcacaaaaagcaaaaatcaattgtatacctgttacactttttgtttgataaagtagaaataattcatcacaaacaaggacagaaaggaaagggattaaacatgtccttaaattgtgtaccctagatgcctctcttgcttcacccaaggctcagtccagatgaaaatggctcattatttgttagagaaatttaaattaaaactgtagtgacataccattctacacatactagtttgtctaacattaaaagactaacaataactattacaaatgaagatacagtacaagggaaattctcatagactgttggagaaaaagtaaatggatgcagctacccacttacatatttataccacaagatacaagcaaggatgtacatagcagcattatttgtttaaaaaaagatgaatttttaaaattgcctattgaatattattcagcaatgaaaatgaacaaattagaactacatgtaacaaca

SEQ ID NO: 65597 - DNA, 1168 bp, Homo sapiens
ccagtggcactccaagtcagtaaatggaggccragaccctgagtacagggagtggagcagagggcccaggctgagaattccaacgtctctgtagatgctcttcagctccaaggctgccatgtggacctaccatctattgcacatgctccagcccataggcttcattagagacctcctggtgcgggtgttgaagagatgaggcttgcatggaaaggtgaaaacctctccctgtgcatgactacttgtgcaaagccaggaagcaattccccacaagaggctctgagatgagtcttgctcatccttccaaaaaatggtttttgttcatacttggaggagggtgtggatatgtcaggccatggtttaacagacctggtgttttaacctaatcttttatagttcttgagcagaaaatctgcatggcaaaaatttcaaggggctgcaaacattttcaggagaagagaaaaatgttggcacatcagaactcctcttagaacataaatatacatgttttcatggggagagattgtttagggtaaaattaagagagactttttttaccctatcagcccaaggagacctgtataagacaaggaggaggatttgatgcttagtggagagaagtgggatgggtaaggaagcagatggaatagaattccaagagtggtagagtgggcccctcattgtgataaactccacttcattgtgagtgaatttactaaatctacagagtgccacatagcaccgttttccagggaaagggactgagtttaaagtccagttgaaccaaagctgggtgagtccttaatttcaggggcctatatagcgataataactaccaaataaaagataatttttcctaggcaggtgatggagactagggcaagcagatggctgcaaaattaacagaagttcttttatttttttaaatcttgaaacagaaaattcagaatcattagaaaatatgaaatcaaattaacatcacctagaaaggagctgtgatctgaagtacacgtgacttaacagtcattcagcactgagtggtgaccacatttaataataatatattgtgcatttcaaaattgctgaaagaatagatttttttaatgttctcactatacaaaaaaagttaagttggtgaggtgatggatatgttcattagtttgactaa

SEQ ID NO: 65598 - DNA, 646 bp, Homo sapiens
aattaatgctcctgaaatgtcggtgaggatgttttacaccaacctctctcccccatccaagctgccaactgactgacggagccctcctgtgctggctcaggtgatattggcaggtgagctgcctagttaattcacaactgggagaaaataagaaattgctgttttaagctacagttttgggtgatttcaagagagatcacgaatacactccaccaggtgattttactggttaaaagctagaagaacctcatggccacttgtggcccatgagaactaatcaggcatcctttgtcccaacacactttaggaatgttggtgactctccatgcagctacttctcctagacagcccctactttttcttttgaattttccaggcaagagcaaggcaccagttcaccatatctgtctgaggaaaagaacatctatcaatctcctgagagtgcccatggaaacttatctcattagactttaggagatacttcccccatgtcttgatcttctcttttataagaaatcctttcaattttatttttctttcccacctagatagacagtattgtrtatgtggcttttagccactggtctacaatcctttctctacaattctgagatctaaatagctcttagaaaatagaacagaatgt

SEQ ID NO: 65599 - DNA, 1138 bp, Homo sapiens
tggttacttgcctgccataatggtaggggtgagtatttgtgatagatactgcatggcccacaaaacctaaaatatttactatctggcccttttcagaaaaagggccgtttgctgcctgagaatgttgttcttaaccttttttatgccattacccctttttggcagtttagtgaagtccatggaacccttcttagataatgttttaaatgtaccaaataaactaaaataaaaaccaataggaatataaaagaaactaattatattaaaatagttattamagagaaaaaattgtgatatgccaatgtgtgtgtttcattaatgaattcaagaatcagacctagcggcagctctagtaactacagtcatttctaaataaagaagagtgtaaaagatatttgctccatctgcagcaatcattatgaagagatttttgatttccgctggcgacaactttacatgcactgttatcagattggttgcctgttttcataattgaaggacgtgtcaaattttaatacaggctagtgaaaatgaagacgtctttgttttccccacccccattcaaggacctccttcccaaatctactcatggatttctcaggggcagacgtctgtagactcaaagtcagaatccttgctccagaatgttttactaggttttccagttatatccctgtcaaaattatagtgacagtcttttttcactttttttaagcaatctgcagaggtgagacccagaaaatccagaaaaccaaatctcgcagctaagttgcagagcttaacaacgttttttggcatgaaagcaaaggttttaaattcctttgtctttttttttttaatttaaccataaacatttctttaatgaagtatcctggtcaaatagtcccactggacactaaggtcttcaaagctaatgactatgttcattcttgcctactacctgattcccactgtgtctggcacatagcgaggtttaaagaatgttggatgaatgagcgacatatatttaagctgacaggtcctccttgagtttgggttgctactaaaacaagtgttgatgtagtctatccaattgccgaaagggtaaaaacaaaatcctattaatttacagttttaccagtgccacagatttataaaa

SEQ ID NO: 65600 - DNA, 996 bp, Homo sapiens
accaatttgggtgttttatttcattttttttttagatggagtctcgctctgttgcccaggctggagtgcaacggcgccatcttggctcactgcaacctccgcctcccgggttcaagtgattctcctgcttcagcctccctagtggctgggattacaggcacacaccaccacacctggctaatttttgtatttttagtagagacagagtttcaccatgttggccaggctgttctcaaacttctgacctaaggtgatctgcctgcctcrgcctccccaatttttttttttttgagatgcagtctcgctctgtcacccaggctggagtgcaatggcgtgatctcggctcattgcaatctctgcctcctgggttcaagcgattctcccgcctcaacctcctgagtagctgggactacaggtgcctgccacagtgcccagctagtttttgtatttttagtagagatagaattgcaccatgttggccaggctggtctcacactcctgcctcaggtgatgtgcccgcctcggcctcccaaagtgttgggattacaggcgtgagccaccgcgcccgaccaactgggtgtttgtatgcaatttgatgccagagtagccactcatccccaggtgagtgtatgtgtgtgtgtgtagtggaccttggaccaacctgggtgtgtgcatgtgatttgatgctgcagtcaccactcattgccaggggtgtgtgtgtgtgtgttggtgtgtgtgtgtgtgtttgtgtgtgtgtgtgtgtacagtcagattgaccctgggccaacctctgtctcctctcactagctatagggccttgaccaagtcacttctctgctcttcagttcttttgtcggtaaaatggggatattgcagtgatctcagagcttagatcttgttgttctagtaaagattcaagggaaggataaggcatactgcaagtcgggcacactgcaagttcttgagaattctcagtggacattacggtaactatgc

SEQ ID NO: 65601 - DNA, 996 bp, Homo sapiens
accaatttgggtgttttatttcattttttttttagatggagtctcgctctgttgcccaggctggagtgcaacggcgccatcttggctcactgcaacctccgcctcccgggttcaagtgattctcctgcttcagcctccctagtggctgggattacaggcacacaccaccacacctggctaatttttgtatttttagtagagacagagtttcaccatgttggccaggctgttctcaaacttctgacctaaggtgatctgcctgcctcggcctccccaatttttttttttttgagatgcagtctcgctctgtcacccaggctggagtgcaatggcgtgatctcggctcattgcaatctctgcctcctgggttcaagcgattctcccgcctcaacctcctgagtagctgggactacaggtgcctgccacagtgcccagctagtttttgtatttttagtagagatagaattgcaccatgttggccaggctggtctcacactcctgcctcaggtgatgtgcccgcctcggcctcccaaagtgttgggattacaggcgtgagccaccgygcccgaccaactgggtgtttgtatgcaatttgatgccagagtagccactcatccccaggtgagtgtatgtgtgtgtgtgtagtggaccttggaccaacctgggtgtgtgcatgtgatttgatgctgcagtcaccactcattgccaggggtgtgtgtgtgtgtgttggtgtgtgtgtgtgtgtttgtgtgtgtgtgtgtgtacagtcagattgaccctgggccaacctctgtctcctctcactagctatagggccttgaccaagtcacttctctgctcttcagttcttttgtcggtaaaatggggatattgcagtgatctcagagcttagatcttgttgttctagtaaagattcaagggaaggataaggcatactgcaagtcgggcacactgcaagttcttgagaattctcagtggacattacggtaactatgc

SEQ ID NO: 65602 - DNA, 733 bp, Homo sapiens
gaaaaaaattaactgtaatcctgtaacccacttctatcgcccactttgtgctgtaaatattttgtgttctacattgttttttccgtattggcagaaacttgtttttaatacataaaataacattatactgaacctattgtttcataactcttagcactttatttgtggtacatagcgaaagagtagaagttggggtgttcagaggaagatttgtcaagctttgccatgcttggcaaatcagcacgtcaaaacatctggctaacatggagagctttgtgcttggcaagaggtggcggttggtcatgaagacatttaatggattctctgaagtggtggcaaggtggcaagragagtccaacctgaagctgcagagcctgggattgcgctgcatggagaagaaagggtgtgcgtgattccacgctccttttcatcctggcctttccattcggtctgtgcaactgtgggcttgggcggatttctttgccattattggcctcagttttctcatctttaaaatgaggggaatcaagctggtgatgtttccgaagtctgttgccattctgaaatgttagagttaaaatgtttctatttcatattgaattgacattccatctctatccagagagaatttgaggatgcttatgctagatacagcacaaaaggttcacattagaaggcctcagagtgagggttggggtgggacagtgagggtcaggacacaaaacacagacca

SEQ ID NO: 65603 - DNA, 733 bp, Homo sapiens
gaaaaaaattaactgtaatcctgtaacccacttctatcgcccactttgtgctgtaaatattttgtgttctacattgttttttccgtattggcagaaacttgtttttaatacataaaataacattatactgaacctattgtttcataactcttagcactttatttgtggtacatagcgaaagagtagaagttggggtgttcagaggaagatttgtcaagctttgccatgcttggcaaatcagcacgtcaaaacatctggctaacatggagagctttgtgcttggcaagaggtggcggttggtcatgaagacatttaatggattctctgaagtggtggcaaggtggcaaggagagtccaacctgaagctgcagagcctgggattgcgctgcatggagaagaaagggtgtgcgtgattccacgctccttttcatcctggcctttccattcggtctgtgcaactgtgggcttgggcggatttctttgccattattggcctcagttttctcatctttaaaatgaggggaatcaagctggtgatgtttccgaagtctgttgccattctgaaatgttagagttaaaatgtttctmtttcatattgaattgacattccatctctatccagagagaatttgaggatgcttatgctagatacagcacaaaaggttcacattagaaggcctcagagtgagggttggggtgggacagtgagggtcaggacacaaaacacagacca

SEQ ID NO: 65604 - DNA, 831 bp, Homo sapiens
gcattattgagtaaatcctagcacccgccccccccccatatccaaaatattgttggtggaatgtaccctttgaaattgctttasgaattaagttcaagtcacagtaatttgaaattttaccctgaatcaaattactgtatgtgtcaatatcattcagttgacttagtgtatactaaatcatttgtaactttgctgttgttatttaaaacactaccactcttctcaatggatatttttttggtttcaaaaatgtcctttttttttttaattaaactttgttgtttatgttcataaacatgtattgggtttattatttttaaatgaattcatatgtatactttaaaaaggtctgcattttaatttgtaatttgataaatatcaatatatgtaattcaaatcaacaaaagctctttggatccttctgagaccaaaaagtttaaagtctaccagtccaggtaatgtgagcaatttgtcaagttcgtgcactaaagccagattaatggaatatttatccatatgccataatgagagtactgagtttggcttctggaatggctttaagtgtcaatcgtgattttattgctttttctctaatttttagcataacgtatctgtttcacaacattgtttgaatacaattggaatcaccacaggaaaagtgcttttaggttttagtttaaaaatatgtcacgtaaatatcgcccatgtgaaattagagaatgacagaaccattagtttcatttttaggatacatgttataatttgttcactgttaataggttaactacctggcaataaatgtttttgaaatatttggaaactttcatttcc

SEQ ID NO: 65605 - DNA, 902 bp, Homo sapiens
ttaccatatatgtctaatgattcaatatctgaagtgtttgaatgtacccttctttaagtgatgtaaattcagtctgcacattggctcaaggaccaccttttagttacaacttctcagggacattcctccttaatctgctcagcaatagacaaatttccttaagtcccctggtgttgggaatggaatggagtaggacttctaatttgccctttccctgagggtgtaaccctttggggaaacagtttaatatagagaagcacttcaatttgtctcctcacctgcatgaactgagctttgatgttggtttcttctcagcctgagaggtctacaattgacagatgtcttgagccaaaataatctccagagctcggttcacctccctgagctcctgcttcacttagattttagcctggttaaaatactttcttgtcagctttttattattttaagaagatgcttttgtaccttatccaatattgttgttttcagtgggaagtctgatctgaataacctaggctaccatgttttgtcacagtataatctctgcattcagggttcttctgtacccctcacacactcctcagctttcaaatctcaagtgtcacctcatccataaaggcttctctgaacaaatcctttccccaaagtaccatagattattcctactccagttggtcccagcatatacatatatactgtatttcacttcattgtatggtttgtttgttttgttttcctgtcagtcttttccaaatagaccataagttccttaagagcaggtaatgtgtcttatttacttttgtatcctgggggtttggtagagtagctggcatatattaggcccttaacagatgtgtgtcaaaggaagggatgaaarcagatctgccttcccaatgttctat

SEQ ID NO: 65606 - DNA, 850 bp, Homo sapiens
tatctgctaacaacagggttgtctgacagtggcacccacccctcaccktaccatccttgttccttacttgatagctgcttagcaactgttctctgctcctaagatggtgtcagatgcaattgtttggggtattggaagtaactaaaactttggatactgtgattatgcatgacattctagaaggagcaaagagggggctggggaagggcatccctttgtctatgtggcctgtatggtgtcggggatgatggaggtggatgaatgacagtgaggctagaagacccaggctaggagaccctggtcggctggggccacaggacgtcaggcttcagcaaatcttaggcacaagaatcttggtatcaaggaaaatgggaaggaagatactcgctagtcccttactaagaaaagcacccctaacaactaaagcagatttagtctatattctgcaaaattggaattaaatgcagcataattttagggccaaggaaaagactatccccctctctttacctcccaacaatgttcttctgacttcctgaatttgtgtcaaattcctctatcaggagatagaaacttttatttcataataggaaactcctattccttaaataggaatttaagagttaaaacagaaaactcttaaaagactgaatgtattcatgaaaattaattttcaagtagaaataatatgtcacattttgctgtttttatttggaggagttagaaattaagaaggcaaataataacctgagtttgggaaaggggagaggactttcagaaatgctgaaggagaggctagaggcagaaagacaaatttttcaaaagttataattttgccaaccctattatt

SEQ ID NO: 65607 - DNA, 858 bp, Homo sapiens
tccatgttgttgtcatccctttgtatggctggagaggaacaagatgctcagggattttgggtgccattcttgagttatattctagggagctttcagaggtggctgcctgggcataatagaggaaagctgtatccttgccaaatgtctcggggaagcattttcttcaaactttgtactctttaaatcaatgatgatacttaatcttgtttttaaaaagaagaaaataagatcacctttaattctaaccttcacattaccaaaatggttttagtcttttttctatgtagtccttttttcctatggctacatatgtgtatatttacacacatatatatgtaaatatacctatgtgtatatttacacacatatatatgtgtaaatatacctatgtgtatatttacacacatatatgtaaatatacctatgtgtatatttacacatatatatgtaaatatacctatgtgtatrtttacacatatatatgtgtaaatatacctatgtgtatgtttacacatatatatgtgtaaatatacctatgtgtatgtttacacatatatatgtgtaaatatacctatgtgtatgtttacacatatatgtgtaaatatacctatgtgtatgtttacacatatatgtgtaaatatacctgtgtgtatgtttacacatatatatgtgtaaatatacctatgtgtatgtttacacatatatatgtgtaaatatacctatgtgtgtatttacacatatatatgtaaatatacctatgtgtgtatttacgaaatgggatcacaacatactgatttataacctaagttttttattcctaatattgtgaatattggtatgtttttgcataccttgaaa

SEQ ID NO: 65608 - DNA, 845 bp, Homo sapiens
ttggactacagctgaaagaggttaaatagggattttcttttaaatgaatgtttatatgaggagaggaatgatctagcagagagagagagacggaagatgcaagaagaaatagatttaatttttgttgttgctgttattattttagtgctttatttttgttatattttaacttttattttgatcaaagtaatacatgaacatagttttaaaaaatcatatagtatgactaggcttattgaagcagttcctcgtcaaacctttttacacctctcatttgtactccctaaagacaacaacttcccagccttttagttacttcatcttataaatgcctttatattctaaatcatatcttaatgttactagtttctgacttccccgcctccattaagagaagatttgttgattcctattatggaatataatgatttattgctttgactagcacccacccctacccatggcacatgcactttcctagcttcccaacatagctaattataatttttgatgtctgcaatattatatttaggtagatgccacaggtaacatttcctttgtcaagtagctgctttttcctatacagttcatgattgcaaggtttrtttttttcacgaaataacttaatttttctatgtgtacatcactaagttatccctaaactctttatacacatttaaatgtcttcttaaaatattcagacacatcaggtaatctctcctattcttttttttgagacattcctcttggagccctttgatctggtataatcaggattaatggccctctgggcttgctacttagcagtggctccggcctttgccttcatctgttgattggatccc

SEQ ID NO: 65609 - DNA, 1094 bp, Homo sapiens
ctactttacacatgaatacctaggtccatcaaaagacatgtacaggaatatccatagcaacaactgtggacagttaaataagttacggcatatgtatataacagaatattttatagcaataaaaagcaatgaattatatgcaacagcaaggtgaacttcacttaccaattgttgaggaaaataagccagacaaaaagtttaaaaataggcaatttacattttgataaaggttggattagtacttaccttttggggaggggaaaaaatgggagggaacactggggggtcttctagatttctgcatttgttctgtattttgttcttcacattttttcaagctgaatactttgtatatatgcactttgtgtaatttaaaacgtaattaacaattaaaatataactaatgttttaaatataaagaacataaacaagtaccttttttaaggtttagcttttagtttgtttcttcttttctttctttctttcttgcatctttcatggagataaagagggtgagctgaagaaaattggaacttggaacagacaagaatgcagaaagtgagaggacacaraaaaaatagtaaaatgggcaagagacagcctttaagcatatgggttggtagaaaaatctgagaagaaatgaagtagggatagttagattaataacaatgtgcaaaccatgaaaaaaggtattttttgcactctacaaatgtggcactacacactattctaattttctgtgtagtaaccagttgaccagcgcttagtaacagtccgtattcttaggggtttgaatcctgaagtggtttcatttggtatgctgactgtccttgtttcatatccatcctagttctatgggacgccttctccaaaataagcatactgtaaaggcttatagataacttaaactaaaagaggaaatttataattactttgaacagttttaaagaaagtatcaggctagatattaggacaatgccaaagttcactaactagctttttgcaggtttaataatgatattgctttccttcccattatcaatctatattatatagttaagttgttttacttcaaatgtctccaatcgacattt

SEQ ID NO: 65610 - DNA, 1094 bp, Homo sapiens
ctactttacacatgaatacctaggtccatcaaaagacatgtacaggaatatccatagcaacaactgtggacagttaaataagttacggcatatgtatataacagaatattttatagcaataaaaagcaatgaattatatgcaacagcaaggtgaacttcacttaccaattgttgaggaaaataagccagacaaaaagtttaaaaataggcaatttacattttgataaaggttggattagtacttaccttttggggaggggaaaaaatgggagggaacactggggggtcttctagatttctgcatttgttctgtattttgttcttcacattttttcaagctgaatactttgtatatatgcactttgtgtaatttaaaacgtaattaacaattaaaatataactaatgttttaaatataaagaacataaacaagtaccttttttaaggtttagcttttagtttgtttcttcttttctttctttctttcttgcatctttcatggagataaagagggtgagctgaagaaaattggaacttggaacagacaagaatgcagaaagtgagaggacacagwaaaaatagtaaaatgggcaagagacagcctttaagcatatgggttggtagaaaaatctgagaagaaatgaagtagggatagttagattaataacaatgtgcaaaccatgaaaaaaggtattttttgcactctacaaatgtggcactacacactattctaattttctgtgtagtaaccagttgaccagcgcttagtaacagtccgtattcttaggggtttgaatcctgaagtggtttcatttggtatgctgactgtccttgtttcatatccatcctagttctatgggacgccttctccaaaataagcatactgtaaaggcttatagataacttaaactaaaagaggaaatttataattactttgaacagttttaaagaaagtatcaggctagatattaggacaatgccaaagttcactaactagctttttgcaggtttaataatgatattgctttccttcccattatcaatctatattatatagttaagttgttttacttcaaatgtctccaatcgacattt

SEQ ID NO: 65611 - DNA, 1251 bp, Homo sapiens
agaccccaagagagggttcttggatctcctgcaagaaagaattcagggtgagtctgtaaagtgaaagcaagtttcttaggaaagtaaaggaatcaagaatggctactccatagtcagagtagccctgagggctgctggttgcccacttttttggttatctcttgatgatacgctaaacaaggggtggattattcatgcctcccctttttagaccatctagggtaacttcctgatgttgctatggcatttgtaaactgtcctggcgctggtggagagtgaggacgtccagaggtcactctcgtgaccatcctggttttggtgggtttttgtcggcttctttgccacgacctgttttatcagcaaggtctttgtgacctgtattttgtgctgacctcctgtctcatcctgcracttaaaatgccttcaccgtctgggaatgcagcccggtgggtctcagcctcattttaccattttacccagctcccgttcaacacggagctgctctggttcacatgcctctgacggtttcaccttctgctcagagcatttggacctccacaggctctgactcagccctcttatcccaggctgatcccatccccgtctaaaaatcccactaacttccttctgagaaagttgagagtcttgtttatactaaagtgttaatgactcacaaagcattcccagaggaaaagttaacaggaggagactgtgaggctctggcggtgaaaggtcaggcatgagccctgggggagatgttttcttctctggaggcccctcctgagaccccccatctctgcacaggaagacgaaccctgtgcccagcgggtccacctatctgcccacgtggccccaaccccaggcttcatggagtagagcagggctcattcgtgtggcacccacacgcagtttcagggcgtggactttcccggatggctgggtggctttgggggaggtgtgagctgttggtggagaatgctgagcccggccctgacgacggtcctcttttcctgccttaataggctagtccccatcactgtggggggcaatttggggatattctcctccaactcctgctggttctgaatcttgcagggagctgcaaatcccagtcactgtggggtcttggggcttctaggagtccctgctgggcccagggcttttttctcactgacctggaggcctctccccacggctccccatctgacatcttctcagctgggagacttaattgtaaagactcacagggat

SEQ ID NO: 65612 - DNA, 826 bp, Homo sapiens
tgggacgccaaggcgggcagatcacctgaggtcagtggttcaagaccagcctggccaacatggtgaaacccagtttctaccaaaaatacaaaaattagccgggtgtggtggtgggcacctgtaatcccagctactcgggagacaggcaggagaattgcctgaacccgggcggcggcggttgtagtgagctgagattgaaccactgtgctctagcctgggtgacagagtgagactctatctcaaaagaaaaaaaataaaaaaggtgggcgcggtggctcacacctgtaatgccagcactttgggaggccgagatgggcggatcatgaggtcaggagattgagaccatcctggccaacgtggtgaaaccctgtctctactaaaaatacaaaaattagcgggcgtggtggtgcacacttgtagtcccagttactcaggaggctgaggcaggagaatcgcttgaatccaggaggtggaggttgcagtgagccaagatcacgccactgcactccagcctggggacagaaygagactgtctcaaaaaaaacaaaggttaaagcagaggggacttccttatcatgttggcttcttgctggcttctggtggcctgtttggggattcggctgctatctctccctgatttctgggaagggtgggggcggtcagatacagatcttaggaaccacagcatgggtgactccattttggttttgtctgttgggcctcctgcaggagctccgtccaaaccaatgacctctgcattcagttttctttgacaagagcaggcatcggcccctgcccagcactggtgggtctcgcctgttctggg

SEQ ID NO: 65613 - DNA, 817 bp, Homo sapiens
ctgcatcaccctttacctggccttgtcaggaggaggcgggggtttcagagggccgctgtttcaggccccagctgggtcccatctgggtctgctccagactgggcagcctcctggagggcagagtcctgtctgtgcgaggccctggcgaggagttctgcccagctgggtagtgaccgccgctgctgccctgactgaagcccgtccccttctgtgggggtctcactggccgaggccccccagcttcccgtgtccggcagagcgaggaaggggaggagaagcctcagagggatggggaggctggagcagcgggaaggagctgcgtggccaggccctcctcctgacctcattcagttttcctttctccttaccttaaaaaaacacacacacacagagggttatttatctgacagccccaaacacggtggtattattggcctctggttgaggaagggatctgggggcgtccgcagcttcagataaaggggagccctcgcccgggaggggtttatcccatctggcggcttcgctcgtagagcgagcgactcccaggcccttgcgccacctgctggtggacctgcrtagccgcgcccatttcggagcaggtgcggaggccggccctggggggcagggtctgggtgtggggtcccgacggagggggccggcgtcccaggaccccgacggagagcaagggggtgctggagcccatctcccgcctctcgcggccactctgctgtaacaagcagctcgcaccaccagggactcctgggtcccgggtcccgccctcagccgtgaccctcacccgctccagatggggaag

SEQ ID NO: 65614 - DNA, 1466 bp, Homo sapiens
gcccgcctcggcctcccaggtgctgggatgacaggcgtgggcccccgcgcccggccgggttggtgaataatttaaaacagagtccgccaagacgccctgttggcggcttyggtctgcactttgcacgtcaccgaaaaattcctgaggcctcgagaggctgtggggccctgctgagtggccgaatgccatctgtcccttgcccttgtctctcccgggctcccggtgccctcctgtaacccaggcgggaaggaccttcccaccccgtgcaggttcccagcgtggctggaagggcctgggtgcccctggcagtcctgggtttgagcagcggcttctgggctccctgccaaggggctgggctttgcggcagccggtcaggcctccacaatgggaccccggggatttcccatgtgctgtgactgtgggaatgactgtccttgtgggtgacttagtgtgtcccggagtggggctgcaggcacagggttacatccataccctggtgcgtgtgtgtgacctgggtgagctgtgcatacctgtgggtggctgtgtggggtgcaggggagaacttggcggggtgtcctggagcccctggaaacggtcaggatgtatgtgctcgtgcgtctgttcatttgtgcctgcatgtctgtgtgtcgggcatccggctgtacctgtgctgccggctggccgcctggagtcagggctgagtctctgggggtgcccaccaggtggctggactcaggaagcactgggcaacggtccctatccagaagccagggagggagaaggcagcccgggggacaggctggactggcaggtgcatgggccttgaggcagctcctggctctgctgaggggagagaagccccgtccccatgagagggtcaaccaggagcgtcaggggtctttggaggagctgtggggtctggcttatttcctggcttcatgccgctctggcatcttactttgggggtcggctgggggaggtggggaagaccctgaggaggatgtgtgaggctgagaacagctccaggatggagagcagatgcaggtggggtcagcggccccaaatcagggccctggcttggtctgtgggggctccgaggcaggggcaggaggcaccaacacccagaggaggggagagagggtctgggccctggatggtgtggggtgggagcaggaaggaagccgttgcccctggaccccctgcccagacgtggggcctggttgcaggcctcctgctgcaggacagcagttcctaagagcctgcgggcctcctgcagggacaggactggagccgtgggtgtggcaggaggcagagctcccaggcaggaccagcctggaggggttggaggggcagaaacccacgccccctgccctgcccactccctgaacatctagggggaaggagccccaggctctgccacacagcctgtcatgggctggcagttctgccccaggctctggctatga

SEQ ID NO: 65615 - DNA, 932 bp, Homo sapiens
tgcaaatactgtatactgccaagctacattaaaatatgcctgcttataatcaaattctgcctggaggtttcctgatcaactgtgccatgtcctttgtgtatatgctgcaggagcacttgctcctatcaaaatggcccactccatttaaggacagtcagtctacagacatgttctcactgggccccttcacagcctccacacatcatgacaagtgcctctgagttcatctaagagggagaaataatctagaataagggctagagaggaatgatagaaactcttgcattttcctggtaaccttgacagacacagggcaagggcaagaagaggtataaggcctcttcagaacaaaggatagtctagttttccatatttcaagctcacacagtcttcctgctgattcctcttttggagtcactgagtcaggaatgaggtatggtaatttctcaaattcactatttctcttccttaaataataaattgcatagaatgagtcagttaatgagcagatgagaggactagtgtgggttgccaatcaccaggartaattgatatctgcatatcccctttctcttccctactatcatcaaatacatgtttggtaagaattcagtgttctgacaagtaacattcattcctatatagattggcatttaccaaactgagaaagaactctaagagagttttaaattcatattaatgataagaaaacattaggacaattcaattttcttctctaatagctaacttgagacaacacatagagttggtggaacatccattctaatttctcctgtctgaatcatgattgctcaaaattaaagctcatagccacatgatttgagataaataggatgtaaccacaatggctatttaagacactgtatttcatatacttagaaatttatagcacacggagggggtattatttt

SEQ ID NO: 65616 - DNA, 703 bp, Homo sapiens
acttaatcaaaatcaatgtaaacaagggcaaattgtagtgggattacttacattaattctcagtgattatagttgaaaagtactttcacaagatattttatcctatgacgatttgtttaaatattatgaattttttgcaaaatgattaaatacaatgatgaaattgaaaataaaaattatagtatttaaaaaagctaaggtctgacaagatggctgaataggaacagctccagtctgcagctcccagtgaaatcaatgcagaaggcaggtgatttctgcatttgcaactgaagtacccagctcatctcattgggactggttagacagtgggtgcagcccacggagggcgagccatagcacagtgggatgtcacctcatctgggaagcacaaggggatgggaactccctcctctagccgagggaagccaagagggactgtgcagtgaggaatggtacattccggcccagatactatgcttttccccttgtctttgcaacctgcagaccaggagattccctcaggtgcctacaccaccagggccctgggtttccagcacaaaactgggcagctgtttgggcagacactgagctagctrcaggagttttttcataccccagtggcacctggaatgccagtgagacagaactgttcacttccctggaaagggggctgaagccagggagccaagcggtctagctcatt

SEQ ID NO: 65617 - DNA, 741 bp, Homo sapiens
cttgaacccaggagtttgaggctgcagtgatttatggtcatgccacagcactctaccctaggcaacagaacaagaccctatctcaagcccctccaatgcccccgaaaaagaatatccaactgtatacatggaaaaactgaataaaatagtccttctaaaatgactgggctttataaataaagaaaaagtaaacatgcaagaacacttggaaagtattgaaagaaaaaagctataagagggtacgagccctactagaygttataatgtactatggaacagtgtagtactggtgactgaatagacaggcagaccaacggactagaataaaaagtcaaggaacaaactcaattatatatgaacattttttttaaagaaatgtgataaagtatttgataaaatattttataatggtggtttctcaaattactggggtaaagataaattgaatgttttaataaattgctttggaacaattaatagccattgataaaagataaaatttaattcactcttgacacatacaacaaaacaaaatgaaacaacataaatactagaagaaaacacattaacttctataacctggctgtagggaaagacttaataaccatgactcaaaatctggacacaattcaaaaaaattgatatatttaactacataaaaataaagatattttcttgacataaaacaccacaagcaaaatcaaaagacaaatgccaaattgggagaaaaatctgtgagat

SEQ ID NO: 65618 - DNA, 1561 bp, Homo sapiens
tcctctcagtcttcactcagttaggtcctcctgcagtttgtttcacatgtttatttgtatatctaggttttctttctttttttttttttttgacggagtcttgcactgtcacctgggctggaatgcagtggtaccatctcagctcactgcaacctccgtctctcgggttcaagcaattctcctgccttagccttccaagtagctgggattacaggcatgcgtcaccacgcccggctaatttttgtattttttttttttaagtagagacggggtttcactatgttggccaggctggtctcaaactcctaacctcatgatctgcccgcctcggcttcccaaagtgctgggattacaggcgtgagccacygtaccggcctgttctctaggttttgaacgcacacatgggagcatttaaaactaccgtcagaaaggactcctttaacttgatttcctcaagggattgtgtgcagctaggaaagcacgtagggccaagctgcttgtgtttcttgaaaacaatagaagagatttttctggaaagaacatccccagccctgagtccagcttttaggattagggctcatggctccatcaccgtggatttgaaacatcgattagcagagccattagagttcagctgctgggggaggccaaggaaggggcttctgggccagaccagagctttcgattcatctgcaagactgtggggaaaaggctaattgcaaacctgtgctaagagcgggccacacgttttcacatttaatgctcaccacagcctcataaagttggtatttttaaacccacaaaatggagcacttacctccttgcaattatcatacctctctctgggtaattacttgaatggagtgttgtcgagcatgatgcagtccatttcccagcatcgcagggaaattttgaaacacaggtcaagtgccctcaccttcgagttatatcaagaagcttgcttaatagaaaagccagcgtaatgagaatactgctcgttaaatgtgcagacgatgcctctgagacagtctgcaagatcccctcagctggtccctttgcaacttggaggatggagctactccagggttccccgatccacttactgatctcagtcctgggtttacaggggatactctgcagcctggggcaggccgaagaccctccaggcctcctggtgccactttggatatctgacaaccaagcagggctctccacttctcagctgcctttggcccacagctgacttgagggtccatgccaagaagcttcggtgactgaggaagggttgtggtgggggtgagcagggctgacgggggaagcgctgatctctccctgatcttctccattgtcttctctgacccattcccttcacaccactgggaaggggctccctgccgctcagccctttgccctctgccccctctcctctccattccacattctccttctcctactgcagcagggtgacacttctcctactgagggaacggaggccccagtcacctctcaaggccacgaaggactttgtggctgagctgaatttgagctcagagctccagga

SEQ ID NO: 65619 - DNA, 1561 bp, Homo sapiens
tcctctcagtcttcactcagttaggtcctcctgcagtttgtttcacatgtttatttgtatatctaggttttctttctttttttttttttttgacggagtcttgcactgtcacctgggctggaatgcagtggtaccatctcagctcactgcaacctccgtctctcgggttcaagcaattctcctgccttagccttccaagtagctgggattacaggcatgcgtcaccacgcccggctaatttttgtattttttttttttaagtagagacggggtttcactatgttggccaggctggtctcaaactcctaacctcatgatctgcccgcctcggcttcccaaagtgctgggattacaggcgtgagccactgtaccggcctgttctctaggttttgaacgcacacatgggagcatttaaaactaccgtcagaaaggactcctttaacttgatttcctcaagggattgtgtgcagctaggaaagcacgtagggccaagctgcttgtgtttcttgaaaacaatagaagagatttttctggaaagaacatccccagccctgagtccagcttttaggattagggctcatggctccatcaccgtggatttgaaacatcgattagcagagccattagagttcagctgctgggggaggccaaggaaggggcttctgggccagaccagagctttcgattcatctgcaagactgtggggaaaaggctaattgcaaacctgtgctaagagcgggccacacgttttcacatttaatgctcaccacagcctcataaagttggtatttttaaacccacaaaatggagcacttacctccttgcaattatcatacctctctctgggtaattacttgaatggagtgttgtcgagcatgatgcagtccatttcccagcatcgcagggaaattttgaaacacaggtcaagtgccctcaccttcgagttatatcaagaagcttgcttaatagaaaagccagcgtaatgagaatactgctcgttaaatgtgcagacgatgcctctgagacagtctgcaagatcccctcagctggtccctttgcaacttggaggatggagctactccagggttccccgatccacttactgatctcagtcctgggtttacaggggatactctgcagcctggggcaggccgaagaccctccaggcctcctggtgccactttggatatctgacaaccaagcagggctctccacttctcagctgcctttggcccacagctgacttgagggtccatgccaagaagcttcggtgactgaggaagggttgtggtgggggtgagcagggctgacrggggaagcgctgatctctccctgatcttctccattgtcttctctgacccattcccttcacaccactgggaaggggctccctgccgctcagccctttgccctctgccccctctcctctccattccacattctccttctcctactgcagcagggtgacacttctcctactgagggaacggaggccccagtcacctctcaaggccacgaaggactttgtggctgagctgaatttgagctcagagctccagga

SEQ ID NO: 65620 - DNA, 1860 bp, Homo sapiens
tgcatgacatcagaggtaacacattcaatgggatatagacttcgccaaatattctagccaagtaacaaaacaagcaaataaacaacaacaaaatcaagtcccagagagggtagtggtatcagtattcacaattgatgcaatatataatctaaaatgtctagtttttgataaaattatgaggtattctgtgacaaaattatgagttacactgtgagctctacatgaaaaaagcaagcaacaaaaactaactgtgagagggctctgttgtcagatttaacagataataactacaaagaagccattataatcatattcaaagatttaaaagaaactctgcttaaataagtaaaggaaggtaaaatgccaatattttatcaaatacagagtatcaataatgaaataaaaagcacaaaaataccaaatggaaactctggagttgaaaagtacagttatcaatatgtaaaattgactagagtgattcaacagtgcatttgaaccaatagaagaatgaatcagaacactcgaatttaggttgatagatattatgcaatctaaagaaaaagagagaaaaaagaacaaagaaaaaggcatatattcagatcttattttttattctatctgacaatgtttgccttgttttttgttgtttaatctatttacttcattgaagtaaaaaagaaataaagaacaattatgaggaaagtgggtatcagaaagaaagaagaaaaaggagtggaaataatactagaagaaataatgttattaaatttctcaatttgataaaagtcatatatacacaataaatttmatgaagtctgataaacacagagatccacacggacacatttcagtaaaaatactgaaagataaagaaaataagaaaattttggagggaaaaaaaaagactttcagtggataccagaaggcaagaaggcagtgaaataacaaagagtcgtaagaaaaaaaaaaggtaagaaataattttttatccagcaaaatattggtcagaaatgaaagtgaaatacaaaccttcctagataaacaaatattgagacaatttattgctagcatatccatgttacataaaatactaaaggaaattcttccgactgaaagtcagagagtcaagatagtaatttgaaaccacattaaaaaacacaatattggcagtaaaagcaattatgtaggtaaatgtaaaagacagtataattttgttttttcttttttctcctcttaatgaatttgaaaaacccttgtataagacaagacaagacatatgcatctatatataaacaattgtataagatatatacatatataattatatatacacaattatatataattttgttcagtctataacatatagaaattcatatacaataataatacataattacaacattagcacaaagataggtagaagcaaagtattggagtaaggaaatgataccagattataactagaattcacaggaaaagaaataaaagaacaaaattgtaaaataggaaggttaataaaatataatttataattatgtactactccccttttatcagcttcattaaaaatacataaattaataattatggcaatgtagttattgaattttttacatatatatgttacagaaaagtaaatagtaaatataggtatataggagtaatatctctatgtcccatggaattaacttacattaagtcaaaaacaactatgataaattaagattcaagcactagacactaagagaataacactcatacacacatacacacacatatacatacccgcacatgtatagtgaaaaatatcataaaaagcattaaaatattacactagaatgtattcacctaatgcaa

SEQ ID NO: 65621 - DNA, 1860 bp, Homo sapiens
tgcatgacatcagaggtaacacattcaatgggatatagacttcgccaaatattctagccaagtaacaaaacaagcaaataaacaacaacaaaatcaagtcccagagagggtagtggtatcagtattcacaattgatgcaatatataatctaaaatgtctagtttttgataaaattatgaggtattctgtgacaaaattatgagttacactgtgagctctacatgaaaaaagcaagcaacaaaaactaactgtgagagggctctgttgtcagatttaacagataataactacaaagaagccattataatcatattcaaagatttaaaagaaactctgcttaaataagtaaaggaaggtaaaatgccaatattttatcaaatacagagtatcaataatgaaataaaaagcacaaaaataccaaatggaaactctggagttgaaaagtacagttatcaatatgtaaaattgactagagtgattcaacagtgcatttgaaccaatagaagaatgaatcagaacactcgaatttaggttgatagatattatgcaatctaaagaaaaagagagaaaaaagaacaaagaaaaaggcatatattcagatcttattttttattctatctgacaatgtttgccttgttttttgttgtttaatctatttacttcattgaagtaaaaaagaaataaagaacaattatgaggaaagtgggtatcagaaagaaagaagaaaaaggagtggaaataatactagaagaaataatgttattaaatttctcaatttgataaaagtcatatatacacaataaatttaatgaagtctgataaacacagagatccacacggacacatttcagtaaaaatactgaaagataaagaaaataagaaaattttggagggaaaaaaaaagactttcagtggataccagaaggcaagaaggcagtgaaataacaaagagtcgtaagaaaaaaaaaaggtaagaaataattttttatccagcaaaatattggtcagaaatgaaagtgaaatacaaaccttcctagataaacaaatattgagacaatttattgctagcatatccatgttacataaaatactaaaggaaattcttcmgactgaaagtcagagagtcaagatagtaatttgaaaccacattaaaaaacacaatattggcagtaaaagcaattatgtaggtaaatgtaaaagacagtataattttgttttttcttttttctcctcttaatgaatttgaaaaacccttgtataagacaagacaagacatatgcatctatatataaacaattgtataagatatatacatatataattatatatacacaattatatataattttgttcagtctataacatatagaaattcatatacaataataatacataattacaacattagcacaaagataggtagaagcaaagtattggagtaaggaaatgataccagattataactagaattcacaggaaaagaaataaaagaacaaaattgtaaaataggaaggttaataaaatataatttataattatgtactactccccttttatcagcttcattaaaaatacataaattaataattatggcaatgtagttattgaattttttacatatatatgttacagaaaagtaaatagtaaatataggtatataggagtaatatctctatgtcccatggaattaacttacattaagtcaaaaacaactatgataaattaagattcaagcactagacactaagagaataacactcatacacacatacacacacatatacatacccgcacatgtatagtgaaaaatatcataaaaagcattaaaatattacactagaatgtattcacctaatgcaa

SEQ ID NO: 65622 - DNA, 1860 bp, Homo sapiens
tgcatgacatcagaggtaacacattcaatgggatatagacttcgccaaatattctagccaagtaacaaaacaagcaaataaacaacaacaaaatcaagtcccagagagggtagtggtatcagtattcacaattgatgcaatatataatctaaaatgtctagtttttgataaaattatgaggtattctgtgacaaaattatgagttacactgtgagctctacatgaaaaaagcaagcaacaaaaactaactgtgagagggctctgttgtcagatttaacagataataactacaaagaagccattataatcatattcaaagatttaaaagaaactctgcttaaataagtaaaggaaggtaaaatgccaatattttatcaaatacagagtatcaataatgaaataaaaagcacaaaaataccaaatggaaactctggagttgaaaagtacagttatcaatatgtaaaattgactagagtgattcaacagtgcatttgaaccaatagaagaatgaatcagaacactcgaatttaggttgatagatattatgcaatctaaagaaaaagagagaaaaaagaacaaagaaaaaggcatatattcagatcttattttttattctatctgacaatgtttgccttgttttttgttgtttaatctatttacttcattgaagtaaaaaagaaataaagaacaattatgaggaaagtgggtatcagaaagaaagaagaaaaaggagtggaaataatactagaagaaataatgttattaaatttctcaatttgataaaagtcatatatacacaataaatttaatgaagtctgataaacacagagatccacacggacacatttcagtaaaaatactgaaagataaagaaaataagaaaattttggagggaaaaaaaaagactttcagtggataccagaaggcaagaaggcagtgaaataacaaagagtcgtaagaaaaaaaaaaggtaagaaataattttttatccagcaaaatattggtcagaaatgaaagtgaaatacaaaccttcctagataaacaaatattgagacaatttattgctagcatatccatgttacataaaatactaaaggaaattcttccgactgaaagtcagagastcaagatagtaatttgaaaccacattaaaaaacacaatattggcagtaaaagcaattatgtaggtaaatgtaaaagacagtataattttgttttttcttttttctcctcttaatgaatttgaaaaacccttgtataagacaagacaagacatatgcatctatatataaacaattgtataagatatatacatatataattatatatacacaattatatataattttgttcagtctataacatatagaaattcatatacaataataatacataattacaacattagcacaaagataggtagaagcaaagtattggagtaaggaaatgataccagattataactagaattcacaggaaaagaaataaaagaacaaaattgtaaaataggaaggttaataaaatataatttataattatgtactactccccttttatcagcttcattaaaaatacataaattaataattatggcaatgtagttattgaattttttacatatatatgttacagaaaagtaaatagtaaatataggtatataggagtaatatctctatgtcccatggaattaacttacattaagtcaaaaacaactatgataaattaagattcaagcactagacactaagagaataacactcatacacacatacacacacatatacatacccgcacatgtatagtgaaaaatatcataaaaagcattaaaatattacactagaatgtattcacctaatgcaa

SEQ ID NO: 65623 - DNA, 501 bp, Homo sapiens
agtgcctgttttcacctaggtctgtgggcacaggcccaggagtggagccctagctagggaccatgcccttctctaaccagcacttcccttcccccatgcagtatcatttaaagatatcacacccttcccttcccagcacttcccttacccacttccatgtcarttccccaaacctcagcatcatgcaatatacctctgtaacattcttgcacatgtactcccttattctaaagtaaaagtttaaaaaagaaatcaaagtactaaataattggagtgacataccatctccttggattggaacactcaacacagtaaaaatgttacttctcccaagtttgagctatatactggacatcattccaaagaaaatacctgcaaaaatttttacagatatagacaagctatttttaaatttatatggaaagaccccaacaattattatagcaaaaaataaaaaaagattaaatttgtaggaataacattactttgttttaagactta

SEQ ID NO: 65624 - DNA, 829 bp, Homo sapiens
ttcaacctctgcctgtttcccagttccgaagttgcttccacatttttggatatctttataggagcactccactcctggtaccaatttcctgtattagtccattctcatgctgctaacaaagacatatctgatagtgggtaatttataaagaaaagaggtttaactgactcaccattctgcattcggcctcaggaaacttacaattatggtggaaggggaagcaaacacatccttcttcacatggtggcagggagaagaagactgagtgcccagtgcagggggaagccccttataaaaccatcagatctcctgagagcaggatgggagaaaccgcctgcatgattcatttgtcttcacctggtcccacccatgatatatggggatttggggaactataattcaaaatgggatttggggaactataattcaaaatgagatttgggtgaggacacagacaaatcagcctctatctattgtttagacaaactcagactctgagttggattcaggtaatactaaccctaattttcaactctagcttcaaggagtttctttttccttactcccttaactttccttaaaaatcaatgaaatctacttttttcctggcttctttacttaattacagctgtaaactgcatcctggtcattactttcattgttctgcacttcaactgcctttttacatctgratgcaataatattctcctttctccttgaacttcactctttaagaataagcatgccaatgactcaaccaccataacatagtctggctactgtagctaacaattaaagctattactgagtcctctgaaatttctggtgg

SEQ ID NO: 65625 - DNA, 499 bp, Homo sapiens
tgacgagtgaatattgaaacaaaagaaaaattgaatataatagagaaatcatattcacatagcttttattacagtatattatataattgttcttttttattgttactgttaatcttctaagggctaaaaaaaaaacttsttctttgccctcttaagcttcactaaaaaattaactgacaaaagacagattaatagaagaaatagaatacaaatttattagcatgcaaggggaaaaatgacagagtaaattacccaatatcccaatgggatacagatgcttacatgccctgcctctttagagaaagggagatggggaagtgtggatacttctagatgggaggaaataatttttaagggaattctatgggcttgaagaacaaacaatggcccgggagaaagtctgctgagcccaaagaacagacaatggtttgtgatgtaaaccaaaaataaaatcctaaggcctgcaaccaactgaatggacacctcctcttgatcaaga

SEQ ID NO: 65626 - DNA, 539 bp, Homo sapiens
ggccaaygtgatgaaaccccgtctctactaaaaatacaaaaattgaccaggcgtagtggctcacgcctgtaatcccagcactttgggaggccaaggcgggtggatcacgaggtcaggagattgagaccatcctggccaacatggtgaaaccccctctctactaaaattacaaaaattagctgggcgtggtgtggtggcacgcgcctgtaatcccagctactcaggaagctgaggcacgagaatcgcttgaacccaggaggttgcagtgagccgagattgtgccactgcactccagcctggaggcagagtgagactccgtctcaaagaaaaaaaaaatattgaaaaattagccaggcacggtggcaggctttgcagcatttgcttttaacctggtacaaatcagagggttttttttaccaattttttaaaaatgtatgtaatgtgtgtatttatgtctcttgacatctctggcttagtataattcttttcctggggaagttataactatgcctgttccctgtatgtgatgtagctaaaaa

SEQ ID NO: 65627 - DNA, 539 bp, Homo sapiens
ggccaacgtgatgaaaccccgtctctactaaaaatacaaaaattkaccaggcgtagtggctcacgcctgtaatcccagcactttgggaggccaaggcgggtggatcacgaggtcaggagattgagaccatcctggccaacatggtgaaaccccctctctactaaaattacaaaaattagctgggcgtggtgtggtggcacgcgcctgtaatcccagctactcaggaagctgaggcacgagaatcgcttgaacccaggaggttgcagtgagccgagattgtgccactgcactccagcctggaggcagagtgagactccgtctcaaagaaaaaaaaaatattgaaaaattagccaggcacggtggcaggctttgcagcatttgcttttaacctggtacaaatcagagggttttttttaccaattttttaaaaatgtatgtaatgtgtgtatttatgtctcttgacatctctggcttagtataattcttttcctggggaagttataactatgcctgttccctgtatgtgatgtagctaaaaa

SEQ ID NO: 65628 - DNA, 539 bp, Homo sapiens
ggccaacgtgatgaaaccccgtctctactaaaaatacaaaaattgaccaggcgtagtggctcacgcctgtaatcccagcactttgggaggccaaggcgggtggatcacgaggtcaggagattgagaccatcctggccaacatggkgaaaccccctctctactaaaattacaaaaattagctgggcgtggtgtggtggcacgcgcctgtaatcccagctactcaggaagctgaggcacgagaatcgcttgaacccaggaggttgcagtgagccgagattgtgccactgcactccagcctggaggcagagtgagactccgtctcaaagaaaaaaaaaatattgaaaaattagccaggcacggtggcaggctttgcagcatttgcttttaacctggtacaaatcagagggttttttttaccaattttttaaaaatgtatgtaatgtgtgtatttatgtctcttgacatctctggcttagtataattcttttcctggggaagttataactatgcctgttccctgtatgtgatgtagctaaaaa

SEQ ID NO: 65629 - DNA, 563 bp, Homo sapiens
ctctaaccagggcgacggagcgagactctgtctcaaaaataaaaggtgcattagggtgaagaaaacctttgagttctcatatgattgcatcaagacaaggctggctacccttttctgaatcactggtttaatctttyttcctttatcattcttcttgatttaattctctagtcctgaccttcagctttttcaaataaccaactgtcctaattatatacttttttttttaatttaggatgttgttttccagtggctcacgacaggagacatccacctaaaccagattgatgctgaggacccagaggtagacaccgaattattagaaacttttaaatgaaaaatgagtccagcttctcagtaccacttctcacagctcaaaaggaatacatgactgtcttaactcatctgtaagacagatggaacgaaggaatgatttgggggagatgaaggccatattgtaaaaaataagtcaataaacaatatatgtaattaatcatagaattaattggagggggagcatacatacatacagtatgtatataaattagaatttaaattatggg

SEQ ID NO: 65630 - DNA, 998 bp, Homo sapiens
aggtgctccagggaaactttgctttaaacaaagacgcatcttacagtgaatgttctgtggaccgtatctacgtgtgtatcaaacacaccacatggcactttgtaggaagctactgcatctctgcggaacagtgtgggaaatcagctcacaagacctttggaacccaatgctgtcacccgtagaagaagagaaaggttcctagaattggccttgggcaggagcttttcccaactcagtgtcctgatgcctctyccaggaagcctgtgttggccctgagctgccagcccctgagccccagaatcctcacccgctccccgcgcacctaccctcagctccagcctctcggaggaacagacaaggaacagatgggccagcatgcagttagcagctgagaaaccagttcatgctggggaggtacaggctttgggatggtccctccctagtcttgtcttaagataaaatgtcaatactttgtttgtcctgaccttcctacctagtctcgcccccgtctggtttataacctccttcatacactcccctccttgcccacagtggattcttcagccccggtaccctacagaactgttcctgcattttgcagggccccagagacccactgagctctcggcactcacagctgccctcctgggagtcaccctgtatttcttgaccctactttattccttatttctttgtttttcacagcacctgtctgacaagacctcatttttggctaacatgtgaattgcccctccagtccactcagcaaccactaccatggtggtccacgcagggagtggccatgaccgccatgagagcccccaaccctccaccttgcacagtgctgaatgtgcagagaagctccccaaatctatgctgggtgaacaaatgaacgtcttgaccctgtggaaacccagagtgggagaaagaggtggtgcccttgggaagcgtccacgacttagaccttcttaggtacatggcagcaggcagaggccact

SEQ ID NO: 65631 - DNA, 789 bp, Homo sapiens
caaatgtcagggagcttgtgaatttctctaacaagagaaggataaaggtcacctacgtgttttaaagacaagtactcacctttcccccacccaccctcatcagcttgtaagtcgtgaaaggcttagcacatcatacgtagttggaaaaaaaaagaaaagagtacaaacagcacatttgcatgattggccactgtttctccagtattcaaaccatcaggcactcgtgggcccccagaagccagcaagtgtccttgtattttctgggtggctgcatagtgaactggcatcatgccctctgcctccacacatgttcgtggaaacctggccctgtgctgggcagcaggctacagattggggatatagcatcctacacagccaacaatgcccatctggggcctcatggagcttgccctgccagtgaggyttggagtgggaacttcaacagcatggtaaaggtccctggattaattccagctcccccagaagcagaattcaaggcttcaagttgttaatttgggagggaatcccaggaaactgcagcagtggagtgcaggggtgagatagggaaggaaagatagacaatggagcgtatgttattcagccagctacacctgtggggtactagagtgagcccctggggcaactcccggagccactgcagacatgcatgcagagctggtgtgcctgaggggagagagagctggggtatttaaacacccactcccaagagtgattgatggacagctgctcctggtcaccattaatcctctggtgtttctgaccctctgg

SEQ ID NO: 65632 - DNA, 737 bp, Homo sapiens
aggagaagacactcaaaggtacgagaggaggctgaggtccccccttccacccttccctgagcagagccatctgacactggagccgagctgctccccctcttcctgcacatcctcagctctcaggggcagctgccagcttggtctcagacacattcacttcccagaccccaatctcatttgtaaaatgacagctggagcgcatctggcctggcaacttcattcagaacatcatgtggcttcgtttctctgtaactccacccttcactgcagaagttcaaaccaccagtgggtcygtgaatcaagtcgaaccagaccttgctatgttccttcctttctgatgcatctaccagagaatgattccaacatgctcccttgaatggctgggccaggaattggcacttatttccacgtttcatagtgataccctgaactggtctgtaggagacaaaaggggccctttgcccatcagcaaccctgtgagatgccatcagcacatttatcccaaaagccacactgcgatgttcgttttttactgggagacatagtaaaaaggcggtgacgtggtgtagggccgccagagcgtatgggtctgtaatggccgtcttcactattgcctcctgctcctgatgatgctaatgtaatagtcacccacggctgtgaacaagccgagtgagcgccattagaatgtgcttagcatgagagcaagacctctgtgatgctggcccatgtggtggacg

SEQ ID NO: 65633 - DNA, 751 bp, Homo sapiens
cctttcctgatggtgggattcttgtgtccaatgacgtgatacagctccctgggaggagcttcaaatggtgcccaccacagagccagtgcccatcttcactgccccgtggacacctgtgaattcgaaccagacatttacctagactctctctcccagcaggagcatcgccagacctctgtggatttgtgctttatccttgtttctctgctccgggtgtctggggaggatttatggaggaaacaacataatgagacctgagtgacttagagcttggggaggtcgaccacagcatcttcagagggaaggaaattcagatggcaatcrtcccagtggatgacttcacgtggtttccctggggaagccccgcccccagctgctccttcccgaggccctacctgcccttccaggcccagcccagtcctgcctctcccaggagtctcctctgagctcctgggtcacagggaagggtctcctcacagctcctgaggcagctctgcccgcccacccactggggttcatttctggccagagctcctccctcctccccagggcctcctgtggggtcctcagagagctgcttgtcccccaaagctgtccttggtgtcttcttagctgaggacggagtgttaaacacatcacagacaggaccatagtatcccacactacgccataaaaggagagttacaactttcaacctctgtaaatatttaaaagtaatgaaattatactccaagtcttataagacattaat

SEQ ID NO: 65634 - DNA, 770 bp, Homo sapiens
tttcattaatgcttatctgctgggcctcagaatttagctctgtggatgtgttgctttctgctgcgtgatccggttccctgtagacacgtctgtggcacccccgccccactttgatctgtgtttcgaaatttataatttacctcccacctcctgatgtggcgctttccgtctgctcaggactccagtgaggtcatccattcagtacgtattcattgagctcccactctgtgccaagcaagattccaggcatcggggcgtgaaacgctagaaaaaagacacagatgaaatatagtctaatcaggtgagataaagacaggaggcaggaggaaacgatgggaggagggagtgagggaggaaggacaagcgaatgccagtgaattgccggtttgctcatgcactgtcattagacctcacagcaaccctaccgtcagtgcaagtgccgttatgtgcgctattttacagatatggagactgaggcccagagaggttaaagtaactgcccagagacacccaagtaggaagtggtgggggcatgaattgaacccaggtccacctgaattcaaagcctctcacgggtctggaatgaaggaaggamggaatgaatgagtgaacgaatgaatgaattctggagtgaacgcatgagcaaatacatatcactgtcaagtccctgcacatcaggattccatgataactcttcaaacccaaggaagggtccaagcctctctctacctctccctctcccctactttctcattcccaagaattattta

SEQ ID NO: 65635 - DNA, 901 bp, Homo sapiens
gcattgcccgacatgctgaagacaacctcttactttcaaggcttaagagaagcacagattagaatgatgaggaatgatgaagattgtccacataaatggacctcacatagactgaactcrtgttaggcatgtccttaggatttttttgctgtctaaaaattaattaaactgaattgctccttttccagacaatttttttttccgtgcaacataagtaaattgctaagtactgggctttatattcctcaataaaactgctttaaattgttttgtgttagtagagagatagctttgaagaaaaaaattaccagtcagttactactctgaataattatcttgaagagcagtaattatgtggcacctagtgttgaagaccagagtactttattcaatctgggttgatgtgtctgttaaaatcttgcagatttctgcagcctgttcacaagattgatatgaacctcactgatcttcttggggagctacagagggacccatggccagtaactcaggggaagagacctttgcgatccactggtgtggctttgtccattgctgttggcttgctggaggtaatttaaaatttaccaggacctctcaaatcatacaaatgtgctctcagaaaatatatttgttggctttgtttgaaaatcacttgtgatctaagtcaaccgtctgtgttaatgtatcagaaagcatttgaggcatcattatcattcacgttgagggagcccctcaacattttgaaaatgccaaaagttttcattgaaaaactaagaattagagcaatagggagcactcaaacagcgaattaataaaactgtgcaaacccataaggttggaagaagacaagtgctgcttttctgcattatcatctgtattattctgcattatcaccactttt

SEQ ID NO: 65636 - DNA, 901 bp, Homo sapiens
gcattgcccgacatgctgaagacaacctcttactttcaaggcttaagagaagcacagattagaatgatgaggaatgatgaagattgtccacataaatggacctcacatagactgaactcatgttaggcatgtccttaggatttttttgctgtctaaaaattaattaaactgaattgctccttttccagacaatttttttttccgtgcaacataagtaaattgctaagtactgggctttatattcctcaataaaactgctttaaattgttttgtgttagtagagagatagctttgaagaaaaaaattaccagtcagttactactctgaataattatcttgaagagcagtaattatgtggcacctagtgttgaagaccagagtactttattcaatctgggttgatgtgtctgttaaaatcttgcagatttctgcagcctgttcacaagattgatatgaacctcactgatcttcttggggagctacagagggacccatggccagtaactcaggggaagagacctttgcgatccactggtgtggctttgtccattgctgttggcttgctggaggtaatttaaaatttaccaggacctctcaaatcatacaaaygtgctctcagaaaatatatttgttggctttgtttgaaaatcacttgtgatctaagtcaaccgtctgtgttaatgtatcagaaagcatttgaggcatcattatcattcacgttgagggagcccctcaacattttgaaaatgccaaaagttttcattgaaaaactaagaattagagcaatagggagcactcaaacagcgaattaataaaactgtgcaaacccataaggttggaagaagacaagtgctgcttttctgcattatcatctgtattattctgcattatcaccactttt

SEQ ID NO: 65637 - DNA, 901 bp, Homo sapiens
gcattgcccgacatgctgaagacaacctcttactttcaaggcttaagagaagcacagattagaatgatgaggaatgatgaagattgtccacataaatggacctcacatagactgaactcatgttaggcatgtccttaggatttttttgctgtctaaaaattaattaaactgaattgctccttttccagacaatttttttttccgtgcaacataagtaaattgctaagtactgggctttatattcctcaataaaactgctttaaattgttttgtgttagtagagagatagctttgaagaaaaaaattaccagtcagttactactctgaataattatcttgaagagcagtaattatgtggcacctagtgttgaagaccagagtactttattcaatctgggttgatgtgtctgttaaaatcttgcagatttctgcagcctgttcacaagattgatatgaacctcactgatcttcttggggagctacagagggacccatggccagtaactcaggggaagagacctttgcgatccactggtgtggctttgtccattgctgttggcttgctggaggtaatttaaaatttaccaggacctctcaaatcatacaaatrtgctctcagaaaatatatttgttggctttgtttgaaaatcacttgtgatctaagtcaaccgtctgtgttaatgtatcagaaagcatttgaggcatcattatcattcacgttgagggagcccctcaacattttgaaaatgccaaaagttttcattgaaaaactaagaattagagcaatagggagcactcaaacagcgaattaataaaactgtgcaaacccataaggttggaagaagacaagtgctgcttttctgcattatcatctgtattattctgcattatcaccactttt

SEQ ID NO: 65638 - DNA, 901 bp, Homo sapiens
gcattgcccgacatgctgaagacaacctcttactttcaaggcttaagagaagcacagattagaatgatgaggaatgatgaagattgtccacataaatggacctcacatagactgaactcatgttaggcatgtccttaggatttttttgctgtctaaaaattaattaaactgaattgctccttttccagacaatttttttttccgtgcaacataagtaaattgctaagtactgggctttatattcctcaataaaactgctttaaattgttttgtgttagtagagagatagctttgaagaaaaaaattaccagtcagttactactctgaataattatcttgaagagcagtaattatgtggcacctagtgttgaagaccagagtactttattcaatctgggttgatgtgtctgttaaaatcttgcagatttctgcagcctgttcacaagattgatatgaacctcactgatcttcttggggagctacagagggacccatggccagtaactcaggggaagagacctttgcgatccactggtgtggctttgtccattgctgttggcttgctggaggtaatttaaaatttaccaggacctctcaaatcatacaaatgtgctctcagaaaatatatttgttggctttgtttgaaaatcacttgtgatctaagtcaaccgtctgtgttaatgtatcagaaagcatttgaggcatcattatcattcacgttgagggagcccctcaacattttgaaaatgccaaaagttttcattgaaaaactaagaattagagcaatagggagcactcaaacagcgaattaataaaastgtgcaaacccataaggttggaagaagacaagtgctgcttttctgcattatcatctgtattattctgcattatcaccactttt

SEQ ID NO: 65639 - DNA, 862 bp, Homo sapiens
gcgggggcattttcctcctgcttctcctcctgccggtagctctgctttgctctccctctgaagcttgtcatttttgatattagacttcttcactagaaacaagctctgggtggcgatggtagaatgtcagtgtcagtgaaggctgttattacagtttccacaatagttttggttggtttgtttctgtgtagaccatagcccagtggcgtaaagctggctaccaggacatgcccgagtatgaaaacttcaagcaccttctgcaggcaccactggatgatgctcaagaaattctgcaagcacgcttcccgatgccacgttacatcaacacggagcatggaggcagtcaggtgagtgagctgagttctaactccagtggtttgttcgttttatgatagattgttattgctatacatctaaacaggatggttaatattttatgtgatgacataaattgacacacaggtaatcttccaaatatgacttctttttaaatgagtggtcaggccaagcgcggtggctcacacctgtaatcccagcactttgggaggccgaggcgggcggatcatgaggtcaggagatcgagaccaycctggctaacatggtgaaaccccgtctctactaaaaatacaaaaaattagctgggcgtggtggcgggcacctgtagtcccagctattcgggaggctgaggcagaagaatggcgtgaacccgggaggcagagcttgcagtgagctgagatcgtgccactgcactccagctggggctacagagtgagactccgtctcaaaaaaaaaaaaaaaatgagtggtcaaaatgtgcttatgtaaagggattgccaagataaaatacatattttatgtttta

SEQ ID NO: 65640 - DNA, 862 bp, Homo sapiens
gcgggggcattttcctcctgcttctcctcctgccggtagctctgctttgctctccctctgaagcttgtcatttttgatattagacttcttcactagaaacaagctctgggtggcgatggtagaatgtcagtgtcagtgaaggctgttattacagtttccacaatagttttggttggtttgtttctgtgtagaccatagcccagtggcgtaaagctggctaccaggacatgcccgagtatgaaaacttcaagcaccttctgcaggcaccactggatgatgctcaagaaattctgcaagcacgcttcccgatgccacgttacatcaacacggagcatggaggcagtcaggtgagtgagctgagttctaactccagtggtttgttcgttttatgatagattgttattgctatacatctaaacaggatggttaatattttatgtgatgacataaattgacacacaggtaatcttccaaatatgacttctttttaaatgagtggtcaggccaagcgcggtggctcacacctgtaatcccagcactttgggaggccgaggcgggcggatcatgaggtcaggagatcgagaccatcctggctaacatggtgaaaccccgtctctactaaaaatacaaaaaattagctgggcgtggtggcgggcacctgtagtcccagctattcgggaggctgaggcagaagaatggcgtgaacccgggaggcagagcttgcagtgagctgagatcgtgccactgcactccagctggggctacagagtgagactccgtctcaaaaaaaaaaaaaaaatgagtggtcaaaatgygcttatgtaaagggattgccaagataaaatacatattttatgtttta

SEQ ID NO: 65641 - DNA, 606 bp, Homo sapiens
gcaagattgcttcagaaaaactgaattcacagcaatgcttactcaccctggtttgcatacacacacacacatgcacacacacacacacaccccaaaaaacaaaacataaacaacaaagactccttggaggaactttagagcactaaactcagccctgggtcaagtgggctctgccccagagccttttgtattttactttgtccttagaagggtatcagagtcctggaagtgyggctggcctccatgttggcttgggtcctggaagagacagacaaaggctatttggcaacagagagaccatagagccctagaggattcaagcttaaatcctccaactacagattataaattattaatacttccagtggacttgtttgtctttccttgccagaaccaacaattctcaaatctgactgcccatctaagccacttggggagcttaatctatagatgtttatatgaattctgaagccttacctcatggactcagtgtctgcagtgaggcctgggaaccggatctttaacagccatggcaccttctgcaggctggccttcggtaaccactgagtggttgatccaaaggtctttctgagctctcctggccca

SEQ ID NO: 65642 - DNA, 1560 bp, Homo sapiens
tctggaggagccaacttgatagtggaacccagatctactgtaaatggcaccctgagacccccaggggcttgcctggctgagatcagaaatcaggataccctttaccttgacaacggaaaaaccaaattctgccaaaatatttaaagaggtttattctgagccatatgagtgaccaagaaagggaaacacagtctcaagaggtcctgagaaagtgtggctgaggtggtccggttacaggttagtttgaagcatgtcatggagccaggagttgcaggtaaaattataaatcaatacatggaaggtatatattggtttggtcccaaaaggtgggacatctcaaggcattggcttacaagttttaggtgggtttagggattctttagtttgaaattggtagaaaaagttaagctttgtctaaaacatggagtcagtagaaaggaatgctaaggggctctactatctgtcaggtgatgccatgccagagtcaggttggaaaacaagtcacaatgtactgggtcagaaaggacctttttgatgaaattttatggtttgcaaggcatgattcctcaggtccttaaacaggaatttcagaaataaagaaaaaamggtaagaggtcagtcctcaacctgcactctctaacatctgccagcagttgagctcttgggtggcgggcaggtgaagtggcgttcttcatggccccgcacaaccctgggcccctttctttcccatgtgctggcagggttgtggggacactgtcagagcagttcttgttccattctctccctgcctcaggaatgggatccctatgctactagctgcagcacctgaggacacatctctctcatctaccctcgccttcatccccaagctccgtgggtatgcaacctgtccatctgggggacttggtctcccttgcttcttggcctgagctggccagccctatgtggtctcatgagcagcccatggaggaaggtgttctttgctgagccctgacagtgtgattgaacattggagggacctgggtcttcacatgtcccgggctgcttgtttccatcatactcataccccatgttgtcttagggcataccaaaccctactgcccacatctaaggtcagttttgttaatgtgatctgtgcatgggttcaggtttagctcttcaaaaccatctggcctctgttgacccactgagtcagagtcaggatgaagaattaagatcaagacagtttcactgactcatggaatttttgagtttattgactaacagcaatatttttatatgagcatgaaaggaaatggaatgtgtggacatagaggctcctgagacacctctaaattgtctccttctctaccaaggccgtgttagccttggccacaccaggaaggacacagacatatatcaaagaggcttcatgcagtgtagcttgcccttccaccttctaccacgtgaggacacagcagggaggccctcacaagatgctggcaccttggtcctgggcttcccaacctctagagctgtgaaaaataaatttctgtttcctgtaaattaaccagcctgtgt

SEQ ID NO: 65643 - DNA, 1560 bp, Homo sapiens
tctggaggagccaacttgatagtggaacccagatctactgtaaatggcaccctgagacccccaggggcttgcctggctgagatcagaaatcaggataccctttaccttgacaacggaaaaaccaaattctgccaaaatatttaaagaggtttattctgagccatatgagtgaccaagaaagggaaacacagtctcaagaggtcctgagaaagtgtggctgaggtggtccggttacaggttagtttgaagcatgtcatggagccaggagttgcaggtaaaattataaatcaatacatggaaggtatatattggtttggtcccaaaaggtgggacatctcaaggcattggcttacaagttttaggtgggtttagggattctttagtttgaaattggtagaaaaagttaagctttgtctaaaacatggagtcagtagaaaggaatgctaaggggctctactatctgtcaggtgatgccatgccagagtcaggttggaaaacaagtcacaatgtactgggtcagaaaggacctttttgatgaaattttatggtttgcaaggcatgattcctcaggtccttaaacaggaatttcagaaataaagaaaaaaaggtaagaggtcagtcctcaacctgcactctctaacatctgccagcagttgagctcttgggtggcgggcaggtgaagtggcgttcttcatggccccgcacaaccctgggcccctttctttcccatgtgctggcagggttgtggggacactgtcagagcagttcttgttccattctctccctgcctcaggaatgggatccctatgctactagctgcagcacctgaggacacatctctctcatctaccctcgccttcatccccaagctccgtgggtatgcaacctgtccatctgggggacttggtctcccttgcttcttggcctgagctggccagccctatgtggtctcatgagcagcccatggaggaaggtgttctttgctgagccctgacagtgtgattgaacattggagggacctgggtcttcmcatgtcccgggctgcttgtttccatcatactcataccccatgttgtcttagggcataccaaaccctactgcccacatctaaggtcagttttgttaatgtgatctgtgcatgggttcaggtttagctcttcaaaaccatctggcctctgttgacccactgagtcagagtcaggatgaagaattaagatcaagacagtttcactgactcatggaatttttgagtttattgactaacagcaatatttttatatgagcatgaaaggaaatggaatgtgtggacatagaggctcctgagacacctctaaattgtctccttctctaccaaggccgtgttagccttggccacaccaggaaggacacagacatatatcaaagaggcttcatgcagtgtagcttgcccttccaccttctaccacgtgaggacacagcagggaggccctcacaagatgctggcaccttggtcctgggcttcccaacctctagagctgtgaaaaataaatttctgtttcctgtaaattaaccagcctgtgt

SEQ ID NO: 65644 - DNA, 1560 bp, Homo sapiens
tctggaggagccaacttgatagtggaacccagatctactgtaaatggcaccctgagacccccaggggcttgcctggctgagatcagaaatcaggataccctttaccttgacaacggaaaaaccaaattctgccaaaatatttaaagaggtttattctgagccatatgagtgaccaagaaagggaaacacagtctcaagaggtcctgagaaagtgtggctgaggtggtccggttacaggttagtttgaagcatgtcatggagccaggagttgcaggtaaaattataaatcaatacatggaaggtatatattggtttggtcccaaaaggtgggacatctcaaggcattggcttacaagttttaggtgggtttagggattctttagtttgaaattggtagaaaaagttaagctttgtctaaaacatggagtcagtagaaaggaatgctaaggggctctactatctgtcaggtgatgccatgccagagtcaggttggaaaacaagtcacaatgtactgggtcagaaaggacctttttgatgaaattttatggtttgcaaggcatgattcctcaggtccttaaacaggaatttcagaaataaagaaaaaaaggtaagaggtcagtcctcaacctgcactctctaacatctgccagcagttgagctcttgggtggcgggcaggtgaagtggcgttcttcatggccccgcacaaccctgggcccctttctttcccatgtgctggcagggttgtggggacactgtcagagcagttcttgttccattctctccctgcctcaggaatgggatccctatgctactagctgcagcacctgaggacacatctctctcatctaccctcgccttcatccccaagctccgtgggtatgcaacctgtccatctgggggacttggtctcccttgcttcttggcctgagctggccagccctatgtggtctcatgagcagcccatggaggaaggtgttctttgctgagccctgacagtgtgattgaacattggagggacctgggtcttcacatgtcccgggctgcttgtttccatcatactcataccccatgttgtcttagggcataccaaaccctactgcccacatctaaggtcagttttgttaatgtgatctgtgcatgggttcaggtttagctcttcaaaaccatctggcctctgttgacccactgagtcagagtcaggatgaagaattaagatcaagacagtttcactgactcatggaatttttgagtttattgactaacagcaatatttttatatgagcatgaaaggaaayggaatgtgtggacatagaggctcctgagacacctctaaattgtctccttctctaccaaggccgtgttagccttggccacaccaggaaggacacagacatatatcaaagaggcttcatgcagtgtagcttgcccttccaccttctaccacgtgaggacacagcagggaggccctcacaagatgctggcaccttggtcctgggcttcccaacctctagagctgtgaaaaataaatttctgtttcctgtaaattaaccagcctgtgt

SEQ ID NO: 65645 - DNA, 1606 bp, Homo sapiens
acaatctgtgccccttttccttcctggggttggggtccagggatgctactgaccagatgttcccagcatgtctctggccttagcctctggcacaaaatttgctcaggggcccacctcatggctacactcaacatctatgaacccagtttcctgattcttcactgcacaaattcccgaaggaggagaagtatagctgtctccaggagcaagtgcagacaggcaaggcaagctaggagaggtctttccaaaggaacagggcctgcaatgcgactcctgtcctctaattaggcctgtgcacctgggtcatgtcatgcatcatgagtctggaaatacaatagaaatcaacacatgtcccagaaattgtggatgtccatttcttagggatgcagaaaactgttaaagacccatacatgtagtctgagtcaggcaggaattagtgcatcctcccaggagccagtgccttagagtgggctcctctccccttgctccatgaaggacggctgtgctccaaaagggtcctgagccaggacaccccatcacctcagtgagctcactccccatgagaccctgtcctgggagctgtctcagaaatggttctcwaatggaatgagtagggtggattctttggatccgcaggaggcactgtggataaagcgccttctctgagcttccttctgctgatggagtcagggtcaagagaaggaccaagggtgggagcagacaggggaggtggtgggagggtctcaaaggaaaatctgttcaagtctggaacaaggcagtgcagggctgtgtgggttccagagacccacgcaccagatgggacaaagtgcagcagctgtgtctacctcagtgctggcaggccgcagggaggtctccgggcctggctccccactctgccttgcctgaatgcccatgatctagggaccaccctcccagcacttctatggagggtacgtcccaagacgatggtccaaacgcaccacaggtctgtgttaggtccccccaggctgaccctgaaacgcagactggtgggtgcaggtagtttatttggagatgatcccaggaggcacatgtgagaaagggagacagagaaggggaaacacaatgtgtctgttatcgatgggttacactggggccgggggtgtttattctgctggggagctctgagaaccatgtgacacacactctgaatcgggtgccaggaggctgggagactgggacattcacctgcctcacttctgaagatggagcgtggctctcagacttgaccttaggagttggcaaccatggcccgaggaccaaatgcagcccagtctggttgtctccatgtgtaaacaaagtcttgttgggacaggactgctcttatttgtttatgcattgactatggctgctttcaacttacaaaggctgtgctgggtagctgagaaagtgactaaatggcctacaagatcaaaatagttactccttaaatctttacagaaaatacatgctgaagcctgatctgggagatgtggacagggtgtccatagctgctggctattctcagctaacacactaggtatacatgcaccctgagcattaatgccaatgtcacatttgttatgtg

SEQ ID NO: 65646 - DNA, 764 bp, Homo sapiens
ccaggtcaagacagctgcaggtgaagagagtcatgctgcctgacccaacactggggtggtcccgagtgtctcctcacaggagacttcacccatcacagacagaagaaagtagctagtgtgtggggagctgctgcccaggagccatgtgcatcttgatcttctgccttgactccaggaagtgggtgacacagagtagctgaaacctgtgtcctgattagcaatgataacaggtgaaatctggcccattgcgttgtttcatgggttgtttttttttttttttttgacggaatctctgttgcccaggcttgagtgcggtggtgtgatcttggctcactgctgcaacctccgyctcccaggttcaagagattctcctgcctcagcctcctgagtagctgagattacaggcgtgttgcaccatgcccggctaattctttgtgtttttagtagagatggggttttgccatgtaggccaagctggtctcgaactttcctggcctcaagtggtcctcccacctcagcctcctaatgtgctgggattacaggcatgagctactgtgtccagcccccattgcactgtcgaaatgtcactggtcttctggatcacacccagctgacccattcttctcatatttatttaaccttggcaaacaaacagctcaaccacacaactatttgcaaaattatttgtgagatctactgggttgtgaaagattttcacatgagaaagattttcaatcaaacacaactcacaagtcaagggatcc

SEQ ID NO: 65647 - DNA, 764 bp, Homo sapiens
ccaggtcaagacagctgcaggtgaagagagtcatgctgcctgacccaacactggggtggtcccgagtgtctcctcacaggagacttcacccatcacagacagaagaaagtagctagtgtgtggggagctgctgcccaggagccatgtgcatcttgatcttctgccttgactccaggaagtgggtgacacagagtagctgaaacctgtgtcctgattagcaatgataacaggtgaaatctggcccattgcgttgtttcatgggttgtttttttttttttttttgacggaatctctgttgcccaggcttgagtgcggtggtgtgatcttggctcactgctgcaacctccgcctcccaggttcaagagattctcctgcctcagcctcctgagtagctgagattacaggcgtgttgcaccatgcccggctaattctttgtrtttttagtagagatggggttttgccatgtaggccaagctggtctcgaactttcctggcctcaagtggtcctcccacctcagcctcctaatgtgctgggattacaggcatgagctactgtgtccagcccccattgcactgtcgaaatgtcactggtcttctggatcacacccagctgacccattcttctcatatttatttaaccttggcaaacaaacagctcaaccacacaactatttgcaaaattatttgtgagatctactgggttgtgaaagattttcacatgagaaagattttcaatcaaacacaactcacaagtcaagggatcc

SEQ ID NO: 65648 - DNA, 2359 bp, Homo sapiens
aaatattaaagaaacacatttcctctttttgaaagctataagacactaaattcactggttctcttatattaaaattttcagtttaattctttaaagtagtgctcttcatggacaaatacaaatgttagcactaagagccattttcatacacaaaactgaaaacttcacgcacatggagatcagaataaaaaatgatgcaaatatttaatatgaagtgacttttggcatctgcgttccctcaatagaaaagagggttccctttatgtcaggctttgcaacagccagaatgggacttttatgaattcaggagttgacccacaatgcatctattctgagaataataagcatgttaaacttggaattcattaagtattctctctccatagtagtaataacaaaaaacaacagcaacaataataataataatagctaacacttaagtagcttttactctggaccaggcactgtttgaagcactttctatttattagctcatttaatcctcacaactttaaccctttagattaggtcataaatcccaatatgaacaataaatctgttgcctattatttcaaagctttaaaagagagttttcagaagggtaactttcagctccttcaggagaacaacttgaaatgaaaatgaagattatacatactatcaagctgaaaaacacaatgtcattcctcttgagggatggcttaatatgctaatgtttaatttaagaactttaaaaacgcccttctattagtaattctaaaacaaaaacaagtcgctacataaagcatggctaaaataccactaaaggtatgacaaggatcgaaactgcagccaatttagtacacagcacacagatcattggattgttccagctcttcccatgatcaataccaattgacatggctgaattgattctgcagcaaggtgctccaattgttgaaactcatcacgtgggccgtgctccagagtcccggcctcttcgtggacatgcctgcaattctgcaggattgaccccattagcacagtcagaggcttggcaagtgcccgacaccaggcaaggctggattccatacccacggttctccacaaaatgctagatgtgatatggggttccttcaactcttattattaatcaacataaccaaaatttcaagatacaatttttcaaaagtacaaaatttagaaaacttaaaacatttacaaaataataaatttgacattataatttccaaagaggcctagtaatacaataatacaattttgtgctcatgatgaaaaattctttgaaaatcccaattcatatttaattcctataaagcatgcataattcagatatatgtaagacattcaacaactggatgagagtcccctttaacatatttgtatcactgattttcaatgacaatgaatcacatggcaaatgctttatgagtcagtacaacaatgcaatgaaaacgtacctcaggtttcttcgttatcgcgatgaagaacatgtgattcttcattgggtaaataatgattgaaacatctccaaaggcagttgggataatacccctgcggtagtctctggagtgttcagaccagacgatatggacctcgtcattccccaagtgacgaagctgcaacagcaaattgactgtttattaatcagggtgataacagcagtttatgaggggtcatggcttacaaattgaattataaaactcaaaggccaaaaaaatttcactaccaaaaaaggctacaacattgatgttcttctgtgaggattttaaaaagcacaagtgcataaaaacacagcctgtcttcttaatgtgttggtaccaagataaggcatgctagcttcgcaggcacattacagctggatggggctgaggcctttgtaagaatttattttctaatggaattttactcctgcgtcagagtcctgtgctttatattgctgaatatgtttctaaacaattaacaacacrtgtcttttattccacattgcagttgtgctttataagattctcaattcaatggttattatgaaaataagaatatgaacataagagaacataagccactacaacacaattgttaccaaatgtataagaaactagatttgtgacaaacctttaagaaaaggacgtataaaattacctttgcttaggaaatgaataactactgcttaagtctgataagaacactcctacctagcatttaaggagtgcttactgtatagaagacatgttcacacatactatctcatttaatcttcccactaactctctgaggtagatgacatcatcttcatcttactgtacaaaaaagaaatgggcgctcaggaaggtgaaggcaccacctacccgaggatgca

SEQ ID NO: 65649 - DNA, 984 bp, Homo sapiens
aatctttctgtgtcaaaaggggcagagatttcatgtaccatctgtttatttgcatcatttgatcaaagttctgttaagggytgtgggggaatacagatatgaacaagtcgaggctctgaactgtaggtagtttgcagaagaggtaaaacaatgtattcaagaaggcaaaagggaaaaaaagctttagggtggacgcagataaaatattctgaagctacagagagttcttttctagctgagagaagccatggaagtcttcatgtaggaagtggtcatgacagtgggtgttggcagagattcacggtgggaagagcggagcactccagacaaatggtaaaaataggaatgaaaagatgaggtgggtctggctctcttttctagcgcagggttccccaaagtgcactttaagagatactaatttagctgagtgctagctggtttgtatgaatgctgtgcctacagttaatgattaaagtattacagataaataaacagaaagactgtggacagaacatggcaaaggactgcacagagctcctgagggattcctgagagcaaagtgaagtcagaggtagggccacaaaaggaagtgaggcaggcatagaagcctagactggatttgagaaggatggaaagctctggaataggtatgtacggaaatgcatacagataagagaaaaggctgaagaacaggtatgggaagccagatgatatgggacttgatgaaatgccctgcagaaattaccagcttgctctcaagactctgcactgctgtacttgcctactcctgctcatctacccacatcatgtcctggtcatccaaatgaaagcaacacagagcaccaggtaagtttcccatcttttacttaatggaaaggctgagctgaaggtacattcactgtgtgtgtcagtaggagataagatctggtgggtggtgagaattggaaaggctgcagatctgttgggtgttcctcacaagttagg

SEQ ID NO: 65650 - DNA, 984 bp, Homo sapiens
aatctttctgtgtcaaaaggggcagagatttcatgtaccatctgtttatttgcatcatttgatcaaagttctgttaagggctgtgggggaatacagatatgaacaagtcgaggctctgaactgtaggtwgtttgcagaagaggtaaaacaatgtattcaagaaggcaaaagggaaaaaaagctttagggtggacgcagataaaatattctgaagctacagagagttcttttctagctgagagaagccatggaagtcttcatgtaggaagtggtcatgacagtgggtgttggcagagattcacggtgggaagagcggagcactccagacaaatggtaaaaataggaatgaaaagatgaggtgggtctggctctcttttctagcgcagggttccccaaagtgcactttaagagatactaatttagctgagtgctagctggtttgtatgaatgctgtgcctacagttaatgattaaagtattacagataaataaacagaaagactgtggacagaacatggcaaaggactgcacagagctcctgagggattcctgagagcaaagtgaagtcagaggtagggccacaaaaggaagtgaggcaggcatagaagcctagactggatttgagaaggatggaaagctctggaataggtatgtacggaaatgcatacagataagagaaaaggctgaagaacaggtatgggaagccagatgatatgggacttgatgaaatgccctgcagaaattaccagcttgctctcaagactctgcactgctgtacttgcctactcctgctcatctacccacatcatgtcctggtcatccaaatgaaagcaacacagagcaccaggtaagtttcccatcttttacttaatggaaaggctgagctgaaggtacattcactgtgtgtgtcagtaggagataagatctggtgggtggtgagaattggaaaggctgcagatctgttgggtgttcctcacaagttagg

SEQ ID NO: 65651 - DNA, 1188 bp, Homo sapiens
cacgcttcccgatgccacgttacatcaacacggagcatggaggcagtcaggtgagtgagctgagttctaactccagtggtttgttcgttttatgatagattgttattgctatacatctaaacaggatggttaatattttatgtgatgacataaattgacacacaggtaatcttccaaatatgacttctttttaaatgagtggtcaggccaagcgcggtggctcacacctgtaatcccagcactttgggaggccgaggcgggcggatcatgaggtcaggagatcgagaccatcctggctaacatggtgaaaccccgtctctactaaaaatacaaaaaattagctgggcgtggtggcgggcacctgtagtcccagctattcgggaggctgaggcagaagaatggcgtgaacccgggaggcagagcttgcagtgagctgagatcgtgccactgcactccagctggggctacagagtgagactccgtctcaaaaaaaaaaaaaaaatgagtggtcaaaatgtgcttatgtaaagggattgccaagataaaatacatattttatgttttaggatccttaaatggagagccagtgggcttaagctaaagaaatagattactgtgcagtaaaacaattctaattagattactgtgcagtaaaacaattctaatttaaccaaacaaatgttgtaaaaacttatcttttttctgttacattaatattaatgtcactttttaatctttaaatctttttgttgttgttgttgttaaaggctcgattccttttgtccaaagtgaacccatctcagacacacaataacctgtatgcttggggacaggtaagaaatcttcaggtatttggggaggatgctaagctagtttttttttaaacttgttttaaaattctacaaattggatctcttttggcctggagacagaataactgcgtaagttgggtattttgctggggagtggcggggagggaaacaagttgaataacattrctgggccggaggttgagggggctccctgggtgtgtccccttccacaatatacagcagaacataccaggttcaggccaggggacagagcactgtactgtggcctccatggtggtgtcctccgtcacacagcctcatggcccctagtcctctccccaccaagaatacagggcaacttgtcaccatcggtttt

SEQ ID NO: 65652 - DNA, 533 bp, Homo sapiens
tcttttgtctcagcatcccaatagttgggattacgggcgtgcaccaccacactcggctaatttttttgtatttaktagagacggggtttcaccatgttagtcaggctggtcgtgaactcctgacctcaggtgatccatctgcctcagcctcccaaagtgctgggattacaggcatgtgccatcgtgcccggcctgctccttgctttttattatgtttttgctgattcaaagcatctgtaaatataaaaattgaacttactcttttgtgtgaactatttggtaaacattcacaagcatgaagaaggaagttaagatgtcttaatcccatgctgtagagataaaggattttgggcagtacatttgctgtcactttcaaatatttgtatggcgcgtaagaggggagtcataatgtctgcatggggtgtgcccccacttttctgctgggacagggactacacaaagcttcatattatcctgattaatggctgcagggtgctcggtgtgcagtggcctctctgggcaggtctccgggc

SEQ ID NO: 65653 - DNA, 533 bp, Homo sapiens
tcttttgtctcagcatcccaatagttgggattacgggcgtgcaccaccacactcggctaatttttttgtatttattagagacggggtttcaccatgttagtcaggctggtcgtgaactcctgacctcaggtgatccatctgcctcagcctcccaaagtgctgggattacaggcatgtgccatcgtgcccggcctgctccttgctttttattatgtttttgctgattcaaagcatctgtaaatataaaaattgaacttactcttttgtgtgaactatttggtaaacattcacaagcatgaagaaggaagttaagatgtcttaatcccatgctgtagagataaaggattttgggcagtacatttgctgtcactttcaaatatttgtatggcgcgtaagaggggagtcataatgtctgcatggggtgtgcccccacttttctgctgggacagggactacacaaagcttcatattatcytgattaatggctgcagggtgctcggtgtgcagtggcctctctgggcaggtctccgggc

SEQ ID NO: 65654 - DNA, 568 bp, Homo sapiens
atttttttttttctgttttgttgaactgatgtttgcatcttgcctggtgaaatctttagcaaggaggaggtggaagttgttcactttagcacccaggggctcagctaacatttcgtggggctgacattctgggtgcctgtgctaggtgtggaaggagaattaagcggcttctgtccacaattgagagtctgagtagaaaaaagaggcatagctcacggcacgtgtcatttctcccttcgtccctccttccatccctccctctgtccttcttctttctccttcccttccagcaaatttagtgcctatgataatgtcaggggtgaggctgggcttggggaatagcgcagcaaaccgacctgttgcctcatcctcgtggtagatcgtctggtgagtgatgggcttggatcacatcagctcataggcgaatgccccatccagctgtggggaggctgccctggagccctgcgggcttgtrgaggggttggcatatctggggatctgagggaagggtccaggggagggcacttgagttagagccaaaaggtggcttcgaattaactagcccagc

SEQ ID NO: 65655 - DNA, 560 bp, Homo sapiens
tggattcagatgttatgagccctggaagggtttgtaacataaggcagtattttaatgctttaggggcyggaaatatttaaggcaatattttaattctcatgagggacgaagtgttgtggttgcaagtgcagcctctgaaatcaggcggagctgggtgtgaatcccagcctctgcacttaggttggttacatcacctctccaactccgttccctccttcataaaatgggcacactagtagtattaacctggttgcattgcagtgaagattcaatgagaaaatgcaggtaaaacacttaatgtggtgtccagcacagagtaacaggttaggagtgttggccgtgaacggtggtgatggtcatctaatcacagcatggaatgaggaggagcaagccctcaccctggcctgctgctcctttgttgatgaaatgcctgtggttgttttcacaccgcagcaacagaattgagcattttcccagaaaaatttcccggtctaaactgtttactctctggcccttcatagaaaaagaatcgctgctccctgccctcaaggcagcctcct

SEQ ID NO: 65656 - DNA, 1366 bp, Homo sapiens
gggacccaccatgaataacaaagacactcctatcactcaggaaattccaaaaatttagagattctctcccagaaatgggaaataaactagctaaattttcagttataaaacgtcacttcaatactcagtagtttaaaacaggagttatttattctcacacacctatagcttagctgatctaggataagcatgactgggcccagcttcaagctatggtagggtccaggtcaactctatatgtctcttacctttgaaccaggagatgagataggacctattcatagaagaatcaaaagaggacaagcccaaagcttcaagcacagtacaagcctctgcttgcatcatgttcactaacatcccactggcccataaagttatctagcttaactcaacatcaaaggaggtggggaagtatgttccacttataattggaggtgcaaaggggcaaatatttcctgaaaaataatctgaactatcatataagagaaatattatgtactcttttagcccctttgtggcagaagctgtgtgctaaagatgatttctaaatatccaggaccaccatactatgcccctaaccactggctgtttatatcttaagtgtcctccatagactagtatcccttgggcttgaggctttgatgaaaccaaaatgggtcatatattagtctgttaccaagtcttcacaaataaatgtttaccaaagtaattaaactctcagcttatcagcaaataaaaaacagccatcattggaaaaaagagcccactgatcttcaacttgtggtctctctttgactttctcccttccttttttcactctccttttcacagtttgcccttaaaatccttctgctctcttgatctccagacatgaatcatgctatgtaatatgaatgataatgagtgatggtaataattgaaaagatgaaaaatctgcatttgtttcttatctagaaagatacyaaaacagctgccagggagtgttcagagactctacagcccattccataatttatgaatgtgagaatgctccccatgaacagcctggatgagtcagatgttttaattgggctgccttaaatttagaaccaaaggagcttgattcctactccactgggtagtctcatgaagggtgttccagccagagaggagccagagttgacacttacatacacaagtgggtagaataaagtacaaatgttgttaatgtttgtaagacactacattctggttttgttctttgattttaaggttgaagaattttcagagaagccttattagggaagacttctcttttatatgaaagttacctcattgtgtcctctcctaggcaacaataacttgagtgtgaaaatcagctgggatc

SEQ ID NO: 65657 - DNA, 734 bp, Homo sapiens
ttgctatcccagcccctcttaagcccacttgtcttcttagctctccacaagtgtgagctcctgctttcagctgtgaccttctcccatttcttatccagaggcgtgggtttcttgtttttaatcacagtgacattatatttctcatttttatctaactacctagtagcctgtgtgttgggagcagtcaatctctcctgtggacctggcactctggttgaagttcagtgttctaaggcatcctgagatccgcagaggcactgccagctgacggtagggacagtgacatgtgatatgatggtggggacagtggggtgctctggacacacctccagctgctaccagggagctctacttgcaggggtttgtatacaagtttatatacaaaatctctattactaataagccaaatatttggaacccatactctagcccaagcatctcattttccagatggagatgaggctgttagttscaaagccaggcgggaaactaggtctgctcatgtcctgtctgacactctcagaactgcaccaggcataggtctgctaggcgccctgtaatgcccatctcatcccacatgatggggtcacctccctcacttcatccccaagacgaagcagttgggaactcagcccaagaggaaacttacttccaaacccatctggaacactgattcatgtaaccaaaaccacctagctgcccgcctggagaaggttctgggttgtggcactgca

SEQ ID NO: 65658 - DNA, 734 bp, Homo sapiens
ttgctatcccagcccctcttaagcccacttgtcttcttagctctccacaagtgtgagctcctgctttcagctgtgaccttctcccatttcttatccagaggcgtgggtttcttgtttttaatcacagtgacattatatttctcatttttatctaactacctagtagcctgtgtgttgggagcagtcaatctctcctgtggacctggcactctggttgaagttcagtgttctaaggcatcctgagatccgcagaggcactgccagctgacggtagggacagtgacatgtgatatgatggtggggacagtggggtgctctggacacacctccagctgctaccagggagctctacttgcaggggtttgtatacaagtttatatacaaaatctctattactaataagccaaatatttggaacccatactctagcccaagcatctcattttccagatggagatgaggctgttagttccaaagccaggcgggaaactaggtctgctcatgtcctgtctgacactctcagaactgcaccaggcataggtctgctaggcgccctgtaatgcccatctcatcccacatgatggggtcacctccctcacttcatccccaagacgaagcagttgggaactcagcccaagaggaaamttacttccaaacccatctggaacactgattcatgtaaccaaaaccacctagctgcccgcctggagaaggttctgggttgtggcactgca

SEQ ID NO: 65659 - DNA, 734 bp, Homo sapiens
ttgctatcccagcccctcttaagcccacttgtcttcttagctctccacaagtgtgagctcctgctttcagctgtgaccttctcccatttcttatccagaggcgtgggtttcttgtttttaatcacagtgacattatatttctcatttttatctaactacctagtagcctgtgtgttgggagcagtcaatctctcctgtggacctggcactctggttgaagttcagtgttctaaggcatcctgagatccgcagaggcactgccagctgacggtagggacagtgacatgtgatatgatggtggggacagtggggtgctctggacacacctccagctgctaccagggagctctacttgcaggggtttgtatacaagtttatatacaaaatctctattactaataagccaaatatttggaacccatactctagcccaagcatctcattttccagatggagatgaggctgttagttccaaagccaggcgggaaactaggtctgctcatgtcctgtctgacactctcagaactgcaccaggcataggtctgctaggcgccctgtaatgcccatctcatcccacatgatggggtcacctccctcacttcatccccaagacgaagcagttgggaactcagcccaagaggaaacttacttccaaacccatctggaacactgattcatgtaaccaaaacyacctagctgcccgcctggagaaggttctgggttgtggcactgca

SEQ ID NO: 65660 - DNA, 734 bp, Homo sapiens
ttgctatcccagcccctcttaagcccacttgtcttcttagctctccacaagtgtgagctcctgctttcagctgtgaccttctcccatttcttatccagaggcgtgggtttcttgtttttaatcacagtgacattatatttctcatttttatctaactacctagtagcctgtgtgttgggagcagtcaatctctcctgtggacctggcactctggttgaagttcagtgttctaaggcatcctgagatccgcagaggcactgccagctgacggtagggacagtgacatgtgatatgatggtggggacagtggggtgctctggacacacctccagctgctaccagggagctctacttgcaggggtttgtatacaagtttatatacaaaatctctattactaataagccaaatatttggaacccatactctagcccaagcatctcattttccagatggagatgaggctgttagttccaaagccaggcgggaaactaggtctgctcatgtcctgtctgacactctcagaactgcaccaggcataggtctgctaggcgccctgtaatgcccatctcatcccacatgatggggtcacctccctcacttcatccccaagacgaagcagttgggaactcagcccaagaggaaacttacttccaaacccatctggaacactgattcatgtaaccaaaaccacctrgctgcccgcctggagaaggttctgggttgtggcactgca

SEQ ID NO: 65661 - DNA, 746 bp, Homo sapiens
tgttgcagaatgaattagatgatgagcacaacgtcccccacagagcattttacccagggtcttcagtcgcctcctgggtctacttcaccagggtatagttacgctaaatggttttctcaaatatgtttagcgatgccctggtataaacacacctgctgataattttggatatgacatgattggcgactacctcctatcctccaccacagcctcattctgattttcgttttaactctgtaattatgcaaactcaagttttatacgtgattgattttttttccttgcattatggaggaattttcctttgtgtgtacatgtgatagatggaaagagagagataggcaactacatcagcaacacagaacagcaaaatgaccagctactgaactcacaggcatctttttgactagcaaaggataatcagcaaccagcctcactaatttccatgttttaaccccaattaagaaaagtgccttcctgcaggtggtgtcacttcaatcccctccctgaatgtcttcagcctgrtagagcccaggtttgtactctcccttaagggtcaagaggccatcatgaaaagctactgagctaagccctggggatgcgaagtgagcaagacgtggtcctgccctcatgagttttacattttaactgggaaaatggaatattgacagcgaagtgcataagcatagaattgcattgtggtcatttctatgaaacgggatggggggcactcctggagcggatcc

SEQ ID NO: 65662 - DNA, 1372 bp, Homo sapiens
cctcactgagcaactgtctctccagtccagtgaaaatcttctgaccatggaatgccatgcatgccactttgataggagtcctttgatgcagtatgttttcaaactgcaggtcactaccccatttagtgggttactaagccaactcagtgtgctgtgatcagtattttttaaatgagataaaataaagtagactagaagagagtaggaattgtttggaatgcatataataagaacaagtaacatttcataaaattttgttcattattttatatgcacacacacacaggcatgcacacaccaacacaactcaatgtgatataaaatgtatttgttaccctgtgtcagtttttgagaagtctgaaaaccacttctaagaaggatatttaattttattgtttcacattgtatctaaatgttcacatactaccaatctattccctcttttcaagaaggtaagggtaggagtaaacaggatgggtgcacccacttttagctacactaagaacacagctgtgggaggaagaatcarctcttactaggtgaagaagacagatccactgaaggataaaaatgtgcctttccacttggataacaagctgatgacgtggatatcttaacagaggagagaagcactgtaaagtttccatttgagtcactggttttttccaaatatggtaactggttccaaaacctaagaagctgaaggctttggcggaatgtactaattaatatatgcttggctaactatgggatactcccattcaataggtgatgccataaaaccaggacctcttctcaatagaaacgtctaaaacaagatctctattaattattcttaaatgtaaatgctctcccactctccaccataccccagctaatgctgtgttcctcgacatcattaaaaaaaaaaaaatctcagtttagtttcccagtgtttgagagggtagtttaactaatatcttctctttaaggggggattacaaataaaagtgcatctgacactttctggatttaaaataaaacaagatttcatttattctttggcaatgtgtgtgtgtatgtgtgtacatacacatttacaacataattatacatacacactacagtatatataattatacatacacataccagagtctttgccactgtttgacaaaaatgatttcatattctataaactcctctccatcttgttaatcttcaccattcatactaaatgtatgtgccaaatgttggagttaaaattcattcttttaaaagactgctgaatatttcatggtaagcaaataccgcatgtattcaaacattgctcttttgatggatatttattttattttatttttttctgaagagagggtctgcctaccctact

SEQ ID NO: 65663 - DNA, 1536 bp, Homo sapiens
ttgacaaactggagctatttggtatttgcacaattagaaagaatcccccatgggggttgtttggctttgtgagtaaatgctggcctctcacttgaattccaatacagagatctcattcaaatgagatgggtggtcttatgcaatttctttgcggttcataaattcctcatagagggggaaaaactatttcagaatggcctccacaaaggaattacacgtagatgattacttttatccggagtaatttgtgttttaaatgatttaaaagtataagcagttaaggaagtcgtgaagtttgatgcttcagaagaaagcctcctttcattcattattagtgatttctccaaatccactatttctgcatctatgtatgaaaattgaagaacattccagactatggcggtggcatcaaatccaatcatttttatagcggggctttctcttggaggactctttaaaggttacagagagaggcagcttggcacagtgtgtagattggttcatagttactgttttatagatgtttactgtaccttttagtatctgtgaaaaatattccttttatttcttctgaggcacacatctctttcaaaacgttttttaatatcttagaaacatactctacctgtgagctataaggaaataaaatgatgctcattttcatccattcttatattattacaaaactaaatcatttctcaatcctataagatacaaatcaattgcctattattgtagatgacttaggaaagaagattgtaaactagaaaaaatatacatgcatttttagtccaaacttttaaaaatacaagtactgtattcagatatattttctaaaaagatatcattcataaaattaatgcaaattttaaaatccactaaaggatccatagtgctagaaataaatgtggctttcagatggctgcgactctcagcttgcacaactgggaaagaacctgaatatgcctcttttcaattttgtccacttgatcatggggtgggaacgatattattgagtggaagtaattgctactccaaagattttttcaaagctttatggagactgtggcaaatattattttgtatcttaaaggaccctgtatggagagttgcactgatatttaaaagttcccacacacggtgtcacacaggccacgagccacagcagtcagaaatggaagggggacctcactgcttcttactgcatcattcccatcctctcattacaacagaaaagaaaaaagctaaygaggaaaaggaagcaacttttgccagaaatgtccatgcaatcaagggctttcttttccctgtgtaatgtgagtacagaaatgtccatgcactagagggctttctttttttttttcttttttttctttagatggaatctcactctgtcgcccaggatggagtgcaatggtgcgatctcggctcactacaacctccacctcccaggttcaagcaattctcctgcctcagcctccaaagtagctgggattataggcgcctgccaccacgcctggctaatttttgtatttt

SEQ ID NO: 65664 - DNA, 1374 bp, Homo sapiens
tttctatcaaaccaaaagaattcagagtttctcaagagatctcttatttaaaaaaaaaaaagtgtatttcatgaaataaggatagactatggcaagagagtgggatagaaagaaagttattcttttctgaagttggtttgattttcctggggccatcttagcagtacacagaagcaaggttggttttcccagatccccatcacaatgaatggttgcatagaagtagggttgattgaatgttctcagtctagttgtatctgacttagaaagatgttaacatacaaagggggaaactaaagccaatagataatcagagaattgtggatttaattcaacattagctcctatctttttctcaggcagaaggatacatgagatctaagtacaggaatttaactaaatggaatataagacttatgatatgtaggtttcctttggaaatccaaacatctgtctagaggtgaagactatagaaagtacttcttgcttaaagcagattattaactcgaataagtacaagcatgaccacccccaaatcatttactaataattgtttcttggacttcaactgatgttccttcccttcaactaaaatcctacttacattccaaataaaagtagtaattccttattgtgctcaaccagaccatcaaaatcttcaagctgaggatccccaagataatacagcaacagactattttctagcatagttggggcttgaggtttttccartggatctccagtttttcaggaatttgaatacatgttttaaatgaactgacataaatgctctactggatataatcctacagtatttgctgttgcaaaggccatcaggaccttgaggtgctccgggtctgggttaatgcccatggggttcaccatgctggactggggaccgcagcagcaccgggcacagagctcagttcataaagcaccagcttctaacataaattgacattaacaacagtcactctcctcccaaggacagcgcaaaaaggaaacccacttaatgaaacagatgtgcttagtgtattttagctcatcccttaaacagtcactaaataccggcatcccattggatttgtctaggcttacatcaaggaagtttcttctcttaccaaatttcttacatcgcctgtaaagaaagcacattctttcactcaggtgtgtctcctcagctcctcttagctcagtcttcagtttgcttcttttttattccttgcccttggtttccacttggattatttggtaaatgtgtgcagctgaagatgcttgctgtcgcttccatggttggtctcaaacgtgtctgcatattagaatcacctgggaagcttcgagaatcctgaatcctgtgtcccttccgcaaagatt

SEQ ID NO: 65665 - DNA, 581 bp, Homo sapiens
tgagttccatagcttctagtacgcagatgcctcacctcagcaaccactcctgtattcactcatctcctcttgcctctgtcactgcccagtctgggagatctcctaaaacattacccggatggtatggaaaacaataagccatagttggcaaatatatattaaactttgaaaggttatttttttctttatacagttctaaattttggttcgatttttcagggcamtcataagttacattctaattaaaaataagtctaatatagaaaaaatctatagttggttatttcaaatggccaattgcttctgatgaaattgctctataaaatagatataagacctcctgtatcactaaatcttaattacattgtggaatgtggaaactagcactactcagtagctgtagaaaaagattggacccccagtggggaaaggatgctgaatagcagctaccatagccttatcatttttgcatttttgtgataaattcttgagtagggcagcatctaagtatagtttttaatttttagttgcttttttaaaatctatatctcattcagtgttacctaatatttaataacaat

SEQ ID NO: 65666 - DNA, 581 bp, Homo sapiens
tgagttccatagcttctagtacgcagatgcctcacctcagcaaccactcctgtattcactcatctcctcttgcctctgtcactgcccagtctgggagatctcctaaaacattacccggatggtatggaaaacaataagccatagttggcaaatatatattaaactttgaaaggttatttttttctttatacagttctaaattttggttcgatttttcagggcaatcataagttacattctaattaaaaataagtctaatatagaaaaaatctatagttggttatttcaaatggccaattgcttctgatgaaattgctctataaaatagatataagacctcctgtatcactaaatcttaattacattgtggaatgtggaaactagcactactcagtagcygtagaaaaagattggacccccagtggggaaaggatgctgaatagcagctaccatagccttatcatttttgcatttttgtgataaattcttgagtagggcagcatctaagtatagtttttaatttttagttgcttttttaaaatctatatctcattcagtgttacctaatatttaataacaat

SEQ ID NO: 65667 - DNA, 761 bp, Homo sapiens
tttttgcatttttggtagagatggggtttcgccagcttgcccaggctggtcttgaactcctgagctctagtgattcacccacctcagcctcccaaagtgctgggattacaggcatgagccaccataccaggactgatttaattgaactttttgccatgacattttactacttggctagcctctccctaagaaacgtagctgatttgaaacagaggtagagacaccttcaaggtattaagacattcatacagacctacattactgtaatgttgcttagcatagtgaggtaacataaaattggacaagagagtatgggcttcagttgtcaggtctattcagataaagatatggatgtggatataaacagtgcatggatatagatataaacatgtagatatatagatgcacatacacaattcttagatttaatgatcatatctttaaaatrcaagggaaaggactacctagtcatccttctcaggctttatctttcacttctgtgattagcaaacttgaagaattaacgaagtccaatctagtgataaagagattctataaagatagaaaagacattttaacattcttagaaactttcaactctggcaaaataaaatgttaaatcacaggaagctttgccaacaaactgtctttatgatatattttgaaagggtcagaatggctgtcagaactctgaagaacagtgcagctctagaacctgttactcctgctgagattgtcaagcaaggacaaatggatgtaca

SEQ ID NO: 65668 - DNA, 637 bp, Homo sapiens
attgatattatagtaagaaatggaaaaatgtgcaggatatattatcattaactcttatttgcttatatctcttcttattcaaaacattttattttcctattaaaataaaaacatttttagaaactcagagaattgatgggtcaagttaaaatgttcttatgacaagatgggtgaatctttttcctagtacgctgcacctaagaggctcagtatcaagaaagaaaaatcaacaaagaggatttggttcatgagtaaaaaatacaataaggaggaataacatctagtgttcagtagcacagtagggtgactagagttaacttttttttgtatatttgaaaataagtggaaagtagaatgtttctaatacaaataaatgatacatgtttaaggtaatgtatatcttgactaccctgatttgatcattacacatttgtacgcttgcagcttgttttaaaatatcacatgtatcccataaatgtgyacacctattatgtatccataacaattaaaaatttaagaaagaaaaatcaacatagtcataaatactcattaaatttcttagctctcataactacatgtatgtctgcatgacacagaaatgaacatcaacacatagacacagatgattgatggatcc

SEQ ID NO: 65669 - DNA, 643 bp, Homo sapiens
gcattattttaacatatcctctaaggccctatctactgacaccctatctactgaatttgatcaacacatttgatcaagtagcataagtcttgcaaataatgtgtctacttgatggccattagagggccttatttttttttctcatgatayattcgttaagaaattataactacaccctttattaaagaattcttgtataatgatacaaaaagtaatcccagtgctgatacttttgtttgatgtcactctacaatcattatttccaataaaaatgattgactgtctaagtggctgacataaggaatgagacattctgtttgttgctatcaccactgttggacttgcccatgggcactgcagctaagacttgttatatgagaaaagtatacttctccagaaaaaaataacaataaaatccctttgcactcatccaggaatgttagtttcaaaagtagatagaactagaaatatcagtagatttcagattatacaggtaggttcacaatggagttaagacttaaactcaggtctccaaacttctatatatgtcttcctattaaataactaatttaaataaatattattaacaattgaattctagaaatctgcctagaaaaattaatatatttaaatgtctcaggat

SEQ ID NO: 65670 - DNA, 643 bp, Homo sapiens
gcattattttaacatatcctctaaggccctatctactgacaccctatctactgaatttgatcaacacatttgatcaagtagcataagtcttgcaaataatgtgtctacttgatggccattagagggccttatttttttttctcatgatatattcgttaagaaattataactacaccctttattaaagaattcttgtataatgatacaaaaagtaatcccagtgctgatacttttgtttgatgtcactctacaatcattatttccaataaaaatgattgactgtctaagtggctgacataaggaatgagacattctgtttgttgctatcaccactgttggacttgcccatgggcactgcagctaagacttgttatatgagaaaagtatacttctccagaaaaaaataacaataaaatccctttgcactcatccaggaatgttagtttcaaaagyagatagaactagaaatatcagtagatttcagattatacaggtaggttcacaatggagttaagacttaaactcaggtctccaaacttctatatatgtcttcctattaaataactaatttaaataaatattattaacaattgaattctagaaatctgcctagaaaaattaatatatttaaatgtctcaggat

SEQ ID NO: 65671 - DNA, 2394 bp, Homo sapiens
cgcagcaagaccctgtctccaaaaagaaggagagggagaggagaagagaagagaaactaaatcaagcttctagaggtaaactgtctgaaataaaaaactgactgagattaatagtatactagatacttgagaagattaatgaacttgaagacatagcaacagcaattgtctaaaatttaacataccaacgaaaaagactgaaaaaagattaatcatatcagtgaactgyagacaaagtcaaccaaaccaatatacaagtactggaatccctgaaagcaaaggggaaggaagagaaaaaatatttgcagaaataattggtgaaaaacgtctaaagtaggtaaaaactataaacccacagatccaagaaactcaatgaatcccaggcacaagaaaggtaaagaaaactgtaactataaacagtacatgtgagtgacaagcaccaaattcaagacagaggttaattctggggaacaaggcaggagaacgtgattacagtggaaaacacaagagacttcagctatacttacactatgttatcttcttaaggtagtagtaaatacatggatatttataatattcactacagtttctccatgattaaaatatttttttaaaaaataacacaaaatgaaggaaaaccaacaggtcaaatagttgccaagaagataaaaaattttcaaaagcagagtagagagtagcaaatgccaccaaaaaatcagataacatatgcgaacagcttctgttttgcccttggatccttttctcttttggaatctcactctcccttcatacaatgtctataatctctttttccatcttgggcctctgttcccttcttcactttatcttgtaaatataatatgttcacagaggccattaggagaaagacagggggagaaagcacttcttagtaggaccctatagcattccttctcttcttagctaagcttcttgaaaacgtagtttgcctttttttcttccttttcttcccattcccaatattctgtaacccagattctgaccctccttctccacagtaactgttctcttttttcctttatttaccttaaaaaaaaattatctaactacacaggtaattcaggcacaccttaaacatacttacaaagacagatgcataatgctgaagtctttttttatattcttttcccgagataacctcttttaaccatttggtatgtatttgttcagctaatcctatatgtttattattactttgggtcctactgagaagtacttttttctgtttgtctgtttttctaatggaatctttgaacatatttacaggataaaataaagaggggaacagaggcccaagacagagaaagaggttatagatattccataatgaaaaaggacagtgggattctaaaagaaaaaaggattaagagcataacagagctgttagtatttattctctgatatgactttcacataattgaaaacatataaagttaggaaattttgcaataaacatgtatcactttggaaatccaaaaaacaggagaggtgaggaggtttaggagcacatgagatatcactgctctaatactaaaaatagtaataagcacagatacagatatagagcaatcaagattatttaaatgatgagttactgaaaatgtcacataatcaaaactcataattcaaaactaattgggggtgtcttctaggaacacataagtctaaccaatgtgacatacttaagctttcacatagcctttcattttctcagtaactgtgtaaagttttgctgagttttctcctagattaacagctttttttttggcataatatgacagttgttccacttctcttataacatttctttttttggagacagggtcttgatccgtcgcccaggctggaatgcagtggactgatcacagctcactgcagccttgacctcctgggctcaagcaattctcccacctcatcctcccacgtagctgggactacaggcatgaaggcaccaaccacgcctaattttttttttttgtagggatggggtctccctatgctgcccaggctgatctatactaaatttatagaaaaatgtttttctttcttcagtaataaattaaccttggcttactgtaacctttttactttataaattaaattttttaactttttgactctttcaccttaacatttagcttaaaacacaaatacactgtatagaggtacaaaattttttctttctttatattctgattctataagcttttttctattttttaatttttttttttactgtttaaatacaaacacacacttttaaatactgttaaaaacaaacacacacacacccgttaacttaagcctacccaaggccagaatcatcagtatcactggacagtaccactgaaaggt

SEQ ID NO: 65672 - DNA, 1130 bp, Homo sapiens
gtgtatatgattcaatcttcaatctgtgtgtatcattttgttttgtttagcaacttaccaaccacattcgggataccctaccaaacttcaggaacaaactacagggacagttgctctccatagaacatgaagtagaagcctacaaaaatttcaaaccagaagacccaacaaggaagaccaaagcattgctgcagtaggtcacctttcccttccttggctcagcattttaatctaatttctttagttttctattgccttagtctatttgtcacgttgcttcttaggtagcaagtaaactatatgaggctatctatatgatacaagataactcttgaatttttatgctttgttgaacaagaattattggtattattctgttattatcaacttaccagttgagcatcctcatgcccatttaaattgtgtttttaaaactggattaagtgagtaaaaccattagggatgacccagcaggaatttttgtcccttgtcttagaagtgggtaaatacagatgcaaatatcatttgtatttttcagctgtttctatggatgtcaattgtacttattatcctttattccaattatttcatgtaacttatttgtgtgcatttttcagtggaatgagaaccaagggtttaatttaaaagttctaacaataaggctgtagtttttttttttccttttacataatgattttaatgtagtcctttgaaaatgtaaatgtgaaactgccaagcatcttttcaccccttcatgatcttcccatcttatctttgggttactagagttattcctgtggtgtcttggggtaggatagcagagaattgttagagaattcctagctctttatatcttacactttcttctctccttcaaatccttctgtctccatcagttcctttatcctgtgctgccacttgtgtcaagtccctctcaacaggaaggctcccctgcccagcacacactgcaggatacccaaggtctacctccgaagatgatgtttggcacctcttatggcgcacttttctccccagcagcgtggcaatcaaagcatccttcaattggcattyaaagtgcacactataatttctttctttgtgaggagattcccaaatgctcaaatatttaa

SEQ ID NO: 65673 - DNA, 933 bp, Homo sapiens
tataacagagttaaaatccactgcccccaagctccccaaaatccctagtgttctgtgttgccttgaaatttatataaacagatgttttgaccatctgggtttaggttaggaaagacatgagtatccacttattaataatgaagtcaagttattctcattctgtaatgttcaacaatattattcaaaggaattaagtgtcataactatggctcattttgcatctgcagatggagttcaatgagaaagaattgcgaagagaaataagctatgcaatcaaaaacatacatggtatcaggcaagtgattcacatttttcttgtcatctgttcaagctaccaaaagaaaattaatgtttataaatggctaggaaactcgtcttttcatcattgaatagggtagaatacagaggtgggagtaagaaacaggaaatcctactttggggtttaatggtaacttcctgtattgctgtagtcagttttttccaagtgaaaaagcaaaaacattttctgcatttccagcctgtactctgcacaataggggattcgcagattakcaagaccccattctccagagccttcatttttcatgagggaggccagacatgctcataattaatcattacttacaccagagaagggacagattaattttgactagtgttgtggagcaagattgggaaagattaatggaggttgttactttcaagtttatcctttcctgtggggaggatggtttcaacaggccaggaggtgttgtgtgtgcatgtgtgcttgcacatgtgggagcgtgcatatgaagtgggcagcagtgtgatgagacaggagaggatggaaggatggaatggaggttgttgaggataaaagaaagggctttccggtggaaggggtgggatgaccaaaggcaaagaggtgagcgggcacagtatatatccatg

SEQ ID NO: 65674 - DNA, 933 bp, Homo sapiens
tataacagagttaaaatccactgcccccaagctccccaaaatccctagtgttctgtgttgccttgaaatttatataaacagatgttttgaccatctgggtttaggttaggaaagacatgagtatccacttattaataatgaagtcaagttattctcattctgtaatgttcaacaatattattcaaaggaattaagtgtcataactatggctcattttgcatctgcagatggagttcaatgagaaagaattgcgaagagaaataagctatgcaatcaaaaacatacatggtatcaggcaagtgattcacatttttcttgtcatctgttcaagctaccaaaagaaaattaatgtttataaatggctaggaaactcgtcttttcatcattgaatagggtagaatacagaggtgggagtaagaaacaggaaatcctactttggggtttaatggtaacttcctgtattgctgtagtcagttttttccaagtgaaaaagcaaaaacattttctgcatttccagcctgtactctgcacaataggggattcgcagattagcaagaccccattctccagagccttcatttttcatgagggaggccagacatgctcataattaatcattactyacaccagagaagggacagattaattttgactagtgttgtggagcaagattgggaaagattaatggaggttgttactttcaagtttatcctttcctgtggggaggatggtttcaacaggccaggaggtgttgtgtgtgcatgtgtgcttgcacatgtgggagcgtgcatatgaagtgggcagcagtgtgatgagacaggagaggatggaaggatggaatggaggttgttgaggataaaagaaagggctttccggtggaaggggtgggatgaccaaaggcaaagaggtgagcgggcacagtatatatccatg

SEQ ID NO: 65675 - DNA, 1050 bp, Homo sapiens
acctgtctcaaggtagctgaggatttttctttttcggtatatgtggtggggaggaaaatagctaaaaaatatttacttcatgtaagactagatttaggggagaatattaaaactcaggaagaggacttttaacataatgaggtggttaaaaggagacaacttctcaatagacaagggaggtattttgaatagatttttggaaatggtacacaaaattagttttattgaagagtgaaagagctggacagatgggaaaatcatcatggagactagtagattgtgagggtgaaaaccatgagtaggcttaaaagtattgtctcaagacaaaaaaaaaatgggctattttggaagtaaagagtttttaattccaggaggtggccctctactgatgtaagcagactgtgatttagtatgtgaaggatggatgtaccagactcatttcccagagggaagaggcagttactagattgtttagcctcttcacatgcttgtaatattgttgctttcaaaggtttgctgaagaaatgaatgaaatggcttgtcaagtattagtaagatatttctagctgtagttcaattgcattttttttttttttttttgagatagggtctccttctgtcacccaggctggagtgcagtggtgtgaacatggctcattgcggcctcgacttcctgggctcaagcgattctcccatctcagcctcccrtatagttgggaccaaaggcacgtgccaccacacctggctaagttttaaattttttgtatagatggagtcttaccatctttcccaggctagtcttgaactcctggacccaagggatcctcctgtctcagcctctcaaactcctgagattataggtgtgagccaccacgccctaccaacaaaacttttttttttttgcccgacccccagcaacaaaacttttgattccttccttataatagtttctttttaaataacttggacaagaaatgtttgcacagaatctcactgataatgtactttaacttgaagagtatgaaataatcttgagtctactatttttgt

SEQ ID NO: 65676 - DNA, 557 bp, Homo sapiens
tccttaagacctaggcaagtgcctggcacaagggtctaatgacacaataaatgcccaatgaattactgaatgaataaatgtaatcaagtacctttaattttttaaattggaaattctttattcctaaatttttctctaarataatttacacacctatcagcagtcattctagcttttattgaacttagaacaacatgaaataaaaacaacttcaaaaaattcttgcctgttttaagtcagtggagcaaaagtttccaagttcaaaattcaaggatgctgaatcaacacattaatctagacaaattccttcctgtgaaatgaatacagtcataatattcacaagaaaaatgctattcaatagctatattttctgcatttataagtatccagataatatgaatgcaagtagatgacaattttactttgcatctgcattgatcttttaaaaaaataaatagccactgaaaaagatttaatgtagagaggattagaaaaggaaaaattaataaatcttcagtttatgaattgttaacctcttctatggaagaatcagccca

SEQ ID NO: 65677 - DNA, 1159 bp, Homo sapiens
aatcttggaagtttgatttttaaatgactttmgcttacacggcgactttcaggatgatgaatttatctgtatctcccaaacgtatatggggaaagatcctcagaaacatttgcccagccttctcacagccacactgattgtcccaggtgttttgctctgtatgacaaggaatatgatgataacaacataattaagatttactgagcatttactacttacagggctctggattaaatgttttacattcattatctcactcaatcctcactctaactctcgaagttagatagcattattatcccctttacaaaataggtgatgaagctgtagtttgaggaagttaattaatttgtctaagattactcattctagtcattggtagaaccaggcttgaatttagacctgacaaagctatgtaagaaacacttcttgatgcaaagtttactgactgttctccaaattgatccttctaattttcataattgcagtgcagtgtgttagcctgcaaaaattatctaaaaaagtagtaagcccacattgtttgactttcgtaaattctggaaatcctctagcagcttccttgattcccatagatgatcagggtggtcacttggtactaactcctcagctgctaggtgtttaactttctgtttcttcttactggagcctcttccttctctgcgtagcccaatcagatgcccagcacttcagacctaagatggccatgtacacattctactcctggtactcctcatcttagcagacaactacccattcatccttgcttcaccaaagtctaggctggaaaatcattctcacagagcagtactggatcggatcagctaaaagtgccgatagtcggcccccctttattctagatgtgtgttggtggaagttagaacagagtttgcatgccttctcattatagagggtcacatataaaatttccttggaactctatagacttccgacaatgggtttgatgaaatagggcaagaaattatgtcactactgggatgcagaagaggataagactcaaaacacaggttttgcaaatattgtatccttatcttataagaattctccgtcatccactatcttgaagtctcaaagtcgctgagaaaccccccaaattcttagaccagatttgaaagaattt

SEQ ID NO: 65678 - DNA, 1159 bp, Homo sapiens
aatcttggaagtttgatttttaaatgactttcgcttacacggcgactttcaggatgatgaatttatctgtatctcccaaacgtatatggggaaagatcctcagaaacatttgcccagccttctcacagccacactgattgtcccaggtgttttgctctgtatgacaaggaatatgatgataacaacrtaattaagatttactgagcatttactacttacagggctctggattaaatgttttacattcattatctcactcaatcctcactctaactctcgaagttagatagcattattatcccctttacaaaataggtgatgaagctgtagtttgaggaagttaattaatttgtctaagattactcattctagtcattggtagaaccaggcttgaatttagacctgacaaagctatgtaagaaacacttcttgatgcaaagtttactgactgttctccaaattgatccttctaattttcataattgcagtgcagtgtgttagcctgcaaaaattatctaaaaaagtagtaagcccacattgtttgactttcgtaaattctggaaatcctctagcagcttccttgattcccatagatgatcagggtggtcacttggtactaactcctcagctgctaggtgtttaactttctgtttcttcttactggagcctcttccttctctgcgtagcccaatcagatgcccagcacttcagacctaagatggccatgtacacattctactcctggtactcctcatcttagcagacaactacccattcatccttgcttcaccaaagtctaggctggaaaatcattctcacagagcagtactggatcggatcagctaaaagtgccgatagtcggcccccctttattctagatgtgtgttggtggaagttagaacagagtttgcatgccttctcattatagagggtcacatataaaatttccttggaactctatagacttccgacaatgggtttgatgaaatagggcaagaaattatgtcactactgggatgcagaagaggataagactcaaaacacaggttttgcaaatattgtatccttatcttataagaattctccgtcatccactatcttgaagtctcaaagtcgctgagaaaccccccaaattcttagaccagatttgaaagaattt

SEQ ID NO: 65679 - DNA, 1159 bp, Homo sapiens
aatcttggaagtttgatttttaaatgactttcgcttacacggcgactttcaggatgatgaatttatctgtatctcccaaacgtatatggggaaagatcctcagaaacatttgcccagccttctcacagccacactgattgtcccaggtgttttgctctgtatgacaaggaatatgatgataacaacataattaagatttactgagcatttactacttacagggctctggattaaatgttttacattcattatctcactyaatcctcactctaactctcgaagttagatagcattattatcccctttacaaaataggtgatgaagctgtagtttgaggaagttaattaatttgtctaagattactcattctagtcattggtagaaccaggcttgaatttagacctgacaaagctatgtaagaaacacttcttgatgcaaagtttactgactgttctccaaattgatccttctaattttcataattgcagtgcagtgtgttagcctgcaaaaattatctaaaaaagtagtaagcccacattgtttgactttcgtaaattctggaaatcctctagcagcttccttgattcccatagatgatcagggtggtcacttggtactaactcctcagctgctaggtgtttaactttctgtttcttcttactggagcctcttccttctctgcgtagcccaatcagatgcccagcacttcagacctaagatggccatgtacacattctactcctggtactcctcatcttagcagacaactacccattcatccttgcttcaccaaagtctaggctggaaaatcattctcacagagcagtactggatcggatcagctaaaagtgccgatagtcggcccccctttattctagatgtgtgttggtggaagttagaacagagtttgcatgccttctcattatagagggtcacatataaaatttccttggaactctatagacttccgacaatgggtttgatgaaatagggcaagaaattatgtcactactgggatgcagaagaggataagactcaaaacacaggttttgcaaatattgtatccttatcttataagaattctccgtcatccactatcttgaagtctcaaagtcgctgagaaaccccccaaattcttagaccagatttgaaagaattt

SEQ ID NO: 65680 - DNA, 1159 bp, Homo sapiens
aatcttggaagtttgatttttaaatgactttcgcttacacggcgactttcaggatgatgaatttatctgtatctcccaaacgtatatggggaaagatcctcagaaacatttgcccagccttctcacagccacactgattgtcccaggtgttttgctctgtatgacaaggaatatgatgataacaacataattaagatttactgagcatttactacttacagggctctggattaaatgttttacattcattatctcactcaatcctcactctaactctcgaagttagatagcattattatcccctttacaaaataggtgatgaagctgtagtttgaggaagttaattaatttgtctaagattactcattctagtcattggtagaaccaggcttgaatttagacctgacaaagctatgtaagaaacacttcttgatgcaaagtttactgactgttctccaaattgatccttctaattttcataattgcagtgcagtgtgttagcctgcaaaaaytatctaaaaaagtagtaagcccacattgtttgactttcgtaaattctggaaatcctctagcagcttccttgattcccatagatgatcagggtggtcacttggtactaactcctcagctgctaggtgtttaactttctgtttcttcttactggagcctcttccttctctgcgtagcccaatcagatgcccagcacttcagacctaagatggccatgtacacattctactcctggtactcctcatcttagcagacaactacccattcatccttgcttcaccaaagtctaggctggaaaatcattctcacagagcagtactggatcggatcagctaaaagtgccgatagtcggcccccctttattctagatgtgtgttggtggaagttagaacagagtttgcatgccttctcattatagagggtcacatataaaatttccttggaactctatagacttccgacaatgggtttgatgaaatagggcaagaaattatgtcactactgggatgcagaagaggataagactcaaaacacaggttttgcaaatattgtatccttatcttataagaattctccgtcatccactatcttgaagtctcaaagtcgctgagaaaccccccaaattcttagaccagatttgaaagaattt

SEQ ID NO: 65681 - DNA, 1159 bp, Homo sapiens
aatcttggaagtttgatttttaaatgactttcgcttacacggcgactttcaggatgatgaatttatctgtatctcccaaacgtatatggggaaagatcctcagaaacatttgcccagccttctcacagccacactgattgtcccaggtgttttgctctgtatgacaaggaatatgatgataacaacataattaagatttactgagcatttactacttacagggctctggattaaatgttttacattcattatctcactcaatcctcactctaactctcgaagttagatagcattattatcccctttacaaaataggtgatgaagctgtagtttgaggaagttaattaatttgtctaagattactcattctagtcattggtagaaccaggcttgaatttagacctgacaaagctatgtaagaaacacttcttgatgcaaagtttactgactgttctccaaattgatccttctaattttcataattgcagtgcagtgtgttagcctgcaaaaattatctaaaaaagtagtaagcccacattgtttgactttcgtaaattctggaaatcctctagcakcttccttgattcccatagatgatcagggtggtcacttggtactaactcctcagctgctaggtgtttaactttctgtttcttcttactggagcctcttccttctctgcgtagcccaatcagatgcccagcacttcagacctaagatggccatgtacacattctactcctggtactcctcatcttagcagacaactacccattcatccttgcttcaccaaagtctaggctggaaaatcattctcacagagcagtactggatcggatcagctaaaagtgccgatagtcggcccccctttattctagatgtgtgttggtggaagttagaacagagtttgcatgccttctcattatagagggtcacatataaaatttccttggaactctatagacttccgacaatgggtttgatgaaatagggcaagaaattatgtcactactgggatgcagaagaggataagactcaaaacacaggttttgcaaatattgtatccttatcttataagaattctccgtcatccactatcttgaagtctcaaagtcgctgagaaaccccccaaattcttagaccagatttgaaagaattt

SEQ ID NO: 65682 - DNA, 1159 bp, Homo sapiens
aatcttggaagtttgatttttaaatgactttcgcttacacggcgactttcaggatgatgaatttatctgtatctcccaaacgtatatggggaaagatcctcagaaacatttgcccagccttctcacagccacactgattgtcccaggtgttttgctctgtatgacaaggaatatgatgataacaacataattaagatttactgagcatttactacttacagggctctggattaaatgttttacattcattatctcactcaatcctcactctaactctcgaagttagatagcattattatcccctttacaaaataggtgatgaagctgtagtttgaggaagttaattaatttgtctaagattactcattctagtcattggtagaaccaggcttgaatttagacctgacaaagctatgtaagaaacacttcttgatgcaaagtttactgactgttctccaaattgatccttctaattttcataattgcagtgcagtgtgttagcctgcaaaaattatctaaaaaagtagtaagcccacattgtttgactttcgtaaattctggaaatcctctagcagcttccttgattcccatagatgatcagggtggtcacttggtactaactcctcagctgctaggtgtttaactttctgtttcttcttactggagcctcttccttctctgcgtagcccaatcagatgcccagcacttcagacctaagatggccatgtacacattctactcctggtactcctcatcttrgcagacaactacccattcatccttgcttcaccaaagtctaggctggaaaatcattctcacagagcagtactggatcggatcagctaaaagtgccgatagtcggcccccctttattctagatgtgtgttggtggaagttagaacagagtttgcatgccttctcattatagagggtcacatataaaatttccttggaactctatagacttccgacaatgggtttgatgaaatagggcaagaaattatgtcactactgggatgcagaagaggataagactcaaaacacaggttttgcaaatattgtatccttatcttataagaattctccgtcatccactatcttgaagtctcaaagtcgctgagaaaccccccaaattcttagaccagatttgaaagaattt

SEQ ID NO: 65683 - DNA, 665 bp, Homo sapiens
atgctctgtaaatatttgttgaatgaataaacaaacaaatggataaataaagtgggtttagtaaatggcaaagtggtatagaactgccaagacaggcacagtgcctggggtgctgagcattgcagagactccaaaataaccctactgtgtaccttctgacgtgcgtgtgtgcgtgtatgtctgcgtgtgtgcatgggcgtgtgtgtgtgcacacgagcttgtgygtgtggtgtgtgtgtatgtatatttgacgggggaagagagagtttctctctgactctcccttcctcatcttgtgacgtgtactccccctgctaatattagcaagaatgcagtggatggaagtggtgcagagcgattaactgctcttgtaggtggggaaatctggggactgtcctgctgaagcaaatattttaaaagctgagttaggggcttctgtccccacaggggcaccaggggagagtctctcatcagcaagaaggttgttggagtagagggaggaatggttgggaaaggtggccaagccctcaacgaggtccctcaactctgcagatctggaacatcaaataggaaggagttagggactttgagcattctattcactaaagtgttcttgttacagagaaggaaatgatggaagccaacttatctcacccccaacttta

SEQ ID NO: 65684 - DNA, 1512 bp, Homo sapiens
ccagggttatacaaatatttgcctacattttctgatacttttattggtcaattgctgcatttagatctttcatttatcttaggtttgtttttgcacatggagtgaaattgaaatctactgtattttattcctgacagataaacaattaaacatcttttttctcactgcaaataatgtcacattgattatatattcttggtattctttcttgtctttctgttctagttcattgatctaatcatccatttctttgtcaaccccttactattttgattagggttattatagttttatctggtaaggcatgttccccacccctccaaactagttccagaaaacaccaaatgcattggcattccgattgagattaccttcaaaatacaaattcattaagggagattgtttttcaatggtaagttctcccattgggcacgaggtaaacttcccagttcattttggctctggttttgtgcctttcaatgagattttatagcttgcttcaatgggttctgccccctcttgctaaattttaaaactatatataaaattaaaacagctttttgagattctgttcaagattctaaactctcttctttacactagtgcctcttaaaaccaccttcattggaatcacattgtaaaacacttataaaaatgtatattctggctgggcgcagtggctcacgcctgtaatcccagcactttgggaggccaaggcaggcggatcctgaggtcaagagatcgagaccatgctggacaacatggagaaaccccgtctctactaaaaatacaaaaattagctggcgcacgcctgtagtcctagctactcaggaggctgaggcaggagaatcacttgaacccggaaggcagatgttggcaacagagtgagaccccrtctcaaaaaaacaaaaaagtatgttcctatgtcccccaaaacttaagtcaaaatctctgggtgtgccctagaaacctgcatttaaatgaattcttacaggtgtcacctgtgtacactgaaggccgagggcattgctttgtctactttacccaaataagaccaaacatgcaacctctccacacttccctgtttaactgagttggaatagatcagtttccaacaccttctcccacttgaacttttgaacaaccccatcccactgctttgggggccatgagaactgatgtgtgcctctcaggaggagcataccagcatctgtcaggatacatttttaaaatgagctgataatgcctaagaccatcattgttgattctggcaaggcttcaaatagcagcaaccagcaaatatttcgcccttcccgtggtttctggcagtgttgcagctgttgcctcatctagtgaacatgccgggcctaagggcaaacagacacttaattaggttagggtgagcttcaaaaactcgagagtaggcatagcagtaatgaccaccacactttctcactaagaatactcaatgcgtgcaaagaaataattatcccaagaagccatggtttcttt

SEQ ID NO: 65685 - DNA, 613 bp, Homo sapiens
aaaccttgatttccaacatttcattctctaaccagagcctctctcacttttaggctcacctgtcctaggttctcactccaaaaattctttgctttgctgggacctctgatcctttggtccttcagaccactgtctgtccggatctctcctaatagcgtcacttccctcccatctagtttaratttcatggcccattattataatttctcttcccctgtcacactcactagtcaaaaccccaaatgtagttaattctgcctctccacttccccaacccctgcatctgagcccctgactgtagctgcaaaacaacacaaggacatgctgatggatcttgctttaacattatgaacacagagccccaggaggtcctcatcatgcctcgagatcctactacactgtcctggccatgccacccctcctctccgtgatgatctcactttaagaaagtagaagctcacaggagaaaatgtcttcattcactcatcaccaaatccatatgtatcctgtggttccacaggatacgtgttttcctttcactgtattgttacagtggatgacaataagaaaaaaaagagctaacatttattcattgtttcctagtccacataca

SEQ ID NO: 65686 - DNA, 1239 bp, Homo sapiens
cagtcaattgctacttcagacccttggtttctggagagaacctgactcattctcactctgctttaatcatcctctgaaagtgggctgtgggcctggagcaagggtgagtaaggacatgtcagcgctcctctcaatccaagggatactaggtgcagctgagttggtagctcacatccctgctgtggctgtaaagggagggaagatggcactttatcatgaacttgcagtaaaggtgaaggacagctcttccaaaagaggggcagctgctaatctcaagatcagattctgtgacactgttgtcactttgctcagtcaggcacagatacagttttatgcattgatgtggttagagcttgccagaaaccaacccaagggtgtgctatcttgctttctttttctttgtcttttggggtaagttacatctaccgtttcagtctmtggaagctggcggtcttaagcaaagccacacttacttcctaagctgttcaacaaatcaaaaccctgttcagaaaggcaggaggagccaggtgctgggtggggaagtcttccttcactgcctggctggactcagaagccctccagtgcactgcagcagagaagactttgatctcaaagtaattttcaccttgatctcatctataggccctgaagactcttcctgggtgtctgtcaatgcaaggagtgggccttggcatttgttgtaacgaactgaaaaatgaccacaaatcaccatcttccgtgttgatggggactatttgtttaacggcattgcttaggccattaaaagacccctcgggaatcaggaaggggtgaagatttgaaacattttcatccttggttcaagacaatagaatttgaagatgcctttaccccactgatgtggatatcaagagtatccagggtgagaggtcacagagtcatccgcctgactgcgtctgcatgagcaaagatagacaggatgagactgaaaattcttcgcttcattcatttctgtatttctgggccatgccctctaacaattgcaaagatgaactgcagcgaattggaatgacctaacatttctgtgacatctgattctgttgtacctgaacatcccagagaccacaccgctcaagggaaatgtatatttgaaaaatatcttgtgaatgtctctaagccagaaaataaaaatggacttttcagagctagcagagatccactttcgagcctgatgcagcctctctggtgatttataatgca

SEQ ID NO: 65687 - DNA, 1239 bp, Homo sapiens
cagtcaattgctacttcagacccttggtttctggagagaacctgactcattctcactctgctttaatcatcctctgaaagtgggctgtgggcctggagcaagggtgagtaaggacatgtcagcgctcctctcaatccaagggatactaggtgcagctgagttggtagctcacatccctgctgtggctgtaaagggagggaagatggcactttatcatgaacttgcagtaaaggtgaaggacagctcttccaaaagaggggcagctgctaatctcaagatcagattctgtgacactgttgtcactttgctcagtcaggcacagatacagttttatgcattgatgtggttagagcttgccagaaaccaacccaagggtgtgctatcttgctttctttttctttgtcttttggggtaagttacatctaccgtttcagtctatggaagctggcggtcttaagcaaagccacacttacttcctaagctgttcaacaaatcaaaaccctgttcagaaaggcaggaggagccaggtgctgggtggggaagtcttccttcactgcctggctggactcagaagccctccagtgcactgcagcagagaagactttgatctcaaagtaattttcaycttgatctcatctataggccctgaagactcttcctgggtgtctgtcaatgcaaggagtgggccttggcatttgttgtaacgaactgaaaaatgaccacaaatcaccatcttccgtgttgatggggactatttgtttaacggcattgcttaggccattaaaagacccctcgggaatcaggaaggggtgaagatttgaaacattttcatccttggttcaagacaatagaatttgaagatgcctttaccccactgatgtggatatcaagagtatccagggtgagaggtcacagagtcatccgcctgactgcgtctgcatgagcaaagatagacaggatgagactgaaaattcttcgcttcattcatttctgtatttctgggccatgccctctaacaattgcaaagatgaactgcagcgaattggaatgacctaacatttctgtgacatctgattctgttgtacctgaacatcccagagaccacaccgctcaagggaaatgtatatttgaaaaatatcttgtgaatgtctctaagccagaaaataaaaatggacttttcagagctagcagagatccactttcgagcctgatgcagcctctctggtgatttataatgca

SEQ ID NO: 65688 - DNA, 1239 bp, Homo sapiens
cagtcaattgctacttcagacccttggtttctggagagaacctgactcattctcactctgctttaatcatcctctgaaagtgggctgtgggcctggagcaagggtgagtaaggacatgtcagcgctcctctcaatccaagggatactaggtgcagctgagttggtagctcacatccctgctgtggctgtaaagggagggaagatggcactttatcatgaacttgcagtaaaggtgaaggacagctcttccaaaagaggggcagctgctaatctcaagatcagattctgtgacactgttgtcactttgctcagtcaggcacagatacagttttatgcattgatgtggttagagcttgccagaaaccaacccaagggtgtgctatcttgctttctttttctttgtcttttggggtaagttacatctaccgtttcagtctatggaagctggcggtcttaagcaaagccacacttacttcctaagctgttcaacaaatcaaaaccctgttcagaaaggcaggaggagccaggtgctgggtggggaagtcttccttcactgcctggctggactcagaagccctccagtgcactgcagcagagaagactttgatctcaaagtaattttcaccttgatctcatctataggccctgaagactcttcctgggtgtctgtcaatgcaaggagtgggccttggcatttgttgtaacgaactgaaaaatgaccacaaatcaccatcttccgtgttgatggggactatttgtttaacggcattgcttaggccattaaaagacccctcgggaatcaggaaggggtgaagatttgaaacattttcatccttggttcaagacaatagaatttgaagatgcctttaccccactgatgtggatatcaagagtatccagggtgagaggtcacagagtcatccgcctgactgcgtctgcatgagcaaagatagacaggatgagactgaaaaytcttcgcttcattcatttctgtatttctgggccatgccctctaacaattgcaaagatgaactgcagcgaattggaatgacctaacatttctgtgacatctgattctgttgtacctgaacatcccagagaccacaccgctcaagggaaatgtatatttgaaaaatatcttgtgaatgtctctaagccagaaaataaaaatggacttttcagagctagcagagatccactttcgagcctgatgcagcctctctggtgatttataatgca

SEQ ID NO: 65689 - DNA, 1239 bp, Homo sapiens
cagtcaattgctacttcagacccttggtttctggagagaacctgactcattctcactctgctttaatcatcctctgaaagtgggctgtgggcctggagcaagggtgagtaaggacatgtcagcgctcctctcaatccaagggatactaggtgcagctgagttggtagctcacatccctgctgtggctgtaaagggagggaagatggcactttatcatgaacttgcagtaaaggtgaaggacagctcttccaaaagaggggcagctgctaatctcaagatcagattctgtgacactgttgtcactttgctcagtcaggcacagatacagttttatgcattgatgtggttagagcttgccagaaaccaacccaagggtgtgctatcttgctttctttttctttgtcttttggggtaagttacatctaccgtttcagtctatggaagctggcggtcttaagcaaagccacacttacttcctaagctgttcaacaaatcaaaaccctgttcagaaaggcaggaggagccaggtgctgggtggggaagtcttccttcactgcctggctggactcagaagccctccagtgcactgcagcagagaagactttgatctcaaagtaattttcaccttgatctcatctataggccctgaagactcttcctgggtgtctgtcaatgcaaggagtgggccttggcatttgttgtaacgaactgaaaaatgaccacaaatcaccatcttccgtgttgatggggactatttgtttaacggcattgcttaggccattaaaagacccctcgggaatcaggaaggggtgaagatttgaaacattttcatccttggttcaagacaatagaatttgaagatgcctttaccccactgatgtggatatcaagagtatccagggtgagaggtcacagagtcatccgcctgactgcgtctgcatgagcaaagatagacaggatgagactgaaaattcttcgcttcattcatttctgtatttctgggccatgccctctaacaattgcaaagatgaactgcagcgaattggaatgacctaacayttctgtgacatctgattctgttgtacctgaacatcccagagaccacaccgctcaagggaaatgtatatttgaaaaatatcttgtgaatgtctctaagccagaaaataaaaatggacttttcagagctagcagagatccactttcgagcctgatgcagcctctctggtgatttataatgca

SEQ ID NO: 65690 - DNA, 691 bp, Homo sapiens
  misc_feature (1)...(691): n = A,T,C or G
atcccatctcctggtcttcaacaagtggcttctatcttcaaggtgacctcctgggccaggatagctgctggagcttcaggcatttcatcctcatcccaaatagcagcagaaagggagagaggaagagaacttgccctctttttaagtaactttcctgragacacaaccaaacttccacttatatctcattggctagaacttgttcacatggccacatctgaagccaaggaggccaggaaacgggcagtggtcctgtcacaaaggccaaggggagactggacgttggggtaggcaactagctgctctgccacacggagtgtgcccctggctcattccaataacagctaggtattatcattattaatattagctctgcagacctcggcaaagacaagaaaactgcctaggccttgtctgttggtgtaccatttattcagtaaacatgcatggcatctatatgtcagctctcttctagggctgggaatatagaagagatgtgggaagaggcagtatcttgtgatgaagagagtggggtctgaaatacagagcctgcgttagagccccatgttggccactctctgtgtgatcctgagaaatggatgtaactgctgagggctctgatgtctctgtctctaagatgacgaagatgatcagaatgccatcacatgatgattctcnaggtgacatgcat

SEQ ID NO: 65691 - DNA, 762 bp, Homo sapiens
aaatatgcagagtgactggtatttcagaatcctgggccctggaagccacgggaaccatacacgacaagtctcagaagctctgctttcattttttcttgtatgtaagggcagatttcctccctcatgaagctgacatcttttttggatggaagcacagagaccagggaaggctggtaaatgtaataatgtctgcaaagccgtcggagtgccttggaagaaaattcaaggtatttctcttattacagctggtcttccaattcccctgaactctgagaatccatttaagtgattacttcatgaggaggctaacagaaaagcaagactaatatatttcttcacttggcagctcccacacagcaaaggaccctaggtgcacttacaatcactatcatattctcactctttccccctcggttctgcttagaacataatgaactaaatacctgcgatttatctcttaggaagaccgaattttgtaaaccttcctgcaggtggcttgcagcaccccttgtacatatgcataaatgtttactttatggtgtgacattggagaactgtgagaaaggtaagatagggggagtatgtttgccacatcctgaccccaggctcccacttaagagagagggaccataggaaaagagaaaactggaactgtcgaatggtctgggttctctaagtcagacttccttgaggatgctwatttggagtattaagacatgaagtctttggcttaatttccatcctgagccatttattgagagg

SEQ ID NO: 65692 - DNA, 789 bp, Homo sapiens
ataacagtgttggttgttttaatcacaggggcgtagcaactttcatttttaagacttttcaagccagaaattaactcattttgccctgttattcagatttagtcactggcacaatttcattaataagcataataataatggacaaatgccttaactgcttttctgctttgtttcatcctctgtgccaatctggtaaaacctcagtgatatcaaggattgactctaccctggaaattgaagtatttttctcctccaactcctcagtaaaaccaacaatgccgttttcccatcaggtttgttagcaaaatctgaactctacatctaactaaaattgtaattgacagtaggggatttgtattccttcattacctgggagctttccccagcaagaggaaataaaaatcacaaacacctgttaatgccactgcaattctaatcatccctgagtagtatctatcatatcttccccatgctcttcaaggaaagtccttatcctagcacrtgaggctatgtacagtctggtgctcaaatacctctccgacctccaaccccccaccatattgccctactctcagtcactaaagtaccatgatctttctctttttagaatcttgtatgatgttctctctgccaagaatttccctttcatctaggcagttattaactacacatcctttagggattagctttggtgtcatctcctccagaaagttttacctgcaagcttaataacccttcccctacattctgggccatatatcatgctaagtgttcccttaggaccctgtg

SEQ ID NO: 65693 - DNA, 708 bp, Homo sapiens
ctctgcttatgctacaataaatctgctcgtatacaaaagtatacagagggtagtgaggcacctctatcatttcacatacattcagtcccatcctcagaaagcacaactatcttcagtatagctaggctagcttgacctgtggcttgtcctccatttccatagttggcaaatgttagacctgtgtataccaccagcaagtctccttcttccctattgggaagttccacctctagggagattctcattatccttccagcaatctggtttcctttattgccctgccagtccatcagacgtatgtgaatatggcagaagatgaatggagaacagggactatgtgtcccctgcagcaaacttctcagcccctttgcaaattagtggttacaaatggggaggatggagtttgtacaacttcatcagcattggagctctctctttyacccatctaagacaagttgttacttacattcacatcacttctgtgaagtttgaagggattctaaaagaatcaatttaaaataaaaatgaacagttaaataacttgtccaaaagcacatagcacatgagtgaacgtgatgagctttaaatctagatataactgacttcagacgtatattctttatataacaactttattgaggtgtacttgtgcaatacactgcacatacttagtgtgtacatttttgtaagttttggtatgctatacac

SEQ ID NO: 65694 - DNA, 764 bp, Homo sapiens
caggccccttcaccttcaccctgtacttgaatcactagaaccatgattactgtgcctcctgcacccagggtcaccctcccaaccccttcccacaattctgtatgtaagtttcagcattctttgggtgaaaagccaggggggccccttactgttacagatgctattttaaagtccatttctacagcagactgctctaccctgtgcacccctgatcttatgtcaaatgttcttggtgcaaacagaaaggagcttgcaaggggtaccagaagacctgagtttgaactgcattttgcctttactagcactctaaccytgaccaaaccatacaacctctctgagccttaatttcctcatttataaagtggagataaaaatagctgtcctacccagagagagaaaatatgtcaattgtaaggcactactatctaaatttttttgggaagaaatgatccctaatgtaaggaatgaggaaaacccaggtcatggagttaagttcactggagagctggagaaagtagaggctggatgatgccatgccttgcaccttagatcttaacccttctttctgattctctaactgatatcttggcttctacaatagagcttctctgctaaaggatgaaaatattaatattatatattaaaacatttttctttgacctcaatgtttattttttgcctctgagtttaaaagaaattcatacatttttgcgggtccctaaaaatattgtgagcactgagcccggcgcctaccgtgcctcatg

SEQ ID NO: 65695 - DNA, 764 bp, Homo sapiens
caggccccttcaccttcaccctgtacttgaatcactagaaccatgattactgtgcctcctgcacccagggtcaccctcccaaccccttcccacaattctgtatgtaagtttcagcattctttgggtgaaaagccaggggggccccttactgttacagatgctattttaaagtccatttctacagcagactgctctaccctgtgcacccctgatcttatgtcaaatgttcttggtgcaaacagaaaggagcttgcaaggggtaccagaagacctgagtttgaactgcattttgcctttactagcactctaaccctgaccaaaccatacaacctctctgagccttaatttcctcatttataaagtggagataaaaatagctgtcctacccagagagagaaaatatgtcaattgtaaggcactactatctaaatttttttgggaagaaatgatccctaatgtaaggaatgaggaaaacccagstcatggagttaagttcactggagagctggagaaagtagaggctggatgatgccatgccttgcaccttagatcttaacccttctttctgattctctaactgatatcttggcttctacaatagagcttctctgctaaaggatgaaaatattaatattatatattaaaacatttttctttgacctcaatgtttattttttgcctctgagtttaaaagaaattcatacatttttgcgggtccctaaaaatattgtgagcactgagcccggcgcctaccgtgcctcatg

SEQ ID NO: 65696 - DNA, 764 bp, Homo sapiens
caggccccttcaccttcaccctgtacttgaatcactagaaccatgattactgtgcctcctgcacccagggtcaccctcccaaccccttcccacaattctgtatgtaagtttcagcattctttgggtgaaaagccaggggggccccttactgttacagatgctattttaaagtccatttctacagcagactgctctaccctgtgcacccctgatcttatgtcaaatgttcttggtgcaaacagaaaggagcttgcaaggggtaccagaagacctgagtttgaactgcattttgcctttactagcactctaaccctgaccaaaccatacaacctctctgagccttaatttcctcatttataaagtggagataaaaatagctgtcctacccagagagagaaaatatgtcaattgtaaggcactactatctaaatttttttgggaagaaatgatccctaatgtaaggaatgaggaaaacccaggtcwtggagttaagttcactggagagctggagaaagtagaggctggatgatgccatgccttgcaccttagatcttaacccttctttctgattctctaactgatatcttggcttctacaatagagcttctctgctaaaggatgaaaatattaatattatatattaaaacatttttctttgacctcaatgtttattttttgcctctgagtttaaaagaaattcatacatttttgcgggtccctaaaaatattgtgagcactgagcccggcgcctaccgtgcctcatg

SEQ ID NO: 65697 - DNA, 813 bp, Homo sapiens
cctttgctctccaaactctgtcctcctgcattcaaccttgctcacactctcctcctcttcaatccaccctgaatttctgttcctgggctgtcctatcttcatgtcacaggtctcaggacagttttgtttgtcaccaggagaaagaagccaaggtcccctgagctgccggttctccctgcagcaggctttcccagggctctgatcccagggctgagcaaggagctagtggaaggagcctaaggrtatagggagtcgggtgggtggaggccggggcagggaatagaggcctgtcaggccctgtatggggtgggcgagcctgtcctagctcaaagttaagcacagctcctgtgctgattagaaatgggtttggagagtggggttctgaaaacgcatccaagtcaatgcccagcctctaatattatcatcttccccaccacactgggagctgccacctcagccaatgacactgtctcctattcctttctcttcaaccccatcttctgccctgactcaggtctttcatttcccctgttggtcttgcatggaccagctatgttctcctagttctgccctcggacactgtctgacattgccgtggtgtgcttcccctccatctactacccatggcttcctgctgcccagaaacagaatctgggcttggggcacaccatatttctctctcccccatctcgcttttttgtttttctttctttctttcttttttaagagacagggtcttgctcattgtccatgctggagtgcagtggcacaatcatagctcactgtagcctcaaactcttgaactcaagggat

SEQ ID NO: 65698 - DNA, 626 bp, Homo sapiens
tgagcttgctgagtgcaagtcgctttggttcctgctggtgttctggtctagctaatgtacttccttgttaacttccattttcttgggtttaacaactgcttctctgctctgttcaaccagaagagccctaacaaaaatgtctttagggcaggcctgggatactttaagtctttgaggagccatacctacctcgcccaggcctcttcctcccactattaacactgaggcaggtataaggtgggggtgggtgacagcccctaatgacctcaaaatggatacaagatagtcccttcccttctctttcttgagaatagttgttccaacaaccctgatttgtttccggggaatcactcgccatcaccttgtgtggccagaccacgtttgagggctggccagcgagtcactgtgaggaggctcccagagaaaggagccccgtataagggggaacccaccaccctcggcaccccaatcctggctcccctgattcgcaggaggcacatgttcctgccctatcagccccaccctstaccttggtcagccagcccttcacggtgggcttggtgccaccccgaagcagagctggaggcccggtggcctgcaccttcagcaggctctggagtactcgg

SEQ ID NO: 65699 - DNA, 725 bp, Homo sapiens
attccctttttatggctaaataatcttcccttgtatgtacatgccacattttgtttatctacacatacaggtttgttttcactttttgactcttgtgaataagaatgagtgatagtatctggtgtgtgcatacagccattttcttactaaaggccaatagcatcaagcagtctactaatggttgttatttatctgattaggatccagagttccaaaaaggttaattcttwttttttccagtttaatggcagtttttgtggagggattgacttctataactccctattccaatcttctaaaatccactttaaaagaatggtttaaattgtgtgcttgtaggatgaaattgataaacaattattttaccaactttcaaaattacatcatagagataatgtcctttgactattgggtgttcacatatttggcatgttatgaacaactttctggaagataaaggccttttatctcatacttaatattaagacaggaaccagtgtgctagcaatggcttttgggtttgatgtgatatatttgtatgtaatgattttttaaaacttagagagaaaaatcctctcatacaaaacaaaatagtttttactgttatgagaaagtagttattaattacttataaaacatgcaagtatctttatgatatttggtgatttatttttctccagccatcttgtcttgttgttagtggggaaaaaaatagggatgctctt

SEQ ID NO: 65700 - DNA, 723 bp, Homo sapiens
aagggcaggcgggctgttgtggatgccagcctgatctgtggcacagtttgcaagargaggctcgcaccagtgagtggccctagaggatgtgccgacctcccacgcttaactaacagacatggggcaggtgtggttttgaaccacaggaagacagtttacatttcatttatttgttcattcttccaataattgttttcatgataaccttttgttcctgggaactttctctgcttctgtcaagaatgatatgttttaggatttttatgcttcagaatatttatttatttttgagacagggtctcactctgttgccaaggctggcatgcagtggcacaatctcggttcactgcagcctctacctcctgtgctcagtgcctcagcttcccgagtagctgggattacaggggtgcaccaccacatcaggctaatttttgtatttttagagactgggttccaacatgttggccaggctgatctcaaactagactcaagtgatcctcccacctcggcctctcaaagtgctgggattataggcatgagccactgtgtccgtcctagaatactttttttttaatatatatttttttgagatggagtctcactctgtcgcccaggctggagtgcagtggtgcaatctcggctcactgcaacctccacccccagggttccagtgattctcctgcctcagcctccagagtagctgggattacaggcaccagtcac

SEQ ID NO: 65701 - DNA, 710 bp, Homo sapiens
agagagctcgacaggcggctgaatttaatttcacagaagaatgaagaaaactcaggagaatagaaaattaacctaagatcaaaggaggtgagggaaattgccaaacttgtatttctagtagggaccatttttggaatttgttgttgtgtttaactttgagaaatatctatgaaacccaatgaaatacatttaaaaagttagcagaacttaaggagtttcttttaaaagtaaaaatttacattagtagctgattatacacacacacacacacacacacacaccacctaaaaccacaatgtatggtttattaatgtatttatttgataaatatgtattgaatggttattgaattggatcatataaaattaacttttttttttttttttgagacagggtctctcactctgccacccaggctggagtacagtgggatgatcacagctcactgtagccttgatttcctgggctcaagtaatcctcctgtttcagcctcccaagtagctatgaccacaggcatgcaccaccatgccttgctaatgttttctgttttttctagagacagggtcttgctatgttgcccaagctggtctcgaattcctsagcttaagttatccacctgcctctgcctccaaaagtgctgggattacaggcatgagccattgcacacagcctaaaactgactttttttaaggtcaagatgttggtctatc

SEQ ID NO: 65702 - DNA, 696 bp, Homo sapiens
cttgagcccaagaggtaacagtgagctatgattgtaccaatgtattccagcacaagcaacagaatgaggcccccctctaaaaaaaaaaaaaaaaaaagtttcaagtataagttgctttagggactttatatattttgctaggaccaactttgatgttcttaggaggctctgctttaaaaaaaaaaaaatctcattttctaatgccccacaagcatgcyttagggtgctaacccttgagatgcacgtaaaattatctacttggaatgatttggcataggggtagatttaggactcttaatttcctgttagtctaaagtaaacataagtgaaataatttcacagaaacaattacacagctaattgtaatgtctctccagccatccttttcccactgacctttaggggtcttcaggatgactcttcagccttgcagagcatgctggtggcaggctgagcttggcttaatcataaggtgggaacaagtggagtacatgaggcatgttatcaccagtgagaaggagatgtggaggtgacaaaagtgactaacaggattgagctccatggtggggttctgcgatttgttctattcactatggtcatggagcaataaagaactggtcctgaataagcattttaaatgcagcacaccagaccatcgcacagggccaaaagtccagaattgtatctatgtttttt

SEQ ID NO: 65703 - DNA, 696 bp, Homo sapiens
cttgagcccaagaggtaacagtgagctatgattgtaccaatgtattccagcacaagcaacagaatgaggcccccctctaaaaaaaaaaaaaaaaaaagtttcaagtataagttgctttagggactttatatattttgctaggaccaactttgatgttcttaggaggctctgctttaaaaaaaaaaaaatctcattttctaatgccccacaagcatgccttagggtgctaacccttgagatgcacgtaaaattatctacttggaatgatttggcataggggtagatttaggactcttaatttcctgttagtctaaagtaaacataagtgaaataatttcacagaaacaattacacagctaattgtaatgtctctccagccatccttttcccactgacctttaggggtcttcaggatgactcttcagccttgcagagcatgctggtggcaggctgagcttggcttaatcataaggtgggaacaagtggagtacatgaggcatgttwtcaccagtgagaaggagatgtggaggtgacaaaagtgactaacaggattgagctccatggtggggttctgcgatttgttctattcactatggtcatggagcaataaagaactggtcctgaataagcattttaaatgcagcacaccagaccatcgcacagggccaaaagtccagaattgtatctatgtttttt

SEQ ID NO: 65704 - DNA, 641 bp, Homo sapiens
attgtgcctttgcttacatttggacttccctcttctggaggagctcctgcctgctccttctctcaaccccatccaaattctgcagtactttaaatctgcattcataatctgtgtgatccactgggtctctcccctggcccacaagcatttccctccactttgcattgtttaaacacttgctgtttgggatgtgatagcagagcaactataactgttagggtttccgttcttatctttaaggttacatttttttatgacagctgtaactgtcaattacaacaattaattgacataacacatatttgatacgttttcacatatatatgcacctgtgaaaccatcagcacagtcaagataaagaacatatccatcacttccaaaygttttcccatacttcttcctccctctgacctttccttactgcctactgcctcttccatttctttttttctttttttttttgagatggagttttgctcttgtcactcaggctggagcgcagtgacgcaatcttggctcactaacttccacctcctgggttcaagtgattctcttgcctcagcctcccaagtagctgcaattacaggtgcccaccaccatgccaagctaatttttgtatatttagtagagacagggtttcg

SEQ ID NO: 65705 - DNA, 1611 bp, Homo sapiens
ctgttcagggagtgcagccgtcccttcaccacaaggtcattccaaggacgctcagagaaagctcacctctagcatctggcacaacagggggcctggcaccttccctggaatgcctctcacagggcaaggctcctgcctgacctgggcctggctcacagaaatgcgctaagtgtggatgaatggatgagaggaygccaggggagataggggcagcaatgccaggggagacaggggcagcaacgccaggggagacaggggcagcagtgctaggagagacagggcagcaacggcccctgcccctgagaaactgaaagtccaagggggagatgatgcggagcgagacaggtcctattccctgagctctgggctggagcagagctgagcacaagggactgtggtttgctaggaaggaagtcagggagggcttcccagaggagggcaccccagaggagggcatattgagagggcctttgggggatgcagaggagtctaagacagacgaggtggaaatgagccttccaaggagggtgaagcatgtgaggttgggacaggagaagggcccaggaattttgggagttggcctctttgctgggagcagtggggatccacgaagacttttaagcaggggcataacgtagtgggagctggctttttatacctcacttcggggtagaggatgcactgcccaggctggtggtggagtggtgaggatctgctgccggctgtaaggcctaacgtgcggggtctgcccgagacgcctccctctgccatcctgtagaccccacctgagtagctccatggggacttcccagggcttggccaagtttccagaacactctggaggcttctaggtcagaggctccatctcccaaccccaacgatgccctcgtttctcagtggtacccaacccccaccagagcaagaatcctcaaggctgggccatatggcagatggggcactgcgagaaagggagcgggagggagaacgcgttgggggcagtcttggaaggcaggtcgtggcttctacctgcatgtccccgagcccatgcagagcctgacatggaggagcccctcaaccaacttgtgaacgtcagggtgagcacacctggtgacgggcactgtcagggcgcgggcccacatccagagaggaaaaaacatcagggctgccccctctgccctgcagagccccttccactgcccggctatctcctcctctcattggtcaccctctttctagctgtttctgcctccagggagccttctagagcccccctgctgtgggcttcttgtgccccacatctccccggctggcttcgcacgtcatgaatgaacgaatggggcaatgacttgcttatttctgtctcatccaccggacctgggtctgtctgttcacttctgtgtcccagtgtgtggagggatgcctgccccacatagggccttgacaaacttttgttgcataaaggaatgagtgttcaacaaagatgtaggtacaaacagactgtggctcacgcctgcactgtggttaaaatcgccaggtgacaccctggtggcgggagaccacatcctgcctcgcacaggctcccagccaccaagccgacgctctgggttaagt

SEQ ID NO: 65706 - DNA, 1611 bp, Homo sapiens
ctgttcagggagtgcagccgtcccttcaccacaaggtcattccaaggacgctcagagaaagctcacctctagcatctggcacaacagggggcctggcaccttccctggaatgcctctcacagggcaaggctcctgcctgacctgggcctggctcacagaaatgcgctaagtgtggatgaatggatgagaggacgccaggggagataggggcagcaatgccaggggagacaggggcagcaacgccaggggagacaggggcagcagtgctaggagagacagggcagcaacggcccctgcccctgagaaactgaaagtccaagggggagatgatgcggagcgagacaggtcctattccctgagctctgggctggagcagagctgagcacaagggactgtggtttgctaggaaggaagtcagggagggcttcccagaggagggcaccccagaggagggcatattgagagggcctttgggggatgcagaggagtctaagacagacgaggtggaaatgagccttccarggagggtgaagcatgtgaggttgggacaggagaagggcccaggaattttgggagttggcctctttgctgggagcagtggggatccacgaagacttttaagcaggggcataacgtagtgggagctggctttttatacctcacttcggggtagaggatgcactgcccaggctggtggtggagtggtgaggatctgctgccggctgtaaggcctaacgtgcggggtctgcccgagacgcctccctctgccatcctgtagaccccacctgagtagctccatggggacttcccagggcttggccaagtttccagaacactctggaggcttctaggtcagaggctccatctcccaaccccaacgatgccctcgtttctcagtggtacccaacccccaccagagcaagaatcctcaaggctgggccatatggcagatggggcactgcgagaaagggagcgggagggagaacgcgttgggggcagtcttggaaggcaggtcgtggcttctacctgcatgtccccgagcccatgcagagcctgacatggaggagcccctcaaccaacttgtgaacgtcagggtgagcacacctggtgacgggcactgtcagggcgcgggcccacatccagagaggaaaaaacatcagggctgccccctctgccctgcagagccccttccactgcccggctatctcctcctctcattggtcaccctctttctagctgtttctgcctccagggagccttctagagcccccctgctgtgggcttcttgtgccccacatctccccggctggcttcgcacgtcatgaatgaacgaatggggcaatgacttgcttatttctgtctcatccaccggacctgggtctgtctgttcacttctgtgtcccagtgtgtggagggatgcctgccccacatagggccttgacaaacttttgttgcataaaggaatgagtgttcaacaaagatgtaggtacaaacagactgtggctcacgcctgcactgtggttaaaatcgccaggtgacaccctggtggcgggagaccacatcctgcctcgcacaggctcccagccaccaagccgacgctctgggttaagt

SEQ ID NO: 65707 - DNA, 647 bp, Homo sapiens
acctgcctcggcctcccaaagtgctgggattacatgcgtgaaccrctgcgcccccgccagtttctttttatgttaaaagtggtttcaattataaaatagatggccctctcttttgaagtgcaaagcaggtagtcctcccgttggggttccccagccactcccaaagcccagcgccagtcagtttctcctgtgatccccggaagcgtctaggcatgtgcaaacagatcaataggaaaggggatcttgtatatattctttttcactttacatacatgagttcgttttacacacactgttctgcaactcctttttgttaacctcacgatgtaggagatattccaagcgtaattttccctgttttatacaagagcctaggggagtgaggctttggggagcttctcctcctggcttctcctcatggctttcttcctcctgcccctcctccacgtccccagccccccatttctgccttccttgctgctccacttggcctagccatgacctctgtgtggtcgtcactgtcttgtgttcttgcttctgtcgtggccgccagagtgaccgcactgcagctttttaaagctctgaccttgtctttcgtcttctcagagcctgtctgaggctccccaaagacattgcccagcggcctg

SEQ ID NO: 65708 - DNA, 1689 bp, Homo sapiens
aaaaaattaaaaagacaaaaaaaagaattgttggcatgtgtcaggcgggcgtctggtaccctgcctggcctctctcagcgtgagacctggactgagcctgctaacgattctgttcctcagtttccccaaatagaaaattctaagattggtcagatgatcaaattatctatgttttcgatcttgatgctatagagaacagccatgttcccctgataacaagaaaaagacgtcccacggtcgaggtatccttgaccaactccccatccattcatttgttcaccgtccacaacccatctgatcaggaagcatttccaggcacctgcggagcactaggcagtgtgcggaagctgcagggcaggcaggacgagggggcagtctggaggggggtggacacacagctgtccccagggagcccagcgcggtgccggtcacatgccgtgggagtggagggtcttgagcagacgcctcccttggagaagagccaccatctcaccttcccacgcaacaaattatctattaccagcacccgatgaggccgtccctcccaaattccacagtgcccaccactcgcactaccccccccgtgccacagaagcagtgtcagcagcctcgccacggtyttcacgtcatgcagaaatggtcattccatgttctatggccaccagattctgctgagagtgtcgggatccttgactgcccagccacaccttgtgtgtgtctggtgtagtgtgtagtttacgaaacaaacggaaaagctcaaagacagcgatccaagacatgatcagcaatttggtcccaaattaggagaggaggaagaggagtatcaattttgtcaccaaaatgttaaaaaaaatgtccttggcgctctttttagctttcccgtttactaccagtccagacatgcaaaaaaaccttgtttattgaaaaataaacaacaagggctagacttgtgtctgcgtctttgattttgcgtgtgccaggctacactggtcccctcccataggggcctcaggccccgggcagggtgggcaggggttcatgctttccagggccctgctttggcctaacacccagcacctctcatgtggccaggaggccgcagggctaaggggtgagcccgcccgggcctgtgcacaccccttctagaccacactcttggaacctgggagtctcctgtccagagggtcctgagaagacctccaaggcccacatggaccttgtccctgtctgtttcccaaggtggctcattgtgggtggcctggatggagctgggacatgaaggtgacaggtgcagggaggggggtccatgtgggagcatgagagttaccgtgctcagggccagttccccccatgctctgaggtccagcaaagaacttgggagtcaaagtctcccacgctggtgtggggccttccggggcttagtgaaggggcagtcgcccaagagaggggctaggacacagtctatgtgctacttagtgagggggacttgcagcctttcaacacttcccatggcaggtggacgggcttccctgggctcctcaggcaggccctgcacatccctcccaggcccagccccggccacacgcaagtgcgctcagcgcaggattccagtcccagaatgccagagccagagcggccagctgaacccaggacagaggagcccaggtcttattccttggccctggtggc

SEQ ID NO: 65709 - DNA, 1630 bp, Homo sapiens
tctggcttccaggccccccctgcaatttaggggaatggctgggactggctttctgcaagtgctaattttcagctgttgagttcatgtggaacctaaaattaattagctcctacatgagctccagcctgagtgcataaaaaggatcctcattaggaaaacttcaccctttggttgacaggaggctggcagctggaagtcagatctatagagcagtaacggtgcagtggctcggccaggagaagtcccacttgcccctaacccttcaggtcatgcctgcctccccgagaaaactgggtgcttccaaagcccattaccaccccgcaggtgttcctgagtgtggacctaatcgcaggctttgaggaaccctggcctatgcagtaggaagccctagaggatgtcatttggacgggatgtcagagaaggcccatttaaggtgacttaggtagtgacatttaaggaggaacccccagtaggagttagccaagcaggggacagagggaacagctttccaggcgggggaacaacccttgcaartaccatgagttgaaaaagagcttggcagagagccagggtgtctggagcacagagaatgcagcagagtggtggagacctgaaggtggcaagggacagtctagaccgggctttggaggccagcaggagcgtttgatctttattctaagaactgtagggatctagaagggtttgggcagggagaagactggaccaggcaccttccaaaaagactccctcccccaatgctctctccaaagagggaagaatccccccagccccttccccacccgccgacagcatctagcgccactgccatcgtcactgtggataattgctaggtgtgccgggcaagtgttttctcttctgctgagccagcggcgggcaggcgataatcacagctttcaccatcctccctccagccagcctccacctccctatcccccgtcctcatatcctttatttggcagagccctgaggaggctgcaaaaaggctcaggacccaagaactgagagggtccttggaggctgctgaagaggtgaaaggcatcaggccagtctttccaaacataataataaataatgttgctgtcgtttgtaataagaatgatgaggagccagcatttgccaagcctttcctatgctcaggcataattgcttgaatttcctcattgaatcttatctctctctctgtgtgtgtgtgtgtgtgtgtgtgtgtgtgtgtgacggagtttcactcttgttgccgatgctggagtgcagtgtgtgtgtgtgtgtgtgtgtgtgtgtgtgtgacggagtttcgctcttgttgccgacgctggagtgcagtgacgcgatgttggctcgctgcaacctccacctcctggttcaagcgattctcctgcctcagcctcccaagtagttgggattacaggcatgcgtcaccacgcctggctaatttgaactcctgacctcaggtgatccacctgccttggtctcccaaagtgctgagattataggcatgagccaccacgcgtggtctaatctccttttttaatttgcaattttttgggttcatagtaggtgtatatatttatggggtacatgagatgttttgatacaggcatgcaatgcgtga

SEQ ID NO: 65710 - DNA, 986 bp, Homo sapiens
ttcccccgccatgatctctgagtcaagcaggaagatggacagactcttaggaggcacctgtgctgttgctcgcaagtggactttacagcaggatgacctggtttcgaatgactgctgtgtgaatgggagcccagtgacttaacctctctgtgcctcagtctcctcatgtgtaaatggggtgtaaccattgtgaagatgaatgagttcgtgtacataagcggcatttagaaaagtctcatttggctaacaaggtgaaagcccatctctactaaaaatacaaaaatttagccgggcgtgatggcgggtacccgtagtcccagctactcaggaggctgaggcaggagaatggcgcaaacctgggaggtggatcttgcagtgagccgagatcgtgccactgcactccagcctgggtgacagagcaagactccacctcaaaaagaaaaaaaaaagaaaaagaaatagaaaaagaaagaaaaccagattaaagcaaagatccagcaagagttagacggtatggatggtgtggcttctatcttctttcttttttaaaaaaattccaactggaaatcatggcactgaaatcacagtgaggagttgaggctgtgacgttgttgtgggggcctcaggcagctgtgtcaattactccaggaagttcaccgggagtcaaggctttcgagccatgccctgccaggagagctcaccagcttgagagcaggacaggtggtttcgggttgattcccacacgaatggggaagtccccagccccatcttcctttcttcctaggcatccaggggggtgatggtggtgggaggatccccctggctccctcctcctcctctcctttcttctagatgaagtacccctgggctccaycccaggttccctgtctaactccactccccacagacttggcccagccctgccccaaccccagcttccaagaccctcaataagctgatggctctcaaatccctatttccagcct

SEQ ID NO: 65711 - DNA, 633 bp, Homo sapiens
ttcttgtgccttcagagggagcatagtcctgccaaccgcttgatcttgaacttctagcctccagcactgtgggataataaatgtctgctgtttaaggcgcttcatttttgtgactttttatggcagccctagcaaactaataacgrccctagagccatcgtttttccttggtgccttctggtaacagaagactctagataatgccccttgttaaaaggaatagcttatttacttcatttccttttcaaagagataatagcacctattgtgatatgggcagctgcacctacataaatgaagatttttttaaaaaaattgtaatagccccgacccgtgtcatgaacaaacaatgttccaatgagctttctcatgttgcctccaaagtctagaaggcaaatatcattgttcccactttacagatgcggcaaacaaggctctcattagacagcagtgactgggccatggcagctctttcgccgtacctagatgtcagggtatctccctactaggttcccccacagccactccctcctgctgatttgggtctagtgcagggggcaaagaggaaggctggagaaccacatcatgggcacctggctggtcatcctatgtattgctagcactaggcatggg

SEQ ID NO: 65712 - DNA, 511 bp, Homo sapiens
tgactaatttcacagttcacatggccctccaggtttcccttggcactcatcatgctagggacaaatcttcccacctcagctttgacccaactgcaaatgtcactttccattcctcagttcctatctttgtcagtctagcctggcccaggcattcaccaaagctgggtattcactgggtcaaaaatgacaacctcaaattcagtccttacagataccatgtgaccatgaagtaaggggacatgtttccagaaacctctgkggaaagacactcttttccacttcacctctgctctgccagccttttccgtagaaactagctgaggctaggcgcggtggctcaggcctgtaatcccagcacttttggaggccgaggcgggcagatcacgaggtcaggagttcgagaccagcctggtcaatatggtgaaaccccgtctctaccaaaaacacaaaaattagctgggcggggtgaagcgcgcctgtagtcccagctgccctggaggctgaggcagga

SEQ ID NO: 65713 - DNA, 754 bp, Homo sapiens
gctgaacagtgtcttggtatgtagagaagtagtagcctctgctgtctatcctttgtttatgggatatagaggggaggcggggaaaactcatgaatcaatcagttgttacagaacagcattccaatgagttgtgtaaaagaattggaaacagattgaagttccttaattcatgaatctctaaaagtggttggggacaagtgtgctttgctcttgccaaagtgtagtgcatgaaagatagtgtgtcattttactgacccatatccaccctcaaattaagttactcattgtgctctcatcagattttaaaagaraaatgcaaaacatggatattagtagaaatgccacaaaatacaataatcagataaaacagtcttaagaagaacactgttttgtgtgtgtgtttgtgtgtagaagtatgagtacatatgtgtttgtatttttgcatggacatacatttatttgtgtatagtgagtatttatatgaaggtacataacaaaatgaactatggttaaacatatttatgccactagtgggtagtgttagtggagactgtcagaattaacttcataggatttctcagtgcaaaaaaatgtcatgataatgtcatgtctgcctttctcaaagataaaggtactttgattaaccctaagctccctttttttgttttaagagacaggatctggttttatcacccaggctggagtgcagtggtgcaatcatagctcatttcagttacggactcctggcctcaag

SEQ ID NO: 65714 - DNA, 797 bp, Homo sapiens
tatttcaatttttaagagtaggtttcttttccaattaacctttgtacactgttttgtgaattatactataaaatatgctcaaatkgccctcaatcaatatttggtactgataaataataaaatattttctgagtaacaagtcattttcaaaattctcattttcattacataatatttataatacaataattctcttaggtggatgtgactgctagatattcttctccggttctgtgtttgggcacagcttcaactgactcagggattcttagcctgcctagccataagactcccctggaaactgattatgcatacagattccaggcctcacccctccaccccagacctgctcagttacaatctctgggtgacttgtatcatcagacaagtctgagaaacttgaaactagtgaggctgcactgggaatttgatcaatgcgtaattgcatgttggtgtataggaaagatttatggatgtggattgaattgatagtgttcatttacttttatcactagtcaaacatcataagagaaaactgctctcctactttctttaaattttagcttctatgagacttcagttgaggtaatataaaaattattttttgagcactaccatgtacaaagcactattctaatgtttttcatgtatctattactattaatatagagagacgaaataatttgcccagagccaaataagtaacatatgggaaaacttggacttgaacctgagaaatcagatttcagaatctacacaattaacccctgcaatatattgcctatagccaccaaatc

SEQ ID NO: 65715 - DNA, 1430 bp, Homo sapiens
ataagacatgrcagagagatttgggggccttggtccaggactatggtattggggctggggctgtactttagctgtctgtagactcagggtcgtatggaaacctggtatgatggtagatgcattcccctcttttgaggagaatttattggagcagaaaccttgataacatcattgggtcacacatggggttaggaatactcttcacatgcagtctggtatggtaaagtggcaagaaccctaactgggaataataagacctaggttcaagtcccagttctcttacctagagctggatcgtaatctataagctgattgagtacctcctatgtgcaaagagggtataagaattggacttacaaaacttctttcctgatcccaagagcccatgatgaagtttcaaggcaaagcttaaagggattaaaaaggaggaaaaattaagtgattcagtaactactattaaaacaacttaattgcaggaattgggatactcataattacatctctctcttttcttaaaaaataggtactctatagctccttacttggagctagatacttagcaaagcccttgataaatattaattgattgactaaggtctgacaatgaaaagtaagccatttctgagggccttggtgaaatagttttgcatcacttgacaaaataaaactcccttagctcttaaaattatatagtgctttaagatccttggagggagatattgaagtaaatgcagaatgccatcattagtctgatgcatgccattgggaaacccttgtcaccttatgagatgtgaactgcctgtagcttcagtccaggccatgtgttatagagaaaagtgccctggattatgagtcagaagacctgggttctactctcacctctgctacttaccaacagggtaaatttgagggagtcagcctttcagttgcctcatctttaaagagaaagtaatatccactctgtgttgatacatagaacaggaaatttccaaagcaaagcttaaagtagaatgtgctcttaaccacaaaaacactttcctcggaggcattaagtctcctgcgtccaggtaggtcctgaagtatccctgccttgcagatgaagtaactgagacctacaaaggttatattttgagctgatcttgtctttgtttcagagaatgatctttactcaaatgtccccttctctatgaccgctctatttaaaatggccctatctttccctctatacaaacccctgtcccccttccctgctttatttttctctgtggcatttgcaacatctaacatactacatatacttagagatggcttatctactgaacattgccttatggtacaatttctgctggcatttcaagagcagaggaatgtcgtggctagagtgagccttggacattatgcatcttgggtcttgccttctggctaaaaag

SEQ ID NO: 65716 - DNA, 1430 bp, Homo sapiens
ataagacatgacagagagatttgggggccttggtccaggactrtggtattggggctggggctgtactttagctgtctgtagactcagggtcgtatggaaacctggtatgatggtagatgcattcccctcttttgaggagaatttattggagcagaaaccttgataacatcattgggtcacacatggggttaggaatactcttcacatgcagtctggtatggtaaagtggcaagaaccctaactgggaataataagacctaggttcaagtcccagttctcttacctagagctggatcgtaatctataagctgattgagtacctcctatgtgcaaagagggtataagaattggacttacaaaacttctttcctgatcccaagagcccatgatgaagtttcaaggcaaagcttaaagggattaaaaaggaggaaaaattaagtgattcagtaactactattaaaacaacttaattgcaggaattgggatactcataattacatctctctcttttcttaaaaaataggtactctatagctccttacttggagctagatacttagcaaagcccttgataaatattaattgattgactaaggtctgacaatgaaaagtaagccatttctgagggccttggtgaaatagttttgcatcacttgacaaaataaaactcccttagctcttaaaattatatagtgctttaagatccttggagggagatattgaagtaaatgcagaatgccatcattagtctgatgcatgccattgggaaacccttgtcaccttatgagatgtgaactgcctgtagcttcagtccaggccatgtgttatagagaaaagtgccctggattatgagtcagaagacctgggttctactctcacctctgctacttaccaacagggtaaatttgagggagtcagcctttcagttgcctcatctttaaagagaaagtaatatccactctgtgttgatacatagaacaggaaatttccaaagcaaagcttaaagtagaatgtgctcttaaccacaaaaacactttcctcggaggcattaagtctcctgcgtccaggtaggtcctgaagtatccctgccttgcagatgaagtaactgagacctacaaaggttatattttgagctgatcttgtctttgtttcagagaatgatctttactcaaatgtccccttctctatgaccgctctatttaaaatggccctatctttccctctatacaaacccctgtcccccttccctgctttatttttctctgtggcatttgcaacatctaacatactacatatacttagagatggcttatctactgaacattgccttatggtacaatttctgctggcatttcaagagcagaggaatgtcgtggctagagtgagccttggacattatgcatcttgggtcttgccttctggctaaaaag

SEQ ID NO: 65717 - DNA, 1430 bp, Homo sapiens
ataagacatgacagagagatttgggggccttggtccaggactatggtattggggctggggctgtactttagctgtctgtagactcagggtcgtatggaaacctggtatgatggtagatgcattcccctcttttgaggagartttattggagcagaaaccttgataacatcattgggtcacacatggggttaggaatactcttcacatgcagtctggtatggtaaagtggcaagaaccctaactgggaataataagacctaggttcaagtcccagttctcttacctagagctggatcgtaatctataagctgattgagtacctcctatgtgcaaagagggtataagaattggacttacaaaacttctttcctgatcccaagagcccatgatgaagtttcaaggcaaagcttaaagggattaaaaaggaggaaaaattaagtgattcagtaactactattaaaacaacttaattgcaggaattgggatactcataattacatctctctcttttcttaaaaaataggtactctatagctccttacttggagctagatacttagcaaagcccttgataaatattaattgattgactaaggtctgacaatgaaaagtaagccatttctgagggccttggtgaaatagttttgcatcacttgacaaaataaaactcccttagctcttaaaattatatagtgctttaagatccttggagggagatattgaagtaaatgcagaatgccatcattagtctgatgcatgccattgggaaacccttgtcaccttatgagatgtgaactgcctgtagcttcagtccaggccatgtgttatagagaaaagtgccctggattatgagtcagaagacctgggttctactctcacctctgctacttaccaacagggtaaatttgagggagtcagcctttcagttgcctcatctttaaagagaaagtaatatccactctgtgttgatacatagaacaggaaatttccaaagcaaagcttaaagtagaatgtgctcttaaccacaaaaacactttcctcggaggcattaagtctcctgcgtccaggtaggtcctgaagtatccctgccttgcagatgaagtaactgagacctacaaaggttatattttgagctgatcttgtctttgtttcagagaatgatctttactcaaatgtccccttctctatgaccgctctatttaaaatggccctatctttccctctatacaaacccctgtcccccttccctgctttatttttctctgtggcatttgcaacatctaacatactacatatacttagagatggcttatctactgaacattgccttatggtacaatttctgctggcatttcaagagcagaggaatgtcgtggctagagtgagccttggacattatgcatcttgggtcttgccttctggctaaaaag

SEQ ID NO: 65718 - DNA, 1430 bp, Homo sapiens
ataagacatgacagagagatttgggggccttggtccaggactatggtattggggctggggctgtactttagctgtctgtagactcagggtcgtatggaaacctggtatgatggtagatgcattcccctcttttgaggagaatttattggagcagaaaccttgataacatcattgggtcacacatggggttaggaatactcttcacatgcagtctggtatggtaaagtggcaagaaccctaactgggaataataagacctaggttcaagtcccagttctcttacctagagctggatcrtaatctataagctgattgagtacctcctatgtgcaaagagggtataagaattggacttacaaaacttctttcctgatcccaagagcccatgatgaagtttcaaggcaaagcttaaagggattaaaaaggaggaaaaattaagtgattcagtaactactattaaaacaacttaattgcaggaattgggatactcataattacatctctctcttttcttaaaaaataggtactctatagctccttacttggagctagatacttagcaaagcccttgataaatattaattgattgactaaggtctgacaatgaaaagtaagccatttctgagggccttggtgaaatagttttgcatcacttgacaaaataaaactcccttagctcttaaaattatatagtgctttaagatccttggagggagatattgaagtaaatgcagaatgccatcattagtctgatgcatgccattgggaaacccttgtcaccttatgagatgtgaactgcctgtagcttcagtccaggccatgtgttatagagaaaagtgccctggattatgagtcagaagacctgggttctactctcacctctgctacttaccaacagggtaaatttgagggagtcagcctttcagttgcctcatctttaaagagaaagtaatatccactctgtgttgatacatagaacaggaaatttccaaagcaaagcttaaagtagaatgtgctcttaaccacaaaaacactttcctcggaggcattaagtctcctgcgtccaggtaggtcctgaagtatccctgccttgcagatgaagtaactgagacctacaaaggttatattttgagctgatcttgtctttgtttcagagaatgatctttactcaaatgtccccttctctatgaccgctctatttaaaatggccctatctttccctctatacaaacccctgtcccccttccctgctttatttttctctgtggcatttgcaacatctaacatactacatatacttagagatggcttatctactgaacattgccttatggtacaatttctgctggcatttcaagagcagaggaatgtcgtggctagagtgagccttggacattatgcatcttgggtcttgccttctggctaaaaag

SEQ ID NO: 65719 - DNA, 526 bp, Homo sapiens
ggggggctgaccgggtggatagaatagaagcaaaactcaacgtataacatttttattttaaaaatccatgaattaaaaataataatctacctgtgaattattacttattaaaaattaaaaattttaaatcatacaccttgcacatagtgtttacagccaaactgcatgtgtttaaatttctgcctcacttactacataagtgaattttggcaaatttcttaacccctytctttttttgttgatgagttaataaatacaaaggaatcaagcctaaaacacagtgagttctacatgactgtagtctgttattaatactgcatttaacagtaataattttgaagaacactttaaccctttagtgataagatttcctgaattcttctgatattcctaacttttttccccccaaaggtggtaaaatgaatgccaagagaaatacagtaatatcaaacagcactgagccagggccaggtacaaatacaggagccgacacttgggcattgctagatcattccatgtcacacat

SEQ ID NO: 65720 - DNA, 504 bp, Homo sapiens
ctaacacaataattgttacatataagaaattctttaaatatatgttaaatgaatatattcaacagtaagctgagggtataaagtataattaccacaaaaatgataggtaaagctctttttatattatctaggttttggcataagtacactacttctttacttcttttttttttttttttttttttttgagacagagtcttgctctgtctccccggctgaagtacagcagcccgatctcagctcccygcaacctctgcctcctgggttcaagcagttctccctgcctcatcttcctgagtagtagctgggattacaggcgcctaccaccacacacagctaattttcatattttttagtagagatggggtttcactgtgttggccaggctggtcttgaactcctgacctcaggtgatctgccaacctcggcttcccaaaatgctgggattacaggcatagctcactacttcttgacaaggaaatgtcttgtttccaaaattatacc

SEQ ID NO: 65721 - DNA, 2149 bp, Homo sapiens
tggtgctgtctgcagtgacatcttctggccatttgtggaagaagttttctctgaggcatcaccgattcttgagaagaggaatttaggaatgttgagttgaggaggtacaccgagactggatatgaagttgtgattgtggtacatcacttaacacagtcccaaaggaaagacccccactttatctgtgagtgttagttttccttcagtgcctgttgccagtcagctcagtgcatcctgctattgacacgatacccggaccatcctcttccttccatcttcactgtccccacggtagtgcgggctgagttgtaccatggtagcttcttggtactttttgttattgttgttgttttgagatggagtcttgctctgttgcccaggctggagtgcaatggtgtgatctcggctcactgcaacctctgcctcccaggttcaagtgattctcctgcctcagcctcaccagtagctgggattacaggcacctgccaccacactcagctaatttttgtatttttagtagagaygcagtttcaccatgttggccagactggtctcgaactcctgaactcaggcaacccaccctccttggcctcccaaagtgctgggattacaggcgcaagcctggcaaaaatgaattatttttaaagttgaaacagaataccttcctgtgattaaaaaaaaccaagcagtctaaaaatattacaattatacaattaaatctctcttttgtttctttttctttttttttttttttttgacttgttgcccaggctggagtgcaatggcgcgatctcggctcactgcaacctccgcctcctgggttcaagcaattctcctgcttcagcctcccaagtagctgggattacaggcatgtgccaccacgcctggctaatttttgtatttttagtagagacggggttttaccatgttggtcagcctggtctcaagctcctgacctcaggtgatccactcacctcggcctcccaaagtgctggaattacaggcatgagccaccgtgcccagcctaaatctcttttcactgaggcttctaatatgcattttcattatatcatttcctgtaacagagcctctgttgaccttccatgggctgcaggaaacggtctgaattcctcagctgcatttaaagtcctccagagtcagactctaccctgcccagccactcctcatcaccatttcccccgagcaccaacactgtgccagctgctctggccttcatgcaggcctctccctgcctgtcctaggaccaccttctttcagcttccttgccaggacccaccctttccaaaactccttttctgtcttcctcttcttggagccctctgccctcttctaaatcctgctagcttttacagcttgccttgaatattgggccacatattgtcttatactgcttagttattgcttgtgtccctagttaaacacagaatagtgttgggtggggcaggggctgctgggtggggaggagacattcatttcttctgtgtctctcttaccctgggcttcccttgccattgattcaggcatgagtatcccctttgcttcatacctgtcataatttttcttggaccctcctcctctgttaatacctcactttgcatgcaatcgatttcattcttttctatctagaaattatctcaagaggccatcgggtccagcttctgctttcaggcaagtaaagtgttaccattcccattttacaaaggatgcagacactctgaaataaaggctattaggaggatgggggcacatcagagccaccatatcccatcctatcctagaggaattgaatgtgagtagaagtgaacagattataaatagacctagatagtgtcctccttctcttcttttcttttctgttgcctgagagtaacctctggggtggagcccagggtagaggaggaaggctccttttcaaaccttcagttaaggagttaaggagataggtgatgtcctggaggcttgcttagtccagttccccagggcaagatatctaacaggaaattggggcagaagctctagtttagaggaatagatgagcatttgcctggagtattccccatgttagaaatgtactggggacatagaatggtgggaaggaagcagaatgagaatgagtgttgttggttga

SEQ ID NO: 65722 - DNA, 981 bp, Homo sapiens
tttaccttcgtatggtttccctcctaaaatctcataatcccagtttaatcgtgatgaaataatcagacaaattctgtctgagggatattctgcaaaatacctgatgagcactcctcaaattatcaagctcttaaaaagaaaaaagtctgagaaacagtcatagtcaagatgagcgtaaggaaacatgacaactaaatmttggaaaggatttacattttacctaacattttttttcttttccaagattttccaagattcttacaagtcaatcaaatttggtcaaaaaaaatttggtcaaaatcattcaacaagtgtttgggaggttccaaacattcccacatcttcctcccttcttctgagcctgcctgttacccagttcataagtcacttccacattttcaagcatctttagagcagtaccaccccactactttggtacaaattaactgtattagtccatcctcacactgctataaagagttgcccaagactgagtaatttataaagaaagaggtttaattgactcacagttcctcatgtctgaggagccctcaggaaacttacaatcatgatggaaggggaagaggtacatcttacatggtggcaggcaagagagagcaagtttgtgaaagataaactgtcagacacttataaaaccatcagatcttgtgagaactcacttcctgttatgaaaagagcatggaggacactgtctccatgatccaatcacctcccaccagacctctccattgacacatggggattatgaggattataagtcaagatgagattggggtgaggacacaaagcctttacaatatcagcgtgctttatccctttatagccactgtagtcttttacacagcagtattttaaagtatgtgcttggtttaaatggataccaggtcttatatactggaaatcaaaatcttcatatgattgagctaaaagagaccctagagggcatgagactaaaaacaa

SEQ ID NO: 65723 - DNA, 981 bp, Homo sapiens
tttaccttcgtatggtttccctcctaaaatctcataatcccagtttaatcgtgatgaaataatcagacaaattctgtctgagggatattctgcaaaatacctgatgagcactcctcaaattatcaagctcttaaaaagaaaaaagtctgagaaacagtcatagtcaagatgagcgtaaggaaacatgacaactaaatcttggaaaggatttacattttacctaacattttttttcttttccaagattttccaagattcttacaagtcaatcaaatttggtcaaaaaaaatttggtcaaaatcattcaacaagtgtttgggaggttccaaacattcccacatcttcctcccttcttctgagcctgcctgttacccagttcataagtcacttccacattttcaagcatctttagagcagtaccaccccactactttggtacmaattaactgtattagtccatcctcacactgctataaagagttgcccaagactgagtaatttataaagaaagaggtttaattgactcacagttcctcatgtctgaggagccctcaggaaacttacaatcatgatggaaggggaagaggtacatcttacatggtggcaggcaagagagagcaagtttgtgaaagataaactgtcagacacttataaaaccatcagatcttgtgagaactcacttcctgttatgaaaagagcatggaggacactgtctccatgatccaatcacctcccaccagacctctccattgacacatggggattatgaggattataagtcaagatgagattggggtgaggacacaaagcctttacaatatcagcgtgctttatccctttatagccactgtagtcttttacacagcagtattttaaagtatgtgcttggtttaaatggataccaggtcttatatactggaaatcaaaatcttcatatgattgagctaaaagagaccctagagggcatgagactaaaaacaa

SEQ ID NO: 65724 - DNA, 1559 bp, Homo sapiens
ttcttaaccatgtggaaggagatatttttaaaatgaatatcgaaagatgccctaaacttcagtgacagcaaacattgatttatagcaaattccccagcaaaacaagtctgaaacaaacagattaattttagaacttaattggttcaaatatctaattctttcagatcatggaaaatataattcctaaaataagagatctagagtatatgaccttataagtctttaactccataaaatgtgttaatgattattcaggtgcttacctaaaatgaaacaatgaccctcgaatatgagaagaaaacaagtatctgtaatattgtgaatgacattttccctgcaatatcaggatttttgggggggctggggatttaaatactggtactcatttatttttgctgatacaaaaatactattagccatgcctatgttcaattagaaggaaaaaaatgaagaagtttaatcgttggctaaaagctctatgtgctaaattcagttcaggcttaatttgtgaacagaaatcttttaatgtatatttggttaaggatatatgatctagtcaccaatggtgaatggcttgggatataaggaggagcataaaccagctgtgaatatttaaactaaacatagaaaattaaatgtattttcatctattattttatgataatattacaatctgttttaacaacagcatatcctattttattattttgtaaattctcaatcccctcctccaaaaaaattagatgtcagaagttctcacacagtcaaaaccctccaacatgaaatttataatcaaggactcagcccggaagcacatctaaattctgttcaaataaaatacctcctcccttaaatgttctcacatatcaaatcactgtattcatccctatgtattattcgtaccataaaaaaacacccatgtgctttagaaaaaggcttttactcttgcaaaattattgagatgtctatctgaaaaatcaatggcagttttggtgacataattactctcattctcaaaagccaggcattcataaatgtggagctatgtctttttctgatggtaaagttcaggatttactaattggtacaatcagagagcactggtttcgaggctgctgcagcagtatacttacctaaattgaagtgcaagctaaatccatagtgagaagcactcacttactcatacaaactgataaattatactgccgagtaatcagtttgcataggcagttgttcatagacgtgtctctgctccatcaatgcactaaaaagccatgtagggtctcacttcttcaccctccaaaggacaagtcacaaaacaaatcacagagaagggagtyagaaaatacagaagccctatcttcagcccacataccatttataacagtgaaattagaattatatcagtaaaatggaagagcactgaaataaagacttctcatgtgagagtaaagaaatatagagacataatgaaaataaaggctgaaagcagtgttagtattccgacttcaaagttcatgaagtagtctgtaaatagcatgcactttttaacaggcaca

SEQ ID NO: 65725 - DNA, 2002 bp, Homo sapiens
aagtaggctagactgagctaggatggtgggtcggttaagtgtattaaaatgcattttaacttatgatattttcagtttatggtgagtttatcaggatgtgaccccatcgtaagttgaggagcatctgtaatagcattttgttttttaaaaatatttaatcatctttgtcaatgtctcttgaatcctcagcgttgacaacgaagatgtgtccctaccctctgcctctcaggcttgctaattgctgggttctgctttcactttcacattgttgaaggagatatttccagttgttttctgtgcattatctgtagttcccttttaaaaggtgaagctgataaacacttgttatgacagtgtgaactgggcttaatgctgtgtcaagcagtgtgcaaagattacatttccctctcctcatgtcttgacttctgcatccctcaagagagaatgaatgttcgtaaggttaaggtcaaatggaatggagtttgctcctcatatttcatcagttgctcaaaggtactccccattttagcttgtgttctgtttggatcctgactttctcatggtggtttttctggacttttattagctttctttttcatcctgggtattacatggcgtgccttccactctgcccctggatttctttttacagccctggctcttgtgggccacaacagttcttgaggtaggctgctagggttccccattggagcctctccattccagtgttccagggggcagatgagctcctatccccactggcctgtcttgctggtgttcagggccctggcttccactttgcgaggtcacctttcaggattcatgtgtatccactttgctgtgtcagaaactccctactgctgacctccctctcctctttgctgtcattaatggattctcattgtgggagataaacgtgtgctcagcctagaataccacatgattttttttttcttgattcattgcttttgcctgttagccttgttgttctaaagtagttcatttttctactstacttttcctttcccctcaatgacccccaccccaaaactgtgcctaaatactattcatgcagtctttgagaatcaaacaggttcacactcttattcctgagtacagaaacttaccgaatcacacagctggataaagccgggattgaaaccctggcagtctggtttccagagcattctggcttagccacttatgccatggtttggcaaaagttagaaacagctaatcagctaataagggcatgatcacaaggcattttgctaataagtttttaaaatatacactatgggtgttttttggttgtgacaattcttgggtccctattcataggagcatcccccgcaccaatccctaggcacaatcctgtatccagcctgctggacatgaccgtttattccatttcgtaaaccctaagcatttgctctgcaaacctcctcctgcttggtccttgctcttactccttgtctgagaaacatggtggctgagctttgtgactgcaaggcagggctcatccttagggtctaccctgaggtattcttagtaggactgctctttgatagggcaaaggagtttcatggaccctttgaaaataatttagaggcattttcctttggtttctctgaatgagctaagaacccctgataataaggaactgctgtgggctgatggtcagttcctccagcccctccattctaggaaggtgtctggtaaagcagctcactgtgtggttggggaagggagacaaactatgaagttgtgccgatttctgggttttttcccttacacatgggatggtgtgagataaaaatctggcaacatagacgcagtgttcatgtcaagaaagagccacaataggtaagtcccaagactgttttctcagacctcatggaaaaggagacctcttggagaagtgagaagcaaaacgagaacaggtttattcaccttggactggaaagataacgccttgtaagcagttagaggcaacgctttt

SEQ ID NO: 65726 - DNA, 1039 bp, Homo sapiens
gcatataccaaatgttgcacctttaattttataataaactacattatcgtatcttactaaggtctcattaagtcatattttaagagcagatataattcataaaattttatattcttcactttcaatataactctagataaaagtcacattttatcttacaagaagtatctttttggtcatagtcttcaaacagaaaacaagaattaaaatggccaaattgttaattttgtcctttatacttaaaagttrtccttatttccattttttctttcaatgcaaaagaatttcaattttatattgagtatattcccattaatgctgatgtaataagttatttttatgttttgcaatcatttaagctctgctatttttctaagatagttctcaagcatctgcagtcatcatttatatcatttatatgtcacctctaaaggaagccacaatttgtaagtgtgagtaataaatttaagattgtgatagttgcataccagttcctaaaggtaaacttctgtaggtatttatatgtcagagaagctaaaaatctgtgtgaaatcaggggagatccctccagtaatggaaatcactctttgcagcaggaacagccagaatgactaggaagatctgccttaagactacctatagaccgaggcaaactttgtcagatatccccgttaaatttctatgccaagaaatttcactcagtatgaaatcttcacctgtccatttttctctttatgctaaagagttcaagcatgtctaactctgtgctgatatgcccaggaatatcatttctccttctttatccaagagagaaaaagaaatcatgcaggctctctggactttgtaatccctggcaaataccatctgagatgaaacccacagcagcataatgttggtttgttgtttcagatgtatttgatagggtgcaagatctttgctgtggtcagtcagattgccacttctatccaactctaaaatcctattagtaaaagggcagctatgcctgtctgtatgtctccctcagagatttctaagggag

SEQ ID NO: 65727 - DNA, 1039 bp, Homo sapiens
gcatataccaaatgttgcacctttaattttataataaactacattatcgtatcttactaaggtctcattaagtcatattttaagagcagatataattcataaaattttatattcttcactttcaatataactctagataaaagtcacattttatcttacaagaagtatctttttggtcatagtcttcaaacagaaaacaagaattaaaatggccaaattgttaattttgtcctttatacttaaaagttatccttatttccattttttctttcaatgcaaaagaatttcaattttatattgagtatattcccattaatgctgatgtaataagttatttttatgttttgcaatcatttaagctctgctatttttctaagatagttctcaagcatctgcagtcatcatttatatcatttatatgtcacctctaaaggaagccacaatttgtaagtgtgagtaataaatttaagattgtgatagttgcataccagttcctaaaggtaaacttctgtaggtatttatatgtcagagaagctaaaaatctgtgtgaaatcaggggagatccctccagtaatggaaatcactctttgcagcaggaacagccagaatgactaggaagatctgccttaagactacctatagaccgaggcaaactttgtcagatatccccgttaaatttctatgccaagaaatttcactcagtatgaaatcttcacctgtccatttttctctttatgctaaagagttcaagcatgtctaactctgtgctgatatgcccaggaatatcatttctccttctttatccaagagagaaaaagaaatcatgcaggctctctggactttgtaatccctggcaaataccatctgagatgaaacccacagcagcataatgttggtttgttgtttcagatgtatttgatagggtgcaagatctttgctgtggtcagtcagattgccacttctatccaactctaaaatcctrttagtaaaagggcagctatgcctgtctgtatgtctccctcagagatttctaagggag

SEQ ID NO: 65728 - DNA, 643 bp, Homo sapiens
agttaggcaatatgtgtcaatatgcagattccctttgattaaggtacttcttgaaatttatcacaagtaggataattggggatgtgcaaagatgtatgttcaaaatttattgctgtgttaatggtagtgaaatattggtccagtcatatgatggagttttatgaggcaaatgatgtgatctacattcacrtggaaacctttctttgacgtgcttacggttgggggacagattctagccaggcatttgtagcatgaacccatatgtaaaattgtgggtgtggcctgtgtatgttcttttggatgggtggtgatttggaactagggtcacaatgttaattatctctagatgtgggctttcaaacgttttctttttcttaaaattttttttgatatttcctttaaaaaatataaacggtgaatatatacctattgataataaacccatccaggaaacgggaataaatatctaagactgcctatcttttttttttttctaatctgaacagttattttgcttatgaaatataaaattaggacactttgtcattttgtatttaaattcttataacacttattttgggctcctatacatgctcttcctgcgtttggctttcctagccactgtagttgggatgtttgaaat

SEQ ID NO: 65729 - DNA, 886 bp, Homo sapiens
tatttctttggaggtatagctgaactacaatttccgaatcatacatatcacaaaattaacttctagaaagactgtgctaatttatgtccgcaactacgtgcaagacctgcctcttaatcagccattgggttgaattgtcctgatgatttttgtggcaccttcattcaattcctgctttttgtaacatatcccatgatcacaatcatatgatgactttgtatcctgtgtctttattttattggaatcaatgcctgattcatacagaatattgccaagaagttttacagatataatcagataagagaggagagatcaagatcatgttctttaactctgtttaaagtattgatgtcaggatgatacttcaagtttgaggtgaagtttttgtgccaaagcctggctcatggctgtgagggcacctaggactcactaaaagatgcgtgttcttcagtgtgcacattacctgccttcatgtggtaagtggtggagagttaaagccattacatggatcactcaggacaaaaacaaattttactgtaaaatttctggtgatttgggagcaaaactaggataactcttttgcacttgcagtatgccataagtgccgcagtttttgactttttctactttgcccaataaaaatgttgctctacaacccttaatttttataactgttctggcctcagttttccacagtgamtgttcctagtttgtgtaatgttctttaggttgctaatttctgcctccagagccaggagatctgtcttcttttgattattcccaaaggtaaattttgggaaaactagaatcaggctatttccctatttttcatttggaaatttctgcattcataaacagttgcttgtaaccttttaatgaatatgca

SEQ ID NO: 65730 - DNA, 1294 bp, Homo sapiens
agggagaagtggtgaaattatgtaaataacaaattcaggattcttaagagaagacggstaagattatatgatagacaataggctaggcatttttataattactttttttagcttctcagaaatgctaaaaggctattatattgttcccattttccagatgaggaagctgagagttagggaagtaacttcctttccaactagtcaggatttgaatatgtctggtttcaaaatccacaccctttctattatacattatatcaatcaagaattcattctatagcaatagaacttgttgatggtggtttaaaactgtgggatttattttctcacatgaaaggtagtgtggagacacctgggcgttggcaatggcccagtgtctgggtgatgtcagggcaatgatactgtgatgttctcagcctttcctcacggttgcaagactcaagggaggaagatgagaaggggaagtaggccctcaaatccaaaaactttcttaggaacctcacagcagatttcatttatatcccattgtccataacagagttaaggaggaggatgataaagagttggacaagccaatgatcagtgtctacacaatcaggttgtgatgtttgatagtagattcttttgatgttgtctctgtagggtaattgttaaatgatcaagcagttcctctgagctcatctccagcgggtacattctgggtcagaagaactgagttttcaagtgcatctcgggtatctggtcacttttgcttctgccaacatagtcttgtccagtgtcagagagaggacatgctgttaagtgctgccacttttcatgtacttcctacaagtaccatgtctgtagctctgtgctgtaaaactggggcactgggtttttctactttctgatttttgggtttcaaatagaaagagcatcagacaaggagtcagaaggctcggattcgagtccagctttgttacccgtgaagtgacctgaaataaatcccttaagccccatggacttttatctttttcatcttcacagggtggtgataatattcttggctgtttgtcagggttgcagaatgtactagtaagcactctgaaatcaccgaggtcttatataaatgaacgtgtcattaccgttattaggtccaaaggggccctctggatccaagcactgcagtgactatcttggatcttgaggctgtaagatctcaaagtctggagcctctgtcatccttatttccatttcctgaaaactagcacaatgcctgcacttagtggcaacttattaaatgcttattcaatga

SEQ ID NO: 65731 - DNA, 875 bp, Homo sapiens
tgcatacatccatgatatcaccacaacaaggtactactagaccgtatatctatgatatcaccacaatcaaggtactagatatatccatcacctctaaaaatttctgtrtgttcgtgtgtgtgtgtgtgtattaagaacacataacatgacatctattcttttaacgtattttaaagtgtgcaatactgtactgttaactgtaggtactatattgtacagcagataataagttctagagaacttattatcttgcatattttaaattttgtctattttttgaaattgggatttacatgcttttctcatttatttttaagatattttacattttctgaatatggccttccttagtatatgaatttcaaaatcttcaactttgtggctgtcttttctgtgaataatctcttttaatgtatatgttatgtctctctgtttaaatcttcaatttttctcagcagtattgatagctttattttggagttttttgcacatcttttattagatttattcctgtgcatttgatggttgttgatgatagtaaacacaacgtctttttttcttttagaatttcgctgtttattgctggtgtataaaactaagattatttttatctattaacttttcatcacccgtattcctaaatttacttattaattccaacgaacattaatttatctgaaggttattttttgtttcctaggtatacaataattttatatgtaaaaaattaaagtttcatttcatattttccaatctttattaccctttatatttttatcttgccttttgtattggccagcagtacctccaataaaattttaaataaatgttgtaacagcagaaattcttgtcttattctcattctcaaggaaaac

SEQ ID NO: 65732 - DNA, 875 bp, Homo sapiens
tgcatacatccatgatatcaccacaacaaggtactactagaccgtatatctatgatatcaccacaatcaaggtactagatatatccatcacctctaaaaatttctgtatgttcgtgtgtgtgtgtgtgtattaagaacacataacatgacatctattcttttaacgtattttaaagtgtgcaatactgtactgttaactgtaggtactatattgtacagcagataataagttctagagaacttattatcttgcatattttaaattttgtctattttttgaaattgggatttacatgcttttctcatttatttttaagatattttacattttctgaatatggccttccttagtatatgaatttcaaaatcttcaactttgtggctgtcttttctgtgaataatctcttttaatgtatatgttatgtctctctgtttaaatcttcaatttttctcagcagtattgatagctttattttggagttttttgcacatcttttattagatttattcctgtgcatttgatggttgttgatgatagtaaacacaacgtctttttttcttttagaatttcgctgtttattgctggtgtataaaactaagattatttttatctattaacttttcatcacccgtattcctaaatttacttattaattccaacgaacattaatttatctgaaggttattttttgtttcctaggtatacaataaytttatatgtaaaaaattaaagtttcatttcatattttccaatctttattaccctttatatttttatcttgccttttgtattggccagcagtacctccaataaaattttaaataaatgttgtaacagcagaaattcttgtcttattctcattctcaaggaaaac

SEQ ID NO: 65733 - DNA, 875 bp, Homo sapiens
tgcatacatccatgatatcaccacaacaaggtactactagaccgtatatctatgatatcaccacaatcaaggtactagatatatccatcacctctaaaaatttctgtatgttcgtgtgtgtgtgtgtgtattaagaacacataacatgacatctattcttttaacgtattttaaagtgtgcaatactgtactgttaactgtaggtactatattgtacagcagataataagttctagagaacttattatcttgcatattttaaattttgtctattttttgaaattgggatttacatgcttttctcatttatttttaagatattttacattttctgaatatggccttccttagtatatgaatttcaaaatcttcaactttgtggctgtcttttctgtgaataatctcttttaatgtatatgttatgtctctctgtttaaatcttcaatttttctcagcagtattgatagctttattttggagttttttgcacatcttttattagatttattcctgtgcatttgatggttgttgatgatagtaaacacaacgtctttttttcttttagaatttcgctgtttattgctggtgtataaaactaagattatttttatctattaacttttcatcacccgtattcctaaatttacttattaattccaacgaacattaatttatctgaaggttattttttgtttcctaggtatacaataattttatatgtaaaaaattaaagtttcatttcatattttccaatctttattaccctttatatttttatcttgccttttgtattggccagcagtacctccaataaaattttaaataaatgttgtaacagcagaaattcttgycttattctcattctcaaggaaaac

SEQ ID NO: 65734 - DNA, 1465 bp, Homo sapiens
tggaacagccattgtaccagagttctgtcttttccaggaatcagtgactcatatcagtctctgctgatatcagctgctgaagggcttaggagaactggtaggactcagaggagcagaaaatccaggaaagggcactcttggccagtgctgtttaatagaactctttcagatgagtaaaatgttccatatttgtgctttccagtatgggaatgtctcaagttcctttttagacagtatctccagccccctcattggttcctgacttcaggctgtttccaagacattcaacttgagactacagatccctgggctaggtcttcaagggccctccagatccaagctatgcctcagttttagctgaagttgtgtccaagaacacaggtcagggtacagggagatgggatacgtatagctccagacatggccagtgcattgttgatattgccaccccagcaaactgcctagaacttggcccagagcagatgctaggttaacatggtagatgagtgaatttactttctcttccccagattggggctccctcacctactgccattggcttctggaatccttctctatcattgtgaactgatgacttgccacatggtgaagattaacgaagccagtgctttgaaccaccaccctgacattttgggggtaggtcaggggggtagctacaaaaccagctagtaataattcattgaaaatatgctggatccagcatttttatgtaatgacctcatttttcttgtgaaaccctgtgtgcaaaatgaaagcccaaatgagcatctgctatatacagttaggagtagggtggtgctggggaaagaggactgatctaggagttaccctggacctggggctcayaggctgtatgaccttgaacaagatgctcaatgcttctgtgccccagttttctctcaagtaaaataaaaacattggactctaagcttctttctacagttaatgtgaatgtttaaaaaatggctggtcacatctgtgatcaacctacattaagcacctttcaagtgattacttgcttcaattaggtccattttcattgtttacttttactaacagttttttttcttaacccttccacttccagtgccttcctcattcttcactattttttgattgtttcttcagattctgataaatcatcttcatttccagccattgaatcacctgctccttggccctgcctagaggctctttaatcctcagcagtttcaatttcctgacaaagcacacagagggggcccggtctccctcctcttcccttgcccactactcaccactctcccatctaaaacacatctgaaaaatcagggaggtttctattctggcagttgtctctctcaccactagatggcacatgcaggtcatcagtcttttgggcaaaaactaattttattgtgtatttaaactccatctcaatccacaaaagctttgaggggaatta

SEQ ID NO: 65735 - DNA, 2989 bp, Homo sapiens
tctgcgcagttgatgaagcccatgtagctggaatcaaaagcttctgtacccatgggctgaactggtagtagcaaactgaccagggaattagagcatgacacccaagatagtgggaaccagctgagatgcaggtcataatcatgataacagcaggtaacatttactgagaattttctgtgtcaagccatgtgcaaaacacatcaccagattatgacattttctcatcacaatagtccaaggtggtgtccctgtcatgacagcctgcctactctcctttcagagtgcatgttaaaataacctctcactgcaaccagtggatttcccagtagtctctcttttttttttatttttttctggagtccggcctttcataacaagcccccaggtgcatttggagttgctacctgtaaatgtggcaggatttctcttcatcagacttttgtccctgttctcttccctgaagagcaaacatgctgcactagaaggaatcagtggctcattgtcactggcaaagccgaggcagtgggaggaccattttttctctgggttcagcaaccctcctagtggttagcagacagcagcataatggccagccagtgtgaaactgtgcaaattgcctcataaataactcgtaatgcacaggcaacagggagaggccatagctcatggataaatgactccctgccatttcggggtattaaaccagggataatccggacctcaccatggggattcattaactactatgggtttcccgcacgcaagcctgctgggactcaggcctgcttggtgcttcttgtggcatcatgatgggggcaaaacacttccaagcagggccatgagaaagagaatgtaagtacctttaacaaaccagccaggggtgaaccctgtaggagccaagtattttctctgtggaacttgctttctgaagaaatctctttgaagcgcagagaaaaacataataaccttaacaattaacatgtattgggcatttactctgtgccaggcactgtgctaagtctttttttttttttttttttttttgagatggagtctcgctctgtcgcccaggctggagtgcagtggtacgatcttggcttactgtaagctccaccagccgggtagctgggactacaggcgcctgccaccacacccggctaattattgtatttttagtagagatggggttttgccatgttggccaggctggacttgaactcctaacctcaggtgatctgcccaccttggcctcccaaagtgctgggattacaggcgtgagccaccgcacccctgtgctaaatcttgtgtaactcccacaaacattccattgagtggatactattattattagtcctattttcatagaggatgaagtgatagctcacagaggtttagttatttattttaggcaatatagccaatatgtggtgaatgcattagtcagcttttgttaggttgtggtaacaaatagtccaccagtctcagtggtttaaaatcacaagagtgttttgctcctattttatgccactcatggatcagctgctctcctttacctgactttattacaggatccaggctgaaatagtagcctctatctgggacatactattctcatggcagaagaagacaagagcaagaaaactggtggaactggccatggctgtgaaagcttctgctcagaatgggcatatatcacctctgctcacatttcattgatcaaaggtggtcatatggccaagccttctttcaatggggtgaggaagtttactcctcacactgggaggtactgcaatgaatgacaattggggagagatatctaagtctcttagaggaaaggcagagatcagagaatagtaatataatctatgcagctgagtgagatcagatctttgtggttttacattttgtgctcttaatttctgccctttgctgaatttggarttgggatacttgggcttgagcaccactctgcagtgagaaactctgtgactaagggcaatttatttccctctctgggtcccagtttccctgccttagttagatcccccagaagcagacgcagagacaaggaatgaaatgcaagtagtttatttgggaggtaataagaggaagccccagtaagaaaggaaaagtaagatagaaaaaagaaggaaggtaataaagtatgttaccaagcaggttaccctcagagcaaccagggcagaattctgctaaagaactgtggggatacacacctcagaattatcctacccgaggggtgaggaacctggaaatttacttaccaactcccaggccatcattggttgagggctatttctgagaccattgactcttctgcaaccagataaaagcctttggagcagagttataagtttttgtaataagcatcttttggcatacagaggtgagccaaagtccctatctatgcaatgggtggtgttggctagaaacacttcaatggctcttctactttttgtcccctgtgcctacagccctgcctggcatggggttagcatgtgggcagtctggttgagtgtgaggatcatgggcagttgcattttccctccatcttcctatgaaacctcatgccccaccactggctcttcctcttgcttttccactgcatgcaaaccttggctctgcaggatgttccatccaactcctgctcttcacaaatgtgtctcttacccaacgtgctgcagttcttactgcctgctcgcattgggcacactctttattcccggtactatgctttccatggtcacagggaggcagcatcaatgatgtcctcatttccctggcatctctcactctatgcaaaatatccttttgctttgcactctgccaccccctttgctgtcatctttgttccagtactaaccatcctcccctgaccctatcaagctccattcacctaaggctggctcccagcctccctccctctctgagctaccaaccaccttggcttctcccttgtctatggggttga

SEQ ID NO: 65736 - DNA, 693 bp, Homo sapiens
aggtcacgtgacgcgcccctagcccggctctatttggctgcaagagcgctctgtcgcctgcctcggactctgtttcccagaagtcttcctggaaactacatttcgcagggggctttgcggcgcctacttcctcctggctgattagatgggactggtgccgttggccggacgtttttgggagcttcacaggctgatggggaagggcgaaacctgctcgattaaaacaacccgcatttcgaggcgaggaagcgagtcacggctcggcccctccctttgtgaggagaaccaggcccgcctcggggtcccctgggcaatgtagtaacgtgaaggtctccgagtcccgctagcactcccggggcgtgggggtcccaagtgggactggaaccaccgcgaaagaggcggggctgcgcggatcttccacaccagctcctcccttccgtcagggggtgctgcgcatgaacgttttcccatctctacctcttggttatccctcagcagagattcttcttttactctgtacagttttcagcatccctcaagctgatatttcrattaaacaaattttagaattctgagaaatggcgaaataatgtaaaagaaacaaatgatattggccctaaattatcctccagcccctgctgctcatcggacactttatgaggttacaaaggaccatggcgctgcgcatatggg

SEQ ID NO: 65737 - DNA, 2799 bp, Homo sapiens
cttccttacamcttatacaaaaattaatccaagatggattaaagacttaaacattagacctaaaaccataaaaaccctagaagaaaaccgaggcattaccattcaggacataggcgtgggcaaggacttcatgtctaaaacaccaaaagcaatggcaacaaaagccaaaattgacaaatgggatctaattaaactgaagagcttctgcacagcaaaagaaactaccatcagagtgaacaggcagcctacaaaatgggagaaaattttcgcaatctactcatctgacaaagggctaatatccagaatctacactgaactcaaacaaatttacaagaaaaaaacaaacaaccccatcaaaaagtgggtgaaggacatgaacagacacttctcaaaagaagatatttatgcagccaaaaaacacatgaagaaatgctcaccatcactggccatcagagaaaaatgaacatttcaaagacagattatgtgcttccaaatgccaaatcatcactaaatagctctgtggcatagaggaaatttcacaaccttttagtgccccaattttgtggaagaatggttaggaggctattgcaataacaaaagaaaatttgaatagctgtatccaacatgaaaagattgctagtagaattaaatgagttactataggtaaaacaatcagggaagtaattaaagagaatctgcactaacattgttttattaatttaaaatatctgtacacaatcctttgattcatttggaattagttttagtgtattttagaaaataaggtttattttttattttctcccaaaacaattcttcaagacaacttttcgaacagtaaattccttctttgtttataacatgtattttaataaagtgacttatcttcatgatttctaggacatctgttctatctaatttattgttcagcattcgtctgagtattttctgggcagcaattaacccctctgtacctctgagtgcccacatttccttgatccatttcaccttgctgatgaatccttctttactcatagtctaaatttttttttagaaattctgagagtgccccaaaccttggtcttgggtcttccttcaatcttatttgtctttccacctgatcttaattatttacatcacattataccctatctttatggtgacaaatctcaaaattctctctctgacctaaatttatcattaaagatttggttgcaacttattaagaagtcaggttcaatgtaatacatgcattgttgatttaatatgctcatcaaaatatttaaaattttatttgaatgcaaaaaaataaagcttttaattttatctcctatttaataattttgacaaaaacattataccaatcatcactaattattgctggcttttaaaatattatctgattaaatatttttgactttgaaaaatggtaacaaatgcttctctctttcttgtccccttgaaccatacttgatattgctttttccaaatccgtgccacaagttcagaatataacctgttaaaatatcttctatgtataaactatctttaaattttcttgagagaatactgagtaaccaaaagcattgctccttcaccctacaaaagagagaaaaatttaaaaatcccattaatttgttattttaaatggtaattaaagctattgtgagggctcttttatcggccaaacttgtgaacaaaaaacagctcaaatttatgtgtaaataaaatatattgagatgaagcctttcattcaatgtgtgattttcagttcataaaaacacactgatgttcaagaacaaagactggtacgataactatctacaaaatgcttttgttactagattttaattccttcatcaaacagacacagtcaaagttgatagtgtcactagatctagaggtctatcaatatccttcccaccatttaatatgttcttaatctcagggaaattctaaatcatattcttctaaattgtacagttgactcctgaacaacacaaggtttaggggcatcaaacctccctaacccctccccaccaccccagcacagtcaaaaactcacatataactttggactccccaaaactaaactaagagcctaactgttgactggacaatccttaacacatatttcgtatgctgtatgtattttacactgtagttttacaatgaagctagttacagaaaagaaagtgttattaagaaaattatagggaagaaaaaatacgtttacagtactacagtatatttatttctctcataagtttacaatcctgtgtttacaagatggatccttcttctgaaatggcggcacacacagctgcagacctcaacctagggtacctatcaagcaattcatttttttcctgtaatgtcaggacccttctctgtttcctggaagaactttcagcatcactagcagcactttctacaggtctgaaggtgttattcaaggtttatggtattgcactagacatcatgaataatacaggagaaacatgagagatcactttttactgtgttaatttactggagagacaagctactcacaagaagatgattagcattatgtggcattttaagtgaatactcacaacacttgagttcactgcaagaacaacaggtggaggctaggaaattatcccagtagtacagtatgtactgcagttaattttgtgcagttatgatttacttttgtgtatttttgttttacttttctctaaacttcaattggctgcatgtatgctctgtgtgtgcctacatcttgataaattttaactttttataatagatgca

SEQ ID NO: 65738 - DNA, 2799 bp, Homo sapiens
cttccttacaccttatacaaaaattaatccaagatggattaaagacttaaacrttagacctaaaaccataaaaaccctagaagaaaaccgaggcattaccattcaggacataggcgtgggcaaggacttcatgtctaaaacaccaaaagcaatggcaacaaaagccaaaattgacaaatgggatctaattaaactgaagagcttctgcacagcaaaagaaactaccatcagagtgaacaggcagcctacaaaatgggagaaaattttcgcaatctactcatctgacaaagggctaatatccagaatctacactgaactcaaacaaatttacaagaaaaaaacaaacaaccccatcaaaaagtgggtgaaggacatgaacagacacttctcaaaagaagatatttatgcagccaaaaaacacatgaagaaatgctcaccatcactggccatcagagaaaaatgaacatttcaaagacagattatgtgcttccaaatgccaaatcatcactaaatagctctgtggcatagaggaaatttcacaaccttttagtgccccaattttgtggaagaatggttaggaggctattgcaataacaaaagaaaatttgaatagctgtatccaacatgaaaagattgctagtagaattaaatgagttactataggtaaaacaatcagggaagtaattaaagagaatctgcactaacattgttttattaatttaaaatatctgtacacaatcctttgattcatttggaattagttttagtgtattttagaaaataaggtttattttttattttctcccaaaacaattcttcaagacaacttttcgaacagtaaattccttctttgtttataacatgtattttaataaagtgacttatcttcatgatttctaggacatctgttctatctaatttattgttcagcattcgtctgagtattttctgggcagcaattaacccctctgtacctctgagtgcccacatttccttgatccatttcaccttgctgatgaatccttctttactcatagtctaaatttttttttagaaattctgagagtgccccaaaccttggtcttgggtcttccttcaatcttatttgtctttccacctgatcttaattatttacatcacattataccctatctttatggtgacaaatctcaaaattctctctctgacctaaatttatcattaaagatttggttgcaacttattaagaagtcaggttcaatgtaatacatgcattgttgatttaatatgctcatcaaaatatttaaaattttatttgaatgcaaaaaaataaagcttttaattttatctcctatttaataattttgacaaaaacattataccaatcatcactaattattgctggcttttaaaatattatctgattaaatatttttgactttgaaaaatggtaacaaatgcttctctctttcttgtccccttgaaccatacttgatattgctttttccaaatccgtgccacaagttcagaatataacctgttaaaatatcttctatgtataaactatctttaaattttcttgagagaatactgagtaaccaaaagcattgctccttcaccctacaaaagagagaaaaatttaaaaatcccattaatttgttattttaaatggtaattaaagctattgtgagggctcttttatcggccaaacttgtgaacaaaaaacagctcaaatttatgtgtaaataaaatatattgagatgaagcctttcattcaatgtgtgattttcagttcataaaaacacactgatgttcaagaacaaagactggtacgataactatctacaaaatgcttttgttactagattttaattccttcatcaaacagacacagtcaaagttgatagtgtcactagatctagaggtctatcaatatccttcccaccatttaatatgttcttaatctcagggaaattctaaatcatattcttctaaattgtacagttgactcctgaacaacacaaggtttaggggcatcaaacctccctaacccctccccaccaccccagcacagtcaaaaactcacatataactttggactccccaaaactaaactaagagcctaactgttgactggacaatccttaacacatatttcgtatgctgtatgtattttacactgtagttttacaatgaagctagttacagaaaagaaagtgttattaagaaaattatagggaagaaaaaatacgtttacagtactacagtatatttatttctctcataagtttacaatcctgtgtttacaagatggatccttcttctgaaatggcggcacacacagctgcagacctcaacctagggtacctatcaagcaattcatttttttcctgtaatgtcaggacccttctctgtttcctggaagaactttcagcatcactagcagcactttctacaggtctgaaggtgttattcaaggtttatggtattgcactagacatcatgaataatacaggagaaacatgagagatcactttttactgtgttaatttactggagagacaagctactcacaagaagatgattagcattatgtggcattttaagtgaatactcacaacacttgagttcactgcaagaacaacaggtggaggctaggaaattatcccagtagtacagtatgtactgcagttaattttgtgcagttatgatttacttttgtgtatttttgttttacttttctctaaacttcaattggctgcatgtatgctctgtgtgtgcctacatcttgataaattttaactttttataatagatgca

SEQ ID NO: 65739 - DNA, 1422 bp, Homo sapiens
ttacatatttttcatttatttaatgaaactattgtgtcaaccacttcttccaggccctgtgtgtattgtatgtgttctttcttattccaaggtgaatatgcccagcctggcccagccctcatggagtccataaagtagttgggaagagagaaacacacagagaaaaatcatacaagcaagcagaagggaataggaagttgtttaatgcgtacagagtttcagtttgagaggaatgtggtaccactacctccaccattcaaccatctccacaacttttgagatgtggaggattttcacaaggcacactcaaactcaacttttgagtttggagatggttcaatggtggagagtggtacaacaatcaaaatgtgcttaatgccactgcaccgtacactttaaaaaggttacaacagtcaactttatgtcatgcatattttaccacaataaaaagaaggggaggggcagacagccacgtggcacaccgtgcagacatctcccatgtacccagcaatcccatctgcaggtacatacgctcctaggttctcacgggagggagaaccatcatgggcagctctgggcatcccacgccttctccatcaggggtccggggggcaacctagccctgygctcagtgcctgccaaagaccatatcctggagacgatctccacgatctggagacagactctggcagctgcctgtcccagggccaaggtcggctacactacgagtgagcccccatgcaaaatgaaaacaaagcacccttgttcaaaacgtattaatagtttcaagacagacagcagaacattaaaccaagccccctgcccttctgagtgcacaccctgtgcaacagtccaggtcacacagccttgaagggggctctgaaggtgacagttcccaaccatgtgctgggagggaagatggcagagggagagagagggagattgagagagaatatctttaaaatttttatttaagtataacgtataaaaaggtgcacagatcacaggcagacagctcaatgaattttcacgaagggaataaacctgtgtaaccaccacccagatgaagaaagagaacattcctggcaccccagaacccaccttgttgccctcacgactcccagattagattagttttgcctatttttgagcatcatcggtctgcatgttttcttttatgcctggcttttctcaccgcatgtctgcgggactcagccatactgctgtgctgtcattctcagacggacaatcccaagtgtcagagcccatgtggggcaaacagaattctcatacgctgctggtgggagtggaaaatggtgcaactacttggaaaaatcggctggcaatatctatcaaagctgaacaaacacctgccctgtgacccagcaattccacccccagatagatacacaacagaaatgc

SEQ ID NO: 65740 - DNA, 1065 bp, Homo sapiens
ataataatagtaatgttacattgttttaggcaaaagtctatatagcttatataaataaaagttaaatcttggaaatggtctttttttttggtgacagttacttagctggcttctttgaccattattaacagaaagcatttaaataacacctcttgttagtaaggttccaacgttacattttcttttatttgtctggagactgttgactaatctataatctaaattatatctgaaatgttgatgtaatatttgtcctcacagtagctggcatttgtccttcagttaaatggtgagataataatcagcagtagaaactttaccgtgggaaaggtgaactcttatcatgtgaagtacagtgtggaatcagtaactttctcacgctggtatggtatcatgttcttgctaaccttgtttgagtattcaccattgtttgctatcccatggtggcagtataactaatgatattttgcaaaaataggagagaactttcagatcatgaaatatacaggaagttgtttacatattacaaggaaggcaatattttcaccaaaacaatagcttgggcattttagagtattttagtatgcctcaggcactgacattttagccaccttctaatgaatgggcttgaagcagaactgcttctactatcaggtaatggttgaggggggatgtctattacacatgtactttgttttgtgtaaagtatgttctggaaagttacattcttttggtgagtacatgtaagtatttgrgggatattcatgatttaaggaggcctgaaatgaatctttttgattagggaaagaaatattttgcagtgtaaatgattaaccatttcttccagtttacctgtttggtgagttcataccataaatgttacgatgtttggttttataaaagagtacctgtaagtttttagtttctgtgtggaagattttttcagagagaatacagatagccttcttgtattagaattttgtcatatgtggtttgaaactgttcattggagctgaggaattttgttacgtttgttttaactagatatgattaacaaaatgacca

SEQ ID NO: 65741 - DNA, 882 bp, Homo sapiens
atactgggaaatttggaagtggagtttaaacacagaatcagctgcagtcatgtataggtcccctcctgaaacacaactctcaggctgtgttgtaacaacgtatataataactgtccctaactatctctcagggcttttgtgaaaaatagaggaaataatacttagacaaatacatttaatgttttcaaatggcaaatggcataaaatccaagggcatactatttgatagtaactctttgaaagataagttatccagaaaaggatgtattggcctaaggggatctttgaattccttaaaaatctgtagtcattttccttggtaagctttcaacaacttcatgagtgtgtatcttcttgtgataatcttgccatgggttggattgcctttgagtatccggttaaaatcctcataccttgaacagacacactggaatagtcataaactacatccttgcctaagttggcagtgatggtaacttgccttccaagaagactgatatgcccgttgaaccagaagttgcagtacggytgaagtgtccagattagtgctaactggtggaaatacaatgtaagctacaatgtgagtgatatctgtagttataaattgtaaaatagccacgttttaaaaagtgaaaagaaataggtgaaattaattttagtaatacaggtaacagtatataaaaagtgttaatcaggcagacatggtctcatgcctataatcccagtgctttgggaggcccaggtgggaaggttacttgaggctaggagtttgagactagcctgggcaacatagcaagaccccttctctacaaaaaattaaaaattttccaggcatgatagtgcgtagatgtggtctcctcttctctgaaggctgaggcaaga

SEQ ID NO: 65742 - DNA, 882 bp, Homo sapiens
atactgggaaatttggaagtggagtttaaacacagaatcagctgcagtcatgtataggtcccctcctgaaacacaactctcaggctgtgttgtaacaacgtatataataactgtccctaactatctctcagggcttttgtgaaaaatagaggaaataatacttagacaaatacatttaatgttttcaaatggcaaatggcataaaatccaagggcatactatttgatagtaactctttgaaagataagttatccagaaaaggatgtattggcctaaggggatctttgaattccttaaaaatctgtagtcattttccttggtaagctttcaacaacttcatgagtgtgtatcttcttgtgataatcttgccatgggttggattgcctttgagtatccggttaaaatcctcataccttgaacagacacactggaatagtcataaactacatccttgcctaagttggcagtgatggtaacttgccttccaagaagactgatatgcccgttgaaccagaagttgcagtacggctgaagtgtccagattagtgctawctggtggaaatacaatgtaagctacaatgtgagtgatatctgtagttataaattgtaaaatagccacgttttaaaaagtgaaaagaaataggtgaaattaattttagtaatacaggtaacagtatataaaaagtgttaatcaggcagacatggtctcatgcctataatcccagtgctttgggaggcccaggtgggaaggttacttgaggctaggagtttgagactagcctgggcaacatagcaagaccccttctctacaaaaaattaaaaattttccaggcatgatagtgcgtagatgtggtctcctcttctctgaaggctgaggcaaga

SEQ ID NO: 65743 - DNA, 882 bp, Homo sapiens
atactgggaaatttggaagtggagtttaaacacagaatcagctgcagtcatgtataggtcccctcctgaaacacaactctcaggctgtgttgtaacaacgtatataataactgtccctaactatctctcagggcttttgtgaaaaatagaggaaataatacttagacaaatacatttaatgttttcaaatggcaaatggcataaaatccaagggcatactatttgatagtaactctttgaaagataagttatccagaaaaggatgtattggcctaaggggatctttgaattccttaaaaatctgtagtcattttccttggtaagctttcaacaacttcatgagtgtgtatcttcttgtgataatcttgccatgggttggattgcctttgagtatccggttaaaatcctcataccttgaacagacacactggaatagtcataaactacatccttgcctaagttggcagtgatggtaacttgccttccaagaagactgatatgcccgttgaaccagaagttgcagtacggctgaagtgtccagattagtgctaactggtggaaatacaatgtaagctacaatgtgagtgatatctgtagttataaattgtaaaatagccacgttttaaaaagtgaaaagaaataggtgaaattaattttagtaatacaggtaacagtatataaaaagtgttaatcaggcagacatggtctcatgcctataatcccagtgctttgggaggcccaggtgggaaggttrcttgaggctaggagtttgagactagcctgggcaacatagcaagaccccttctctacaaaaaattaaaaattttccaggcatgatagtgcgtagatgtggtctcctcttctctgaaggctgaggcaaga

SEQ ID NO: 65744 - DNA, 572 bp, Homo sapiens
gggcagggatttttttgtgttyagctcactgttgtatccccaggatctaggataacacctggcacctagccagtgctcagtcaagattttttgaacaaacgatgagtaaatgaatattatgatatatggaagtagggaatggtttctggaagtctattctaatatggcatcaaagccaaaacaacaacctatagctgtgcctcttctgtgactatgagcgtagagggcaaggaggtgttacaatatctgccttaggtatgtaaactgctgaagaggtggaagtttcacatttatagcaaatagccttggattcagattgtttgtctttatctattaatgagtccattctgatgactcaatgactaaattgaagtgggtggtttcgtagagggaaagtgtttcaagaaaaagaaatgttatttgatgcaaaaaagaaacataaaaaaacccacagaaatcagggataaaaaatagtggcaaagaggaatgaatctaatagaggggccaacacatttccagtaagtcaggctatctttgaaagcttggtgactccttacttgcatgccttctcc

SEQ ID NO: 65745 - DNA, 935 bp, Homo sapiens
gccatgttggtttgctgcacccattaacttgtcatttacattaggtatatctcctaatgctatccctccccccaccccctaccccacgacaggscccggtgtgtgatgtttcccaccctgtgtgccagagaagcccttgaatttgaacccaagtattctagctcagtcagtacttatgagtggtggagacgggggctgaatcaatgacatctggttctagagttggtatctttcattaatattcttttgagcctctttaagacttcttgataccttggagattcttacagataccactgttattatacagtagtagtcttggtttataaaaagtttccattttctggaaaactcacttttgaaacactccttggtcacatgttaaattggttacaactcttttctagtagatgctgatcaaaaaaggcactgcgggtgttcaatggggtgatcataagccaaactaaatacatttcatagcttcctatttaggttaattcaattattccttcatctgtagctgtaagaaacttaactacagactttgaacaaattttggccaatccagattctaggagacagaactgccaccaacaaatggccttgttgaaaagcagatgtagatactaatcacagcactaacctcacaggctctctgtgaaggtgtggctggaagattaacatgagaacaatcttttcccctcaacaacctaataaccatctttgaaagagacaacaagtttccaccatcacaatattacttctgatgtttcctcaatgtataatgcaaaacactaattttcagagtgaaaattcgtagtgaatgttgacagtagtaccacagaaagactatgtttttattgtatcactgtatgaatcaatgtttgtgtactgaaaagtactgttccagtcagatgtttcaaatttgtgagata

SEQ ID NO: 65746 - DNA, 935 bp, Homo sapiens
gccatgttggtttgctgcacccattaacttgtcatttacattaggtatatctcctaatgctatccctccccccaccccctaccccacgacagggcccggtgtgtgatgttycccaccctgtgtgccagagaagcccttgaatttgaacccaagtattctagctcagtcagtacttatgagtggtggagacgggggctgaatcaatgacatctggttctagagttggtatctttcattaatattcttttgagcctctttaagacttcttgataccttggagattcttacagataccactgttattatacagtagtagtcttggtttataaaaagtttccattttctggaaaactcacttttgaaacactccttggtcacatgttaaattggttacaactcttttctagtagatgctgatcaaaaaaggcactgcgggtgttcaatggggtgatcataagccaaactaaatacatttcatagcttcctatttaggttaattcaattattccttcatctgtagctgtaagaaacttaactacagactttgaacaaattttggccaatccagattctaggagacagaactgccaccaacaaatggccttgttgaaaagcagatgtagatactaatcacagcactaacctcacaggctctctgtgaaggtgtggctggaagattaacatgagaacaatcttttcccctcaacaacctaataaccatctttgaaagagacaacaagtttccaccatcacaatattacttctgatgtttcctcaatgtataatgcaaaacactaattttcagagtgaaaattcgtagtgaatgttgacagtagtaccacagaaagactatgtttttattgtatcactgtatgaatcaatgtttgtgtactgaaaagtactgttccagtcagatgtttcaaatttgtgagata

SEQ ID NO: 65747 - DNA, 935 bp, Homo sapiens
gccatgttggtttgctgcacccattaacttgtcatttacattaggtatatctcctaatgctatccctccccccaccccctaccccacgacagggcccggtgtgtgatgtttcccaccctgtgtgcmagagaagcccttgaatttgaacccaagtattctagctcagtcagtacttatgagtggtggagacgggggctgaatcaatgacatctggttctagagttggtatctttcattaatattcttttgagcctctttaagacttcttgataccttggagattcttacagataccactgttattatacagtagtagtcttggtttataaaaagtttccattttctggaaaactcacttttgaaacactccttggtcacatgttaaattggttacaactcttttctagtagatgctgatcaaaaaaggcactgcgggtgttcaatggggtgatcataagccaaactaaatacatttcatagcttcctatttaggttaattcaattattccttcatctgtagctgtaagaaacttaactacagactttgaacaaattttggccaatccagattctaggagacagaactgccaccaacaaatggccttgttgaaaagcagatgtagatactaatcacagcactaacctcacaggctctctgtgaaggtgtggctggaagattaacatgagaacaatcttttcccctcaacaacctaataaccatctttgaaagagacaacaagtttccaccatcacaatattacttctgatgtttcctcaatgtataatgcaaaacactaattttcagagtgaaaattcgtagtgaatgttgacagtagtaccacagaaagactatgtttttattgtatcactgtatgaatcaatgtttgtgtactgaaaagtactgttccagtcagatgtttcaaatttgtgagata

SEQ ID NO: 65748 - DNA, 935 bp, Homo sapiens
gccatgttggtttgctgcacccattaacttgtcatttacattaggtatatctcctaatgctatccctccccccaccccctaccccacgacagggcccggtgtgtgatgtttcccaccctgtgtgccagrgaagcccttgaatttgaacccaagtattctagctcagtcagtacttatgagtggtggagacgggggctgaatcaatgacatctggttctagagttggtatctttcattaatattcttttgagcctctttaagacttcttgataccttggagattcttacagataccactgttattatacagtagtagtcttggtttataaaaagtttccattttctggaaaactcacttttgaaacactccttggtcacatgttaaattggttacaactcttttctagtagatgctgatcaaaaaaggcactgcgggtgttcaatggggtgatcataagccaaactaaatacatttcatagcttcctatttaggttaattcaattattccttcatctgtagctgtaagaaacttaactacagactttgaacaaattttggccaatccagattctaggagacagaactgccaccaacaaatggccttgttgaaaagcagatgtagatactaatcacagcactaacctcacaggctctctgtgaaggtgtggctggaagattaacatgagaacaatcttttcccctcaacaacctaataaccatctttgaaagagacaacaagtttccaccatcacaatattacttctgatgtttcctcaatgtataatgcaaaacactaattttcagagtgaaaattcgtagtgaatgttgacagtagtaccacagaaagactatgtttttattgtatcactgtatgaatcaatgtttgtgtactgaaaagtactgttccagtcagatgtttcaaatttgtgagata

SEQ ID NO: 65749 - DNA, 935 bp, Homo sapiens
gccatgttggtttgctgcacccattaacttgtcatttacattaggtatatctcctaatgctatccctccccccaccccctaccccacgacagggcccggtgtgtgatgtttcccaccctgtgtgccagagaagcccttgratttgaacccaagtattctagctcagtcagtacttatgagtggtggagacgggggctgaatcaatgacatctggttctagagttggtatctttcattaatattcttttgagcctctttaagacttcttgataccttggagattcttacagataccactgttattatacagtagtagtcttggtttataaaaagtttccattttctggaaaactcacttttgaaacactccttggtcacatgttaaattggttacaactcttttctagtagatgctgatcaaaaaaggcactgcgggtgttcaatggggtgatcataagccaaactaaatacatttcatagcttcctatttaggttaattcaattattccttcatctgtagctgtaagaaacttaactacagactttgaacaaattttggccaatccagattctaggagacagaactgccaccaacaaatggccttgttgaaaagcagatgtagatactaatcacagcactaacctcacaggctctctgtgaaggtgtggctggaagattaacatgagaacaatcttttcccctcaacaacctaataaccatctttgaaagagacaacaagtttccaccatcacaatattacttctgatgtttcctcaatgtataatgcaaaacactaattttcagagtgaaaattcgtagtgaatgttgacagtagtaccacagaaagactatgtttttattgtatcactgtatgaatcaatgtttgtgtactgaaaagtactgttccagtcagatgtttcaaatttgtgagata

SEQ ID NO: 65750 - DNA, 756 bp, Homo sapiens
caagactttcctagtcattccaggaaacccctcagtcctaggcaaactgggacaattgatcactctacatcaagttataatggcccaaagtttccttctcctctttttagggcttacttgtggagaggactgcacatttgtctcactgggacatctctcctggatagcattggatgaacattgccaaattcccatgtttatatcttacagtgctttccaattttcccatgcttcttttctatatctaatgccatagattcatctcaagatggtgaagcagaactacagactggcttgcccaattccrttccctcttctcgtgcgtcttcctgccctgtagtaggggaaactcattctccacactcacttgcagctcaagctcctcatgtgacttaggcactgctaagcagatgcagtgatgtgagtcttggaaggagcgagtgagaaaagtcagctgttggccttgtgcagggagaggggaccttctgacaagcatagtggcaatagccagcaggggcagggcagctacggacccagaagcttcctgatcatggcagaggcctggtgcttccggggccctgctggcaacagctcccttagtagaccggttcttttgagaggttcagtctagattgtgtaccttcaaccctcccaatgattttttggagctattagtagccctttatacctctccttttgcatacactagccagaggattctgtaatttacaacaaaaatcacagcctcacacagat

SEQ ID NO: 65751 - DNA, 756 bp, Homo sapiens
caagactttcctagtcattccaggaaacccctcagtcctaggcaaactgggacaattgatcactctacatcaagttataatggcccaaagtttccttctcctctttttagggcttacttgtggagaggactgcacatttgtctcactgggacatctctcctggatagcattggatgaacattgccaaattcccatgtttatatcttacagtgctttccaattttcccatgcttcttttctatatctaatgccatagattcatctcaagatggtgaagcagaactacagactggcttgcccaattccattccctcttctcgtgcgtcttcctgccctgtagtaggggaaactcattctccacactcacttgcagctcragctcctcatgtgacttaggcactgctaagcagatgcagtgatgtgagtcttggaaggagcgagtgagaaaagtcagctgttggccttgtgcagggagaggggaccttctgacaagcatagtggcaatagccagcaggggcagggcagctacggacccagaagcttcctgatcatggcagaggcctggtgcttccggggccctgctggcaacagctcccttagtagaccggttcttttgagaggttcagtctagattgtgtaccttcaaccctcccaatgattttttggagctattagtagccctttatacctctccttttgcatacactagccagaggattctgtaatttacaacaaaaatcacagcctcacacagat

SEQ ID NO: 65752 - DNA, 568 bp, Homo sapiens
atggtctagaagaggcatccattattgtgcccatgttccattggtaagagcaatcacattaccacctacaactacagggagggctgggatatatagtccccagctgggataacactaacccagctggggactacctatatatttgagacagggtcttgttacattacccaggctggagtgcagtggtatgatctcggctcactgcagcctcgacctcctgggctcagggtgattctcctacctcagcctccagagtagctgggactacaggtgcacaccaccatgcctggctaatttttgtattttgtagagacaggggtcccactttgtttcccaagctggtcttgaactcttgggctcaagtgatccactgccttggcctcccaaagtgttagcattacagccgtgagccactgctccaagctcaaaaaggayattttttgacaacacactgaagtctccaccacaggttgcccattttactaccaaatgtatatacaaatttctccccattcataaaaaaatactgtcagtatcacccaagggaaataactaaaaactcccccag

SEQ ID NO: 65753 - DNA, 2741 bp, Homo sapiens
gcaaaagcttatttataaacatttagggaatgaaggaataaacagaaggcttcatctgatccaaaatgactttactagttttctttcctaccctctcccactagcaccctctactccagtcaacaaagtgagaagggcgctctggtgaacatcagttatttttgcctgccaacagcattcaacttcctttatcttggcaatgagatatggattttcctttaggaaagctacccctcccttgctctgagtatgtgaagttcaggtggagttaccccatcacctcactcctgggtggacatgtgacagaagtctggctgtaactaggacacagcaggccagggagcaaactgggatgatcagagccaatgagtgccagtccagggacattttcaggaaccactgggaaggagatgtactttctctctggggagtactaagctggtaagtttgagctgctgggggccttgcctaccaccacttagggaaaacctgtctgcatctgaaaccaataagaaaaaacagagccaagagctggagaaagaggttatggatgatcatttgagcacctaaattcaaccattattttacttctctgtgccccagttttcccattctgtgaagtggggatcatgtgagtacttcctttatgaagtttgggaattacatgaagtaagacatataaatcacttaagcagtacctgtattgtttacttacataagctgataatccctttaaaaaaaaaacaaaacagtgattgagtatctgtcacttgtagctaatacaggtacccaaggagtaaattcagttgctggtgaaatcaaacttcaagtctctgtccagggtgaacctaaggaccagtcagtttgcaagaaaaggcaatatgtaacctgttgtcacaagctctgtttctcttctcttattctccctttattagagttcatggtaggatcagtcaggctcctggtacagagcagatattgaaaaaaatatttagtcaacaaatgaatgaataacttaatgccttgtgtattattgattgctgtgaaaccaattaccccccaaactcagtggcttaacaataaacattaattaattttcacagttctgtggccaggaatttggcagctacttgtctgggcagttcttggtggagtctcacatgagactgagtcagaagtaagccagggctgcagtcatctgaagccttgactggggctggaggatttgcttccaagatggtgcactcccatggctggcaagttggtgctgcctgttgatgacagtcctcagttcctctccacatgggtctctccacagtgttcatcagtgacttgcagcatggtgactggatccacctagtctagaagttgcaatgcctctgataacataactcctgaaagtcctaatccagtgtggaggatactaaactgttctttgtcacacagatcaaccctgattcactgtgggagggtactacttgaagggatgaaataacagaagacagggatcatgtggcaccgtattggaggctggctactacagccttgaatggatcaaaattcctctcattagtcttgtctttgaaccactgtgggggaaggtgagatcttttgagttgcttgagatttggcctttgtaaattaaagttcctggtattaataactcttagaaatcttgatgctataactttaaaatattagctgctagaaatttggatgtcacaaaacaatttgggaaagatgcagccaaaactttctccttgacctctacaaacacacacactctcacaattcctttactgcctgttgaattttcacaatgaaagcattcttcctgagcggaaatgaaattaagcttttctgggtaatcccacacttttcctaatatgtactgacttcagacaaatacatgtttcacagagtaaatacagcccaagggcccagtttattcttggaagagttggaagaactgacatcattttcttcttgtgatctgtgggtatttttcacctggtgagaattggcaccaacgcctttgctccaggcatggcaacacttgggtactgtgtttccaaagattccaacctgagcctcactgagttggaagaggctcaggttggaatcttttatcatttccctggcattctccctttactcgtagggctacatattttctcacctcctttaattctgcacaaagccaggataatgtatgatttaggttagggtacaaacatgcaggaatagagtattgcaggctctggaaaacagccccacctaaaactgctcctcaaatcctactcgtcatctgttctctcctatggagcctgtcctgaatttcacacaagaaagctcaaggccatcaacatttggagcaaaactggaattgggctgcaggccttgagcaggcacttttattaaatgttattattttatttttgcttctgaagagttaccctgagattttcttataactttgtgtaatccctcaccctttttctggcatagtcgtcaacttaataagcatttattaagcccctactatgtgtcataagatgtgagcggcactggaggtacgaagagcccatggtttcaggggaatgatgcctaagtcagcacatgctaaacctgtgctaagtacccacatcagtgcaaatcatgtaggagccttcacaggggacatgagaaatgaatggaggccttaaaraaaagaatatttcaccaaacaagaaaatgattga

SEQ ID NO: 65754 - DNA, 719 bp, Homo sapiens
aagtgtggcccttgtgtgttacgttacttcttttgagagtatggtcatatccatccgtttgtagcattacacaaggagtcagttaaggtacaaggggtgtgagacccagtgactgcccccaaagtgcttgtcactagagcttctctccctcacctctaattggccttgacatttgggttcgttcagagggttgccccatactgccttctggtaaaatcttggcgccctaggcctaagcctgctcatcttgtgcctccttttcctcctcctcggggcccattccagtggaaaagaagtgctactttgggggtggactgaaacaagttgctgggcttccattggccattgccacttgcttgtcgttgtgaggaggggccgtgcctccacaggcccatacctgtaacctgagatactgttgtgagcgggaatggaggaagtgcatggaarcccctcagcacgatgcatagtgaacagacaagctgtgaaccttgggagttatcaccatgtgtgatgatgctggtgaagaaagcctgcactgcggaggctgacagcctgggtttgaatcccctcatttggaatataatcttggcaaagtctgaaagcctcaattgctcgtttgtaaaactggaagatagtaggacttgctgcccggggtcggggcaggatggaggggcccatgagaattaaggcagagcccagcgcagtgcattgtaaggatc

SEQ ID NO: 65755 - DNA, 719 bp, Homo sapiens
aagtgtggcccttgtgtgttacgttacttcttttgagagtatggtcatatccatccgtttgtagcattacacaaggagtcagttaaggtacaaggggtgtgagacccagtgactgcccccaaagtgcttgtcactagagcttctctccctcacctctaattggccttgacatttgggttcgttcagagggttgccccatactgccttctggtaaaatcttggcgccctaggcctaagcctgctcatcttgtgcctccttttcctcctcctcggggcccattccagtggaaaagaagtgctactttgggggtggactgaaacaagttgctgggcttccattggccattgccacttgcttgtcgttgtgaggaggggccgtgcctccacaggcccatacctgtaacctgagatactgttgtgagcgggaatggaggaagtgcatggaagcccctcagcacgatgcatagtgaacagacaagctgtgaaccttgggagttatcaccatgtgtgatgatgctggtgaagaaagcctgcactgcggaggctgacagcctgggtttgaatcccctcatttggaatataatcttggcaaagtctgaaagcctcaattgctcgtttgtaaaactggaagatagtaggacttgctgcccggggtcggggcaggatggaggggcccatgagaattaaggcagagcccagcgsagtgcattgtaaggatc

SEQ ID NO: 65756 - DNA, 1189 bp, Homo sapiens
taaaagttgtgtctataattaaaaaaawatatatatatatacacacacacatatacatacaaagtcaaactgaagaccaaatcttagcaggtaaaagcaatattcttatacatttcataataaaattagctctatgtattttctactgcacctgagcaggcaggtcccagatttcttaaggctttgtttgaccatgtgtctagttacttgctgaaaagtgaatatattttccagcatgtcttgacaacctgtactcttccaatgtcatttatcagttgtaaaatatatcagattgtgtcctcttctgtacaattgacaaaaaaaaaaatttttttttctcactctaaaagaggtgtggctcacatcaagattcttcctgatattttacctcatgctgtacaaagccttaatgttgtaatcatatcttacgtgttgaagacctgactggagaaacaaaatgtgcaataacgtgaattttatcttagagatctgtgcagcctatttctgtcacaaaagttatattgtctaataagagaagtcttaatggcctctgtgaataatgtaactccagttacacggtgacttttaatagcatacagtgatttgatgaaaggacgtcaaacaatgtggcgatgtcgtggaaagttatctttcccgctctttgctgtggtcattgtgtcttgcagaaaggatggccctgatgcagcagcagcgccagctgtaataaaaaataattcacactatcagactagcaaggcactagaactggaaaagaccacagaaaacaaagaatccaaccctttcatcttacaggtgaacaaactgtgatgatgcacatgtatgtgttttgtaagctgtgagcaccgtaacaaaatgtaaatttgccattattaggaagtgctggtggcagtgaagaagcacccaggccacttgactcccagtctggtgccctgtctacaccagacaacacaggagctgggtcagattcccctcagctgcttaacaaagttcctcgaacagaaagtgcttacaaagctgccttctcggatactgaaaggtcgagttttctgaactgcactgattttattgcagttgaaaaaaaaaaaaagctattccaaagatttcaagctgttctgagacatcttctgatggctttacttcctgagaggcaatgtttttactttatgca

SEQ ID NO: 65757 - DNA, 654 bp, Homo sapiens
ttacaatcagagaggcacagtatgtctgtctccttggattctgagagttcacattcccattttctgagctagaacttgactctttttcattgaaagtgaaggccaggcacagatagctccatagcaacctctctgaactccccaagrggaatttactcacacaaagcaaacagtgtccaattcactgaagatttttcagaggagacagaagagagagagctggtattgcacacctcactgcaaatgacttgaaatctttggatgttttacttacctccaagttcctccctctcctttctctgttgccccatagtccaaggtcttctttcagttcttcctacatatggcactcagtctcaccaagttcttctcagtcttcaaatgtcctttactatctcagccaattagtgaccataatttgtgaatcagccatgccatttgaggctgtcatccccacctccaagggattcacattccaagggatttttaatattttcccattgtgaggagtgattctgatgtagcagctgttaaaagaacaatatttttgcacattgtttcagaaacattatgtaaaattatcaatgaatttaaaaacaatgtatttcttaggccagattctcagttttttctgtatatgggagtgtgtcctta

SEQ ID NO: 65758 - DNA, 2007 bp, Homo sapiens
tgcatttttgccagagctttaatatgaaccaacaagcatacaccttgataggaaattggcacctaaaggcacctggtggaaagtacctctgtggttagatgagtaaactccagcagtgaatagggatatccggttttttgtttatgaacataaagtggcaaacaaaacaattacaagccaagaaaagtctggaagtgtcctttcatctttgagaaaaaaaaaatcagttagcagagtacttacgcagtctttgtgcagtagcaattgccaaacacccctcacaatccagattttattacttgatttttcaccaacagagaacagcgatgtaacctccttctgatttttgtgccatatgaaacagtggtgtttacagtattgaggaggaagtttctcagagttcagtcctattgcagcttgcatggaataatttgggatcttacttgtttatgtgaatattcacagattcctttagaataatgggactttccattgaaaaaaatgtaatgtgaatttccagtgatttattgatttgttttatactctgtccagttagaattctttggaagtggaatcagtccagagacggttattgagcatctactatgtgccaggcaccattcctagcactagggatacagtgatgggcaaagcagaccaggcacctagctttttggagctcaaattctactggggaagacagatcacacacatgtaaacaaagaaatagtataatttcagataggcataaaactaacatttgagctcagacttaaattgcgggaaatggtcagcttcactaacgcctggaggaaaagaggcagggggcctctctcagcatcttgagctcaaggtgtaaagagaaccacgaagagaatagcacacaggatgctgatcagatgcataaatatatttaatatttattctaaagacaaagaggtcatattccctactcccatctctaaatctaattatcaaatggctcctggttggcatgctttcatattgcagaggtgttttattttttcaagatcattttgtttagtggcacaggtgtgaaagttaagagtctaaatagacatgaagctcttaaaataagaaataaactgaataacgtcattaggattaccttctttatttccaccagttcacaggtgcaacaaggttctatgggctaagcataagaagaatgtaaatgttggtcaatttctcaaacactgcagattacatttagaagttatttgaaggccatttgatcagccaaacacagcacagacacccttgagcacctgcaaggttagaagcacatggctagcctctgttcttgtccctgaggaatctacttgctctcaaatcatgtgtttaaaatgaaacagagctggagtctgtgtgatgaacttccttgggttttacctgcccagcaaccaagatcttgtcttctgattgctgagtggttcacataggctaatctcaccctacaaggcaaagcccatgatttaggaccaatccacacattccttcctcttggctaaagttgagtgcatccacctgggatgaactcatgttccaggttagtcagatcagagtgaatgtggagacttttgctggagcaactaggaaacagaagactctttcccctgggaaggttacttgaggcccttgatttgctggggccaccaagtagagaaggctggcctcacggcaaagccagcacaaaggagagcaaaactaaaagaggagatggaggacagggaagagaagggaatgtcagatcctcatgccatcgttcagggccattcatccatctctggatttcctgtacatgagccaacaaattcctcatgttgcttattccactttgatctgagtttctcctcttgcgatttgaagaatactgactgatatagtcattctaacctatatattgctatttggattttatttatttttaatkataagaaacatcatccgggactaggaaagggtataatctttctggcctcaagc

SEQ ID NO: 65759 - DNA, 746 bp, Homo sapiens
ctgactcctgagccatcacccttgttcacattgagactgcctgtatccctgcctttccacaaagaatattcataacttgtagggcttaaaatgcgcgcccatgacttggatatgaaaaagaataactattttctatgactggcttcatctggctgtgtaacccctattcctgttgtgccacccttgggtaaatacyttggagtagaatagctggctcctcttgtggttgggtgtttagctgtttaagaaactcttgagctgtttcccaatgtgattgtaccttttcacattcctaccagcagcataggaaagttctgatccctctacatcctccccaacactccttgtgatcttctaaattttagccattctattaggtgcagagttctatttattgagtcagtttttatgttgtgatttttcaggaaatctgtccatttttttctaagacattgaatcattgacatataattgcttatcatatgtctttattatctttttaatgtctgttaaagctgtaattatatcccctctgttattcctgatattgtttttgtttgtatgtgtttctcttttctttttttctttcattagtcttaccttgggtttatctattatagtcatcttttcaaagatccgactttatgaaatttctctttgtttactatttcatagatttttgctatgatatttattacttcacttgttcattctgttttgctcttaagctcccaatatctggacac

SEQ ID NO: 65760 - DNA, 746 bp, Homo sapiens
ctgactcctgagccatcacccttgttcacattgagactgcctgtatccctgcctttccacaaagaatattcataacttgtagggcttaaaatgcgcgcccatgacttggatatgaaaaagaataactattttctatgactggcttcatctggctgtgtaacccctattcctgttgtgccacccttgggtaaataccttggagtagaatagctggctcctcttgtggttgggtgtttagctgtttaagaaactsttgagctgtttcccaatgtgattgtaccttttcacattcctaccagcagcataggaaagttctgatccctctacatcctccccaacactccttgtgatcttctaaattttagccattctattaggtgcagagttctatttattgagtcagtttttatgttgtgatttttcaggaaatctgtccatttttttctaagacattgaatcattgacatataattgcttatcatatgtctttattatctttttaatgtctgttaaagctgtaattatatcccctctgttattcctgatattgtttttgtttgtatgtgtttctcttttctttttttctttcattagtcttaccttgggtttatctattatagtcatcttttcaaagatccgactttatgaaatttctctttgtttactatttcatagatttttgctatgatatttattacttcacttgttcattctgttttgctcttaagctcccaatatctggacac

SEQ ID NO: 65761 - DNA, 1141 bp, Homo sapiens
cagacactttcctcagaagtgaaaaatgcctgaccacaagccctagttaatttaaggccacttagatggcgactccaggagaattccaactcagtgccccaagatttctcagggacttggatttctccctaacctactggaaaagaatttgtcatcagcaaagctcttccgtagagaaacttgagataaaatgggtctttcaacagggctgtgattgtgtgaagggatataaactggcaagaattgtgctcctcattcttgatggaaggttaacatgattaggatctccagaagtctcatatagcaagattaaattctattttgcatactgaagtctcagatactcaaatttccactagcatgttagattctcagtgtgctccctttatgtgggaaatctgtaacaaccacaaggcacactcaatccttcctcaggcataggcacacccagacccacccacatgcgcacacacccatacgtccacacgtgcacccaggcacccgtgctgcatgccctcacatgcacagccccacatgcaagcacacctccatgcaactttcctcaccaacacgaacatgcacccacattacacacccatatctattcccccacatgcacctcttcccacagacacatcttccacacatgcatgccccccgcacttgtgatttaatggcacatatgattcagaatgtctgtgaagccatttccaacctgtttttgtaataacctgtgcttctcagtccaaaagatagtggaacgtatgtttccaggaaaatatgaaacaggaatttctcaatctcctagcagcatccccaccctgctgtactaatattagtccatgttgccaatagcagcagcccatgtcagactggctgcctctcctccccacctaatccccacttttcttgtttgtaattgaagaacaaccgactgtatctcatgctcgggctgaccaatgagtaagcaaaagtgttatgcggggagacagccttctaattctgcagacattattaaaataatccaacacaggtaccygtgcaatcaattttcagtttctaggatgagagatatgtcaccttgccttcaaaaggccaaacctggctcgcttcattggctcccttctcaatgtctgataca

SEQ ID NO: 65762 - DNA, 519 bp, Homo sapiens
cctcatcatgctgggagatgactctcatctcctcactgaggtttcctgtgcagttgcagagagttggtgaccggggctagattcaccttaagkcttcctcactcaagtctggcagttgatactggctgagagctggggtctcagcagggaccattgattggaacactgctgggtgcctggacttccttgcagcacaaaaggtgggcaccaagggttaatgcccccagagagaacaaggtaaaactagattacctcttctagcccaaccttggaagtcatatggcaacttctgcttctgctgcacttttttggttagaggggactcaccagataagtccatattcaaaggaagggaagtaggcttttgatgggaggatatcaaagaatttgcagaaatgttttaaaagtacaattgcctcaacacgaaggaatctacttgatttcctaaaactagaatcctggttgctaaaggttccataagacaccccatatattgcttagcaaatcaccattcattgt

SEQ ID NO: 65763 - DNA, 519 bp, Homo sapiens
cctcatcatgctgggagatgactctcatctcctcactgaggtttcctgtgcagttgcagagagttggtgaccggggctagattcaccttaagtcttcctcactcaagtctggcagttgatactggctgagagctggggtctcagcagggaccattgattggaacactgctgggtgcctggacttccttgcagcacaaaakgtgggcaccaagggttaatgcccccagagagaacaaggtaaaactagattacctcttctagcccaaccttggaagtcatatggcaacttctgcttctgctgcacttttttggttagaggggactcaccagataagtccatattcaaaggaagggaagtaggcttttgatgggaggatatcaaagaatttgcagaaatgttttaaaagtacaattgcctcaacacgaaggaatctacttgatttcctaaaactagaatcctggttgctaaaggttccataagacaccccatatattgcttagcaaatcaccattcattgt

SEQ ID NO: 65764 - DNA, 519 bp, Homo sapiens
cctcatcatgctgggagatgactctcatctcctcactgaggtttcctgtgcagttgcagagagttggtgaccggggctagattcaccttaagtcttcctcactcaagtctggcagttgatactggctgagagctggggtctcagcagggaccattgattggaacactgctgggtgcctggacttccttgcagcacaaaaggtgggcaccaagggttaatgcccccagagagaacaaggtaaaactagattacctcttctagcccaaccttgraagtcatatggcaacttctgcttctgctgcacttttttggttagaggggactcaccagataagtccatattcaaaggaagggaagtaggcttttgatgggaggatatcaaagaatttgcagaaatgttttaaaagtacaattgcctcaacacgaaggaatctacttgatttcctaaaactagaatcctggttgctaaaggttccataagacaccccatatattgcttagcaaatcaccattcattgt

SEQ ID NO: 65765 - DNA, 519 bp, Homo sapiens
cctcatcatgctgggagatgactctcatctcctcactgaggtttcctgtgcagttgcagagagttggtgaccggggctagattcaccttaagtcttcctcactcaagtctggcagttgatactggctgagagctggggtctcagcagggaccattgattggaacactgctgggtgcctggacttccttgcagcacaaaaggtgggcaccaagggttaatgcccccagagagaacaaggtaaaactagattacctcttctagcccaaccttggaagtcatatggcaacttctgcttctgctgcacttttttggttagaggggactcaccagataagtccatattcaaaggaagggaagtaggcttttgatgggaggatatcaaagaatttgcagaaatgttttaaaagtacaattgcctcaacacgaaggaatctacttgatttcctaaaactagartcctggttgctaaaggttccataagacaccccatatattgcttagcaaatcaccattcattgt

SEQ ID NO: 65766 - DNA, 577 bp, Homo sapiens
ggtaattcaatccttgattgagtaatccgccttttccacagtaatctgaattgtaccctttattaaatattaaatttctatgcatatatgtgggtgtatttttggttttctgttctatttcattgattggtcttttcatgcattaataaaactgcagccttttatttattgaagtattgtactatttagtacgcagataggactaagcctttttcatgcctgttttttgtagagtttgtagtttaggaatcattttaaaatttttacatggtttaacccaggaggcagaggttgcagtgagctgagattttgcgactacactccaacctgggcaacagagcgrgactccattccaaaaaaataagaaaaacagaaaaataataattacatctgcaaagaccttatttccaggtaagtccacattcacaagtatcaggaattagaacttggacatatctttttgaggtattcaatttaacccactacacccagttgacaatatatatcaacaccctcttcacttagtgtcctgaaggaattgatcctatagtggaaaagtttttgtttctattttttc

SEQ ID NO: 65767 - DNA, 836 bp, Homo sapiens
atttttcctctttatcttctcaagagctctttttggatctatgctggtatgcatgcccgtttttaagaggtgaccactcagagcggggaaggcactacccaaaggccagccccaggggcgcaggggcttctgtgattaagaagctcagaccctgactttttccatgtgtcccttgacggttatccttccagcacactcttcctgagagcagagatgctctagcctggcaatggtaatgataactgtggcaaatatgccctgtgcctgggtggtggggtccttgtgtgagccctggtctctctgtccagttccaggacccacttcaataaccactaagccggaccacctctccacccaggctgggtctttgcctgcctttcagaagctaaaaacctggttgtcaatcttgggctgagttctggcacagcagaatgtatagtataatgaaaagaacatgggcttcgggtrgagtcagatttggaagtgaatcctgatgattatttggcgtggcattcttcatgctcacaggtcccacttggctacttcacaatggaatgaagccatcattccaccctttgctgggtaacctcaggcaggtcactgagcccctacttcatcatctgtatagcgggacaggatgtcacagatgtagagattcaacaggatgagagtgcctgagctgtgacgggtgcccagtaagtgccattttctccctcatggggcctcgaagtattcaaggaggaagacaggcattgttggcactttttgtgcttcattcattcaacaaacatttgtttagcagccattgtgcagcaggggcttgggatatggtcatg

SEQ ID NO: 65768 - DNA, 836 bp, Homo sapiens
atttttcctctttatcttctcaagagctctttttggatctatgctggtatgcatgcccgtttttaagaggtgaccactcagagcggggaaggcactacccaaaggccagccccaggggcgcaggggcttctgtgattaagaagctcagaccctgactttttccatgtgtcccttgacggttatccttccagcacactcttcctgagagcagagatgctctagcctggcaatggtaatgataactgtggcaaatatgccctgtgcctgggtggtggggtccttgtgtgagccctggtctctctgtccagttccaggacccacttcaataaccactaagccggaccacctctccacccaggctgggtctttgcctgcctttcagaagctaaaaacctggttgtcaatcttgggctgagttctggcacagcagaatgtatagtataatgaaaagaacatgggcttcgggtggagtcagatttggaagtgaatcctgatgattatttggcgtggcattcttcatgctcacaggtcccacttggctacttcacaatggaatgaagccatcattccaccctttgctgggtaacctcaggcwggtcactgagcccctacttcatcatctgtatagcgggacaggatgtcacagatgtagagattcaacaggatgagagtgcctgagctgtgacgggtgcccagtaagtgccattttctccctcatggggcctcgaagtattcaaggaggaagacaggcattgttggcactttttgtgcttcattcattcaacaaacatttgtttagcagccattgtgcagcaggggcttgggatatggtcatg

SEQ ID NO: 65769 - DNA, 1308 bp, Homo sapiens
catccatttgtctcagatctcatcagtccttcctcttcaattgattcaaggcctcaaccccaaatgcttcctgcattgctctgcagcaccctccagccctactgatgcccatcaagtcataggaatcacacttgtcctctatggagacccaaacattaaataattaaaacaatgagagaagatttgggaagcaaagtcgatgcacttttctgcatagccacagagctgagtcatctaagctctgtacagattcatcaattgaaattgtctgtgatggttaattttctgtgttaacttggcttggcaatggtgcccagttgttgtcaaatatcagtctacatgttgctgtgaagttattttttaaacgtgattaacatttaaattggcagactttgagtaaagctgattaccttctatagtgtgagtggccctcacccaatcgttgaagatgttaagagagaaaactgagatccctcaaagaggaaggaattctgcctccaaattgctttcctttgggcttgagttgcaacattaactttttccttagtatctggcctgctgacctgccctgcatatttaggacttgccagcccctacaatcacatgggccaattccttaaaataattatctctctctgtctccctctgtgtgtgtgtgtgtgtgtgtgtgtgtgtgtgtgtgtgtgcscgcacgtagggttttcttattatgttaaattaataagtaaatttcgatttaaaagaattatcagctttaatttctatgatggaaaatcttcagattttcatactgagattaaaacatgtttgggaatgtggatgtataccctaaggtgtaaatggggaatgtttgtaaagtactctgacatcatctgacatggcagctccccagccatggtggtggtgatagaaatataaatggtgacagcagcagcagtgtgatagtcacggtggagggagattgcttttctgcagccatgcttctggcatctcccaacctgggtgggacccagctgaagatctgcagagaaaccagccatttctgagagcaaggcaatcagtgggcatttactggagggtgtctaggttcttaacatctcactgttatttgggctcatgggatcataagaatgacaaaataaagagaagtcctcatttctgaccacaagaagcttgacacaattccagtaagtcttggattgaaaggagagacatgttttcatgtgtttatattcccttaacaaccaatataccttgacattgaagagccaagatgtgagtgggaggtagtgctatggtttgtatgca

SEQ ID NO: 65770 - DNA, 869 bp, Homo sapiens
tgagttttaccccttcctctgtcctcacatttctccttttaacttcccagtgtccttccattgggcagagcgttctgccacttgaatctaggcgtagccacagggctggtttgggccatgttagcaaaatggcacaagcaaaggcttggaaaagtgcctgtgtgtatcatcttgcccatttgctcctctgtccttgtcacaagaatagggacacatgagcttgctggggaacgaggcacaaggagcagagccaaaaccacaattttwtttcagccaagtcagacatctcttggccaactgtcagtcaggagagactctgaaaactgcccatttgaggttagtccaactcattgactccagaactcatgacttatgtaattattgtatggccttaaagctgagtcggttttttttggtacatagaattattgtgacaatataaaactgatactttaaatatattcattacatttcagttgtgtgctagacatggtttattgtaaaaaattagaagcttcagattacaatatctacaagagatattgtatcaacactttgctaatcaaagactagaggcttattatcttgttagttatgaacttagctggatcaaggctgggttaaagtttcattaaaactttgtctatctctggttagttcctgtccccaagaatatggatttcaagggtttatttgaaatcatgatgatttcggctcctcagtacccagaaatctggacctttggctttgattctcagagaaatcacacaccccttggtcaactacctgtcaggggagactctgaaaactgcccatttgaagttagtccaactcattgattctagaacatacgacttatgtaattattg

SEQ ID NO: 65771 - DNA, 595 bp, Homo sapiens
accataatttcttagtataactttgcaagaaaataagctttaacaacaaaagaatgtaaaataccwgatccagcacagcaagggcaaccctgtggcttgctgactcattaagtacccatgctactttatgaaacacatgtgagttgcatagatttattaaatactaatactttgaataaatatggacatacccctgcagaattttggaatatgacatattttaaaacacagttttcacctgtgactgtaaaacatgcataaattaggttggaaaccttgaggtggtagtgagtgttttgaaacattagagattgcacatttacaaatccaccaattataaatgtgatttttgagcatatatgtagtttaaatatataattattcttattccattgcacctgcaacacccagttcaacaaatatttattttctaggatctggagagttaagatgaaaactaccttgatcatgacatgtaggagttcaaagtctcatgtggggtgtgaacatctaaatagatagttctaattactgtggtgggaaactggggtcctgtatgatgatcttagcctacagagaagaggagcacctctcc

SEQ ID NO: 65772 - DNA, 1085 bp, Homo sapiens
tttgggaggctgaggtgggcggatcacaaggtcaggagatcgagaccatcctgaccaacatgttgaaacacggtctctactaaaaatagaaaaattagctgggtgtggtggcatgtgcctgtaatcccagctactcgggaggctgacgcatgatagtcgcttgaacccaggatgcgaaggtgcagtgagccgagatcacaccactggactccagcctggtgacagaatgagactctctctcaaaaaaaaaaaaaragagagagagaagttgggatttcttggggagtcaaaatgagacaaggatgatcttgcagggctcacattttcagcttctcttgtggtacgtgaaggctgttggtggtgggtgtgtttttgtttttgcttctttgtttctttttttggttttgcttttgttttttgagatagggtcttgctctatcatccaagctggattgcagtggtgcaatcatggctcactgcagcctcaaactcctgggctcaagtgatcctcccaactcagtctccctagcagctgggaccacaggtgctcaccaccatccccagctaatttttttgcatatatatttttttagagacagggtttcaccatgttgcccaggctggtctcaaactcctggactcaagcaatccagctccctcagcctcccaaagtgctgttcttaacatggaagttactgataaacatcgtgcttatgaaagccactcgtatttttcaggcccagaacctgaggggaggccgttgaagggatgtcatggtgcaaatgagttcctttgcctctccaagcactggtccttattaacctggaggtgactgcagccacaagaaaaactccctaaaagctttgctggcaggaggtgaaagagaagatgcaccacgcctggaacatcctaagtgctcaataaatggctgccgtgggtggctgcttccccaagccctcctccttcaccacagggttcttgtaaaattcctaactgtccttggaggcctaaattccctgctgtagccatcctgatgcccctaccctgtgactttgtggtttcataataaagataacaacagctgg

SEQ ID NO: 65773 - DNA, 1256 bp, Homo sapiens
gcatattgtgttaaaaatcctcttggccaggcacagtggctcacacttgtaatcctaccactttgggaggctgaggtaggggaattgcttgagcccaggagttggaaactagcctgggcaccatagtgagaccctatctctacaaagtattttttttaaagttagctgagcatagtagtacatgcctgtggtcccagctactcgagaggctgaggtgggaggatcacttgagcccagaaggttgaggctgctgtgagccatgatcacactactgcactccagcctgggtgatagaacaagaacctgtctcaaaacaaaacaccacttgttcccccgccaacaccaaaacttcttgaggcctaccaccgaggcagggcatgttgctttggggacaatagctgagtcaatggcaccttcagagtccacacggaggtctccttgggagtgtgagccctgaacactcaagggcatgtccaccctagtggacacatgtccatgagcctgtgcaggatgtaaactcaacagtgaccccagaatggcagggtcaaagcccccatgctagaggataaatcagactttgctattatctcacctctcaaggtttgaaagaaaacactcagcattcttgtgctattaagggtggaagggcggctattaagggcatttagggaccgatgagatgaactggattttgtttttgttttgaggcagggtttcactctcgcccaggctggagtgcagtggcacgatcatggctcactgcagcctcgacctcccaggatttcccactcctgtgcagcagaggatgccaggtgcacttgatgtcgggctggctgtcacgaatatgcccttgagctgcacaggctgcaggtggcagcagggccctgggacaacctcacagacccgccccactgacgctggctcctagagaggtggttgctggccgatctatcaggggcttctcctttttgccatattcagattggagccataaattaaattctcaggagaaaaaattaagctacttttagaagwcatgaaacatgggctttggggatcaggattaaaaactttaacaataacattgcttaattctcaactcctattcttggtaggatgaactgaaaccagtgattttaccattatgtacaatattttttcttttgaagggcctgaacagacggttccaaatccaggctgtatcattataatcacagtttccctggctcacacttcagcgttttgcctttcatgca

SEQ ID NO: 65774 - DNA, 768 bp, Homo sapiens
gcctgaacccgggaggcggagcttgcagtgagcagagatcgtgccactgcactccarcctggacgacagagcgagactccgtcccaaaaaaaaaaaaaaaaaagaaaaatctttaccaaggcctgatttcttgagcatattgatataatatatagttaaacatgttattgatagacaagatgtttctcaagaatattatgtttgtgcagaaattaccacataaaattaaatccttcttttcggctgactattttttaaaaacttaggctgatattaatgaaaaaactgaaacccaaatgaagcctggagttaatagtaatgtacaacgttgggaccttagtttccacaaatgtatctgttttactttaagatcttcaagatgcggagcacccctacaacgattaggagagacacaggctagaaatagtttattacttacagatcctggggcacatggcatacttggaggccaccttcatggaaatcagggagtgcaggcagagagaccaagacagcaacccatgggccaacacctttattgggtccagggtgttatccaaacaggtttcccatggggagttttattcggtgggtttacagcaagcaggcatgagttccaggaggtggcacagtgactgagtggtgggccctgtggcgcatctgcacattctaggtggggtgtgagggtcagtgtggccaataggttctagctgtgccatagagaagtggtcaacaggagatagttgtatgaggcagatatctggatcc

SEQ ID NO: 65775 - DNA, 566 bp, Homo sapiens
gctgggattacaggcacgagccaccatgcccagctaatatttgtatttttagtacagacggagtttcaacatgttggtcaggctggtcttgaactcctgaccttgtgatttgcccacctcagcctcccaaagtgctgggattacaggtgtgagccatggcgcctggcccactctagtctttcttaagcctctactccatctcttcacttaaaaattgactttttgcaatgtggctctacactagtcaacaccatttctctcatgggtagcatgacctgctgctctgcatttcatatgtatccagcagaaacacaatgtggyacactggtaaatacaggacaccagattgcataaagtcaccagggagttggcacaccctaaggagatcccatcgatttgtagagtcagcactcccaaaggacttcagaaggtgtgcagctgtcatctcagttgccacaatgtcagctttcaggtggcatcattggctgcattttagagttatgatctgctgctatggatttctatagagctaatgcttctcccacctccaattattatttgtatta

SEQ ID NO: 65776 - DNA, 532 bp, Homo sapiens
ctggtgctcagtcataattcagcacaaagagaaatactagatcatcattagtctgggtaggttagggctaaagattaaatgctaaagagacatagcctcacttgtgtctccaggtcaagtaatgggccttaccatcatcatcactattataattttttttttaatctctgcagatcaaggctcaggagcagccctgggaggcccacactttctcaaagttgaaattcacttacttactcattcagcaaatatttctataacgtctgctatgtgtttggcaccagagttacaatattagaagagaaaaaaacaaaaagtccttgatctcaagaagtttatatgctggtagggggagacaataatggtagatgccaggagggagtcgtgtgtgtgtgtgtgtgtgtgtgtgtgtgygcgcgcgcgcgcgtgtgtgtgagatactaggtggaggaataaagcagagtaaaatatcagagagtgagagtggaaagtgcatcttacatgaatggccaaggaatgtgtttctgagcag

SEQ ID NO: 65777 - DNA, 710 bp, Homo sapiens
tacagttcgacatgagatttggggagggacacagatccaaaccatatcagttaaacatacacttaccattatatacgagcaatttcactgataggcattttcccaaaagaaattaaaatatgtgctcaaaaaagactggtaaatgaatgtttctaacagttattttttaatagccccaaatggaaaacaattcaaatgctcatcaacaaataaataaataaatacaggtagagtcatttaattaaaattaaagtcaaaaggaatgacttactgataaatacagcactatgaacaaattaaaaaacattatgttgcacaaaagaagccagtcagagaaatggtacctactgtacgatttcattaatatgaaattttaaaatcctcaaagttaacctatagtgataggaaacaaagcagtggttaccaagggtcagagtgaaagtgagattaactgtgaagaggcaaaggacatttctcggagtgraggaaatattcaatattttgattacagtggtagctaccaaagtacatttatttgtcaaaatgaatcacaatatacatttaaaatagggtacattttattataggtaaattatagctcaacaaagttgatttaaaagataaaaataatcatagaacattattagtcagattatctgatatttataactattatatgtcataaataaagcattaggttttaagatgct

SEQ ID NO: 65778 - DNA, 529 bp, Homo sapiens
gggaagctgagacaggagaattgcttgaaccaaagaggcagaagttgcagtgaactgagatcgcgccactgcactccagcctgggcgacagagcaagactccatctcaaaaaaagaagcaaaggcagatgaaataatcaattgtgtgcagtaacaagtatttgaaaaaatagtgagatttcccattttcagaagagtgttatggtgaaagcaagaagggagtggtttgaagagttaatgagagattggagaattagtacaacattatggataaaatcttcaatacttggttgtgaaagaaaacagacaaagtgcaataactccgggaccatgagttgtcaagtgggagatctgtatatmtacatatgtatgtacatatctatctatccatttatctatctatacattcagcttcattgaaagaatgtgaatgaattgaataaatgaatttaacttaaaggataattatccattgggagggaaaagaggtaaatatacaagagtgagaataaataatctatgatgtaaaa

SEQ ID NO: 65779 - DNA, 1453 bp, Homo sapiens
gctgaggcattcataagtctggcacaggtaatgaacttgatagaaataattgcttgatagaattggttttggaaattgctgaatttttatttaaatttcaaagtattggggctggtcatggtggctcaggtctgtaatcccatcattttgggaggcctaggtgggtgaatcacctgaggtcagaggagttcaagaccagcctggccaacatggagaaacctcatctctactaaaaatgtaaaaattagctgggtgtggtggtgggcacctgttgtcctagctactctggaggctgaggcagaagaattgcttgaacctaggaggcagaggtggcagtgagccgagatcgcaccattgcactccagcctaggtgacaaaggaagactccatttcaagaaaaaaaaaattgggaatgactaaaaatacatttttagcactaggtgaatggctatatttgtctactccacagccatgcacagggctccacctaaattttaaaatatgggaaccagagcttggtaaatgttctttgctggacactgggatctttaaaataggacaatagaactacatatcatgatcccaagaggattatatgcatatcactagggatttaaatataatgagtcttaggaaatgatcaccattcttaagaaaaagaacattcttgtaatatgtgcaaattcaacagaagttagaatatgcaaagagtacatattttgctgatttttaaataaaacctttagtataacttttaaagatgtatttagaaattatagcagaattgcaacagcattacagaaagttgaaaaatggaggaaaaagttcctcctgggaaccaacatcagaactgacatcattttgctgtgttaagtcagtaatttctcagttgacctccaaattggaatcacctggggagcttgttaaacagcagatcttggttccttctgagtcagaatctctgtgggtaggacccaatggatttatagctttaataagctctgtggctgattctgatctgcagctgggagattaacttgttcagctgcctagattattctaccaccagttcatcctggagggcccatcccaggctttgctgcagagattgtctctgcttaagagaagccacagraggcttaaaacaggagttgacctgatcttactcacttgtataaagccctggagtagaatctgaaaggaataaaccttggagtcagggagagcaattatgaagcatggtgaggatagagagatgtggatacatttgagggaaatttagaaggtaaaatctggtagaactcgctgacaactggatttaagaaggaaaaaatcaagacatcgtccaggcttagggacagaacacatggtaacaactatttgagacaggacacacaggaaccttatttatataaatttttattataatttgtctgaaatatttttccaaaag

SEQ ID NO: 65780 - DNA, 1670 bp, Homo sapiens
gctggagcctcagcaaattttagaaatgagagaaatattaaagattatgtaattcaaacttcatattttgtggttgaggatgttcaacccaagtgcgcaaaactagagagctagatgtagcaggtgtggacctggaatcccaacctcctaacaatcactycaacattctttctagcacacagtgcttcaggtacaagccttctactaaggtagtcctacaaagttatggtccaactaatgtggattacatttcgctattaggctatttgatggttttaatttgcaaatttacaagtcaaaattatatgtttctaccaacttgtttcttcctcagaatttttccatgtgttgtcctgataaaaaacaatcaaatataattttcagggtttatttctatttattttggtttagatcactatgaattttttttctaactttaaaattctatgaaaataacaatttgaggtcttagtattcaatttgtggtttaaatgctgacattagggaatgaacagttcttatttatctcaagactactattatgatgcaatttcctttttacaaaaaataaaaacctcaagcttttattgatttatagaggatgaactcatgcttgtatttcaagaggaaaaataaccactaatttaaaaagcaaattatcttcagttgtattatcttccaatgagtctgggtagggattcaaaaataagctcctattttctgctggaaaatctacttgagatatttttgaatttctctcccaagttatgaggagaaaaaaatctaaactctagaatcctttgtgcatttgttgatgggaactgatactttctggctatcctttcactgatcatttgaaactttttactttgattaaaaagagtaaaatatcagtttccaagaaaagatgaaagctttccttcagaatatgtgtttacaacaatcagtattactcttggaaaattatgcaaagaaggtgtcaaaacaaagagattttcccacctctacaaataaaaaaattggatacaatagcaaaaaattatatatgcaaatatgtgtatatgtatatacagtcaatccgcattattcccagattctatatttgctaattcactcactaaaatgtattttaactacaaaatcaatactacgggcacttttgcagtcattcacagatatgcatagagtggcaaaaaaaaaaaagtatgtctctgaaacatgcacgttcccacaaatgtgatattttcccacacatatgtatacgcacacacacacacacacacatacatatatattaaataaagtgactaaacagaaaaactcataaaacaaagtttcatattatggattggttgataaaaatatcacaagaggcttatgggaacttaaccctgtatttcccctaggagcaatagttcagtgtttattaatttagtgtatgtggcaattttgtaaagcataactatcaaaagtaacaagaattgactgtatacatacatgtatatatatatatatatatatatatatatatatatatatatatgaacacatgtataaaacaaaacctacaatttggaagatgagatttagaaaacattatttatgatgtatttcttgtctcactatattctcaaactttagtgttccatttagaactcatagctagaaat

SEQ ID NO: 65781 - DNA, 1133 bp, Homo sapiens
aaatttgttttaaatacatttacttaaaacatgtacctctaaaaataaatacactagcctccatttagctaattctcagagttctttcacaaaccaattagaacagtttatcaacaatggcagacaatcaattagccgccctttaaatccattatctatcagtaaacattttaaaattcagatgtataacagaaataacatccgcagaatagaatgtagatagaattctcgctttgaaaataaatgtcttgatttccttgatatttagttcctacagatgtctacactttgcctctgcatttatctagcagtgggagagcattttctggtgacagcattctattccatgacattaccttctaatcaaagaagttagctggcattccctttgctgttttgttcgagagaaggaacacaacatcgtttgtatttgatatcactcccatagatcacagtgagttgtgtgttttaacgtaatttacaatgtgctgataccactgaggtaaagcagaagtagccctggcatttaaaaaaagaagtctcccaggagaacaacacataaaggacctggtggtgtatgtccaagttccatgaagtaactcaaaaccactgccagaatggacacactggatatctgatatcatagtcgaaacaatacaaacagatgaaaatactcaaaatacttcctttagaaacaatgcaattcacaaaaatggagctttacttttttcttttacatttccaaaaaacttgttaaaatgatataaaccagaccaagttgtttaatatagtacaacttaacaaccctgtcatttgtttttgaatacagggatctcagaaatgtaggaaatccatggtaaatgatagcaagaatgtttaatgccattgcctggattttttaaaaggaaaatttgctacagttgtaacacaacttctaaaaaatactgttttatgggctcacagtttccagattgttaactttataaattaaatgtgaagctacccatatataaacaaggcctctttttcattgatttccatcttgtttaaacctttggatatttcaatcttcagattccacaaggtaaggctgagtttatcagataaataagatgtttaagtccaygatgtat

SEQ ID NO: 65782 - DNA, 1054 bp, Homo sapiens
catgtttaactatcatactttttttgaaacaaaaaatcctaaaataaactacgtttcaccaatgatgataaacatcaggttggtttttaatgtagaggtacaaaacgtaagaaataaatatttaaatggaaaacaaaaagtcttggaataatgctctgagtccacagcttgcaaactgcaatgaggcaccccakagagctacagcaaattcacaagagcattgtggaatattttacatttttagggaaagacagtgacaggagttggacaccataaaaattactagttgaagcgagttcacagttttaatacagaattcctttagacgacattatgtctttgtaaagctgggtctggggcagttattttgattaaaaccacatattgtgcaaaaaaatcaaggtgtaacaggacatgtagttgtggtgtccaatctgattccaaggtttgagaagttgtatgctctttaacacatgctaagttgtttggacataaacacttagttatttggatctatctgcttaataaatggaattgttaggtatttcttttggcttggaggtgctgtgtatgaggcaacatgaaccaagcacatttgctagcctctggcctaagtccttttcattcatcctttctgatcctatctctaaaacctacacacagatttatgtctagcacttagtggaaatcaaccagagtatgaagaactttgctggagatgcagaaaccagatcatggtacaaaacagaatttctatgaagttaatttcattaactctgatctagatcaataaaatatgtgctcttcattggttgtaccagtttagagtagaggagatcctcaggaaagacatttccttaaattccagaatcatgtgcctcagcttatcaaccagcttgtactgttgatagctggttaagtaaaggaggctagtattatctctaagcttttctctgcctccctttctccttcttactccttccccacctccccaaaaacaaaataaaaggttttaagacttaaatatcctccctttgacacaagaatgaatatc

SEQ ID NO: 65783 - DNA, 821 bp, Homo sapiens
gcaaataaagctctgattaattgtattttcacttattatatatcatctttggacctttctaaaagtgggacactagaaaagatatactgaaactcaaaaagaatacttcagctcgagttgaatggaattcaagatgttgtggagggttcagtgggttggttataccaaagaatgctatagaatttccatgcccgaagaactgtgagaggagtatagattttttcaccaaggaagttactggcatggtttgagagatagaaggaattgattaagaaacctctcaaagtttcttccacttaacctggctctgagactctgggtctttggaaatgagaaaatacccagggaagagaaaacgaacaatttaagaagcaggaaatgactctagatcagtatttctcaattacagccgtktaagacattttcttcctaatcatctctcccttgcaccatcaccatgaaattttaataccacataaatactttgtatctgtttatgtacttgtgatcctttggagggtcacaactcactgtactatctaagagttttcccaaaaaaaccatctgacaattagggagtgtgtgctctctataaataaactatgggtccaaatgggaggtcattgaagacgggagaaaaaataaaagcgttgaatatttcacctctggctacagggagcatacaaatcctcacttgcccatgctctcacgtattgcctgcacatggaaacttccttcttcccctccctcctgttatatggaaagggatgaatgctttgctagtgctatatcatctgactgcaatgcttataatattttgg

SEQ ID NO: 65784 - DNA, 848 bp, Homo sapiens
tgcgttctgcaagtaagatttcatactgtatcctcagtttctgagcttgcctttctcacagtgtcttattggtacctcctaatgtgttcagcttccctagggttccttcttctgggttccttcctctgtctgaatctcattttcacatctgtgtgatctcacctgcatctctagttgaattaccacttgggttttgatgactatttctttaaactgtrtttacttttattttgactcccagatcggtacagccaacttacttctagaaatttttatggagttcctgaccctcattatagtaacctgcaggtcaggctctgttgtctacttgctgtgtgtccttggtcaagtcacccacttctgagtctgtttcttcatctataaaattaaagggtcaggctatatgacgaaaattccttccaactctaataggctaattctgtatgttattctagtgtgtacgtgactgtatcttgtatagaaatcttatttccccccaaaattgtaacttcttcaaagtcgcgggggtggagggacatcctttgtttctataatacttagggccatgccaagaagaacttcttcaattatttcaatgttttttatgaaccaccctgggcacatcaggtattccaattaaagatctcctgcctgactttaatacttacctttcgctcctctaacattctgtttaaggacaccaatatctgggcaaatgatggcctctcataaggcttctcccgccagcattgtctcattagatcataccttcgaaagcaaagaattaaagggttaattctataactgtgcttcagtcctaggcacggcaggaaaagagaggagagaat

SEQ ID NO: 65785 - DNA, 1847 bp, Homo sapiens
gtgcaacacaggatagttgtaaagctccattgtaattgtacatgaaagcattctggataaaaacaaagcactatcgcatgaaagcttcttataattatttttaaaatccaaccatccttagttttcatattacactagattgctggcattcatggcttttaacattcagaataccaattccctgggtttccaggaaaaatgtaaaggtaggcaattaagaagctgatagtgggggctcccctactataatagtagtggtagtggagaaaacctctgcatggccaaggatggggcaggtaggagccatgaatacctttgggcagtaatggctgaaccacatcagaggctaaatagtccagcctcggcacctccctccaaaaacagggcaaaccacagcacagtctataaatgggactagacagacattcagatagaagatgcaacttttaaaaaaaataggcaacattcttaagatcattatctttccttatatccatatggaatttgtctgttttataaaaactctggcaggaaagacaggaaaagagcatcttacctcgatgttcacatgctcctaagagattgatgatgtttggatggtgtccaagtttacaaagaacttccagttctcctgcaaagtccctgtgatcatctttggaggcatattctgggaagaaagtcaagggttgtgattcttctttgttacaccttttcagaatcagctgtcccgtcctgccccctaagaaccttcagctaccctcagtcaccatcaactgtatacaaccaaagagattactctaaagtagagtttctcggccttggcactattgacactgggctgataattcctttgcaggggcctgtcctgtgcatggtaagatgttttgcagccatcctggcctctactaactagatgccaatagccaatmaaaaatgtatccagatattgccaaatgcccccatgggcaaaatcacccctggatgagaaccactactctaaagttttcttgttgaagctcccagatcctcaggtaaatgacttggtagaggtggagctgtatcatcttttagattttagctcttccagctaaatctaccatccacagacaactgaggaatagaaccaaagtttccatgaaacatcaccaataatgcatgcctctttgttcactaactgtaacttattttttacaaaccagtctcaatctggttgattgagctaaacaaatcaaatccaaatggtatcttatggaagttgcatgggaatcaggaaactgagttgcatctgcttctattctttttgccttgtctctccactagcactttaaccagagggagaacacagcaggcaccagaatgaagagaaggctattggttggtgcataaactgatcagtcttgagtcagggacaatgagctatggctgctttaaaaaaaaaaacacacattgggtggcaaggaaaggagtgaggtgctggtggccataaacatggctgctcatgcttagaaactgtgacaatcatctcatgagggactaatggtactcataagtcaagtgctctgttcatactacagaagcctcatggagggtcaatatcttgggaatatttttttaaagttctttatagtgaggttgtccacttcagtaactgcccttctttggatgcactgctttgcctgcaggatttatctgccctggtgccttattaagctattttccctcttcacatgggcacaaggtagaaaatcaggctcacaatagatcccaataaaaactgccttcataagattctacacccctctcctctcactatcctcactgctccccaaaactccctgtgactaaag

SEQ ID NO: 65786 - DNA, 694 bp, Homo sapiens
agtccacttaccgtcctctgaacgaccaacaccataatagtggccaccgtgaagacaaggcacagagccagagtggctgtggtcaaatagaaatagctgcggctcgtggtccccaggtggctggccacggagcccgccggcacatgcatggctgtgtctccaggaggggccattccgttgagtgcttgctgcagccctgggtccattctttatatagtcttccccacatcacaccttatctctcttcatctgattcagttctgggcccatctctgttccaagaaggattctccccctgaatcctgaatcatgtgacttggaaaaaaaccttcacctgctgcctggtggagaaactcttctctgggggcgtgaggcgagaggcggcagcaagggtgggggagaggttcatttttcattgccagggattaagttgtgtgcagagaaactagctacagagaaggtggctgatgtcagagggcgcgtaggaaaatgacggttccccgactstgtgtgtgtatgtgtgtgtgtgtgtgtgtgtgtgtgcatgcgtgcgcacacacaaagcaacttctgtttcgtttagactctgccacaaaacgccttcctgttcaagaagctgcaccttctttcagcgaggcctgtggctcagaagacctccccagataatgagtccttgctgggtctcagggaggcc

SEQ ID NO: 65787 - DNA, 883 bp, Homo sapiens
aggttggtgcaaaagtaattgaggcttttgaccaattccttgatatcactaagccaactagtaatagagagataaactgcaggatggaccatttgttaaacaaaggaccactaggtgaccctgatttccaaaaggatttggagaatgcccatatgaacacacttagtgctgactgagcacataggaagtgatcagtaaatataaattaaggtcaagttggaattcctttaaataatttaaatcctgcctccccccgccccctgccccacctactttccttgggatgttaaggtcttttcagtcctgacttgttgcagtgtatctgcaacagttagtaaacctgtctgacactatgggcatttccttggaattcatttatactaaacacaggttgaattgacattactgtgggtaagtaagaagcatctttaaagtctataatttaaaaggaaaggtgagtctggagacatagggtaaattttgctaacattctaataaccttaataaaaaaacactccctacctgttcaaaatgcaaaagtatggcagcaattttagaaagttygttttgggttcaaatcaattttagaaagttagacagacttatgttcaaattccacgtctgccattactagctgtgtggctttgcaaaaatcatgcagcctctttgaattgtcctgttttcttcttaaaagtgagaataataaaataactgtcatggagagttgtagagaggattaaatgagataatgcataaaaatgagcctggtgtctaccacccaaactataccaaacagtggttgagtcctgtgccctagtccatggtttgtgctgcttgaaatgtagaaacttaagccaacacatgttgtgtctagatagtttga

SEQ ID NO: 65788 - DNA, 1211 bp, Homo sapiens
ctctaccatttatgcttctatttcactcactgatctaaaattttatacctagatttttattattacattttaatactttacattattcatcttatctttaaaatttgttttaaaatttatcttttgattatgttggtaatcagtataattacttatatttatcatttaactggttttactactcactaccagtgtttctacaatacagattcactgttctcaaagggttttttaatggtgatataattttttctcatttagaggctatctctgagtaatatcaggtatgaagcttgtgtagtacattttctgagttttgcatattgtggaatgtgtttttgytgccactgcacaaaggaggcaatatgctcacaggtgggatctttagtcaataacattgtcatcctctccctcaccaccatatatattgcttctagcattgccatctggcaacaaagaaatcctagacgcacttaatttttttttcttacacaaataatctgatttttcttacttggatgtttgtggaatattttttatttatcctgtgaaatttagatacctcagcatgatatgtctaaatactggtttcatttcatcaatgctgcctgcttctcagtgagaccccttattctgcagactcaacgctttcttcagtttaggaaagttttgtgtagctatgacttcagttactgattttttaccatttgttctgatctctgttcatttatctgttatgttgattctccttaatctttcatgtttcatcttcactgtcatctccgtatctcaatcctatcgccttgtatcctagaatagcttctctaatgtgtgccttacaccacattcctgtggtgtcagtgtgagaggaggaataaacaggtaagaaactagtaaatcttccagaggacagtgctttattgctccaaatacctgccctaggctaacttcaccctaaatcactatagtaaatgaccacggaaagtcaaaaggaacaaaaacttactgaacatttcgacacctatagctaacacagtatttcaactgacaagaggcctaagcatgatgaagtgtaattgtgacagctccgacaactttgcggtccacaagtcgagcggatcactggaggtcaggagttcgagactagcctggccaacatggtaaaatcccgtctctactgaaaaaaatacaaaaattagccgggcgtggtg

SEQ ID NO: 65789 - DNA, 1211 bp, Homo sapiens
ctctaccatttatgcttctatttcactcactgatctaaaattttatacctagatttttattattacattttaatactttacattattcatcttatctttaaaatttgttttaaaatttatcttttgattatgttggtaatcagtataattacttatatttatcatttaactggttttactactcactaccagtgtttctacaatacagattcactgttctcaaagggttttttaatggtgatataattttttctcatttagaggctatctctgagtaatatcaggtatgaagcttgtgtagtacattttctgagttttgcatattgtggaatgtgtttttgctgccactgcacaaaggaggcaatatgcycacaggtgggatctttagtcaataacattgtcatcctctccctcaccaccatatatattgcttctagcattgccatctggcaacaaagaaatcctagacgcacttaatttttttttcttacacaaataatctgatttttcttacttggatgtttgtggaatattttttatttatcctgtgaaatttagatacctcagcatgatatgtctaaatactggtttcatttcatcaatgctgcctgcttctcagtgagaccccttattctgcagactcaacgctttcttcagtttaggaaagttttgtgtagctatgacttcagttactgattttttaccatttgttctgatctctgttcatttatctgttatgttgattctccttaatctttcatgtttcatcttcactgtcatctccgtatctcaatcctatcgccttgtatcctagaatagcttctctaatgtgtgccttacaccacattcctgtggtgtcagtgtgagaggaggaataaacaggtaagaaactagtaaatcttccagaggacagtgctttattgctccaaatacctgccctaggctaacttcaccctaaatcactatagtaaatgaccacggaaagtcaaaaggaacaaaaacttactgaacatttcgacacctatagctaacacagtatttcaactgacaagaggcctaagcatgatgaagtgtaattgtgacagctccgacaactttgcggtccacaagtcgagcggatcactggaggtcaggagttcgagactagcctggccaacatggtaaaatcccgtctctactgaaaaaaatacaaaaattagccgggcgtggtg

SEQ ID NO: 65790 - DNA, 1211 bp, Homo sapiens
ctctaccatttatgcttctatttcactcactgatctaaaattttatacctagatttttattattacattttaatactttacattattcatcttatctttaaaatttgttttaaaatttatcttttgattatgttggtaatcagtataattacttatatttatcatttaactggttttactactcactaccagtgtttctacaatacagattcactgttctcaaagggttttttaatggtgatataattttttctcatttagaggctatctctgagtaatatcaggtatgaagcttgtgtagtacattttctgagttttgcatattgtggaatgtgtttttgctgccactgcacaaaggaggcaatatgctcacaggtgggatctttagtcaataacattgtcatcctctccctcaccaccatatatattgcttctagcattgccatctggcaacaaagaaatcctagacgcacttaatttttttttcttacacaaataatctgatttttcttacttggatgtttgtggaatattttttatttatcctgtgaaatttagatacctcagcatgatatgtctaaatactggtttcatttcatcaatgctgcctgcttctcagtgagaccccttattctgcagactcaacgctttcttcagtttaggaaagttttgtgtagctatgacttcagttactgattttytaccatttgttctgatctctgttcatttatctgttatgttgattctccttaatctttcatgtttcatcttcactgtcatctccgtatctcaatcctatcgccttgtatcctagaatagcttctctaatgtgtgccttacaccacattcctgtggtgtcagtgtgagaggaggaataaacaggtaagaaactagtaaatcttccagaggacagtgctttattgctccaaatacctgccctaggctaacttcaccctaaatcactatagtaaatgaccacggaaagtcaaaaggaacaaaaacttactgaacatttcgacacctatagctaacacagtatttcaactgacaagaggcctaagcatgatgaagtgtaattgtgacagctccgacaactttgcggtccacaagtcgagcggatcactggaggtcaggagttcgagactagcctggccaacatggtaaaatcccgtctctactgaaaaaaatacaaaaattagccgggcgtggtg

SEQ ID NO: 65791 - DNA, 2166 bp, Homo sapiens
cctgagaaagaccacttggttccctggtttcagccccctttccagaggagagaacggttctgtctcactggcattccaggccccactgggtacgaaaaaaactcctgcagctaactcagtgtctgcccaaatgaccaccaagtatttgcttgaaacccagggcccttgtagtgtaggcacccgagggaatctcctggtctgtgtattgtgaagacttaggaaaagcacatcatctgagctggataacactgtccctcacagcattgtccctcgtggctttccttggctaggggagggagtttcctgaccccttgagcttcctgggtgaaacaacaccccacgctgcttctgctcaccctcagtgggctgcacccactgtctaaccagtcccaatgagatgaactaggtacctcagctggaaatggagaagtcacccatcttctgagatggtctcactgggagctgcagaccagagctattcctattcagccgtcttgcctgggagtccctcttctctattttttaatctcaacaaattcagagtgaaaactatagacttgagaagagcaagtagagcaggagaaggaatgtcaaaccaccaaatataattctacaaagcattggtctttttatctgtgttcatagcccctggctcatttctttagccactacagtaaaaaccacctagttaaaattgcagcccccactgacacactccgtatgccttccctgatttgtttttctccatagcactaactgtcaggtgccatattacatatttatttctatagcttgcttatttttatccaccctaataaaatgtaagttccatgagaacatggatttttatctgttttattcactagcacatttctactccctagaacagagccaggcccatgttaagttccaaaaatatatatttactaaattattgctgttaattgtggtcttgaggtaaccctcagaacataacattattgctttgaaaaaatgtgctacaaaatccgaaggatctactttaaaaattaactctgagaacacagactactcagaaatagaagtttacctttttacttaggtttgcagtatctaatttttrtaatccaacagtatgaaaatattccataaattaatgttaaatagtataaaatacataattttttggggggttctcaattttggctttggtcaggccaaactattaataacttggtaggaaaaattcttgactgcctgctaatgaaaattttctgtacttaaatgatttaagtgaacacaatctagtgaccttcttccacaccatgtttttagctctagtgttttctctactgttccttttcttttttttttttcagtaatcatttataagtgataagaacttctaaggcacttgaacaaatagataagtcagataggtcaacgcaataaatatatatcactttgaacaagtataacaaaataaacattgacagaacaatttggacacttagctggatcctagaagtaactgaaatctacatcttgtgactgttctatgtcctcatctccaacaaataatctattgatcttaagaccttttaaactcatgtgtatattacctcacagtttgcaaaactcattcatatgcattgtcttaatctccacagtagcaatgaagtattttattagttagctactgctgcataacaaactagcagaaaacctcaatggcataaaacagtaatcacctatctttcgttacaaattgatatcattggctgcacagttcagctgagctcaacagggtttattcacacatctttgatcagtttcaggtcatctaggtagttttgattaccttaacaggactctctcacatgtcttgggcattaactggacaacatgggctatcttgactctgttccacatggcccctccccttgtttgggaatttcttatgataaaggcagaggaggaaaggaatgagcaggtatactttttcatgtgtcagactgcatcaaatttgctactgtcccacttgccaaagcaaataacatggccaacccagagttacagtacacagaaaaagatgttgctatagaaacaccattaattatggtcattgatacaatcaatctaccacagtttgtgctattagttttgttatttttacagatgagaaaa

SEQ ID NO: 65792 - DNA, 1808 bp, Homo sapiens
caaacacatcagttatctttcaactttgatgatctctgatgactagcaagaaggttttaaagttgtgcaaattaagacaatttttagaaagccaagtgggtttaataaatctatttaaagctatttttatcattccactagtgcaaacaataaatgagaccagggtagagttatacagaaatgttgtgtatgtctttggatgtccctaaaatctgaagggaacagaacagtgtagccctagggtcatttcatgtagaatagaattatgaaaaatttcaaggtcatatacccacggctatgactcttgggtaattgactgggccagacctgcaatagatcctgtaagtacagacatgtttcctrttctctctcctatcctattgtaatttcaaagaaggcaaaataagaaccggttgaataaatatccccaaagtttgcatgtaaataaatttgaatgcaacaccacaagtatgtccttggtctgttctctccaaagtttgatgtattaaacaaactattaggttggtgcaaatgtaattgtggtttttgacattactgttaattgcaaaatctgcaattacgtttgcaccaacctaatggaaatcacactcataaatgtgcgtgggacaaaaaacttggaagaatagcagatgtactggatgacagagtccaatccaaaaggggtacatttggactacaaacaggaaatatgaggtcagaggtcagacatctagtacagaagaaagctgtgaagtggtggatgtaacaaatagtgtgaggcaaaggatcccaaggtatccttctgttgtatgttagccatagggcacaggcttctctttattgatttcaagttatggaactgggctaaagcaagctcatcttcaacactccttttcgcttgctctctctcaggcacttagggagcattacaagttatcatctgcctgctggaagaattatactgtcttttcttacgggcaagtgcttagcaaataatttggtcctgtttaaagagagatctggctttttccttggggtatctgggagacactttatgtcatacctgattagagtgtcattgtttaggtgtgagtggccacattggatcttagagtgggcaggcatacctagtagttttgaggggtccttctggccatgttagaaagaccaaccatatgatttaaggtagaggcttcatggggtatcagtcaacctgggcactgaattcaaacatgtggacaattaatcaaacaatcatgtctagataatgacttccaaataaaaactctggaccaaaattgtgaaatttctcttgttaacagtacttgcatatgatcacattaaggcccagagggcaacccctcccaactccacgggagaggacaatggaagctttgcatttataaatctcccagactctgccctatgtatgcatctcttctttttgctgattttaatctgtattcttttcctgtaatcaaccttaaccatgagtctaatagatttcatgagttttgcaagttctattagaaaattatctaacctaagggtggttttggaaatcctccaaaattgcagctggcataagaaatgaggagtcttagccaggtgcagtggctcatgcctgtaattccaacactttgggaggctgaagcaggaggactgcttgagtctaggagttcaagcctgggcaacaaactgagaccctgtctctaaaagaaaaaaaaaaattaattgaaagaaaaaaaaatagccaggtgtgatagtatgtgcctctagtcccagctacttaggaggctgagatgaga

SEQ ID NO: 65793 - DNA, 1808 bp, Homo sapiens
caaacacatcagttatctttcaactttgatgatctctgatgactagcaagaaggttttaaagttgtgcaaattaagacaatttttagaaagccaagtgggtttaataaatctatttaaagctatttttatcattccactagtgcaaacaataaatgagaccagggtagagttatacagaaatgttgtgtatgtctttggatgtccctaaaatctgaagggaacagaacagtgtagccctagggtcatttcatgtagaatagaattatgaaaaatttcaaggtcatatacccacggctatgactcttgggtaattgactgggccagacctgcaatagatcctgtaagtacagacatgtttcctattctctctcctatcctattgtaatttcaaagaaggcaaaataagaaccggttgaataaatatccccaaagtttgcatgtaaataaatttgaatgcaacaccacaagtatgtccttggtctgttctctccaaagtttgatgtattaaacaaactattaggttggtgcaaatgtaattgtggtttttgmcattactgttaattgcaaaatctgcaattacgtttgcaccaacctaatggaaatcacactcataaatgtgcgtgggacaaaaaacttggaagaatagcagatgtactggatgacagagtccaatccaaaaggggtacatttggactacaaacaggaaatatgaggtcagaggtcagacatctagtacagaagaaagctgtgaagtggtggatgtaacaaatagtgtgaggcaaaggatcccaaggtatccttctgttgtatgttagccatagggcacaggcttctctttattgatttcaagttatggaactgggctaaagcaagctcatcttcaacactccttttcgcttgctctctctcaggcacttagggagcattacaagttatcatctgcctgctggaagaattatactgtcttttcttacgggcaagtgcttagcaaataatttggtcctgtttaaagagagatctggctttttccttggggtatctgggagacactttatgtcatacctgattagagtgtcattgtttaggtgtgagtggccacattggatcttagagtgggcaggcatacctagtagttttgaggggtccttctggccatgttagaaagaccaaccatatgatttaaggtagaggcttcatggggtatcagtcaacctgggcactgaattcaaacatgtggacaattaatcaaacaatcatgtctagataatgacttccaaataaaaactctggaccaaaattgtgaaatttctcttgttaacagtacttgcatatgatcacattaaggcccagagggcaacccctcccaactccacgggagaggacaatggaagctttgcatttataaatctcccagactctgccctatgtatgcatctcttctttttgctgattttaatctgtattcttttcctgtaatcaaccttaaccatgagtctaatagatttcatgagttttgcaagttctattagaaaattatctaacctaagggtggttttggaaatcctccaaaattgcagctggcataagaaatgaggagtcttagccaggtgcagtggctcatgcctgtaattccaacactttgggaggctgaagcaggaggactgcttgagtctaggagttcaagcctgggcaacaaactgagaccctgtctctaaaagaaaaaaaaaaattaattgaaagaaaaaaaaatagccaggtgtgatagtatgtgcctctagtcccagctacttaggaggctgagatgaga

SEQ ID NO: 65794 - DNA, 1808 bp, Homo sapiens
caaacacatcagttatctttcaactttgatgatctctgatgactagcaagaaggttttaaagttgtgcaaattaagacaatttttagaaagccaagtgggtttaataaatctatttaaagctatttttatcattccactagtgcaaacaataaatgagaccagggtagagttatacagaaatgttgtgtatgtctttggatgtccctaaaatctgaagggaacagaacagtgtagccctagggtcatttcatgtagaatagaattatgaaaaatttcaaggtcatatacccacggctatgactcttgggtaattgactgggccagacctgcaatagatcctgtaagtacagacatgtttcctattctctctcctatcctattgtaatttcaaagaaggcaaaataagaaccggttgaataaatatccccaaagtttgcatgtaaataaatttgaatgcaacaccacaagtatgtccttggtctgttctctccaaagtttgatgtattaaacaaactattaggttggtgcaaatgtaattgtggtttttgacattactgttaattgcaaaatctgcaattacgtttgcaccaacctaatggaaatcacactcataaatgtgcrtgggacaaaaaacttggaagaatagcagatgtactggatgacagagtccaatccaaaaggggtacatttggactacaaacaggaaatatgaggtcagaggtcagacatctagtacagaagaaagctgtgaagtggtggatgtaacaaatagtgtgaggcaaaggatcccaaggtatccttctgttgtatgttagccatagggcacaggcttctctttattgatttcaagttatggaactgggctaaagcaagctcatcttcaacactccttttcgcttgctctctctcaggcacttagggagcattacaagttatcatctgcctgctggaagaattatactgtcttttcttacgggcaagtgcttagcaaataatttggtcctgtttaaagagagatctggctttttccttggggtatctgggagacactttatgtcatacctgattagagtgtcattgtttaggtgtgagtggccacattggatcttagagtgggcaggcatacctagtagttttgaggggtccttctggccatgttagaaagaccaaccatatgatttaaggtagaggcttcatggggtatcagtcaacctgggcactgaattcaaacatgtggacaattaatcaaacaatcatgtctagataatgacttccaaataaaaactctggaccaaaattgtgaaatttctcttgttaacagtacttgcatatgatcacattaaggcccagagggcaacccctcccaactccacgggagaggacaatggaagctttgcatttataaatctcccagactctgccctatgtatgcatctcttctttttgctgattttaatctgtattcttttcctgtaatcaaccttaaccatgagtctaatagatttcatgagttttgcaagttctattagaaaattatctaacctaagggtggttttggaaatcctccaaaattgcagctggcataagaaatgaggagtcttagccaggtgcagtggctcatgcctgtaattccaacactttgggaggctgaagcaggaggactgcttgagtctaggagttcaagcctgggcaacaaactgagaccctgtctctaaaagaaaaaaaaaaattaattgaaagaaaaaaaaatagccaggtgtgatagtatgtgcctctagtcccagctacttaggaggctgagatgaga

SEQ ID NO: 65795 - DNA, 1808 bp, Homo sapiens
caaacacatcagttatctttcaactttgatgatctctgatgactagcaagaaggttttaaagttgtgcaaattaagacaatttttagaaagccaagtgggtttaataaatctatttaaagctatttttatcattccactagtgcaaacaataaatgagaccagggtagagttatacagaaatgttgtgtatgtctttggatgtccctaaaatctgaagggaacagaacagtgtagccctagggtcatttcatgtagaatagaattatgaaaaatttcaaggtcatatacccacggctatgactcttgggtaattgactgggccagacctgcaatagatcctgtaagtacagacatgtttcctattctctctcctatcctattgtaatttcaaagaaggcaaaataagaaccggttgaataaatatccccaaagtttgcatgtaaataaatttgaatgcaacaccacaagtatgtccttggtctgttctctccaaagtttgatgtattaaacaaactattaggttggtgcaaatgtaattgtggtttttgacattactgttaattgcaaaatctgcaattacgtttgcaccaacctaatggaaatcacactcataaatgtgcgtgggacaaaaaacttggaagaatagcagatgtactggatgacagartccaatccaaaaggggtacatttggactacaaacaggaaatatgaggtcagaggtcagacatctagtacagaagaaagctgtgaagtggtggatgtaacaaatagtgtgaggcaaaggatcccaaggtatccttctgttgtatgttagccatagggcacaggcttctctttattgatttcaagttatggaactgggctaaagcaagctcatcttcaacactccttttcgcttgctctctctcaggcacttagggagcattacaagttatcatctgcctgctggaagaattatactgtcttttcttacgggcaagtgcttagcaaataatttggtcctgtttaaagagagatctggctttttccttggggtatctgggagacactttatgtcatacctgattagagtgtcattgtttaggtgtgagtggccacattggatcttagagtgggcaggcatacctagtagttttgaggggtccttctggccatgttagaaagaccaaccatatgatttaaggtagaggcttcatggggtatcagtcaacctgggcactgaattcaaacatgtggacaattaatcaaacaatcatgtctagataatgacttccaaataaaaactctggaccaaaattgtgaaatttctcttgttaacagtacttgcatatgatcacattaaggcccagagggcaacccctcccaactccacgggagaggacaatggaagctttgcatttataaatctcccagactctgccctatgtatgcatctcttctttttgctgattttaatctgtattcttttcctgtaatcaaccttaaccatgagtctaatagatttcatgagttttgcaagttctattagaaaattatctaacctaagggtggttttggaaatcctccaaaattgcagctggcataagaaatgaggagtcttagccaggtgcagtggctcatgcctgtaattccaacactttgggaggctgaagcaggaggactgcttgagtctaggagttcaagcctgggcaacaaactgagaccctgtctctaaaagaaaaaaaaaaattaattgaaagaaaaaaaaatagccaggtgtgatagtatgtgcctctagtcccagctacttaggaggctgagatgaga

SEQ ID NO: 65796 - DNA, 795 bp, Homo sapiens
tcagcctcccaaagtgctgggattacaggcgtgagccacggtgcccagcttcgctatgccatttcatgcaaggggcttgagcatctgcagattttggtatctgaatggggatcctggaaccaatcacccaggaatagtgaaggaccacagtatataatttttatttgtcaatcttaaaaataaagcataaaaagtttacaacaacaagataaaaaataagaagtgtttttatagtgtgaggataagtttagatttattttttcctacgtgtaaccctatggtcctgtgttatttattgagaaaatattctattccaccttaaactacatggcagcctttgtcaactatraagggactgtgtatccacagatgtattttagacacagttttctgcccagtggttctctgtatcccctctcatgaggatgctgcatttcatataaacttatagaaccccttaaaatttggtaacctgagttctctgatttgttattataggttatttagtttgcttttttttttctttcttgagacagactcttcctctgtcacccaagctggagttcagtggcttgagctcagctcactgcagcctccgcctcccaggttcaagcaattctcgtgcctcaggtttagtactagaaactcatcaggaaaattagaatggctttttgtcacaattactctgataatgttaataatacctcttagatattttgcacattacacatgaagaaaagtttgaatctcagataaaaacaaaaatacatcaaaagtctttaatgtaagcacaga

SEQ ID NO: 65797 - DNA, 599 bp, Homo sapiens
agaattgtttagatattatccaataaataacacaacaaaagagtttttccaaagatttattgaagcagaamcaagttggttggatacttgctggaaaaaaaaaagcagttttaatggtattcaaaataccttttaaaaagtattctagcacaagatttttctgtaaactagattatgttgtaaacttttttctaaatcttgtaggagtgtcggttgttaagaactagagcttattcctattccaaatctatcttgcgctcctgaaaaactgcagaaaggcacttgaaagctgtttctttaagatatggatttcttttttattcttgctggtaatatattgctgcactgagtgtgtgcaatttttattcaaggtcatcgtgatgctgagaagtttcgttgataacctgtttaaaaaaaaaaaccaaaataaatataatgccacatgccaaagactaaattatcctatatatcacggcaaataaaaatcctgctaaatatatgtaatttattgtgcaaatcagaaggttatgttgcttctgcatgagtgaaaactagaaggggcagacacacaagaccctcttccactacaggcaatataa

SEQ ID NO: 65798 - DNA, 598 bp, Homo sapiens
agacagctttctgtcttgtatggctcagatctatccaagggaattactttgcctccccaaactcaaaggttagatggttacattttaaactctctcggtggttctctgaatctccttgtctcaggcttgaggtgagaagcagacagcctctatagcatgctgataactttctccaaagaccttctctttgtcttcaagaatcttcaactcttttataccttcaacataagtatatggttgtaagaattatgtaactatttctgccccccttcctttggaaaacttgcattatactgctatatttcactttggaatatgtttctagtgtttgggtaccttaggcaaaatatactcattttttttttcctttttctttttgagagacaggtctcactrgtcacccaggctggagtgcagtggtacaatgatagctcactgcagcctcaaactccttggctcaagtgatcctcctgcctcagcctcctgagtacctgggactacaggcacacacccccacacctggctaatgaaatttttttgttttgttttgttttgttttgttttgtttaaaggctggtctttaacttctggcctcaag

SEQ ID NO: 65799 - DNA, 689 bp, Homo sapiens
tgcccagatcagscaatataagtttgggctagccatgcctgtccacacctattttaataagtgtccagttgctgcccatttgcttgacagcctggagaaagtagcgcctgtcagtccacatgcctgcatgcttttgtgttatgatgtctgtgcctaacgcagggggaaaaaaaaaaaaaaagaagaaagtgtttctcacatctgctcagaagctgcacaatatcacagtagacagccaagaccagtaagaggcatcagctcttagtggggcagatgggtctttgcctccaaagaaacctctgggcaagagaagacccctctattgaaaccaagctgtgtgtcaagctctgaaagaccagtcttgagacccaagctacctggccctggtccttgcccaaaaaggactccacttgcccggtatgaagtcaagaccagagaatgaagacctgtagacctatggccaaagtgggctcgtataatcaacaagacacagggagggatggttcctgctcagcaattacagccacttctctgcttcaccagacaccccaggggagctgtttcacctttcctggagaaagaccaagtgggccctatgagtgttcctgctgtggtcactagcaggaagcttatgcctcctacctttatctgccctccgttcccacaggcctggcagaacttggggtttt

SEQ ID NO: 65800 - DNA, 689 bp, Homo sapiens
tgcccagatcagccmatataagtttgggctagccatgcctgtccacacctattttaataagtgtccagttgctgcccatttgcttgacagcctggagaaagtagcgcctgtcagtccacatgcctgcatgcttttgtgttatgatgtctgtgcctaacgcagggggaaaaaaaaaaaaaaagaagaaagtgtttctcacatctgctcagaagctgcacaatatcacagtagacagccaagaccagtaagaggcatcagctcttagtggggcagatgggtctttgcctccaaagaaacctctgggcaagagaagacccctctattgaaaccaagctgtgtgtcaagctctgaaagaccagtcttgagacccaagctacctggccctggtccttgcccaaaaaggactccacttgcccggtatgaagtcaagaccagagaatgaagacctgtagacctatggccaaagtgggctcgtataatcaacaagacacagggagggatggttcctgctcagcaattacagccacttctctgcttcaccagacaccccaggggagctgtttcacctttcctggagaaagaccaagtgggccctatgagtgttcctgctgtggtcactagcaggaagcttatgcctcctacctttatctgccctccgttcccacaggcctggcagaacttggggtttt

SEQ ID NO: 65801 - DNA, 576 bp, Homo sapiens
ttttgagaatccaaggaaaactgagaaaaaaaaaaatggcatgcctatacatacgtaccaatgtgcattcaattttggaggacgctggttcaggatacttattttactgaggggaaactgagggctagagaggacagttgatttgctgcagatcacattgctgtgcatttcactcctgtactgggggccttctactatttgctgcctcatgattcagagtgagataaaggcaaggagtcwttggcaacagaagccagaaagctttcccctgaggctctctctgaggatcttggatttgcttctggaagcttagctctggagaagagcagcattcaggacaagcgaacaggtctggaacttgcttgggctagtcgcttcacttgagtgctttagtttcctcatctgtaaaatgggttaatcacagtaagtaacatataaagtggtgagaattaaagcattactatgtggaaagcatatagatcaatgtttattgaataatgtgtgtatatactctgtgttttcatttaattttctgccgtgtgtactttcctgtcattaaaatagtctttagaaaca

SEQ ID NO: 65802 - DNA, 671 bp, Homo sapiens
tttgacccagcaatcccattactgggtgtatacccaaaggattataaatcattctgctataaagacacatgcgcacgtgtgtgtattgcagcactattcaccatagcaaagacttggaacaaacccaaatgtccatcattgatagactggattaagaaactgtggcacacatacaccacggaatactatgcagccataaaaaaggatgagttcttgtcttttgcagggacatagatgaagctggaaaccatcattctcagaaaactatcacaaggacagaaaacaaaacaccacatgttctcactcataggtgggaattgaacaatgagatcacttggacacagggcagggaacrtcacacactggggcctgtcagagggtggggagctggaggagggataacattaggagaaatacctaatgtaagtgatgagttgatgagtgcagcaaaccaccatggcacatgtatacctatgtatcaaacctgcacgttgtgcacatgtaccatagaacttaaagtataattttttaaaaaaagaaagataaggtattggtatacaaagtagctgttagacaatgatacaaatgttatctcttcttgccaaattgtgtgatctttgtcaaggtattagcccctcctgttcctccgccaccacctaaatttgtctcag

SEQ ID NO: 65803 - DNA, 720 bp, Homo sapiens
tgacccctataccactactcatctttctcctgacacctaggaagctgttgtatgcaaaggccacctctttatttcactgagcatctttttcacttagcttcattgtgtgaaattatttctcttttattcctgccccagaaatctaaacagagtcccaatcttatatccaggaacagcagaagactggtgcgatataaaagtattactctcactggtggctggcaagatggccgaataggaacagttctggtctgcagcttccagcgagatcaacacagaaggtgagtgatttctgcatttccaactgaggtacccagctcatctcaytgggactggttagacagtgagtgcagcccacagagggcaagccaaagcagggtggaattttgcctcacctaggaagtgcaaggggtttgggaactccctcccctagccaagggaagctgtgagggactgtgtcatgaggaatggtagtctggcccacatactatgcttttcccatggtcttcgcaacctgtagaccaggagattccctcaggtgcctacaccaccagggccctgggttgcaagcacaaagctgggcagcagtttgggcagacaccgagctagctgcaggagttttttttctttcatactccagtggcacctggaacaccagtgagacagatccgttcattcccctggaaagggggctgaagccagggagccaagtggtctagt

SEQ ID NO: 65804 - DNA, 720 bp, Homo sapiens
tgacccctataccactactcatctttctcctgacacctaggaagctgttgtatgcaaaggccacctctttatttcactgagcatctttttcacttagcttcattgtgtgaaattatttctcttttattcctgccccagaaatctaaacagagtcccaatcttatatccaggaacagcagaagactggtgcgatataaaagtattactctcactggtggctggcaagatggccgaataggaacagttctggtctgcagcttccagcgagatcaacacagaaggtgagtgatttctgcatttccaactgaggtacccagctcatctcactgggactggttagacagtgagtgcagcccacagagggcaagccaaagcagggtggaattttgcctyacctaggaagtgcaaggggtttgggaactccctcccctagccaagggaagctgtgagggactgtgtcatgaggaatggtagtctggcccacatactatgcttttcccatggtcttcgcaacctgtagaccaggagattccctcaggtgcctacaccaccagggccctgggttgcaagcacaaagctgggcagcagtttgggcagacaccgagctagctgcaggagttttttttctttcatactccagtggcacctggaacaccagtgagacagatccgttcattcccctggaaagggggctgaagccagggagccaagtggtctagt

SEQ ID NO: 65805 - DNA, 720 bp, Homo sapiens
tgacccctataccactactcatctttctcctgacacctaggaagctgttgtatgcaaaggccacctctttatttcactgagcatctttttcacttagcttcattgtgtgaaattatttctcttttattcctgccccagaaatctaaacagagtcccaatcttatatccaggaacagcagaagactggtgcgatataaaagtattactctcactggtggctggcaagatggccgaataggaacagttctggtctgcagcttccagcgagatcaacacagaaggtgagtgatttctgcatttccaactgaggtacccagctcatctcactgggactggttagacagtgagtgcagcccacagagggcaagccaaagcagggtggaattttgcctcacctaggaagtgcaaggggtttgggaactccctcccctagccaagggaagctgtgagggactgtgtcatgaggaatggtagtctggcccacatactatgcttttcccatggtcttygcaacctgtagaccaggagattccctcaggtgcctacaccaccagggccctgggttgcaagcacaaagctgggcagcagtttgggcagacaccgagctagctgcaggagttttttttctttcatactccagtggcacctggaacaccagtgagacagatccgttcattcccctggaaagggggctgaagccagggagccaagtggtctagt

SEQ ID NO: 65806 - DNA, 720 bp, Homo sapiens
tgacccctataccactactcatctttctcctgacacctaggaagctgttgtatgcaaaggccacctctttatttcactgagcatctttttcacttagcttcattgtgtgaaattatttctcttttattcctgccccagaaatctaaacagagtcccaatcttatatccaggaacagcagaagactggtgcgatataaaagtattactctcactggtggctggcaagatggccgaataggaacagttctggtctgcagcttccagcgagatcaacacagaaggtgagtgatttctgcatttccaactgaggtacccagctcatctcactgggactggttagacagtgagtgcagcccacagagggcaagccaaagcagggtggaattttgcctcacctaggaagtgcaaggggtttgggaactccctcccctagccaagggaagctgtgagggactgtgtcatgaggaatggtagtctggcccacatactatgcttttcccatggtcttcgcaacctgtagaccaggagattccctcaggtgcctacaccaccagggccctgggttgcaagcacaaagctgggcagcagtttgggcagacaccgagctagctgcaggagttttttttytttcatactccagtggcacctggaacaccagtgagacagatccgttcattcccctggaaagggggctgaagccagggagccaagtggtctagt

SEQ ID NO: 65807 - DNA, 1413 bp, Homo sapiens
gaggactggcagagcgaaagcaggctgaagctgccatgtcagcccagtttctccaagattaccattccccacccatgcccctgcccccaccaaaaattaaagacaaaagaagtagagtttctctaaatgaaatgttttttgtaaagtctttccagagaagctgctaataacatgcaccgttgtttggcatatacttttatgatttagagaatgctcttttttctcaggacagaatgcacatccaatatcatgtgttgaaatacatccttcttcctcagaatcattttccttccctttaaaatgtggagcctgtttgttaggacagctttgattgcaagtgacagaaacccaactggaactggcttaaatacaaagggatygtatcataatggtcctgggctgtttcacaggaacaagggcagcaacctagagctgtgagaggaatgtgctcagcctcgggagcaactagattcaggggacacagtcagtccccaggtaggtgctctctccaacttttggatgtgtccctctttgtacagctgcattactcttctctctactgtgaatttatttgttctgtccctctggctcataaagtaaaatacagcctagataatttccaagatttatgtcctaaagcccagccaccaagaggagattagatgtttcagctccaaagtttccagagaaagactctacttgacttgctttatactgtcaactatggtcgtgaaataacatggtggatccctctataaccacgacagtgattgtagggcaaagtcctcagtaaaaaaggagatcattggtagtcaaaccatcattctctcttataaaagggttgggcctactaaccattaaggttccttccagctttagtagaccagcttgcattcgctggttgacttaggtgctgagttcaagggagccagtagttgtgtgtttcccaaacatggcggaaatctgccccagccaaaggcagagcctgccataatggaacctgaagcatccccagttaccaatgctgccaagtcccctctctcccaaggcttttcactcaatgagttgttacacatttaagcttacaaacagctcccttgggcacactgtaatacccaaccgaaaatcctgccacctgaggttgcctttgttctgagtcagaaattattgcctccaagatgggaaccatcggaatcaagagtaattaaaattccaaatcagtgctgtagagtgatactctttacctttatggattataaaatcaataaatctttagcaatatgggagccattcaccattcattcattcattcattcattcattctacaagtctttttacatccctactatgagcaaagtaccatctagattcaagtggtgcaaaattaaatactatgttattcctgcatttac

SEQ ID NO: 65808 - DNA, 1413 bp, Homo sapiens
gaggactggcagagcgaaagcaggctgaagctgccatgtcagcccagtttctccaagattaccattccccacccatgcccctgcccccaccaaaaattaaagacaaaagaagtagagtttctctaaatgaaatgttttttgtaaagtctttccagagaagctgctaataacatgcaccgttgtttggcatatacttttatgatttagagaatgctcttttttctcaggacagaatgcacatccaatatcatgtgttgaaatacatccttcttcctcagaatcattttccttccctttaaaatgtggagcctgtttgttaggacagctttgattgcaagtgacagaaacccaactggaactggcttaaatacaaagggattgtatcataatggtcctgggctgtttcacaggaacaagggcagcaacctagagctgtgagaggaatgtgctcagcctcgggagcaactagattcaggggacacagtcagtccccaggtaggtgctctctccaacttttggatgtgtccctctttgtacagctgcattactcttctctctactgtgaatttatttgttctgtccctctggctcataaagtaaaatacagcctagataatttccaagatttatgtcctaaagcccagccaccaagaggagattagatgtttcagctccaaagtttccagagaaagactctacttgacttgctttatactgtcaactatggtmgtgaaataacatggtggatccctctataaccacgacagtgattgtagggcaaagtcctcagtaaaaaaggagatcattggtagtcaaaccatcattctctcttataaaagggttgggcctactaaccattaaggttccttccagctttagtagaccagcttgcattcgctggttgacttaggtgctgagttcaagggagccagtagttgtgtgtttcccaaacatggcggaaatctgccccagccaaaggcagagcctgccataatggaacctgaagcatccccagttaccaatgctgccaagtcccctctctcccaaggcttttcactcaatgagttgttacacatttaagcttacaaacagctcccttgggcacactgtaatacccaaccgaaaatcctgccacctgaggttgcctttgttctgagtcagaaattattgcctccaagatgggaaccatcggaatcaagagtaattaaaattccaaatcagtgctgtagagtgatactctttacctttatggattataaaatcaataaatctttagcaatatgggagccattcaccattcattcattcattcattcattcattctacaagtctttttacatccctactatgagcaaagtaccatctagattcaagtggtgcaaaattaaatactatgttattcctgcatttac

SEQ ID NO: 65809 - DNA, 1413 bp, Homo sapiens
gaggactggcagagcgaaagcaggctgaagctgccatgtcagcccagtttctccaagattaccattccccacccatgcccctgcccccaccaaaaattaaagacaaaagaagtagagtttctctaaatgaaatgttttttgtaaagtctttccagagaagctgctaataacatgcaccgttgtttggcatatacttttatgatttagagaatgctcttttttctcaggacagaatgcacatccaatatcatgtgttgaaatacatccttcttcctcagaatcattttccttccctttaaaatgtggagcctgtttgttaggacagctttgattgcaagtgacagaaacccaactggaactggcttaaatacaaagggattgtatcataatggtcctgggctgtttcacaggaacaagggcagcaacctagagctgtgagaggaatgtgctcagcctcgggagcaactagattcaggggacacagtcagtccccaggtaggtgctctctccaacttttggatgtgtccctctttgtacagctgcattactcttctctctactgtgaatttatttgttctgtccctctggctcataaagtaaaatacagcctagataatttccaagatttatgtcctaaagcccagccaccaagaggagattagatgtttcagctccaaagtttccagagaaagactctacttgacttgctttatactgtcaactatggtcgtgaaataacatggtggatccctctataaccaygacagtgattgtagggcaaagtcctcagtaaaaaaggagatcattggtagtcaaaccatcattctctcttataaaagggttgggcctactaaccattaaggttccttccagctttagtagaccagcttgcattcgctggttgacttaggtgctgagttcaagggagccagtagttgtgtgtttcccaaacatggcggaaatctgccccagccaaaggcagagcctgccataatggaacctgaagcatccccagttaccaatgctgccaagtcccctctctcccaaggcttttcactcaatgagttgttacacatttaagcttacaaacagctcccttgggcacactgtaatacccaaccgaaaatcctgccacctgaggttgcctttgttctgagtcagaaattattgcctccaagatgggaaccatcggaatcaagagtaattaaaattccaaatcagtgctgtagagtgatactctttacctttatggattataaaatcaataaatctttagcaatatgggagccattcaccattcattcattcattcattcattcattctacaagtctttttacatccctactatgagcaaagtaccatctagattcaagtggtgcaaaattaaatactatgttattcctgcatttac

SEQ ID NO: 65810 - DNA, 753 bp, Homo sapiens
acatgcatccccaaaatgtatggaggctaaagtacaatggaaaattatttctcattcgcatgacaattagctgacttctccaaaccatgccataatttgggtttcttccatctgtggctcctccatttcctaagtcctcacctctgtttttattcagttgatgttaagagaagagcatggtgaaagcgccccttcctcagcctttgtgcagagtgatacactgccgcctgcttccattcacgctttattgatgaaagttgatcatattcccacatttctctgtaaggaaagctcgaaatgtagtcccttcatgggcagccccttcaaactacaaccaaacgctatggaaatattgattttggtcaacagctagctacctctgccgtgcttacaatatgtatagaccatctataaaatatacatagctttcaaactactgacacaaaaatgagctacagtaagaacttgaaacagaggaggaaaagaaaacaaaccccaagcttttaaattcttactttaaaatgcttaaaacaagagttttatttcctttcaaatatacatttgtaaagaaattttaaagtggtagttggccatttttaagtgatcctgaatgwcatcatatttttacgttcctattttctttctgactgtacttgtggtataaccaagttcaatgtaatattaaaatagaaaaaacaaaaacatcagcatgtttcttaaacaacagcaagaaagtgcaattttattctaagc

SEQ ID NO: 65811 - DNA, 662 bp, Homo sapiens
ttaagaggagcccagccagtaggatagccttgcatctcggtttactcctcctgtccccatgcacttggaattagcacccctgttttactctctgagtatctcagtttgaatgataaattatatgatcacattatatataatgaaatrtgctgaatcctaaaaattcatcatgtttgagattccataataataagaaaaatgatttataatttgtcaatatatgtaaaatacagtttcctctctatggattcaaagcaattccaatcaaaatctagcaagttattttgtggatattaacaaactgattctcaagtttatgtggaaaagcaaaagacccagaatagccaaaaaaattatgaagaagaacagggttggaggagtgatgctactagatttcaacacataccgtaaaatcagtgatcaagacagtgtggtattgttgaagggaaagataaatagatccaaggaaccaaataaagagcccagaaacagacctccacaaacagaaccaactgatctctgacaaaggagcatagacaattcaatggagaaagataatcttttcaacaaatggtgctagaacaactggacagctgtatgacaaaaaaaaaaaaaaaaacctaacgtacaccttacatctttcacaaaaattaatgcagaat

SEQ ID NO: 65812 - DNA, 1091 bp, Homo sapiens
acaagggcattgggggaggaggggatgagttattcagcctacaacatgcaatcgatcctgggaagagaggcaaagtgctcgtcattcatttgttcattcattcattcatccagctgcaaatgtgagtttgtgggcaccatgttcggccccaggactgcagtagagagcaggacagtcttcccgttgtgaagcgtgagatccatagagggaacggcagagatcagatgacagggagcccatccagcctgggatgggcacttgtgtccagaaagtcagccctgagaaagtgacatttatgccagggcctgagggaagggtaggactttgccaggggaagaggttagggaaaggtgaaaaagccacaaaggcaaaatgaccatccaaccttcaagtaattgtcagtctagaggggtagtgtttaactgcagtgacaatgattttcattgtctactatggtcgaagctgagagctctcttctaagtgagcattaatgtttctgttgttttcttgaaagggcgaaggatcccagggggtaagaggaaggtggggcaagtcagcagaagcttactccatcttcaacttctttttgtttgtttgtttgtttagacacagggtctcacgctgtcatccaggctggagtgcaatggtgcaatcatagctaactgtaatcttgcactcctgggcttaagcaattctctcacctcagtctctcgagtagctgggattgcaggcatgcaccaccatgcctgacttacttttgaaattatttgtagagaggggtgtcttactatattgcccaggctgatcttgaactcccgacctcaagcgatcctctcgcctcagcctcctaaagcattgggattacaggcatgagccaccacacctggtcttccrtcacttctgattggactcttgggctgcatagcttccatgaccaaaaggtcctatactaaggatatttacacagcctctggaaagctgctgcaagacacttattaattacaaagggaaaaatagtcaattcaagtaaagaaacatgatgggccagtgatcagagccaacatcaccagtcatggaacaacttgacatca

SEQ ID NO: 65813 - DNA, 1091 bp, Homo sapiens
acaagggcattgggggaggaggggatgagttattcagcctacaacatgcaatcgatcctgggaagagaggcaaagtgctcgtcattcatttgttcattcattcattcatccagctgcaaatgtgagtttgtgggcaccatgttcggccccaggactgcagtagagagcaggacagtcttcccgttgtgaagcgtgagatccatagagggaacggcagagatcagatgacagggagcccatccagcctgggatgggcacttgtgtccagaaagtcagccctgagaaagtgacatttatgccagggcctgagggaagggtaggactttgccaggggaagaggttagggaaaggtgaaaaagccacaaaggcaaaatgaccatccaaccttcaagtaattgtcagtctagaggggtagtgtttaactgcagtgacaatgattttcattgtctactatggtcgaagctgagagctctcttctaagtgagcattaatgtttctgttgttttcttgaaagggcgaaggatcccagggggtaagaggaaggtggggcaagtcagcagaagcttactccatcttcaacttctttttgtttgtttgtttgtttagacacagggtctcacgctgtcatccaggctggagtgcaatggtgcaatcatagctaactgtaatcttgcactcctgggcttaagcaattctctcacctcagtctctcgagtagctgggattgcaggcatgcaccaccatgcctgacttacttttgaaattatttgtagagaggggtgtcttactatattgcccaggctgatcttgaactcccgacctcaagcgatcctctcgcctcagcctcctaaagcattgggattacaggcatgagccaccacacctggtcttccatcacttctgattggactcttgggctgcatagcttccatgaccaaaaggtcctatactaaggatatttacacagcctctggaaagctgctgcaagacacttattaattacaaagggaaaaatagtcaattcaagtaaagaarcatgatgggccagtgatcagagccaacatcaccagtcatggaacaacttgacatca

SEQ ID NO: 65814 - DNA, 694 bp, Homo sapiens
aggtatctggatctgttggggaaaaaaaattagaaactatgtataaaacttaaaaatattcaagcatcgaaaggttatttaggatgaaagttttaaaacaagtcatcagcaagctgctaccaccaagtggagacttatgcaaaagttgagcaagtccactgagctgagaggacagaaatgaagtcacctgtgctggggcaggggcagggacactgggggcagggagtgtgtgggcagagaagccagagamgtccaggcctgtggaagccaaacaggagagcatgggccggaagggcggtcaggatcgggggacgatcctaataatactactaatctaataatacttttcttcttaaagtctacttcattaaaaatagttatgctgggcatggtggctcatgactgtaatctcggcactttgttggaggtcgaggtgggtggatcactgaagcccaggagttcaagaccagcctgacgaacatggagaagccctgtctctactaaaaatacaaaaattagccaagcatggtggcacatgcctgtaatcccagctactcaggaggctgagggaggagaattgcttggacccaggaagtggaggttgcggtgagctgagattgtgccattgcattccagcctgggcaacaagaccaaaactctgtctcaaaaaaacaaaaaaaaaaagaagttacta

SEQ ID NO: 65815 - DNA, 731 bp, Homo sapiens
cggccagggacccagcatccagtgacccctgtttcgcagcagcagctggggccagccccaggctctcttccactcccagcttcttaaaacaggaagtggagagagttgtttgataaaactctctcttcaccaagggagagttcgaggggatgccagcagagggagctttagagtagagacccctacccaaccagtgacagtcacgcacacagcagggcatgctatggagacccccagacagtcactcggggagacccagcaggtccagactcttcagagatctgtggcagcaggtccccactcccaaaagccacgtgcccacgggtggtctctggtgcctgagaccccagtctcatttgcatctttgcaactttgagtttaagtgggtgtcgcatcctktatgtcctcctgagcagaggaggggcacagcctggggtggcagctggcgtcaaaccctcaaatcccctgagagccactggggagactaagcagtccccagcccccacttgtccctgagctgccattctcagccctgtgggaggagacagaaagccctgaagagaaaccaaaggaccaggtcaggaggggctgggggggtggcatgagcaatcagggcagggaaggatggacagatgggggaatggagggaagaaggaatgaatgaaaaggtgaatgaatgaacaaagagagagaacggccactcctcccttgctttagtttacgaagtactg

SEQ ID NO: 65816 - DNA, 1184 bp, Homo sapiens
ttaagtaataagacatgttaaaattgttttgaattttgtgaggtttgtaatatctttcaacttgcacctaattttatattcaaaattttatgttctttttcttaaatagttccctgtccttgcctgtacaattgcataagctcaggcctacaaatcctggatctgccactgccctttgcaataggatttaaaccaatgattccatgtctctggcccccctttagattatgaatccttcttttttttttgagacggagtctcgctctgtcacccaggctggagtgcagtggcgcaatctccgctcactgcaacctccgcctcccaggttcacgcgattctcctgcctcagcctcctgagtagccgggattacaggcatgcgccaccacacctggctaatttttgtattttcagtagagacggggtttcaccacgttggtcaggccggtctcgaactcctgacctcgtgatccgcctgcctcggcctcccaaagtgctgggattacaggtgtgagccaccgcgccctgccgattatgaatctttccaaagcaggaatagggtttttacttttgctttcctggtgcctggcagaatgctgacacatagtagtcatttaatacatgattgttgtttgaactaatgaaccaacaagggagtagaaagaacagaggatgtattctaattaattgaggaagtgagtggtctgaaagattagcttggaggatttaagagaatgagcatagaggtaagagaggagtactgaaggtgaggaaagaatgctagcccctttttaaaaatgacaattaaccttccagtctaaggtcactccaggaatagaaaagcactgcctgctgatacaatgagtcttaaaggaaaccagttctctagtttcaaaatggaaatgacaaagatctcctctcttgtccaagcatcttcactgctcttcccttgctctcctatcctactcacttggtagctgtgggaccttaggccaaccagttaacctctttgagacataattttctctcctatggacgtagataagttcctcacaaggttattgtaggattaaatgaaataagtcctgtgaaagcaactagtaaagtacctggtaaatagtaggtgctcaataaatgtttgattcctttctttctttctttytttttttttttttgcttcttttcc

SEQ ID NO: 65817 - DNA, 544 bp, Homo sapiens
atctgcaagcagaggctgcgtggaccctgcatagcctggccaaggactggcatgtctgaactgaactttggagctcctggaggtttgttttaagggtcctcaggatttttgaaaaatcaggtatggtaagacatgcagatataaaaatgactgtcatggatgaagaagtgtttactcacaattccctggaagcaggtgtcgataaaaagagtcaaactctgtaaatatttaaggagagttattctgagccggccgggcgyggtggctcacgtctgtaatcccagcactttgggaggccgaggcgggcagatcacgaggtcaggaaatcaagaccatcctggctaatatggtgaaaccccgtctctactaaaaatacaaaacattagccaggcatggtggcaggcacctgtaatcccagctacacaggaggctgaggcaggagaatggcatgaacccgggaggcggagcttgcagtgagcagagatagcgccactgcactccggcctgggtgacacagtgagactctgtctcgagaaaaaaaata

SEQ ID NO: 65818 - DNA, 1169 bp, Homo sapiens
cagacactctagttgccatctcaaacctgctcttttccaatttaaaccaagacatattattagtaaaattaaaaataatataacctaaagttatattttcaaggggaaaaatcaatgagattggtaaggttgaaattactaatgtcactttttgaagaagacagaattgttaatttaccaagagattatggggcttaccctgaggtcactgatttagtacaagagttaagacttcaatgcactctgttttcacaaacacaggagataaccaggagaaggctttcgcttctcaaaattagggtctgagggtaatagtaatgaaacttatttcttctcctataactaattaatgagaaatatactgaagaatcaggatgagtcgccagtctcccaatccactgcatcagctttggtgacctgttgaaggggaatgctgcatctgatgagcttcttcattcacccacctgcagggcagctcatgctatgcctggtgtcttttgagccctgagaacccagagcgcaaggaaatcacccactgaatcccttcttcatggaacagcctatagaaaagtgcagcactgcgtggccaattctaccctctttacaaatcaggcaaatgtgttcttctgctacaggctggatccacttatctaggtggagataatagtctgagagaggagttggcaaactgttcctgtaatgggccagatagtaaatattttagactttttaggccatgatgtttctgttgcaatccttgacatctgctattgtagcatgaaagcagtcatagacaatgtacaaatgaatatcttccaatttttatagaaacaaatgtaaatttcccataaatttttgtttcaaaaatattatttatttgcatttgttcaatgtaaatacttttagctcacatactatacaaaaacaggtggcaggatggacttgtgcagagagtattgtttattgatgcccaatataagactttcctgtccagtagaattttctgcaaagatgctcgattgatttgtgtcctatttaaagaatatttgtcagcacaagattccaaagactgasttttaactttcccataatttttttgttttagctcttatatttacatcaatgacatgtttcaaattaattttatttgtagtatggagtaataatgg

SEQ ID NO: 65819 - DNA, 668 bp, Homo sapiens
gagaagcaactgtctgtaaacccaagcccattatttgaagagagttatattcttgacagagaaaagtgttgttggcattgttgttgatgttttaattctaaaatcttggcactacatgtcattagccaagctagagggcaatacacagggagttcatgatgcaaggaagaggagaggaaggamtaataatgtgatttagttttccctccatgccctctttctactgaggggagtagctgggaggggcgaatgatagtttagatgtaaagatggggcttggctccttggcctatttgggaggttaaatcaccagaagatatgacggaagcctcagatgggtttgggaatccctaaacagagaagacttgtggccttgcttcctgcggagaattctgggagggagcagctacagcacagcagaaatggtttcagggcagaccttgcagagagcacacctaagagaggccgcttccatctccctcaacagccaaggggtgtggaggaagtctgcaaggttctcacatcagctggagaggggcacagaaggtaactgcggattgagagcagggggactaccaatgagtccaaaacctagagccagcggaccccataacagacacttggggagtgaacataagccagtggctgggtggggaaggccactcact

SEQ ID NO: 65820 - DNA, 668 bp, Homo sapiens
gagaagcaactgtctgtaaacccaagcccattatttgaagagagttatattcttgacagagaaaagtgttgttggcattgttgttgatgttttaattctaaaatcttggcactacatgtcattagccaagctagagggcaatacacagggagttcatgatgcaaggaagaggagaggaaggactaataatgtgatttagttttccctccatgccctctttctactgaggggagtagctgggagggrcgaatgatagtttagatgtaaagatggggcttggctccttggcctatttgggaggttaaatcaccagaagatatgacggaagcctcagatgggtttgggaatccctaaacagagaagacttgtggccttgcttcctgcggagaattctgggagggagcagctacagcacagcagaaatggtttcagggcagaccttgcagagagcacacctaagagaggccgcttccatctccctcaacagccaaggggtgtggaggaagtctgcaaggttctcacatcagctggagaggggcacagaaggtaactgcggattgagagcagggggactaccaatgagtccaaaacctagagccagcggaccccataacagacacttggggagtgaacataagccagtggctgggtggggaaggccactcact

SEQ ID NO: 65821 - DNA, 668 bp, Homo sapiens
gagaagcaactgtctgtaaacccaagcccattatttgaagagagttatattcttgacagagaaaagtgttgttggcattgttgttgatgttttaattctaaaatcttggcactacatgtcattagccaagctagagggcaatacacagggagttcatgatgcaaggaagaggagaggaaggactaataatgtgatttagttttccctccatgccctctttctactgaggggagtagctgggaggggcgaatgatagtttagatgtaaagatggggcttggctccttggcctatttgggaggttaaatcaccagaagatatgacggaagcctcagatgggtttgggaatccctaaacagagaagacttgtggccttgcttcctgcggagaattctgggagggagcagctacagcacagcagaaatggtttcagggcagaccttgcagagagcacacctaagagaggccgcttccatctccctcaacagccaaggggtgtggaggaagtctgcaaggttctcacatcagctggagaggggcacagaaggtaacygcggattgagagcagggggactaccaatgagtccaaaacctagagccagcggaccccataacagacacttggggagtgaacataagccagtggctgggtggggaaggccactcact

SEQ ID NO: 65822 - DNA, 1313 bp, Homo sapiens
ttgactgcctgtagtcaactcagactctactgtggctagtgcctacaagtttgtggtttttcattgtaatgtgcttttattaaaagggtctcaccagaaatctcatgggaagttgggggtagaggagaagctgcaggaaaaacagaagaacagcctcaccttggaggctcttggtgcctttcccacctggcagccagagatacagggtggagaaaacagggaatcctcagagaaggtgactattctcaaacaccagcaggaggtgaggtgtactcccagacccccaggaaagctgggcaggccagaaaacaggtgtgattgcaatgagatgcctgggccaggcatcttcaattaagaagaaaggggacaaacagtgaggtgatgagctgattatcatttctgtttatgcacctattggcctaggggcagcacactgagacctctgttaggttcctggaatgtgagataaagggggcttagatttaataactctcatcctttgtcattaagctgggcagtggtctatgtcaccaaaaacgtcctcttacaaaaaagttttttttaatgcacaccaacagagcaccttgcctcccatttctttgaatctactcttgtagtgtgttgagagagatgagatgaagagaaagaaagtggcctggatgactagaggggaaattgaaggggaccagagacaagggaatttcactgttcagaccatcatagctgatttgattagtgttttcaacatttgagactgcaaagcattttctttaaaagcaagatttcagaattgaggaaagttcaataccaggatagttttcaaactttaccaagtaacaaggtattcataaagataaattgccagctaagttaaaactagcaggggcagtttcgaaaagagatagaggctactatattctgtctaataggtcgtattaagttctgaaaagctaagttaaattactaaacattgttttacatttaatacaaatgacacaggttttgaaccagcaatgtgtgactccagaactgcttcttgtaacccatatgcatacacttcattaaatcattaaatgactctgtttaaagttatcgtgcacagtgaatgcacttggattttgtgtgatttatataacgatttcaaagttatttcctttttttacattattagtcagagcttgtttcattttactataaaataagggaagaataccacaaagtccaaacaatttctaatgcaaactaaggaagagcatgctgtactataatttcyatttaaatttcactttttttcagtaaataagtgaaaatcc

SEQ ID NO: 65823 - DNA, 762 bp, Homo sapiens
tgtaatgagccctttgggtcaacctctgggccaatagatggcacttgctggtgaaagccagctgctgtggcagcagtagggtttacacttgacctttgttaactaggagaagcatgtgggtgtcctgggggatggaatgggctgtggaactctcagtggtctgcactctgcttctgaggtagggagggcaaagcttgttgaggtgggccaggtaagtccacactcaggccccctagaggcaggcataagcactggtcccaaaggggtttgtggggcagtcctcaggcctccagagaagcgyccagcaaggaatggagcaatcactgctgtgccaaagacataggaaggaggtgcagctccacctgaacagcctagaaagtggcagtgttctcaagcttcaggcccagcaggtctcatttgctcatggcttgacctcagcagtaagtctggacagttaaccaagttagatgcagtttgctttcagtcagcaaaactactgtcccaggccataaaactcactgcctgggctaatactatatcccctaggcaaatctcactctgctctggtcccattaaggggtggggagtttgcccaactggagtccgtgcagctggggcccatgccacacctgttctcagttctggctataggggaccctcccctgctctagaccaaattgccaaatcccctcctgagactctccaaaccagtgactgttgaccctgccagctggaaggttcttgtgaatccctgtatgagct

SEQ ID NO: 65824 - DNA, 762 bp, Homo sapiens
tgtaatgagccctttgggtcaacctctgggccaatagatggcacttgctggtgaaagccagctgctgtggcagcagtagggtttacacttgacctttgttaactaggagaagcatgtgggtgtcctgggggatggaatgggctgtggaactctcagtggtctgcactctgcttctgaggtagggagggcaaagcttgttgaggtgggccaggtaagtccacactcaggccccctagaggcaggcataagcactggtcccaaaggggtttgtggggcagtcctcaggcctccagagaagcgcccagcaaggaatggagcaatcactgctgtrccaaagacataggaaggaggtgcagctccacctgaacagcctagaaagtggcagtgttctcaagcttcaggcccagcaggtctcatttgctcatggcttgacctcagcagtaagtctggacagttaaccaagttagatgcagtttgctttcagtcagcaaaactactgtcccaggccataaaactcactgcctgggctaatactatatcccctaggcaaatctcactctgctctggtcccattaaggggtggggagtttgcccaactggagtccgtgcagctggggcccatgccacacctgttctcagttctggctataggggaccctcccctgctctagaccaaattgccaaatcccctcctgagactctccaaaccagtgactgttgaccctgccagctggaaggttcttgtgaatccctgtatgagct

SEQ ID NO: 65825 - DNA, 791 bp, Homo sapiens
cgcgaggcgtggagcggcggagcgaggccggagcgcggccgctgtggcccttggcgtgagcagtccccgccacctctcggcgggctcgcttccccttcctggccctcagtccttatctctcatggtcgtccggggcgcccccagttgcccagcctagagaggtggcgaaggggcgatcaccaggagaaccgcttggaggggaggaaggggagcctcacagcctcgcgcatgtctctagaggcgcgcggtccaggccaggtgcgtctgagtccgggctgcactgcagcctgcgccctggctcctgcgagtcgctggcgcggtcactctgggcctcgctgggccsacacgtgccgctgccccgcgctctccctggcgactgagtgggacccggggcagcggggagcggggccgctcacgagctgcgggagatgcccggcatcaccgtggcgcacgcccctccccagatcgcagggccaccatgaagtttaccccgttgcagggcccaggctgcggcgacaaggcgtcccgaaatgccagtctattccgcgaggtttaacttccttctcgctcacgaactccgcgcccctgagctctcgggcaccgtcgctcccactcaaaatctccgcgcgccgcacgcctcctcaagcggaggcggcgaggatcttgctttccgttcggcggtcgcccggctgcccagcaaacccgctcgcagaaaggatgggaaggaagggggctagtgcaccgagcagcggccgcggcggcggcgccggaattcggtctcccgactttcc

SEQ ID NO: 65826 - DNA, 636 bp, Homo sapiens
acaagttatttccccatccacatacccaatgtgcaatgttaagactgcagtaggcactcctgctccaaagaggaaagaatgggaagcacctagcaggcaattctgaatccaggtggacgcgtgtcaccagttcccatgattctggggccagaggtgggagcaattgctggtggtcatctttggaaacaatgctcacagatactaaagtctttgggggaacgtgggtagagaactgtatgccggagagatgaggcagacaccgtgtgagtctaatgaccggcctcggcaatactcacagtggggcaaccagaactatgagcatcataaggtggtacaataagaagtatatacatagcatcacctggccagtattcttgtcttaaaattgaccctgaatcttctcagacatctagactctatgattaatatacaggacacayaagagctagaggaacgggttaaatggcgcaatgaagcaattagctagaccctgaatgtagcacatcctacaggatgaaggactgtgttcctcaacaaatcaatacatgcaaagcacacagaaaggagctgttagagaataaaagagaattaagaggcataacaatcaaatgcaatgtgtggaccttatgtggatcc

SEQ ID NO: 65827 - DNA, 1028 bp, Homo sapiens
gaaaattcaggaagagataaaataattcggctggttgattgaaagtattacacttccttgtaaataattaacttattttcaaaagtaaagctttaatctgattttctttaataattgatactgagtatttaatattcattagccatttgtatttcttcatatatgaattccctttcccatttttctattattttaaaaacaaatttaaaagaactttttgtacagtttatggaaatcagactgtttattgccattatgttgtaaatacatttgtttgtgcttttactttatgaagattcctgctacaacgagttyttttaagtctatagtcaaatttatgattattttccactgtggttcctgagtttggtagtatggtagaaagctgttttccactcaaagattattcaaaagttctcaccaatatttcctttttttttcttaggacttcactttcttctgtgtaaacacttttctatctagaattaatttggggttcataattaattaaagtaagaatatcaacctaacgagattaaaattaagtaagaaaaaaatttgcaggtaacagctgaaaaacattttttaagattaacaaagggataatttaaatttaggtttgtaaaatcactttcatatgatgccacattccaactttatagtctttggagatcttttacttttttcagttttaattaaaactgaacgtaatacagacttgctggggaaatgtgatatcaatgcctgctcttaacttacatatttgaatgtaaatgtaaatttatttttaaaaaaaatttttagagacaggatcttatatgttgcccaggctggtctcaaactcctggcctcaagggatcctcaaggcttggcttcacaacgtgccacgattacagatgtaagccactgctcctggccttaaatgtaaatgtaagtggcatagtttgatctttaatagctataacagtatcttaacaccatttttttaattaagaaaaacaaattcaaacacacaacctgattacagt

SEQ ID NO: 65828 - DNA, 998 bp, Homo sapiens
tgcatttaggctccaacatttgtggcccaaggactctgctgccaatgaacaaatgaacaytatgtaacagctttactacaactttctggggcttcagtctcctagaggcccttgtgtccttctcctcctatacccctctttttacagtggcgatgactgaggcccagagggaggtaggtggtggctcaaggtcacacagaaaggctggaaccagcacccaggctctgatagcctgccagtgccctttgcaccaactctactaggtttggtgagggctattcaataattaaccgtggattctgagaaagacatggacccctcgggcccaatcatgaggtcataaaagaacagattcattacacagtgtttgagcccagaggacacttgctattgacttggtaacataatcttttttttttttttaactttttattaccagaaattttaaatatacacaaaaatagacattataatgaacccctttgtgccagcagctgccagcgtaagtaattatgaacacctgctgttcttggtaacataacttggaatcttatttcctccttggaaactggaggagacacacactataaaacactataaccagaatgatcatttcaaattgcaaactggattgtgtcaaccgcccttccttctccctcaagaccctttaatagaatcctctggtcctgggatgaagatggagcagagctcctaccccagacctggacagctgtctctagacttcttttaagtgagagaaaagtacacttctcttgtttaagccacttttattttgggttttctctgatgtcagtagttctcaaaactggctacacaatggaatcaatggaagagcttaaacacaaaacaaaacaacaacaaaaccagataacccagaacaacacccagggactcctagcaatgtggagtgttgctcaggtgtttccaaagactctcccaggtggtgctgatccacaggcatagttgagaaccactgt

SEQ ID NO: 65829 - DNA, 480 bp, Homo sapiens
cttttgctgtggggatttccagaacaaagagatatcgagtcccaaactggactgacttcatagatkgcagaaggagagagagccagcaggatagcaagaaagggggtggggagagagaaagagaaaagagcacgcgcgccagcctcagacaatgagtggggagagttgagaagagaaaaagggagagattggttttcagatctgtcctgaacctctaaattttattcatagaagtcagagccagcctcggttgtaaaagcagcagttaacgtaactaaggccttctgtctgaggcttcctcaagctccttggtggatcagtggcttatgtgctgtaggaaagagatcaagccctgtttgaatacagaaattgctttctcaccctttcttggtaataaaatccagaaacagaaactggcatgggagtaggtttcagcattcctgttgcacgggacactgacagttctccattctccgatgt

SEQ ID NO: 65830 - DNA, 1170 bp, Homo sapiens
ttgcaagtattttctcccattctgtagactgtctgtttactttgttgatagtttatttttctgtgcagaagcatgaaatactacacagccataaaaaagaatggaataatgtcctttgcaccaacatggatgcagatggtggccataatcctaagtgaattatcacaggaacataaaaccaaataccttatgttcttacttataaataggagctaaacactgggcacacatggacataaacttgggaacarcagatgctgcaggctaatagagggtggagggaggaatgggggcgtggggcaaaaactaccttactagtactatgctcaccacctgagtgatgagatccatacccctaacttcagcatcatgcaacatactcatgcggtaaacctgtacctgtatccctgtatctaaaattaaagttgaattttaaaaaacttgcattatttctgtatcttttatcacgtgacatatacatgtatactagattgtaagctccataaatcaagggcatgcctgtctcttctaaccatgtactctcagcctttaatacattgtttggtacacagttcatgctcaagaaatctaatttaatgaatgattgcaggaggttagtcatctggttttcagacatatataaatgtagttcaaacatgtattttatttgcgcatttaaaagtctataattgaagttagtttttagaatattctttaatgttttatggtgcaaggattaatcttatttttataataaatgcaatggcggatatgctaaattattttgaaattttaagcaaatttattgttgagaatataaaattatgtttaaaaagaaaagaatatgaataatgtgtgtatatacttaactatgtaatatatatttacgaatgaaagatttgctattatgtttatcttctacttttattctaaaattaacgtttattgttttataaaaatatccacagtcttctgactataaaaaacagtattaatagtaaacaaaatatttaaaaatgtgataggagaacttttatgtaccatacactggattgcttatctagtctgttggttaatagctggactttttattattagcttcacattaaaagattagctaaaagaaggtcatgacttcagttaacagaaatattgctcatgttttgcttg

SEQ ID NO: 65831 - DNA, 1170 bp, Homo sapiens
ttgcaagtattttctcccattctgtagactgtctgtttactttgttgatagtttatttttctgtgcagaagcatgaaatactacacagccataaaaaagaatggaataatgtcctttgcaccaacatggatgcagatggtggccataatcctaagtgaattatcacaggaacataaaaccaaataccttatgttcttacttataaataggagctaaacactgggcacacatggacataaacttgggaacaacagatgctgcaggctaatagagggtggagggaggaatgggggcgtggggcaaaaactaccttactagtactatgctcaccacctgagtgatgagatccatacccctaacttcagcatcatgcaacatactcatgcggtaaacctgtacctgtatccctgtatctaaaattaaagttgaattttaaaaaacttgcattatttctgtatcttttatcacrtgacatatacatgtatactagattgtaagctccataaatcaagggcatgcctgtctcttctaaccatgtactctcagcctttaatacattgtttggtacacagttcatgctcaagaaatctaatttaatgaatgattgcaggaggttagtcatctggttttcagacatatataaatgtagttcaaacatgtattttatttgcgcatttaaaagtctataattgaagttagtttttagaatattctttaatgttttatggtgcaaggattaatcttatttttataataaatgcaatggcggatatgctaaattattttgaaattttaagcaaatttattgttgagaatataaaattatgtttaaaaagaaaagaatatgaataatgtgtgtatatacttaactatgtaatatatatttacgaatgaaagatttgctattatgtttatcttctacttttattctaaaattaacgtttattgttttataaaaatatccacagtcttctgactataaaaaacagtattaatagtaaacaaaatatttaaaaatgtgataggagaacttttatgtaccatacactggattgcttatctagtctgttggttaatagctggactttttattattagcttcacattaaaagattagctaaaagaaggtcatgacttcagttaacagaaatattgctcatgttttgcttg

SEQ ID NO: 65832 - DNA, 1315 bp, Homo sapiens
cactgttttaaagaaagcccaaaaattgcatggaaattctctatatagtaccttgtgagactaaatctaccgcagttagtcatgagggaaataaatgacaacgatagtaagaatctaaaaagaatgaattatgttcttatatgtctttcatcaggtttgcttgcgggcataagactttctcagaaagtaaaatgaagcaatgactaaagtgccgagaatgaattattccttcttactatctagaaaagtgtaagttactgtcaatcctgaaatgattcttcaaaaatttgtgtttgcacatacatgctcacttatagacaacttttttttttttttttaccatgcttctttgtcatcaatataattaactttcagattcaggattgctctcattttgtagattttcctttgttttttaacccyacaaagtatttaatcaacacacttttgcttatcattttgcattttacatgataataccctggctatatttatctaaacaattaagggtagatggtgaagacaggctatttcaccatcaagatcctagaaatataacatttaataaatagatcactgttaaaatttcatggtgatatttatcactaacaacaaatcacatgaggtgttattacatggataaagtgaagtggtgaaggtgtaatcatgaaaagacccattgtgacaggtaatacacaaacaagtcaaagaagctgacagcaaaggtccttacattcagctgtaaggaagctgcaaagaacagctcaggcatctgccgccctgcctcctttaggataaatttatcctgggcaggaaacactaaaatatttttcacaaaactatcgtctggataaaattaaattcattaacaagttcaatggacctgataaaggctcaatgagaataattcattgattagagtttaatgagtatctatggcatatataacattttgagtttaattcaaacagaatccatatcataagagtgaaaattaataataaaaataatggcaataataagtaaggagagttgcaggaggaaagaggagaaagggagatgctaatatttaaggaaagcttatgaggagttggttttgttaaaaatacctgatccagattattgcatttcctcatcactctttcagaaaaattatctgagatttggagaagccaaatggccaagagcatatagcttgtcagcagagaaccccattctggtttatacctgctcacttaaggactaaattcatatataacatgtagttggcacttaacaaggtactcaagatgcaaaactgaagatatagtctatt

SEQ ID NO: 65833 - DNA, 1247 bp, Homo sapiens
ttcatgcatcctgccaaaggctgacttcctctggctgctttcagggatattcccatcatgctcctctcaggatgaaataggcttctaacttctactgcaccatggcacaaaggaatagttttgtttttccttcttaacggtaaagggcctgctgaaaggcctgggaggaattaaattctgttcctccacacctacccactggtcttccctagaaggccacaccactgatcactgctgaggagcctgcggaacctaatccrgaacataaggtcctttgggtgtatcctaagagccttgcctcctctagaaaggagacaagcaccaaatcaacctcattggtcctgagctggaacactgggactgcagcctcctctctccaccctgaagaatgactgtgagctgatccaaccatccacacgggaagcccctccctgcagtttagcgatccaggaagatgctaccagtccccaaagcgggcagattggatggtcctgaggcccaccctagtcaagtggcaggtcctgttctctttgtccgtatagacgcacaacacagctctacagactccaatcctaacgaaaatgatccacctacatagttatcccgcgcggaccagccggggtacagttgcatatgaagctgtcgctccttccgggccagctcgtagtatttcgcttgctcttctctggacagtgcatgccactggaggggacgtggggtacagatgagaaagacatgaacaaagagaaaagcatgaaagaacatcacacattacgccaaggtcaggggataaataatgctgcctttttgggtgagtccgtccagaaatggtataatctgtacatactgaccgtcggctgggtcctggcactaacaggaatgtttagacaaaacttgatttgttatctatgtcattctgtcatttgctcactcgctcgggtaggggaagagcatggctgtggctgttctgaacgctgagtgcagaataactagtcctgactcagtgaaggccattcaaggattcagaatgtggctgaagggcaagaattctccaaagaaatggggacagagacattctgccacctgacctgctgcactctggtccctcaccacccgccccccgcttctccctgagaagggcgtcacctaccctccgcccaaggatctggttgatggccgcgctttctttcaacgtgcactcagctacgacctttgctctcatttccttcatatacaacatgaatgca

SEQ ID NO: 65834 - DNA, 724 bp, Homo sapiens
tcacttaggttaaaagttccagaaatactagccatgagcaggaatatatctgatcatgctcctttacatttgtgttacccatcgaagggtttttatcttaaagtatttcattttagcctacaaaatataagcactttgagctccacttggaagataagtcaataggcaaggagatatcaggcgagttggcttccctgatcctagcaayggagacctggactcagtggcatccttctggcttctgcatggggctctttcctgttcctagcaagcccccagcaattagagacagacgaaagcagcattgaaggcccctcgctgtgcagtgcccccatatgaaataattaccaaaagcagccctcagaaacgacaggacccgtgaacgatgactgagcctcttcagctaggagcagccacacacgttagcaaggaccatctcctccagttgagaatatgatgtgccacttggtgtggtgacatcacccttcctggcctgccagctgtgtgtggcatggtgtgaaaatagggctgaaattggatgtggtttcacccccatgcctgccctttgaggcttaggatttgaagcagatgagtgaaattttgaaaaccaagttcaggaagatgttttctcaaaatagcagagatcacccaagatgacaggaggaagtatttattttttttacatcctctccaggtcattctgtaaattataaatcaggatccc

SEQ ID NO: 65835 - DNA, 2187 bp, Homo sapiens
cctggacaccctctgagcaccaggcctgtgtccatgcaccgtggccttggtccaggtggctgtcatctccctagctcatcctgactcctggcctcacccctccgtggcccctctggcatggctctcccagcctcggatggcaggtgctctccccagaattggcctctctctgctccaggggacagggatcctgccacagtgctagcccctcccctccatgtctggcagcagggaactgtcgacaagggggctacgatgccacccccagctgccagcaggaaggaccccaggcacagcctgcaggtctgaagtgggtgacagtggccagaggttctcacaggtcgcaggacttcagtggagtgaaggttggaaattggttacaaaggccatgccttctgcgtcacagccatttcacatttcaatttgtgattctagtggctttttttggcccctctaaagtagcaagtgggggttatgtgagagaaacaaagcttaatctaaaaatgtctgatcttaaaatatcagcgacagacaaagctatcaatttctgttaaaaacaattcttggttgtaaggggaaaccagagtgtacacaatgcatttcatcaacatgcagatactcaggcagtaattcaagagggctctgaagtcatctgttcctttattgaaaacwccaggtggccgggatgaaggggtcagtgaacagtctacatggtagtgtccatttgaattttcttagaaaccccattattttacttattttttttcattccctttcttgttttacaaaggattttaggcagcataaagataattaattccttcattagtcatatttagtttctgcccactatgataaagttagttttaattaaatcaattttctcctgcgctgcagggagcctgcttattttgatcagaattgaatctcattctgggaaaccttgtgccccagtctctgagattctccattttattcatcttcagaaggtccacgctgagtttgatggtgactaatgttgttttcattttgaaattttattgctcattaaaaaaaacacacacatttgttgactttaaaagtgaatagtttttgtttttccttttaaaatcctttgcctttttaaaatttttttaagacagagtctcactctgtcacccaggctggagtgcagtggcgcgatctcagctcactgcaacctttgcctcctgggtttcaagcgattctcgtgcctcagcctccccagtagctgggattacaggcatgcaccaccacacctggctagtttttgtatttttagtagagacagggttttgccatgttggccaggctggtcttgaactcctggcctcaagtgatccacctgcctcagcctcccaaagtgtttggattacaggtgtgagccactgcaaccggcccccaatttttttttattaaaaatttttctagagatgagatctcacaatgttacccaggctgttctcaagctcctggcctcaagggatcctcccacctcagcctcccaaagtgttgggattacaggtgtgagtgagccaccgcacacggcccagaatttttttcagaattgtgtgtttatgaactttctccataaggacaaatattgagtcttgatctctgtgtcatttttcagctacttcctgagaagttcccccatgacaagcagaactgtgaaacccattttccaatagcagagatgaacccctgcatgtgaggctccggccctgcggcttggtggtgcccttgcttctgggaggtcagcctgcctctgctgagggctattagtatatattctggtcaagcgtccttaaaacggggacttcttgagggcctgagcctgccctgttctcacatgagcgagtctctggggtctgcttgaaggggactgtgtacttccatctctggccagtggatcatttgggtcctgcttcagggtcaccccaagtatgcaaggccaggcaggggccaagaaacccaggcaacagacgttcaatcttccaggacaaccgaaactatatagtttcaccctgcatgtatacagctaactaaccggtcctaactcagtcatctccggtcctatccattaaacttcttgagttttccaagctgtctcccttctcgggttcattttccctgatgctgtcgtagggtaggcacgcctgttctggt

SEQ ID NO: 65836 - DNA, 2187 bp, Homo sapiens
cctggacaccctctgagcaccaggcctgtgtccatgcaccgtggccttggtccaggtggctgtcatctccctagctcatcctgactcctggcctcacccctccgtggcccctctggcatggctctcccagcctcggatggcaggtgctctccccagaattggcctctctctgctccaggggacagggatcctgccacagtgctagcccctcccctccatgtctggcagcagggaactgtcgacaagggggctacgatgccacccccagctgccagcaggaaggaccccaggcacagcctgcaggtctgaagtgggtgacagtggccagaggttctcacaggtcgcaggacttcagtggagtgaaggttggaaattggttacaaaggccatgccttctgcgtcacagccatttcacatttcaatttgtgattctagtggctttttttggcccctctaaagtagcaagtgggggttatgtgagagaaacaaagcttaatctaaaaatgtctgatcttaaaatatcagcgacagacaaagctatcaatttctgttaaaaacaattcttggttgtaaggggaaaccagagtgtacacaatgcatttcatcaacatgcagatactcaggcagtaattcaagagggctctgaagtcatctgttcctttattgaaaactccaggtggccgggatgaaggggtcagtgaacagtctacatggtagtgtccatttgaattttcttagaaaccccattattttacttattttttttcattccctttcttgttttacaaaggattttaggcagcataaagataattaattccttcattagtcatatttagtttctgcccactatgataaagttagttttaattaaatcaattttctcctgcgctgcagggagcctgcttattttgatcagaattgaatctcattctgggaaaccttgtgccccagtctctgagattctccattttattcatcttcagaaggtccacgctgagtttgatggtgacwaatgttgttttcattttgaaattttattgctcattaaaaaaaacacacacatttgttgactttaaaagtgaatagtttttgtttttccttttaaaatcctttgcctttttaaaatttttttaagacagagtctcactctgtcacccaggctggagtgcagtggcgcgatctcagctcactgcaacctttgcctcctgggtttcaagcgattctcgtgcctcagcctccccagtagctgggattacaggcatgcaccaccacacctggctagtttttgtatttttagtagagacagggttttgccatgttggccaggctggtcttgaactcctggcctcaagtgatccacctgcctcagcctcccaaagtgtttggattacaggtgtgagccactgcaaccggcccccaatttttttttattaaaaatttttctagagatgagatctcacaatgttacccaggctgttctcaagctcctggcctcaagggatcctcccacctcagcctcccaaagtgttgggattacaggtgtgagtgagccaccgcacacggcccagaatttttttcagaattgtgtgtttatgaactttctccataaggacaaatattgagtcttgatctctgtgtcatttttcagctacttcctgagaagttcccccatgacaagcagaactgtgaaacccattttccaatagcagagatgaacccctgcatgtgaggctccggccctgcggcttggtggtgcccttgcttctgggaggtcagcctgcctctgctgagggctattagtatatattctggtcaagcgtccttaaaacggggacttcttgagggcctgagcctgccctgttctcacatgagcgagtctctggggtctgcttgaaggggactgtgtacttccatctctggccagtggatcatttgggtcctgcttcagggtcaccccaagtatgcaaggccaggcaggggccaagaaacccaggcaacagacgttcaatcttccaggacaaccgaaactatatagtttcaccctgcatgtatacagctaactaaccggtcctaactcagtcatctccggtcctatccattaaacttcttgagttttccaagctgtctcccttctcgggttcattttccctgatgctgtcgtagggtaggcacgcctgttctggt

SEQ ID NO: 65837 - DNA, 2444 bp, Homo sapiens
tggtccacaaagccagagtctttggagacagactttgtcctctgaacgctgcaggcaaagatgtgtggcacaccatgcgttttgatcttcctagacgctatcgtgtaatgggccttttggccttgttgaatttacaacaaaaagcatgcccctttcagttgctccccagtgggcactgtgaaagtctgatatctggctgctttcttttttatgctcggggaagttctctgaatgtaattatggtttgttgtagaaagttttcattccacatttattcaccgtctccttttcttgatctatgaattgctcagagctgaattcactcatttggggctaacctttctcttcttctctctgaaactagatcataaccaaggagagagaggtctcagaatggaaagataaatatgaagaaagcaggcgggaagtgatggaaatgaggtcagttggggagctgggccttcctcgtgcctgagggatacttacctgtggtttaataatgaccggagctggtgtggtccacagaagagtgtcttctgtggaagttctctcttctttattacacacagttcatatttttctaaaagtatttttactctattactattactaaaatagcatgcacatgaattaaagaatgcattcaaataaatgtatgtacaatgcaaaacagatctccccactcagcctccagttccacaactcgcaggtgactatcttctgtttctggtggatccttccaagaattttccatttctcatcacaaatgtaacaatgagtgtaaacagcctcttttttctccaaaataaatgagagcttgcagtatacatcattctacactcttyttaattaattaatttatttttttgaaacagagtttcgctcttgttgcccaggctggagtgcagtggcgccacctcggctcactgcaacctccaactctgccaggttcaagtgattctcctgcctcagccacccaagtaactgggattacaggcgcctgccaccatggctggctaattttttgtatttttagtagagtcagggtttcaccatgttggccaggctggtctcaaactcctgacctcagatgatccacccgcctcggcctcccaaagtgctgggattacaggcatgagtcgctgcgcctgacccaccactctttttaaatttaatagcatattttttgacgtattttttattcctctctgcctcactctgtttaacaggtgcttagtggtccattgtatggatataacgtaattaatttaaacagtctctgtggacaaacatttaggatgttttcctgactgtagcttaaatgatttattttcatttgtggtatgttgtaatagaaatatagtcaccatgtatagtgtacataagtgcaatggccgatactagtttttttttgtgtgtgtgtttttgagacggagtttccctcttgttgcccaggctggagtgcgatggtgcgatctcagctcactataacctccgcctcccgggttcaagtggttctcctgcctcggcctcccaagtagctgggattacaggcacctgccaccatgcccggcttaatttttgttttgtatttttagtagagatggggttttaccatgttggccaggctggtcttgaactcctgaccttaggtgatctgcctgccttggcctcccaaagttctgggattacaggcatgagccactgcacccagccccgatactagtttattatcaaaatcaattgcattcctggctaccattttaagcagaaaagcgaactgtaggtaatcatatcccgttttctaggtcatcgtaggatcttcctgaaaattctcctgttcgttccttctttctgctgatggttccctgtgaccacctctggacattgagcctagcgtgctatttcacattcaaacgaaagccctgcatttgcattatttttaaacctctttgttttttctcttatttgggggtatgggtggttctagtttttttacatgcactgaaaatgaggcatggcacccaggaaggctgtaagttctgtctctaatttcttttgcctcctgggagctttgccttcttggtgcctggggagtgcttattcgtggtttgagaagtcgtaccactgaggggcccccaggaggtgccatttactagctgatgtggtaggatttcaagatgtcaccagctggtgcagatgtaccggcatttggtagcccgaatgtcagcccgtcagcctctggagctagactaggtgaaaaccaggctctgcttcccagccactccggggcatcttacttaactctgcctcactttgcttattaacttgaaaatgggggtaaataacagtgcctcaacagagtagagcagaaggattatgaacaaaggctgcggagtgtgatgcttggattcacatgtaggctctgccacttggcagccttg

SEQ ID NO: 65838 - DNA, 2444 bp, Homo sapiens
tggtccacaaagccagagtctttggagacagactttgtcctctgaacgctgcaggcaaagatgtgtggcacaccatgcgttttgatcttcctagacgctatcgtgtaatgggccttttggccttgttgaatttacaacaaaaagcatgcccctttcagttgctccccagtgggcactgtgaaagtctgatatctggctgctttcttttttatgctcggggaagttctctgaatgtaattatggtttgttgtagaaagttttcattccacatttattcaccgtctccttttcttgatctatgaattgctcagagctgaattcactcatttggggctaacctttctcttcttctctctgaaactagatcataaccaaggagagagaggtctcagaatggaaagataaatatgaagaaagcaggcgggaagtgatggaaatgaggtcagttggggagctgggccttcctcgtgcctgagggatacttacctgtggtttaataatgaccggagctggtgtggtccacagaagagtgtcttctgtggaagttctctcttctttattacacacagttcatatttttctaaaagtatttttactctattactattactaaaatagcatgcacatgaattaaagaatgcattcaaataaatgtatgtacaatgcaaaacagatctccccactcagcctccagttccacaactcgcaggtgactatcttctgtttctggtggatccttccaagaattttccatttctcatcacaaatgtaacaatgagtgtaaacagcctcttttttctccaaaataaatgagagcttgcagtatacatcattctacactctttttaattaattaatttatttttttgaaacagagtttcgctcttgttgcccaggctggagtgcagtggcgccrcctcggctcactgcaacctccaactctgccaggttcaagtgattctcctgcctcagccacccaagtaactgggattacaggcgcctgccaccatggctggctaattttttgtatttttagtagagtcagggtttcaccatgttggccaggctggtctcaaactcctgacctcagatgatccacccgcctcggcctcccaaagtgctgggattacaggcatgagtcgctgcgcctgacccaccactctttttaaatttaatagcatattttttgacgtattttttattcctctctgcctcactctgtttaacaggtgcttagtggtccattgtatggatataacgtaattaatttaaacagtctctgtggacaaacatttaggatgttttcctgactgtagcttaaatgatttattttcatttgtggtatgttgtaatagaaatatagtcaccatgtatagtgtacataagtgcaatggccgatactagtttttttttgtgtgtgtgtttttgagacggagtttccctcttgttgcccaggctggagtgcgatggtgcgatctcagctcactataacctccgcctcccgggttcaagtggttctcctgcctcggcctcccaagtagctgggattacaggcacctgccaccatgcccggcttaatttttgttttgtatttttagtagagatggggttttaccatgttggccaggctggtcttgaactcctgaccttaggtgatctgcctgccttggcctcccaaagttctgggattacaggcatgagccactgcacccagccccgatactagtttattatcaaaatcaattgcattcctggctaccattttaagcagaaaagcgaactgtaggtaatcatatcccgttttctaggtcatcgtaggatcttcctgaaaattctcctgttcgttccttctttctgctgatggttccctgtgaccacctctggacattgagcctagcgtgctatttcacattcaaacgaaagccctgcatttgcattatttttaaacctctttgttttttctcttatttgggggtatgggtggttctagtttttttacatgcactgaaaatgaggcatggcacccaggaaggctgtaagttctgtctctaatttcttttgcctcctgggagctttgccttcttggtgcctggggagtgcttattcgtggtttgagaagtcgtaccactgaggggcccccaggaggtgccatttactagctgatgtggtaggatttcaagatgtcaccagctggtgcagatgtaccggcatttggtagcccgaatgtcagcccgtcagcctctggagctagactaggtgaaaaccaggctctgcttcccagccactccggggcatcttacttaactctgcctcactttgcttattaacttgaaaatgggggtaaataacagtgcctcaacagagtagagcagaaggattatgaacaaaggctgcggagtgtgatgcttggattcacatgtaggctctgccacttggcagccttg

SEQ ID NO: 65839 - DNA, 2444 bp, Homo sapiens
tggtccacaaagccagagtctttggagacagactttgtcctctgaacgctgcaggcaaagatgtgtggcacaccatgcgttttgatcttcctagacgctatcgtgtaatgggccttttggccttgttgaatttacaacaaaaagcatgcccctttcagttgctccccagtgggcactgtgaaagtctgatatctggctgctttcttttttatgctcggggaagttctctgaatgtaattatggtttgttgtagaaagttttcattccacatttattcaccgtctccttttcttgatctatgaattgctcagagctgaattcactcatttggggctaacctttctcttcttctctctgaaactagatcataaccaaggagagagaggtctcagaatggaaagataaatatgaagaaagcaggcgggaagtgatggaaatgaggtcagttggggagctgggccttcctcgtgcctgagggatacttacctgtggtttaataatgaccggagctggtgtggtccacagaagagtgtcttctgtggaagttctctcttctttattacacacagttcatatttttctaaaagtatttttactctattactattactaaaatagcatgcacatgaattaaagaatgcattcaaataaatgtatgtacaatgcaaaacagatctccccactcagcctccagttccacaactcgcaggtgactatcttctgtttctggtggatccttccaagaattttccatttctcatcacaaatgtaacaatgagtgtaaacagcctcttttttctccaaaataaatgagagcttgcagtatacatcattctacactctttttaattaattaatttatttttttgaaacagagtttcgctcttgttgcccaggctggagtgcagtggcgccacctcggctcactgcaacctccaactctgccaggttcaagtgattctcctgcctcagccacccaagtaactgggattacaggcgcctgccaccatggctggctaattttttgtatttttagtagagtcagggtttcaccatgttggccaggctggtctcaaactcctgacctcagatgatccacccgcctcggcctcccaaagtgctgggattacaggcatgagtcgctgcgcctgrcccaccactctttttaaatttaatagcatattttttgacgtattttttattcctctctgcctcactctgtttaacaggtgcttagtggtccattgtatggatataacgtaattaatttaaacagtctctgtggacaaacatttaggatgttttcctgactgtagcttaaatgatttattttcatttgtggtatgttgtaatagaaatatagtcaccatgtatagtgtacataagtgcaatggccgatactagtttttttttgtgtgtgtgtttttgagacggagtttccctcttgttgcccaggctggagtgcgatggtgcgatctcagctcactataacctccgcctcccgggttcaagtggttctcctgcctcggcctcccaagtagctgggattacaggcacctgccaccatgcccggcttaatttttgttttgtatttttagtagagatggggttttaccatgttggccaggctggtcttgaactcctgaccttaggtgatctgcctgccttggcctcccaaagttctgggattacaggcatgagccactgcacccagccccgatactagtttattatcaaaatcaattgcattcctggctaccattttaagcagaaaagcgaactgtaggtaatcatatcccgttttctaggtcatcgtaggatcttcctgaaaattctcctgttcgttccttctttctgctgatggttccctgtgaccacctctggacattgagcctagcgtgctatttcacattcaaacgaaagccctgcatttgcattatttttaaacctctttgttttttctcttatttgggggtatgggtggttctagtttttttacatgcactgaaaatgaggcatggcacccaggaaggctgtaagttctgtctctaatttcttttgcctcctgggagctttgccttcttggtgcctggggagtgcttattcgtggtttgagaagtcgtaccactgaggggcccccaggaggtgccatttactagctgatgtggtaggatttcaagatgtcaccagctggtgcagatgtaccggcatttggtagcccgaatgtcagcccgtcagcctctggagctagactaggtgaaaaccaggctctgcttcccagccactccggggcatcttacttaactctgcctcactttgcttattaacttgaaaatgggggtaaataacagtgcctcaacagagtagagcagaaggattatgaacaaaggctgcggagtgtgatgcttggattcacatgtaggctctgccacttggcagccttg

SEQ ID NO: 65840 - DNA, 497 bp, Homo sapiens
gatcctcccttgcctcttccagtttctgttgcctccaacatatttccgagcttgtgttcacttcactccaatctctgcctctgttttcacgtcactttcttctctgcgtgtctatgtcttctcttctgttcaccctctctctaccaattagcccatgataaatgccatcagaaaaggtatggctttcaagatctagtcattgataaaaagaaatataacttttggaagcccttttgtataaagaaaaagcactcaccttgaagttaaaaggcataggtatgagtcttgactctaccccctgacataggatcaatcrtttaacttctctgaggctctgcgtctttatctgaaaagccaaggaagaagagggttgttaaaatccaccgaagatcagattctataaacaaaaactctctgttaaattaaccatgacacaaattattctattgtcttccccgaatcccacagccccatccaacatttagattcatctttag

SEQ ID NO: 65841 - DNA, 1523 bp, Homo sapiens
ttctcatcaattttcaatcattcgagaccaattttgcttataattatccagttcttttcgaccacctttctcctgaagccagccttatggctattcacttcactttagcataagccgccaagaaggtgaacaaaatgaggaaaagattggttaaagttggctgtttgaaattctgaaacatgtccaccattcccttcacccatgcccacccctcttagaagtagtactttcagattatttaagagtcgatgcttctatgtggattttaatttgtcatctgtcctttataatagctagtaggtttaatttgactctattttaagcatatattgacctatgctaattatctgttaaaataaattccactcttagagttaataaagtgtgtttgtcatggaagacccattgaagtaagaagctgaggagcccttatggtaaagtgggacaagaaataataagacataataattttcccatgcaaatcaacacccgtagcttcaaaaatatcctgacccacaacaagtattggacaggccctgtttctctcactccctaaaaaattggctcgggaggagtatgagagctcccatagctttcccaaggctcattattctccatcactccacaggaacagcctgtcagagaagagtgaaagaccatttgtcaacctctcttcaactccctgattctagccaaacttcatcaatcccaactgaggagccagagagaaatcaaaccccatatatgcagcatcattgtctactggagtcaaaaatcacaattccactacccaccccaacaccactggccctgtttctcccaattgctttttattgtgtttttaaaaaatcctctttccccatccctgcaacaccgagaaggaggaattatagtagataaatatgaagcatggagatcctttaaaagtgtttttaataataaatgagaaaatgaaaaggagagggttgggaaggaaggagggaattcaaatgccagggaattgttcagtttcgcttttaaagatgttaacactcatttatacatctgcaagacactccccttaaagaaaagttctatgagtgtgggtctggttgcatgaataaggataaaattacttttttagacgatggtttcccacatataattcagagacccctgaaattaggtatccctcttgtagatgtccttgagatgctgctggacctgggaaagaggaaactgggatatgggtctatgccaaaaggtgcttctagttayaggacagagaggaaaggggcagagggagaaaaacctgaagtctgagaatctggattgcagaagactaccgaggtcgtgggagaagggagagaaaacaaggatgaaaaccgaaaggggaagaggcatgaaatgttgccaaatgtcaaaaggcatttggagagaagttgggaattgcattaagaaaaccactgcaaatctcatttcagaccatttagagatatgccccctgggaactgcgagctcaggctgtttagcatcaaacaaat

SEQ ID NO: 65842 - DNA, 1523 bp, Homo sapiens
ttctcatcaattttcaatcattcgagaccaattttgcttataattatccagttcttttcgaccacctttctcctgaagccagccttatggctattcacttcactttagcataagccgccaagaaggtgaacaaaatgaggaaaagattggttaaagttggctgtttgaaattctgaaacatgtccaccattcccttcacccatgcccacccctcttagaagtagtactttcagattatttaagagtcgatgcttctatgtggattttaatttgtcatctgtcctttataatagctagtaggtttaatttgactctattttaagcatatattgacctatgctaattatctgttaaaataaattccactcttagagttaataaagtgtgtttgtcatggaagacccattgaagtaagaagctgaggagcccttatggtaaagtgggacaagaaataataagacataataattttcccatgcaaatcaacacccgtagcttcaaaaatatcctgacccacaacaagtattggacaggccctgtttctctcactccctaaaaaattggctcgggaggagtatgagagctcccatagctttcccaaggctcattattctccatcactccacaggaacagcctgtcagagaagagtgaaagaccatttgtcaacctctcttcaactccctgattctagccaaacttcatcaatcccaactgaggagccagagagaaatcaaaccccatatatgcagcatcattgtctactggagtcaaaaatcacaattccactacccaccccaacaccactggccctgtttctcccaattgctttttattgtgtttttaaaaaatcctctttccccatccctgcaacaccgagaaggaggaattatagtagataaatatgaagcatggagatcctttaaaagtgtttttaataataaatgagaaaatgaaaaggagagggttgggaaggaaggagggaattcaaatgccagggaattgttcagtttcgcttttaaagatgttaacactcatttatacatctgcaagacactccccttaaagaaaagttctatgagtgtgggtctggttgcatgaataaggataaaattacttttttagacgatggtttcccacatataattcagagacccctgaaattaggtatccctcttgtagatgtccttgagatgctgctggacctgggaaagaggaaactgggatatgggtctatgccaaaaggtgcttctagttacaggacagagaggaaaggggcagagggagaaaaaccygaagtctgagaatctggattgcagaagactaccgaggtcgtgggagaagggagagaaaacaaggatgaaaaccgaaaggggaagaggcatgaaatgttgccaaatgtcaaaaggcatttggagagaagttgggaattgcattaagaaaaccactgcaaatctcatttcagaccatttagagatatgccccctgggaactgcgagctcaggctgtttagcatcaaacaaat

SEQ ID NO: 65843 - DNA, 1523 bp, Homo sapiens
ttctcatcaattttcaatcattcgagaccaattttgcttataattatccagttcttttcgaccacctttctcctgaagccagccttatggctattcacttcactttagcataagccgccaagaaggtgaacaaaatgaggaaaagattggttaaagttggctgtttgaaattctgaaacatgtccaccattcccttcacccatgcccacccctcttagaagtagtactttcagattatttaagagtcgatgcttctatgtggattttaatttgtcatctgtcctttataatagctagtaggtttaatttgactctattttaagcatatattgacctatgctaattatctgttaaaataaattccactcttagagttaataaagtgtgtttgtcatggaagacccattgaagtaagaagctgaggagcccttatggtaaagtgggacaagaaataataagacataataattttcccatgcaaatcaacacccgtagcttcaaaaatatcctgacccacaacaagtattggacaggccctgtttctctcactccctaaaaaattggctcgggaggagtatgagagctcccatagctttcccaaggctcattattctccatcactccacaggaacagcctgtcagagaagagtgaaagaccatttgtcaacctctcttcaactccctgattctagccaaacttcatcaatcccaactgaggagccagagagaaatcaaaccccatatatgcagcatcattgtctactggagtcaaaaatcacaattccactacccaccccaacaccactggccctgtttctcccaattgctttttattgtgtttttaaaaaatcctctttccccatccctgcaacaccgagaaggaggaattatagtagataaatatgaagcatggagatcctttaaaagtgtttttaataataaatgagaaaatgaaaaggagagggttgggaaggaaggagggaattcaaatgccagggaattgttcagtttcgcttttaaagatgttaacactcatttatacatctgcaagacactccccttaaagaaaagttctatgagtgtgggtctggttgcatgaataaggataaaattacttttttagacgatggtttcccacatataattcagagacccctgaaattaggtatccctcttgtagatgtccttgagatgctgctggacctgggaaagaggaaactgggatatgggtctatgccaaaaggtgcttctagttacaggacagagaggaaaggggcagagggagaaaaacctgaagtctgagaatctggattgcagaagactaccgagktcgtgggagaagggagagaaaacaaggatgaaaaccgaaaggggaagaggcatgaaatgttgccaaatgtcaaaaggcatttggagagaagttgggaattgcattaagaaaaccactgcaaatctcatttcagaccatttagagatatgccccctgggaactgcgagctcaggctgtttagcatcaaacaaat

SEQ ID NO: 65844 - DNA, 1523 bp, Homo sapiens
ttctcatcaattttcaatcattcgagaccaattttgcttataattatccagttcttttcgaccacctttctcctgaagccagccttatggctattcacttcactttagcataagccgccaagaaggtgaacaaaatgaggaaaagattggttaaagttggctgtttgaaattctgaaacatgtccaccattcccttcacccatgcccacccctcttagaagtagtactttcagattatttaagagtcgatgcttctatgtggattttaatttgtcatctgtcctttataatagctagtaggtttaatttgactctattttaagcatatattgacctatgctaattatctgttaaaataaattccactcttagagttaataaagtgtgtttgtcatggaagacccattgaagtaagaagctgaggagcccttatggtaaagtgggacaagaaataataagacataataattttcccatgcaaatcaacacccgtagcttcaaaaatatcctgacccacaacaagtattggacaggccctgtttctctcactccctaaaaaattggctcgggaggagtatgagagctcccatagctttcccaaggctcattattctccatcactccacaggaacagcctgtcagagaagagtgaaagaccatttgtcaacctctcttcaactccctgattctagccaaacttcatcaatcccaactgaggagccagagagaaatcaaaccccatatatgcagcatcattgtctactggagtcaaaaatcacaattccactacccaccccaacaccactggccctgtttctcccaattgctttttattgtgtttttaaaaaatcctctttccccatccctgcaacaccgagaaggaggaattatagtagataaatatgaagcatggagatcctttaaaagtgtttttaataataaatgagaaaatgaaaaggagagggttgggaaggaaggagggaattcaaatgccagggaattgttcagtttcgcttttaaagatgttaacactcatttatacatctgcaagacactccccttaaagaaaagttctatgagtgtgggtctggttgcatgaataaggataaaattacttttttagacgatggtttcccacatataattcagagacccctgaaattaggtatccctcttgtagatgtccttgagatgctgctggacctgggaaagaggaaactgggatatgggtctatgccaaaaggtgcttctagttacaggacagagaggaaaggggcagagggagaaaaacctgaagtctgagaatctggattgcagaagactaccgaggtcgtgggagaagggagagaaaacaaggatgaaaaccgaaaggggaagaggcatgaaatgttgycaaatgtcaaaaggcatttggagagaagttgggaattgcattaagaaaaccactgcaaatctcatttcagaccatttagagatatgccccctgggaactgcgagctcaggctgtttagcatcaaacaaat

SEQ ID NO: 65845 - DNA, 907 bp, Homo sapiens
tgcatatgaaataaaatttccatgtccatgtccatttttccaaggtacatagggcttctataatttcgtctatttcatcctgcagttattttcacgggtctctgtgtccaccactatctggaatctctgagatggtgaaaacgaaatcttattcttctttatatttcaaacaattcctagcacattatcaaaaatacctgataaaatttattgtgtctgtaatactggtaagcatgtaaaagggtggtaaatatataggctttaagtttagatagatctaaatattattaaaattaccaaattattgtttttaaaaagtattagtttcctaggacaaatasagatttttagataaggctggatttgtaatactttaagcaacaggtcacagtgcttaagtatttaatgccgatttggcaagcagctgatgttttatataatgctgtcgggtattttatatttgcgtgtattttctgatgcactggatccagcacttcatgtcacgtcatatatctgtttataatgtatacaaatgtattttcatatatatttgatgtttgatggctttgaaactttaatcttgaaatagattttaaatttttattaaaactatttaaataattactgtaaggaaagagctcttattagttgaaagaaaatgtagattcatgtttccttggagactagtctagtttccaaggatagacggcagtgaggagtttgggtatctagatggaaatttctgttgtttggattccagctctgctgcttaccagctttgtgaactcaagcaaaccaactaaccctcttccagccttaatttccccatctatataatggggatatttataagtttcaccttaatgggccatgggggggaccacatgaaataagtgtatgggaagtg

SEQ ID NO: 65846 - DNA, 705 bp, Homo sapiens
atagtttatgctgaagagtacaggggaccaagagaccacccaaatgggttcatgagcccatcatgccacttctttgttggatcactttgggcacctcactaaatttttctgagctaggtcctctgcaccttgcttgtctatcatcaaagggtcactgtgagactataataatataagaggaaagaaatcgtgattattaaggcatatactgaaccacatacctccattggcaacattaaacttcactccaaactctccccctggtcctccagggcagtggctggctgttagaatgattccaccagctgccttgatcttcctgataatgcaggagaccgcaggtgtyaacaagatgccattctgtccaataatcagtcgtccaatctaaaccatccaaaaaaaaaaaaatcaatccagttgcttgggattaaaggcatttcaacaggaaagtgccccaggctctgttaacatacagccaatcacttgataaaagaaacagagtaggctttagattaggggaggcagggtagggggagcactgacattgtctctcctatctaatgtctctaagaccatttggtgcacctgcatctagtagccaattattaacctgtaaataggatatgcctcactgatcttcagtcgtttgaaacatctgcttctgataatcgaggggttagcttgaatcacacaagaagttcttag

SEQ ID NO: 65847 - DNA, 705 bp, Homo sapiens
atagtttatgctgaagagtacaggggaccaagagaccacccaaatgggttcatgagcccatcatgccacttctttgttggatcactttgggcacctcactaaatttttctgagctaggtcctctgcaccttgcttgtctatcatcaaagggtcactgtgagactataataatataagaggaaagaaatcgtgattattaaggcatatactgaaccacatacctccattggcaacattaaacttcactccaaactctccccctggtcctccagggcagtggctggctgttagaatgattccaccagctgccttgatcttcctgataatgcaggagaccgcaggtgtcracaagatgccattctgtccaataatcagtcgtccaatctaaaccatccaaaaaaaaaaaaatcaatccagttgcttgggattaaaggcatttcaacaggaaagtgccccaggctctgttaacatacagccaatcacttgataaaagaaacagagtaggctttagattaggggaggcagggtagggggagcactgacattgtctctcctatctaatgtctctaagaccatttggtgcacctgcatctagtagccaattattaacctgtaaataggatatgcctcactgatcttcagtcgtttgaaacatctgcttctgataatcgaggggttagcttgaatcacacaagaagttcttag

SEQ ID NO: 65848 - DNA, 705 bp, Homo sapiens
atagtttatgctgaagagtacaggggaccaagagaccacccaaatgggttcatgagcccatcatgccacttctttgttggatcactttgggcacctcactaaatttttctgagctaggtcctctgcaccttgcttgtctatcatcaaagggtcactgtgagactataataatataagaggaaagaaatcgtgattattaaggcatatactgaaccacatacctccattggcaacattaaacttcactccaaactctccccctggtcctccagggcagtggctggctgttagaatgattccaccagctgccttgatcttcctgataatgcaggagaccgcaggtgtcaacaagatgccattctgtccaataatcagtcgtccaatctaaaccayccaaaaaaaaaaaaatcaatccagttgcttgggattaaaggcatttcaacaggaaagtgccccaggctctgttaacatacagccaatcacttgataaaagaaacagagtaggctttagattaggggaggcagggtagggggagcactgacattgtctctcctatctaatgtctctaagaccatttggtgcacctgcatctagtagccaattattaacctgtaaataggatatgcctcactgatcttcagtcgtttgaaacatctgcttctgataatcgaggggttagcttgaatcacacaagaagttcttag

SEQ ID NO: 65849 - DNA, 705 bp, Homo sapiens
atagtttatgctgaagagtacaggggaccaagagaccacccaaatgggttcatgagcccatcatgccacttctttgttggatcactttgggcacctcactaaatttttctgagctaggtcctctgcaccttgcttgtctatcatcaaagggtcactgtgagactataataatataagaggaaagaaatcgtgattattaaggcatatactgaaccacatacctccattggcaacattaaacttcactccaaactctccccctggtcctccagggcagtggctggctgttagaatgattccaccagctgccttgatcttcctgataatgcaggagaccgcaggtgtcaacaagatgccattctgtccaataatcagtcgtccaatctaaaccatscaaaaaaaaaaaaatcaatccagttgcttgggattaaaggcatttcaacaggaaagtgccccaggctctgttaacatacagccaatcacttgataaaagaaacagagtaggctttagattaggggaggcagggtagggggagcactgacattgtctctcctatctaatgtctctaagaccatttggtgcacctgcatctagtagccaattattaacctgtaaataggatatgcctcactgatcttcagtcgtttgaaacatctgcttctgataatcgaggggttagcttgaatcacacaagaagttcttag

SEQ ID NO: 65850 - DNA, 705 bp, Homo sapiens
atagtttatgctgaagagtacaggggaccaagagaccacccaaatgggttcatgagcccatcatgccacttctttgttggatcactttgggcacctcactaaatttttctgagctaggtcctctgcaccttgcttgtctatcatcaaagggtcactgtgagactataataatataagaggaaagaaatcgtgattattaaggcatatactgaaccacatacctccattggcaacattaaacttcactccaaactctccccctggtcctccagggcagtggctggctgttagaatgattccaccagctgccttgatcttcctgataatgcaggagaccgcaggtgtcaacaagatgccattctgtccaataatcagtcgtccaatctaaaccatccaaaaaaaaaaaaatcaatccagttgcttgggattaaaggcatttcaacaggaaagtgccccaggctctgttaacatacagccaatcacttgataaaagaaacagagtaggctttagattaggggaggcagggtagggggagcactgacattgtctctcctatctaatgtctctaagaccatttggtgcacctgcatctagtagccaattattaacctgtaaataggatatgcctcaytgatcttcagtcgtttgaaacatctgcttctgataatcgaggggttagcttgaatcacacaagaagttcttag

SEQ ID NO: 65851 - DNA, 861 bp, Homo sapiens
ttctttagtttttgtgtttgtcttactttgggcacatttactattttataaaacattgaaactctgttggagagagaaaaaccatctctatcagtcaaattttaattcaatttataaaaggtaaggtttcatatttagtgctaggaggaattctccctggcttaatacaagaaagttaattcctcgctaatgttctgtgttccatggggtctggtagagtattctgcttcacagtcactcaggaacccaagctgatggaggctctgccataatttagaacatgcagcatcttcagtcacttaatgaggaaaaaacctggaggatgtggcattgaataaataaaaagaaatttgtgttacttctgtctcatcccagaagtgacacatttcactcccttattacccagtaggcaagctgttatcrtggcctagtggtatactagagctagctcataatgactcatggagagtcaatgatacatttctcttcctagctctgtgttcagcaacatcatgttgggagctaggaatcagctatgatgggaatatttacaccacagaaattgaaaaatgccaaaaattagggttttttttgttagaggggaatttactagcaccccactgacctgacttttcctaactgaaaaggtactcagaaacatagaatggcaaagaaatagttggagaatattattgttttctatgccatagggtgcaaatctacctagaaattatgttattctaaaataccatgcacagagttaggtacctgagaaaggcgttgaacttggaataattgccatttaagttgctgtctacacctaggtaaatatcatttttttgaacctctgtttctttgtag

SEQ ID NO: 65852 - DNA, 958 bp, Homo sapiens
cttctttgtgcctccatttctttactatcaaatggtgaaaataatgcaattatattacttccatcatgcatgtagttgttggaaggatttctttacttagtgtacatgaaattgctaaataaggttaaaaaaaaaacacttcccactgtttgtaattrtctaggctataaattaaatgagtaatgttttaattttatgcctcttattatttcatatagcagaaccaacattttttggatacctatgataatacagattgcttttgttgtatttgttctcacacccagtacctcctaatattgctggaactgatgagccccgggatatcactgtgttacggaacagacaagtgacattggaatgcaagtcagatgcagtgcccccacctgtaattacttggctcagaaatggagaacggttacaggtaaattttttgataagctccacaaattcctttttgagatgaaaaaagtaaaaaaatcagctctagggcctttgctgggtacacaaaaccaactaacatcaggctactaattattcaacattgcagcagtaagcacagggtttttaaattagctttattatttgctttattatttgcctttgctggggtagttaatagttggtcatgggtcaaagaaaggtatctagattcatgatgctctggaaatttgccaaagtttgtatttcctagcgcccatgcattaaagtttgatttgaaatactcagctatttcttaaaagagaagaaaccatcaaagtctcaaaataacttccacgtctctagggagaatgcttcttttactgaatttcccttgtctaagcttggaccttacaagtgaccccaaagataccaggcatctgagactggaatccgtgaagaaccagttactggctgtataaagcttgccatgcttagatgatacctacctgctgtcatacagcgtcaaaggccagga

SEQ ID NO: 65853 - DNA, 1480 bp, Homo sapiens
actaattcagaatcaaatagagtttttgagcatttgactatttttagaatcataaaattagttactaagtattttgatcaaagcttataaaataacttacggagatttttgtaagtattgatacattataataggacttgcctattttcatttttaagaagaaaaacaccactcattttataaaatatagtacagctactataaggcttgtttgatcccaaatggtgcttatcttgattgcacattcagaacaaggatattattttcagtgattttgtgagatcagctgaaccacttatgataataataataaaaaagaytgctttgccctcacgtcagttgtacatggcatggaactttaaaaattttaatataaactttcatccagttagcttcataacttttacgttccagaattttgtttattttcctgtcaatgaaagcaatttttaaagataccagtgggacaggtttggttttttaaaaatctcatgtgttcaaattaacataaatattacacgtcaatacactgtacatggtggtaatagactctaagcaattgccaagatgtattctatttttatgaagtgtatatatattaccttagtgtgcattttctatataatatcttgatggactcttttataaaattattttataaaaaacaatgttacactaaaatcagcctaaataaattttcacaactttttttcataaccttttgaagaacctaaaattcgtttccttgcagctaaaacagggattaaatttaaagtcgtacacgtaaacagacacacaatcatgagaccccttgagagagaggtagtattactcacattgtataggtcaggatcctaggacagaggtaacttatgtaacttccttaagacaggacagctagtgagtggcagaaatgtcataccttccctgtcatgactcccactgcatgagttttttcatctacctaaacagcattttttatatcttatctcaagtgaattcatcttgtgtgatattaaactagtgaaggcctaattgtgacctatgattgaaggatttttaacctagaaacacgttattcaaagaaacctggaaaaaaatatccactccatagtccagctgtcaggcaagtgattgactaaatcagtgtttaccaaagactgttctacagaatactagtctagtacaggtgtttttagtcacaagcattctatgatcaaacaagtttgaaaaatactacataacatatcctcctattaaagattatctatcgacactaacaaagaaacttttagaagttccgcagtgaacaggatgaatttattcaagccaacattttctgaaagatttaatcccaaatcttttttccctaatacattatctcactgaacacttggggaaatgctgatgtaatacagtcaagacgtctgcttcatgcctaaatccttagaaaggacatttttataactaagtactttgg

SEQ ID NO: 65854 - DNA, 1685 bp, Homo sapiens
atatgaaacaattgatgtaaagtactgagtgctatatgtagcacataataaatgctcaacaaatgttatatataaaactactaatcacacatatatcactaaagagctgaatcacttgggattttggcattttcaatatgggacattcctagatgacttgaatactgaggtctttattatatcttggaggattcatcttcatctgggagatctggtcaattcttgcagctggcagtgaaaacaagagagtactaggagagttagagaaaggtgtccagctgggctccatctctgcagccctgcagagctttgacgtggttgtctaatcaccaccaccaggtgtgaaatggtggagtgggaagcctaggagaccagcaggtggggccatcccaagaaagtgtggggaggtccccagatagccatggagtgcagcccctctagtgttgagtgagtttctgctctcccagcagggggcagcaagtgacgaggacagccatttaactcaggggaatcacagtcacttgggaagagaaaccctaggtaaacagcaaatttcttattaatttgtgatgtagtgattcagagtgatttcaatattaaagtaaatgtgactgtattttgcagtcacatgctggcagggccagagcctgtgggtaataataaacatattattgtcaatcaatgttaacaaaagacttgggcaaatcacagcagaatgaatgcagattgcaaaataaacacatgaaagtatttcagcctcaccagtacaaaaaatgtaaatttaaacaaggtagcatttttaatctgccaaactatcaaaacatttttaaaaataataacttctgactagtttcgaaaaaattttatgctttggatcctgtttgtacatcatcttatttagtcctaatagtagtaaggaccaatctcattttatgactgaagaaacaatctccaagaacttgaatgatataaagatgtcaatttgaggccgggcacggtggctcacgcctgtaatcccagcactttgggaggccgaggcggatccgcctgaggttgggagtttgagaccagcctggccagcatggtgaaaccccgtctctactaaagaaaaaaaaaaaaaaagaaattagccgggcgtggtggcgggcgcctgtaatcccagctactcgggaagctgaggcgggagaatcgcttgaacctgggaggaggaggttgcagtgagctgagatctcgccattgcactccagcctgggcaacagggcgagactccgtctcaaaaaaaagatgtcaatttgaatatacatgttaacctcttctttatcctgagaagctactgaaatgataaataattatttgttgttgaaggctgtcttgtgtatcgcaggacgcttagcagcatcactgggctttacccactagayaccagtagcaaccccaactcagttgtggtaaccgaaaattatctgcagtatgccagatgttccctgggggacaaattcaccatgagttgagaatcactgggatatgggctatctgagagtgagaaatttcaacagaattcttgcaaactggtgtttgaaagagtaggctggaagaaaccacagcttgatgtgcccacagagccaccgtagggtgcagacaggatgacagctggctggcccgcagcacctcaaggctcagaaact

SEQ ID NO: 65855 - DNA, 1185 bp, Homo sapiens
atctcagctacttgggaggctgaggcaggagaatctcttgaacctggaggtggaggttgcggtgagccgagatcacgccattgcactccagcctggccaacaagagtgaaactctgtctcaaaaaaaaaaaaaaaaaaaaaaaaaaaaaaagcatattctctcacagttgcttcaggccagaagtccaaaataaaaatgtgagcagggctgtgctttctctgacagctccagcatagaattattcctttcttccttcctccgtcttctggtggctccgagagctccttggcttacggcagaataactagaatctctgtttcagtctttacatggccttcttatctgtctctcttctgtttgtctctcataaggacatgtgccgttaaacacagggcccaccctgccagaatggccttatcttgtgacctttaactaaattacatctgcaaagatcattttgctaaataaggtcacattcacagattcaagtggttaggctgtggatacatcttttttgagaaacacaaatcaaaccactacagctcagaaaatggataataaactgagttggaaaaatgaacttttctagtgaagttttactaaattggtggaattagggtaagtagaaaataatttttaaaaatctggttatatttcagtatatataataattttaacaaagctaacaatctactaagtgaattataatagtgaaatgagaacggtgtcctacaaatttgaaagcartctcttttttttcttttttttttttccttagggatactttttagcaaatattttttcttttttgagacaagatctcaatctgtcacccaggctggaatgccgtggcgtgatcctggcttactgcagccttgacctcctgggtttaagagatcttcctgcttcagtctcccaagtagctgaaactacaggttcatgccattacacccgactaatttttgtatattttgtacagttggggttttgccaagttggccaggctgatctcgaactcctgagctcaggcagtctgcctgccttggcctcccaaagtgttatgattacaggtatgggccactgtgtctggccgcaaaaactttcatcacaggtaaaatcaattagagttgaaaccttttgaataaaataatcacaaataagtttagttttaattataaaatata

SEQ ID NO: 65856 - DNA, 1185 bp, Homo sapiens
atctcagctacttgggaggctgaggcaggagaatctcttgaacctggaggtggaggttgcggtgagccgagatcacgccattgcactccagcctggccaacaagagtgaaactctgtctcaaaaaaaaaaaaaaaaaaaaaaaaaaaaaaagcatattctctcacagttgcttcaggccagaagtccaaaataaaaatgtgagcagggctgtgctttctctgacagctccagcatagaattattcctttcttccttcctccgtcttctggtggctccgagagctccttggcttacggcagaataactagaatctctgtttcagtctttacatggccttcttatctgtctctcttctgtttgtctctcataaggacatgtgccgttaaacacagggcccaccctgccagaatggccttatcttgtgacctttaactaaattacatctgcaaagatcattttgctaaataaggtcacattcacagattcaagtggttaggctgtggatacatcttttttgagaaacacaaatcaaaccactacagctcagaaaatggataataaactgagttggaaaaatgaacttttctagtgaagttttactaaattggtggaattagggtaagtagaaaataatttttaaaaatctggttatatttcagtatatataataattttaacaaagctaacaatctactaagtgaattataatagtgaaatgagaacggtgtcctacaaatttgaaagcaatctcttttttttcttttttttttttccttagggatactttttagcaaatattttttcttttttgagacaagatctcaatctgtcacccaggctggaatgccgtggcgtgatcctggcttactgcagccttgacctcctgggtttaagagatcttcctgcttcagtctcccaagtagctgaaactacaggttcatgccattacacccgactaatttttgtatrttttgtacagttggggttttgccaagttggccaggctgatctcgaactcctgagctcaggcagtctgcctgccttggcctcccaaagtgttatgattacaggtatgggccactgtgtctggccgcaaaaactttcatcacaggtaaaatcaattagagttgaaaccttttgaataaaataatcacaaataagtttagttttaattataaaatata

SEQ ID NO: 65857 - DNA, 888 bp, Homo sapiens
taccacatccagctaatttttgcatttttagtagagatggggtttcacactgttggccaggctggtcttgaacttctgacctcaagtgatccaactgcctcggccacccaaagtgctgggattacaggcgtgagccaccatgcccagcccagaaactgttttttaattcaccagctatttaactttaaattcactctgcccttaaagggaactgaatctgttctagaacctcctcttctgtcctcctggaggtgtactattataataaagaaccctgccacaccaagtactcaccaaatttgctgggtgtttctctttgccaacgtggatatatcggtagatggaatagcccatcacagaaaaaagaaacacggtaatagataygggcaaaacataccagaagatgattttagccttgaactctgatgattgatctgtaaaaaaaaaaaaaaaggtgggaattcgggggaagggattagatagttgtgatttgatgtgatgggaaaaacctcgtatcgttaagctgcttctgtgcagatcacttacatttgggaactcagttttctcacctctacgttgagaagcttaagctaaatgttataagcggtctcagaattcttactctccctgacaagagacggtctgaaggaatcatctgagtgtacctcaaatgtttacactaaggatacatcaatcatccaagtcagcacatattccaccatcgtatgtctggctatgagattcatgcaggttcttatatttcaaagtaagtgtatttgatattcaagtaagtcacagaatttcaaacaaacaacaaaaccctccagtgaagatcccattgaattgctccacttttccacgccacctgtttgactcaatctttctgca

SEQ ID NO: 65858 - DNA, 888 bp, Homo sapiens
taccacatccagctaatttttgcatttttagtagagatggggtttcacactgttggccaggctggtcttgaacttctgacctcaagtgatccaactgcctcggccacccaaagtgctgggattacaggcgtgagccaccatgcccagcccagaaactgttttttaattcaccagctatttaactttaaattcactctgcccttaaagggaactgaatctgttctagaacctcctcttctgtcctcctggaggtgtactattataataaagaaccctgccacaccaagtactcaccaaatttgctgggtgtttctctttgccaacgtggatatatcggtagatggaatagcccatcacagaaaaaagaaacacggtaatagatacgggcaaaacataccagaagatgattttagccttgaactctgatgattgatctgtaaaaaaaaaaaaaaaggtgggaattcgggggaagggattagatagttgtgatttgatgtgatgggaaaaacctcgtatcgttaagctgcttctgtgcagatcacttacatttgggaactcagttttctcacctctacgttgagaagcttaagctaaatgttataagcggtctcagaattcttactctccctgacaagagacggtctgaaggaatcatctgagtgtacctcaaatgtttacactaagratacatcaatcatccaagtcagcacatattccaccatcgtatgtctggctatgagattcatgcaggttcttatatttcaaagtaagtgtatttgatattcaagtaagtcacagaatttcaaacaaacaacaaaaccctccagtgaagatcccattgaattgctccacttttccacgccacctgtttgactcaatctttctgca

SEQ ID NO: 65859 - DNA, 888 bp, Homo sapiens
taccacatccagctaatttttgcatttttagtagagatggggtttcacactgttggccaggctggtcttgaacttctgacctcaagtgatccaactgcctcggccacccaaagtgctgggattacaggcgtgagccaccatgcccagcccagaaactgttttttaattcaccagctatttaactttaaattcactctgcccttaaagggaactgaatctgttctagaacctcctcttctgtcctcctggaggtgtactattataataaagaaccctgccacaccaagtactcaccaaatttgctgggtgtttctctttgccaacgtggatatatcggtagatggaatagcccatcacagaaaaaagaaacacggtaatagatacgggcaaaacataccagaagatgattttagccttgaactctgatgattgatctgtaaaaaaaaaaaaaaaggtgggaattcgggggaagggattagatagttgtgatttgatgtgatgggaaaaacctcgtatcgttaagctgcttctgtgcagatcacttacatttgggaactcagttttctcacctctacgttgagaagcttaagctaaatgttataagcggtctcagaattcttactctccctgacaagagacggtctgaaggaatcatctgagtgtacctcaaatgtttacactaaggatacatcaatcatccaagtcagcacatattccaccatcgtatgtctggctatgagattcatgcaggttcttatatttcaaagtaartgtatttgatattcaagtaagtcacagaatttcaaacaaacaacaaaaccctccagtgaagatcccattgaattgctccacttttccacgccacctgtttgactcaatctttctgca

SEQ ID NO: 65860 - DNA, 688 bp, Homo sapiens
cccagggggayggccactgtttatagaaggcctggcagaaaacttggggctacctgcagagatggtgtgtgcagtggatgacaatttcatgcctttgggcaaattgttattaaaaccagttgagaatttcgagactgtaatggacaggccctgaattatgaaggaagtcaagataaaaagagacggtctttcggtagtgaggatcacacctgtcatacattagaattgtttaatggtgttgaaacacctagtctcaaagcaatggaaggaactagatttgctctaaggagtctgttccttggttttgaagacattttacaaaaagtgggaaatttagggacaattaaagaccttgaaatggatacggatactgataaaggttgagtatcccttatatgaaatgtttgaaatgagaattgattcagaatttttattatttttctggatttgtgaatatttgcattatatttactggttgtgtattccaaatctggaaatccaagatcccaaatccaaaatgttccaatgagcatttctgttgagtgttatgttggtactcaaaaactattaaattttggagcatttcgggtttcaaatttttggatttgatgtactcaatctgtaatatctgaaggtttcaaatacatccttaaaatatgttgccattgctaaaaacaatttacaacct

SEQ ID NO: 65861 - DNA, 688 bp, Homo sapiens
cccagggggacggccactgtttatagaaggcctggcagaaaacttggggctacctgcagagatggtgtgtgcagtggatgacaatttcatgcctttgggcaaattgttattaaaaccagttgagaatttcgagactgtaatggacaggccctgaattatgaagraagtcaagataaaaagagacggtctttcggtagtgaggatcacacctgtcatacattagaattgtttaatggtgttgaaacacctagtctcaaagcaatggaaggaactagatttgctctaaggagtctgttccttggttttgaagacattttacaaaaagtgggaaatttagggacaattaaagaccttgaaatggatacggatactgataaaggttgagtatcccttatatgaaatgtttgaaatgagaattgattcagaatttttattatttttctggatttgtgaatatttgcattatatttactggttgtgtattccaaatctggaaatccaagatcccaaatccaaaatgttccaatgagcatttctgttgagtgttatgttggtactcaaaaactattaaattttggagcatttcgggtttcaaatttttggatttgatgtactcaatctgtaatatctgaaggtttcaaatacatccttaaaatatgttgccattgctaaaaacaatttacaacct

SEQ ID NO: 65862 - DNA, 578 bp, Homo sapiens
aaggacttttctcagaatatctttactgcttgtttttgaattagaccaccttggttaggatttccagccccaatgagtccttgaaagccaaatggctaacctgaactagtgcctgcctagtctgctgagttgggtgggggacatcccataattcgatttactctttgtaaaatgaggatmtggcctaaatgggtgtcatggtgacttcttgccctcttcctgcaaataaattattcttcagttatatggctgggtaaatagtaatgccacagaaaaatacaatcttttttaaatgctcatttttctaaattttctaaattgtgaaatctttaatttttgtgggtacatagtaggggcatatatttataagacacataaaatgttttgatgcaagcaggcaatgtgaaataatcatataatggagaatggggtatccaacccacaagcatttatcttttgtgttacaaacaaacccattgtaatcttttagttattttaaaagataaaatttatcattgactatagtcaccccattgtgctatcaaatagtaggtcttatcatgctttctactttttgg

SEQ ID NO: 65863 - DNA, 578 bp, Homo sapiens
aaggacttttctcagaatatctttactgcttgtttttgaattagaccaccttggttaggatttccagccccaatgagtccttgaaagccaaatggctaacctgaactagtgcctgcctagtctgctgagttgggtgggggacatcccataattcgatttactctttgtaaaatgaggatatggcctaaatgggtgtcatggtgacttcttgccctcttcctgcaaataaattattcttcagttatatggctgggtaaatagtaatgccacagaaaaatacaatcttttttaaatgctcatttttctaaattttctaaattgtgaaatctttaatttttgtgggtacatagtaggggcatatatttataagayacataaaatgttttgatgcaagcaggcaatgtgaaataatcatataatggagaatggggtatccaacccacaagcatttatcttttgtgttacaaacaaacccattgtaatcttttagttattttaaaagataaaatttatcattgactatagtcaccccattgtgctatcaaatagtaggtcttatcatgctttctactttttgg

SEQ ID NO: 65864 - DNA, 765 bp, Homo sapiens
agtttcagctttctacatatggctagccagttttcccagcaccatttattaaatagggaatcgtttccccatttcatgtttttgtcaggtttgctgaagatcagatggttgtagatgtgtggtgttaggtctgagacctctgttccattccattggtctatatatctattttggtaccagtaccatgctgttttggttatttaaccagtgtaaacatttacatgcatttgaaaaggacagagaaagaaattctgaaagaggaagagaagtcacttacttttggcagggagaattaagcctcttatttttaatttgcattatccttgaattcttcagtttctatccacaaatgcttcaaagattttagggcctactttcatgtagggttagtattttactgycacaagagagtgcctttgaggtctgggaagttaggagcacctacctccccacactcttattgtctgcaactatctggatatatttcttatgacaaacagagcctgcttacctctcccatatatatttattgtcagtaaaaatataacttaaatccctttccataactgtctaattgacctcccaatttctatattcactccatctacaacccctgtcccaccacatgctcatgctacatgtatgggagggaaaaaatttccctctatctatgttaggtttaaagaaaaccaaaatatttcaccccaaaatatggccacctggtataactagtattttgaattaaaggcctttaaagatcaacag

SEQ ID NO: 65865 - DNA, 2362 bp, Homo sapiens
gaatggaaacattctttccatttctaataaaagctgggatcttcttatcccacaagcaagttcaaataacaatggcaattatcgatgcattggatatggagaygagaatgatgtatttagatcaaatttcaaaataattaaaattcaaggtgaatctttcagttcatatagatttgcttagtaatgacagggataggaaactgagcatgtaaggaaagaatttacgggttactattgaaactctggatagatgagaggcacaaatcctctaagaggcagagaaagtggggtgattggacctgaataatcctgtagaagaaaactgtgatagagggcttgataagtttgtcttgctgtgtgtctgaagtttcctgggactgagcatccaaacctgtctctcacagagtcctaaatactctcgtgctcagaacttgacttacctcttctctctagaactatttccacatccagagctgaaagctacagactctcagcctacagaggggaattctgtaaacctgagctgtgaaacacagcttcctccagagcggtcagacaccccacttcacttcaacttcttcagagatggcgaggtcatcctgtcagactggagcacgtacccggaactccagctcccaaccgtctggagagaaaactcaggatcctattggtgtggtgctgaaacagtgaggggtaacatccacaagcacagtccctcgctacagatccatgtgcagcgtgagtgttggagagccaggcatcttccctgcctctctctgccccttgggctctgtaggcatggggactatgtagcagagatgggttttatcatcctgacagaggcaccaggcttaggccaagaagtgcagtactataataaaagaaatacatgacttcttttctacctccattttcctaaaaactcagtcttcctttgaaattctatcacttcagaatcacagctgactcatggagttaggtttgagagctatggaaaacaaaacaaaacaagaaaatgaggtgccctgctagggatttggcagattctagaatggctagatcttaaggataactatttagaagacaagcatccaccttttcctggtcagtagcaatgaacagtgtgagtgcctatgatgtgtacagcagaaaagaaggagagatagatagatagataggcccaataaatatcacttaggtacaaaattatgacttttgaaaacagatgtggtccagcctagtgccatgatggctgctattgctattacctgcccctcaaaacaactcagacctccagccaggatgtcagacaaaacccaaatgcttcttcagggttagtccttttttctttcctggggcctcgtatatcaggatggaaagcttatcacatttagtgatattctcagcgctaaatctgtggtctattggccacaatgctagtgcctgctgaagagtatatcttgaagtcacataaaaagtaaccctgcccaacaccccagctacctagccctgccctccttcacacccgacccccacctgtggtctcattttcacatagggatccctgtgtctggggtgctcctggagacccagccctcagggggccaggctgttgaaggggagatgctggtccttgtctgctccgtggctgaaggcacaggggataccacattctcctggcaccgagaggacatgcaggagagtctggggaggaaaactcagcgttccctgagagcagagctggagctccctgccatcagacagagccatgcagggggatactactgtacagcagacaacagctacggccctgtccagagcatggtgctgaatgtcactgtgagaggtgagttttaatctctattgaccttatttattctcagcaaacttcctcaaattaagggtggggatagctaacattaccctgtgactctgctgtttctgtttccattttgccatgctccactgtgataaacaatttcttccattagaatagtaataactcactcaggtcagagtaaggtcctgtagtgaggtaatggtggctgggagccattttgctttttggaggtgattttgtttgtctgtgtttgggtccattgtgtgtttatctccaagaggagccttacttcattagcagtgtttctgggtggggcacagctctgtcaccctaccgtgtcatcctacagtatcaactacacctctcctttcagtaaatcattcacacacaccacacacatcagacctgcagcctcaagtccacagaaccaaaagcacaaggcattcctttacttcattactataatagaatcctgagggattctcagcagccaaattgtatgtgggtcaggaaactcacaag

SEQ ID NO: 65866 - DNA, 2350 bp, Homo sapiens
agctatacttaacctggtactacatgctctatgtctggccaaccaaatgctatactcaaatgtttaagcaagttcacattggggacagtggggaaagaaggaagtatatctaaaggagaacagaggaatgagaaaaggttttaattttagatctttgatttttttttcttctggatttggcctgctttggtaaactgtttatagatattcaaataaattaggactaaattatggctcagtttattctcttgaaacaaaatggcagccaatgcaactgctcaaatgacatatcttctgaagtctaaaaaacttcagttagttcattcaataaatacttactaactacctatgatgtgccaagcactacaccgggtgttggttgtgcagcatcaaataaggtagataaggacactgatctcaaggttttaggaggaagaaatagaaaaacccaagtaagtgccttaggtaagcaagataattctttgagaaggaaattatatgggtggagggtgttgggtgggaagagatttctttctggctgggggattagagagggcctcgttgaggaggtgtcaataaggtgggtggtgaatccagccatgtaactacctgggcaaagagtgtccaggcagaggggacaacaattgcaaagatattgagttgggaatagatttgatgtgtcgaaggcctgcctggtaagagggctgatgtggctggagtaatgtgaatgaggccagagtgagagaagatgtgttgaaaggcaggcaggcaggggccagatcaagttttaggctaagcaaacattttggatttcattctgagtgatgggaatcctttggaggcttaaagcagggagtgactggtctaatttctgctttaaaaagatcactcactgctgtatagagaataggctataacaagcaagactggaagcaggaaaatgcactgggaaaatgttcaaagagtcccagggaccagataacggcttggaatggaagtggccagatttgggaggtactgtggaggaatagcagattgtcctggttgagagagtgtggcaaattctaagtacaaaatagaccattaaccctaccatctttaagcaaagtagactagaatccttgatatttatgtctgctcatgtcttaccacactggttgatcyacctgtttcagaattatgtatataggaagtacaagataagtggtgaccccttaattggatgggtggctgaggaggtaacactccagacagtctaagaagatgaagtataatcctctgactgcagccccatgagcttaggtagataagggccaagcatgagtaagaatagagattaccccactacctcctcattcctgtgtgtagatgtgagtagcaattacttgtgtgtgtctgtgggactctcagcctgcttgaattgggtgatgaaacctgtggcatgggtcaggaaacattcacgtttcccatgccatctccccaggcttggtgtgtgcatttgccaggagtgggcttggagaataaccttccaaggactctggcctgcaggtggcttagcctgtggataactgataatgtcttccgatgcatacagtacaggagctgccacaggaagactcacagcgatttccagcccgatgctgaggttgttactgtggtccatattttgtgaattattcaacatatgatttttattcagtgacttaaaagaaaatatgaacacactaacgtctcatttatccagtattctttgagaacacaacattccatgtaaatgcatttttcacgtatacctttaaatgtcaaggcaaattttatgtcatgaaacattttgagcacttgggagagaaggctttctatagcaagcaataccctgaagcagaggatctgtatggtttaaactttccttgaagcctcctgttcatcattatgattgtcaattaccactttatgctataatgcagtgacacagggactctgagctctgtgaatcagactattgtgcaaattcctcattccctcattttctctttggagaactaggcccccattagactgttttacaacattaacacttagtaatggcacccaggggcaaagtacaagcaagccggggtcacctaccacagcactgtttcttgttagaaaattggtgcttttaagaagatggttcttccacgagagaggttttgcctagttgttgtccagttagttatctggcctgcatttacgggaagcagaagtctcagcgtctccagaagctgtatctctctttttctgctcatctgagtcatgtgcactgaatgtgactcccccacacatctgtattacttatcaatacaaaaactta

SEQ ID NO: 65867 - DNA, 720 bp, Homo sapiens
tggcaatcagagggctgtttctagtgtgctgtgatggacgtgcttatcttccgctgcagttcatcctgcaacagtaaaaytgcaggcagcacacagacaagtttctgccgacaggccagataccagaagtgtaggtgggaaggttcagggctgccttttgaaccaaaacagaagagagatgaaccaagaaagtgtctgcagtttgcctgctgttttctccttcctttggggaaatacataattattttgtatctacttatacacatatgcaggtaatttttcttttttaaagagaaaggtcaaagattgtctgtgtcacatcacactgaaactgcttcggccccttcctctgtatttctgtggtaattggttctgtgagctacaaatacaacagacgtggactgaataggatgagaccacctgtgccaggtccaggcatgcttttcccaaatatggaaaaaaacagggctgtcttgggctggtggctttgacttgaagagaaatccatggtctaaagactctcttttgttccttgtttttcacttagacccaagggacaaggactccacctgtccggcagcagaggctgttgcctaagcctgtgtcatgtaaactgtccatgaacctttactgccattactgacatagtctttggtgcatctcgttgtaagtaagaccctgttattgggctgggcttgagatgcgtaacatccatggcac

SEQ ID NO: 65868 - DNA, 720 bp, Homo sapiens
tggcaatcagagggctgtttctagtgtgctgtgatggacgtgcttatcttccgctgcagttcatcctgcaacagtaaaactgcaggcagcacacagacaagtttctgccgacaggccagataccagaagtgtaggtgggaaggttcagggctgccttttgaaccaaaacagaagagagatgaaccaagaaagtgtctgcagtttgcctgctgttttytccttcctttggggaaatacataattattttgtatctacttatacacatatgcaggtaatttttcttttttaaagagaaaggtcaaagattgtctgtgtcacatcacactgaaactgcttcggccccttcctctgtatttctgtggtaattggttctgtgagctacaaatacaacagacgtggactgaataggatgagaccacctgtgccaggtccaggcatgcttttcccaaatatggaaaaaaacagggctgtcttgggctggtggctttgacttgaagagaaatccatggtctaaagactctcttttgttccttgtttttcacttagacccaagggacaaggactccacctgtccggcagcagaggctgttgcctaagcctgtgtcatgtaaactgtccatgaacctttactgccattactgacatagtctttggtgcatctcgttgtaagtaagaccctgttattgggctgggcttgagatgcgtaacatccatggcac

SEQ ID NO: 65869 - DNA, 720 bp, Homo sapiens
tggcaatcagagggctgtttctagtgtgctgtgatggacgtgcttatcttccgctgcagttcatcctgcaacagtaaaactgcaggcagcacacagacaagtttctgccgacaggccagataccagaagtgtaggtgggaaggttcagggctgccttttgaaccaaaacagaagagagatgaaccaagaaagtgtctgcagtttgcctgctgttttctccttcctttggggaaatacataattattttgtatctacttatacacatatgcaggtaatttttcttttttaaagagaaaggtcaaagattgtctgtgtcacatcacactgaaactgcttcggccccttcctctgtatttctgtggtaattggttctgtgagctacaaatacaacagacgtggactgaataggatgagaccayctgtgccaggtccaggcatgcttttcccaaatatggaaaaaaacagggctgtcttgggctggtggctttgacttgaagagaaatccatggtctaaagactctcttttgttccttgtttttcacttagacccaagggacaaggactccacctgtccggcagcagaggctgttgcctaagcctgtgtcatgtaaactgtccatgaacctttactgccattactgacatagtctttggtgcatctcgttgtaagtaagaccctgttattgggctgggcttgagatgcgtaacatccatggcac

SEQ ID NO: 65870 - DNA, 720 bp, Homo sapiens
tggcaatcagagggctgtttctagtgtgctgtgatggacgtgcttatcttccgctgcagttcatcctgcaacagtaaaactgcaggcagcacacagacaagtttctgccgacaggccagataccagaagtgtaggtgggaaggttcagggctgccttttgaaccaaaacagaagagagatgaaccaagaaagtgtctgcagtttgcctgctgttttctccttcctttggggaaatacataattattttgtatctacttatacacatatgcaggtaatttttcttttttaaagagaaaggtcaaagattgtctgtgtcacatcacactgaaactgcttcggccccttcctctgtatttctgtggtaattggttctgtgagctacaaatacaacagacgtggactgaataggatgagaccacctgtgccaggtccaggcatgcttttcccaaatatggaaaaaaacagggctgtcttgggctggtggctttgacttgaagmgaaatccatggtctaaagactctcttttgttccttgtttttcacttagacccaagggacaaggactccacctgtccggcagcagaggctgttgcctaagcctgtgtcatgtaaactgtccatgaacctttactgccattactgacatagtctttggtgcatctcgttgtaagtaagaccctgttattgggctgggcttgagatgcgtaacatccatggcac

SEQ ID NO: 65871 - DNA, 720 bp, Homo sapiens
tggcaatcagagggctgtttctagtgtgctgtgatggacgtgcttatcttccgctgcagttcatcctgcaacagtaaaactgcaggcagcacacagacaagtttctgccgacaggccagataccagaagtgtaggtgggaaggttcagggctgccttttgaaccaaaacagaagagagatgaaccaagaaagtgtctgcagtttgcctgctgttttctccttcctttggggaaatacataattattttgtatctacttatacacatatgcaggtaatttttcttttttaaagagaaaggtcaaagattgtctgtgtcacatcacactgaaactgcttcggccccttcctctgtatttctgtggtaattggttctgtgagctacaaatacaacagacgtggactgaataggatgagaccacctgtgccaggtccaggcatgcttttcccaaatatggaaaaaaacagggctgtcttgggctggtggctttgacttgaagagaaatccatgrtctaaagactctcttttgttccttgtttttcacttagacccaagggacaaggactccacctgtccggcagcagaggctgttgcctaagcctgtgtcatgtaaactgtccatgaacctttactgccattactgacatagtctttggtgcatctcgttgtaagtaagaccctgttattgggctgggcttgagatgcgtaacatccatggcac

SEQ ID NO: 65872 - DNA, 768 bp, Homo sapiens
atctgcagttgacagaaatgaggaaactgctcaatttcaggtgtttacctcaaaataccccatcttagccaagtgcatggccgctcccttctgcgaatgcaagcctccactgtcatgccttgtgttttttcctctctcctggtgttggcttaatgctcacgtccaaaaagcaggctttcagcaaattgcattctgattgactgacctggttttctgctggggagcagaacactaaagccaaatgaatttgaccaaaacttgctttgctgaataccttcagtttcttcggagcagcctcagacatgttttataagagggaatgaagactattatttaagaagaatggtacaagctagaatcacagaaaagagggttttagagttggatgaaatctcaggttatttgtcctaagctattagctattcacctcctggtcttctttggagagcgcctattgagaccagctttcttttctttttttttttctttttgagacagagtctckctctgtcactcaggctggagtgcagtggtgtgatctcggctcactgcaacctccgcctcctgggttcaagcgattctcctgcctcagcctccgaagtagctgggattataggtgcgtgccaccacgcctggccaagaccaagtttctaaatttgtaaaaccatgtacctttgaacaattagatcttgtcttttgactttctgttcaccttgccatttgtttttagctcgaatctcatacccgtttaatccatctaacttagga

SEQ ID NO: 65873 - DNA, 534 bp, Homo sapiens
tgagcacaaacgcaatgtcgggcacactggtaaaggtccactagaatccagcagcctggacccctttctttgtggtcaagaaaggtgggaaaacaggtgcaggactgctacatccaccaactttctggtattwttttttttcacaatagccatagaaaactaaaatgggggggattacaatcatttctttgaatatcttgatctcctgacctcgtgatccacccacctcggcctcccgaagtgctgcgattacaggcacttctctgaatatctcatagaattattcacttattcactcatttatttattcaaaaacaaaggtttttttaacctcaccgtttagtagctaaaggaaggaaaataaattattgtgttaaaacattatagagggtgtactgaaggaataaattgtgggcttgggccattcagagacagagaagataaataagtaaagaggtctttaaggacgaagaggagtttaccagttggtaaatactagaaaaaggaaaaagcactggcagattcatggagatc

SEQ ID NO: 65874 - DNA, 534 bp, Homo sapiens
tgagcacaaacgcaatgtcgggcacactggtaaaggtccactagaatccagcagcctggacccctttctttgtggtcaagaaaggtgggaaaacaggtgcaggactgctacatccaccaactttctggtattattttttttcacaatagccatagaaaactaaaatgggggggattacaatcatttctttgaatatcttgatctcctgacctcgtgatccacccacctcggcctcccgaagtgctgcgattacaggcacttctctgaatatctcatagaattattcacttattcactcatttatttattcaaaaacaaaggtttttttaacctcaccgtttagtagctaaaggaaggaaaataaattattgtgttaaaacattatagagggtgtactgaaggaataaatygtgggcttgggccattcagagacagagaagataaataagtaaagaggtctttaaggacgaagaggagtttaccagttggtaaatactagaaaaaggaaaaagcactggcagattcatggagatc

SEQ ID NO: 65875 - DNA, 821 bp, Homo sapiens
atggaggacattcagggctaaaacaggggaagtcccagggaaacgggacaagttggtcacctgggagggaccccacagccatttaaccctacatgatgcttgagctccctccgctgtgtccccgcccagcagctgcgcagccctgcttgaataccatcagtgatggtgagttcattatctgacagggcagcaagagccaaccaagagggggacacagccaggactaggcactgaccacagtgaggtcggagttggcagagtggagtgtrgggcaagggaaaatggagcagggcccctgagctgcctttaggggcagccacagcttcccacggaaagaggaggacagagaattcctaggccaagggaacagcacaggcaaatgcctataccatagagattgagttctttctctccgatggccagtgcaggggtgaagcgtggaggctgtgacttcacagccttcttccccaccccacccacagatagggcttcctttggaaacatggaggcctcgtcctcctgccttcactccccaggtccctgagccagaaaaggcctcagtgcagatggaagagctgccaggatgccccagcacgctgctccacccgcctctcattttcctgaggctcattagtcctcagcaccagcatctgccccctcctccaggaagcctcctctgacttccccagccctgaggcctcccctgccataagcatcatccttcttctcaggcttgctgccacctccagccctgccagcgacccctgccacctctagccctgccagagacccctgtaactcttcagccgggctttctcacc

SEQ ID NO: 65876 - DNA, 1813 bp, Homo sapiens
ggccgtctttatcacacagtgttgtttctcggccagtgcctctcccccattccagcccatccaggccggatgacacacgggaaaacaaggagctggcttcaccaggctgacaaggtctcaccttcataagataagctgtagaactgcatccctgtgtgaggctcccagccaggggcatggccaaggagctcacagactgagtggaaagacatttccaacagcaggaatctcacaaccaaagccccaggggcagactattgtggggtgtttgggaaatggaaaagcagagggattgacaggggccaaagaactggaagaactagaggagccatgaaggaccctgaaagccagtctgcatggttaggacttcgctatgtaggcttcttttttttttctttttcttttcttttttttcaaatggagtatcactcttgttgccccgtctggagtgcaatggcatgatctcggctcactgcaacctccacctcccaggttcaagcaattctcctgcctcagtctccccagtagctgggattacagacacacgccaccatgactggctattttttgtatttttagtagagatggggtttcaccatgttggccaggctggtctcgaactcctgacctcaggtgatccacctgccttggcctcccaaagtgttgggattacaggcgttacmcccgcgcccagcctcctttttctctaataaggagaataatcttaacactggaagggatagaagaaacatccctggggagaaattgccaagagcctaagaaaggcaagagatggcaagagactgttcagttactgtgaatacattctccaggcctcagtaagccagctctaattttgccagatgggagtcgcagaaaactgggaagggataaaaggtcataagtttccaaaaagcagaaaaagttggattctggaaaatacagatgatacgtttgatattaatatcggttctgagcaaaaattttcacagatctttgaagagctagcatgtaaacacttggaaggaaaagtggcgcctaagagccaaaccaacctcgttccctgtttttctgtgttaccagaccgaatttacaaagcaacggagaggctccttcacaaaatcctgtggacaatgaagaagaaaataggctgggtgaacgaacggttggggtgatttcatttttagttaggcaggtatttccaaagcactgagaaacacatcaatagagatgtggctggggaggcatccagtgccatacagaggactctgcacccctcccgcagcgctaacctgatgatcaattacaaggacgaaggagacattgaagggtgcattatggcacattcacggctagttcacggaagttcaacatggagcctacagtccacaccctggctgctcaaaaaaaaaaaaaaaaaaaaaatcaacacacgcttcagttgcatcaatagaatcataatattcaggttactaaagggagatgccacccaggtgaaagtgctctgaggttactgtatgcagttctgagtacctgaatcttcaggattcaggataaaaggatctggttgggtggatggacaatctctccagacaaggggtctagcaacaattgtcacatgatgggcaggggaggaaatggagaatgttaccctggaagaagttgtgtgttctcttccaggcatttgaaacctatcatgtgtaatgggcaaccactttttttcagagttcattcattcactcagcatttactcactgccaactacgttcaaccttgtgtcaagcatgatgggcattaggggtatatcatctcc

SEQ ID NO: 65877 - DNA, 1813 bp, Homo sapiens
ggccgtctttatcacacagtgttgtttctcggccagtgcctctcccccattccagcccatccaggccggatgacacacgggaaaacaaggagctggcttcaccaggctgacaaggtctcaccttcataagataagctgtagaactgcatccctgtgtgaggctcccagccaggggcatggccaaggagctcacagactgagtggaaagacatttccaacagcaggaatctcacaaccaaagccccaggggcagactattgtggggtgtttgggaaatggaaaagcagagggattgacaggggccaaagaactggaagaactagaggagccatgaaggaccctgaaagccagtctgcatggttaggacttcgctatgtaggcttcttttttttttctttttcttttcttttttttcaaatggagtatcactcttgttgccccgtctggagtgcaatggcatgatctcggctcactgcaacctccacctcccaggttcaagcaattctcctgcctcagtctccccagtagctgggattacagacacacgccaccatgactggctattttttgtatttttagtagagatggggtttcaccatgttggccaggctggtctcgaactcctgacctcaggtgatccacctgccttggcctcccaaagtgttgggattacaggcgttacamccgcgcccagcctcctttttctctaataaggagaataatcttaacactggaagggatagaagaaacatccctggggagaaattgccaagagcctaagaaaggcaagagatggcaagagactgttcagttactgtgaatacattctccaggcctcagtaagccagctctaattttgccagatgggagtcgcagaaaactgggaagggataaaaggtcataagtttccaaaaagcagaaaaagttggattctggaaaatacagatgatacgtttgatattaatatcggttctgagcaaaaattttcacagatctttgaagagctagcatgtaaacacttggaaggaaaagtggcgcctaagagccaaaccaacctcgttccctgtttttctgtgttaccagaccgaatttacaaagcaacggagaggctccttcacaaaatcctgtggacaatgaagaagaaaataggctgggtgaacgaacggttggggtgatttcatttttagttaggcaggtatttccaaagcactgagaaacacatcaatagagatgtggctggggaggcatccagtgccatacagaggactctgcacccctcccgcagcgctaacctgatgatcaattacaaggacgaaggagacattgaagggtgcattatggcacattcacggctagttcacggaagttcaacatggagcctacagtccacaccctggctgctcaaaaaaaaaaaaaaaaaaaaaatcaacacacgcttcagttgcatcaatagaatcataatattcaggttactaaagggagatgccacccaggtgaaagtgctctgaggttactgtatgcagttctgagtacctgaatcttcaggattcaggataaaaggatctggttgggtggatggacaatctctccagacaaggggtctagcaacaattgtcacatgatgggcaggggaggaaatggagaatgttaccctggaagaagttgtgtgttctcttccaggcatttgaaacctatcatgtgtaatgggcaaccactttttttcagagttcattcattcactcagcatttactcactgccaactacgttcaaccttgtgtcaagcatgatgggcattaggggtatatcatctcc

SEQ ID NO: 65878 - DNA, 1813 bp, Homo sapiens
ggccgtctttatcacacagtgttgtttctcggccagtgcctctcccccattccagcccatccaggccggatgacacacgggaaaacaaggagctggcttcaccaggctgacaaggtctcaccttcataagataagctgtagaactgcatccctgtgtgaggctcccagccaggggcatggccaaggagctcacagactgagtggaaagacatttccaacagcaggaatctcacaaccaaagccccaggggcagactattgtggggtgtttgggaaatggaaaagcagagggattgacaggggccaaagaactggaagaactagaggagccatgaaggaccctgaaagccagtctgcatggttaggacttcgctatgtaggcttcttttttttttctttttcttttcttttttttcaaatggagtatcactcttgttgccccgtctggagtgcaatggcatgatctcggctcactgcaacctccacctcccaggttcaagcaattctcctgcctcagtctccccagtagctgggattacagacacacgccaccatgactggctattttttgtatttttagtagagatggggtttcaccatgttggccaggctggtctcgaactcctgacctcaggtgatccacctgccttggcctcccaaagtgttgggattacaggcgttacacccgcgcccagcctcctttttctctaataaggagaataatcttaacactggaagggatagaagaaacatccctggggagaaattgccaagagcctaagaaaggcaagagatggcaagagactgttcagttactgtgaatacattctccaggcctcagtaagccagctctaattttgccagatgggagtcgcagaaaactgggaagggataaaaggtcataagtttccaaaaagcagaaaaagttggattctggaaaatacagatgatacgtttgatattaatatcggttctgagcaaaaattttcacagatctttgaagagctagcatgtaaacacttggaaggaaaagtggcgcctaagagccaaaccaacctcgttccctgtttttctgtgttaccagaccgaatttacaaagcaacggagaggctccttcacaaaatcctgtggacaatgaagaagaaaataggctgggtgaacgaacggttggggtgatttcatttttagttaggcaggtatttccaaagcactgagaaacacatcaatagagatgtggctggggaggcatccagtgccatacagaggactctgcacccctcccgcagcgctaacctgatgatcaattacaaggacgaaggagacattgaagggtgcattatggcacattcacggctagttcacggaagttcaacatggagcctacagtccacaccctggctgctcaaaaaaaaaaaaaaaaaaaaaatcaacacacgcttcagttgcatcaatagaatcataatattcaggttactaaagggagatgccacccaggtgaaagtgctctgaggttactgtatgcagttctgagtacctgaatcttcaggattcaggataaaaggatctggttgggtggatggacaatctctccagacaaggggtctagcaacaattgtcacatgatgggcaggggaggaaatggagaatgttaccctggaagaagttgtgtgttctcttccaggcatttgaaacctatcatgtgtaatgggcaaccacttttkttcagagttcattcattcactcagcatttactcactgccaactacgttcaaccttgtgtcaagcatgatgggcattaggggtatatcatctcc

SEQ ID NO: 65879 - DNA, 1813 bp, Homo sapiens
ggccgtctttatcacacagtgttgtttctcggccagtgcctctcccccattccagcccatccaggccggatgacacacgggaaaacaaggagctggcttcaccaggctgacaaggtctcaccttcataagataagctgtagaactgcatccctgtgtgaggctcccagccaggggcatggccaaggagctcacagactgagtggaaagacatttccaacagcaggaatctcacaaccaaagccccaggggcagactattgtggggtgtttgggaaatggaaaagcagagggattgacaggggccaaagaactggaagaactagaggagccatgaaggaccctgaaagccagtctgcatggttaggacttcgctatgtaggcttcttttttttttctttttcttttcttttttttcaaatggagtatcactcttgttgccccgtctggagtgcaatggcatgatctcggctcactgcaacctccacctcccaggttcaagcaattctcctgcctcagtctccccagtagctgggattacagacacacgccaccatgactggctattttttgtatttttagtagagatggggtttcaccatgttggccaggctggtctcgaactcctgacctcaggtgatccacctgccttggcctcccaaagtgttgggattacaggcgttacacccgcgcccagcctcctttttctctaataaggagaataatcttaacactggaagggatagaagaaacatccctggggagaaattgccaagagcctaagaaaggcaagagatggcaagagactgttcagttactgtgaatacattctccaggcctcagtaagccagctctaattttgccagatgggagtcgcagaaaactgggaagggataaaaggtcataagtttccaaaaagcagaaaaagttggattctggaaaatacagatgatacgtttgatattaatatcggttctgagcaaaaattttcacagatctttgaagagctagcatgtaaacacttggaaggaaaagtggcgcctaagagccaaaccaacctcgttccctgtttttctgtgttaccagaccgaatttacaaagcaacggagaggctccttcacaaaatcctgtggacaatgaagaagaaaataggctgggtgaacgaacggttggggtgatttcatttttagttaggcaggtatttccaaagcactgagaaacacatcaatagagatgtggctggggaggcatccagtgccatacagaggactctgcacccctcccgcagcgctaacctgatgatcaattacaaggacgaaggagacattgaagggtgcattatggcacattcacggctagttcacggaagttcaacatggagcctacagtccacaccctggctgctcaaaaaaaaaaaaaaaaaaaaaatcaacacacgcttcagttgcatcaatagaatcataatattcaggttactaaagggagatgccacccaggtgaaagtgctctgaggttactgtatgcagttctgagtacctgaatcttcaggattcaggataaaaggatctggttgggtggatggacaatctctccagacaaggggtctagcaacaattgtcacatgatgggcaggggaggaaatggagaatgttaccctggaagaagttgtgtgttctcttccaggcatttgaaacctatcatgtgtaatgggcaaccacttttttycagagttcattcattcactcagcatttactcactgccaactacgttcaaccttgtgtcaagcatgatgggcattaggggtatatcatctcc

SEQ ID NO: 65880 - DNA, 1760 bp, Homo sapiens
tttggttgttaaatctctttagtataaagcagttgtccttttccctcttatttttcctgccattgatttcttactgaaactggatcaattgtcttgcataatgtctgaaggcatcagtcagcgctctccagagaaactgaaccaataatcaatcagcagggtcttactttcacccactctgtgactgtcaaccttttaactggaaggtttagagctttactgtccaatacagtagctattagctacttgaaatgtgcttagtccaaattgctatacacttgtaaaaatacatactggatttcaaagatgttccaaaagaaagaatgcaatatttttcattaataatttttagattgattgcatgtttaaacaatatctggatatatcagcatctttttatttgtttaatatggctaaaattttttaaatggtaaaatgacttactatattcctattagcagtactattttataacattaactcttaatgcaattacttatatagtttcactgaagtctactattttgttatttgttttctacttgttcccctctgtttttaaattctcagttcagtatttttcatagtcctcaggtaggcttttctttggtgctttggggagtggattttccaagagtttttagttgtaactagcagaaaggatgcgctgcagtggacttacgtgcccttaagagaactgaaactagtctaattacatttgaaagtaagaatgctgctagttctacttttacttattttaatttactgagattgttattgtggtttaatgtaaggtcaattgcctttaatgttccacaggagtttaaaaagtaaggtaattctctatttttaaggtctagtttttgatgtgtataggaattagatttataatattgatttytttttttttttacatatggctggtggcagaaactgcccttcaaacctatttcctcttatttttgagcactcaacaagaagcctcatttgcaatgaaataaggactatgtgattgagtttggaccaatggaatatgggcaaaaaatgatgtaccccacttcctggcctggaccctagaacctcctatacaaccatccatgatctctttcccctttgccagttgagtgaaggtgacaaggttccagatgatggtgggacaacgtgatgatagagcatgcatccctgaatgactgcatagagcagtcttcctctccccactaatgtgcattggacagcaattagagtgatcaataagctgagctttggaggtagctagtaaaatagctggagtttcttaccctagctaacatagaactctactatcctattgatatggtttggttatgtgtcccgactgaaatctcatgtggaattttaatccccatgtgtcaagggagtgacctagtaagaggtaattggattataggggaagattttctcatgctgttcttgtaaattgtcagtttcccctgcattctctctctctcctgccaccatgtaagacatgccttgcttccccttcgcattctggcgtgattgtaagtttcctgaggccgccccagatatgaagaacagtgagtcaattaaacctcttttctttataaactacccagtctcagggagtatctttacagcactttgaaaatggattaatacacctatgtaatgggttgaatggtgaccctcccttctccatccactacaaaaacatgtccacctggaatctgtgaatgtaacctgatttgggagagaaaaaaaaa

SEQ ID NO: 65881 - DNA, 660 bp, Homo sapiens
ccaattgaaaatactrcatatagttacaatagggaattttcccaagcacttaaacaataaacaatgccctcttatacaaacctttcccagtaatagaaaagtagggaaaacgtcccaatttgttttacaaggcttgcataacattgatacctgacaaagctatcagagaaaggacagttataggccactttctctcatgaatttagatgcagaagtttgaggtcagggatgtattaaaaagtccagtcttatgggttccatctcacatctgttgaatcataatctctgagcatggagtccagtgagatgagttatcataattcttagtaattctgatgctttttgaagacaagcatctgtaaatgtttgtttttcaacctttctaggtaactgacatagggcaactaatgaatagactgttcatatgcaccacagacatttctttttaaaatacacaattgaaaaaacgcaatttgagacatagtatttgtttccaaatttggggaagatatagtggaaattcttgggacatatgcccaggccataaacctgttcccctcttaacttcttggggaacatcctatgcccatctgctggggtggtccctaagggccatatttttctacaggctaaagaacagtatgtgctgctagtagccag

SEQ ID NO: 65882 - DNA, 660 bp, Homo sapiens
ccaattgaaaatactacatatagttacaatagggaattttcccaagcacttaaacaataaacaatgccctcttatacaaacctttcccagtaatagaaaagtagggaaaacgtcccaatttgttttacaaggcttgcataacattgatacctgacaaagctatcagagaaaggacagttataggccactttctctcatgaatttagatgcagaagtttgaggtcagggatgtattaaaaagtccagtcttatgggttccatctcacatctgttgaatcataatctctgagcatggagtccagtgagatgagttatcataattcttagtaattctgatgcwttttgaagacaagcatctgtaaatgtttgtttttcaacctttctaggtaactgacatagggcaactaatgaatagactgttcatatgcaccacagacatttctttttaaaatacacaattgaaaaaacgcaatttgagacatagtatttgtttccaaatttggggaagatatagtggaaattcttgggacatatgcccaggccataaacctgttcccctcttaacttcttggggaacatcctatgcccatctgctggggtggtccctaagggccatatttttctacaggctaaagaacagtatgtgctgctagtagccag

SEQ ID NO: 65883 - DNA, 619 bp, Homo sapiens
atgtccacgcaactctctattttcaagttcagttttcctctgccataccttctttttcctcttgaccctcctaagtacttttactaagctgttttgaattcttgctctgtcaaggactatctatacatccttaactatcttctagattgttttagtcatttcctcttcttaaccaagatgttattccataagaatgatgctgtttgatctgaaacactctcaaaatgaaattgtgtatttttgcctgtccattgtgtcatggaagcaatagatggtcattgctttccttatctttccaccgtagatccagtagccttattattccacattacttgaagtaacatacaaataatacataagcttttcagaagatgaaaatgcgccacagttctagagctcaggagaaaaaattttaaacctagtgattctacactttgcctgaatttggtccratagcatcatatcatgattcaatcagagaagtaaattcagtaggaaatatatattaagagattggttgcaaagaattggctcatctgattatggggactagctgggcaagtttgaaaactatagggcaggctatcagaaggggcaaacttgaactctcagccactgg

SEQ ID NO: 65884 - DNA, 756 bp, Homo sapiens
aaaggcatagccactgggagctggcagtcaaccgtgtttcccctaaaagtttctcccaaagggtaatctgagcaatgcacctcatttccaacacaattcctttcaaccaacttttttaaattaaaattttttcttaattttgaattttttaggcatggtatcttgctttattgcccaggctggagtgtagaggctattcacagacaccatcgtggtgcactgcagcttcaaattcctgggctccagtgatctttctgcctcagcctcctgagtagctgggactataggtgtgtgccacggtacyaggctcagccagcatttactaaataccttctgtgtgctaggcattatgtgtgttgaatgatagaaacatggcctcatggctcccaggaaatcccacatgactgcagaacagtggggtctatgagttttcatcgtcaattcaaaggaagatgtcacagtttggaggatgccactgacagcttcatggcagagcttggctacaagttgggcagaaatgatgggtggggtctaggtcgttgtaggaaaaaggaggaaacatattggaaggagagagcagggggacaggaggaccacagactgacagagtggattaggcaggagataaggaaggcttagaagtaaaataatctcgaaagagtacaatatttactttaaatgtcttttttttcctaataaggtaacgattgttttaaagaattctgatgttgtagaaatatagaatgtaaactcctt

SEQ ID NO: 65885 - DNA, 756 bp, Homo sapiens
aaaggcatagccactgggagctggcagtcaaccgtgtttcccctaaaagtttctcccaaagggtaatctgagcaatgcacctcatttccaacacaattcctttcaaccaacttttttaaattaaaattttttcttaattttgaattttttaggcatggtatcttgctttattgcccaggctggagtgtagaggctattcacagacaccatcgtggtgcactgcagcttcaaattcctgggctccagtgatctttctgcctcagcctcctgagtagctgggactataggtgtgtgccacggtaccaggctcagccagcatttactaaataccttctgtgtgctaggcattatgtgtgttgaatgatagaaacatggcctcatggctcccaggaaatcccacatgactgcagaacagtggggtctatgagttttcatcgtcaattcaaaggaagatrtcacagtttggaggatgccactgacagcttcatggcagagcttggctacaagttgggcagaaatgatgggtggggtctaggtcgttgtaggaaaaaggaggaaacatattggaaggagagagcagggggacaggaggaccacagactgacagagtggattaggcaggagataaggaaggcttagaagtaaaataatctcgaaagagtacaatatttactttaaatgtcttttttttcctaataaggtaacgattgttttaaagaattctgatgttgtagaaatatagaatgtaaactcctt

SEQ ID NO: 65886 - DNA, 549 bp, Homo sapiens
gctattgtttcttaagccctacttcacaggtagagagcatcaggagagggtgccaggaggcagcaccatccagcagaaatcaataatcccggaccagaaaatgggcccctggctttctgtcccagccttgccacaaactgagtgattttgcaggtcatgacctctttggatcacagttatcttatgtgcaaagcaaagcatttgacctagagaatttttttgagccctcaggttctatgagaattgtgctgctctagtaacaacagcagttagggtgacccacccctcctggtttgccaattggagcaytgaagtcctgtgtgtcaggaaattccttagtcctgggcaaaccaggatggttggtcactctaactgctgtcatcttttcagtatgcggcgtgttcggcctctggcacacgacaacaggagcagtggcagcagtaggctgtggtcttactgccatacctttagattccttccctcatctcagagtgctgagaacagaggctgcagttccctggaggcccgacctctctctgtgctttcccg

SEQ ID NO: 65887 - DNA, 1143 bp, Homo sapiens
ttttccatatggtctctggtttttctcattcaatacttttataattaaattccttcccttcccttccttccttccttcctttttttgcttatttactgtggcatcttcagatcatttggaatttattttgatgtaaagtgtgatgttgggacttgatttgaattttttccaaatggttatcaagttgtcccaattattacttgaattaggcacatgttccccactaatatttgaaataccacatctaccatagatcatattaaactctaaaaggaatgtaataactcctatgaagagagctaatatgacaaattaaaagcatcttctagagatatctacttgttggtgagcagccgatgacataacatggtactgttagtgaacagataagccccctaaaaatagcaataaacccaagggctttacctctgttgaaaagatgctagatttccaacaagctcccaggtggtaccaatgcttctggtctaaatatcatacttcactcagcaaggtgctggacatcttccctttgccttactgacactctctccactctgttttgtgccccgggaggctgactgtgcagactgtatcactcaatcttctcaacaaccctgttcaggtggtgctatcattagatcaccatttaatagatgagcaaattgagccgagataagtaaagcaacttgcctgaggtcacactgcaattcgtgatggggctgggttgagctcaggcaagtgggctccaaggttgtgttccgacctcctaagctaagctgcctttgcatctcattgcagcctgcccaacagtgagtggtgtggtgggaaatcctggactgtgagtcaggagacccagatacaaatcctccctctaccgcttgcatgttgtgtaaccttgggcaagttgcttcacttcttgagcctacatattctcatctgtcaaccttgcaaggttgtcatagggtgaaatgagaaagtacatgaaaaagaaagtccagcagtttacagcacacagtgygtgctcagtaaacaatagcttttatctgttacctggggcttaagtccatgtcttgtaaggcctaattgcatttctcttttctctgtatctgaacctctattgagaagcattccaatttggcaagc

SEQ ID NO: 65888 - DNA, 825 bp, Homo sapiens
tcccactgcacatgtgtgctggatctcattccacatgtgcattagctctcactgtccttggggatctgtttcctgatttgtgtaatacttgctgggtagggctagtagacaccgctcaaatctctgtcgtttatgactcttttatttgttgtcaactcgataacaaatgtggaagagaaaacaagcttgagactgtgttgtggagggctgattcaccgtggtctttaaaatcctcctggcaagkcacggtggctcacacctgtaatcccagcactttgggaggctgaagcgggtggatcacctgcggtcagaagttcaaagtcagcctggccagcatagtgaaacctcatctctactaaaaatataaaaattagctaggcatgatggctcatgcctgtagtcccagctactccagaggctgaggcacaattgcttgaatctgggaggcagaagttgcagtgagctgagatcgtgccactgcactccagcctgggtgacaaagcaagactttgtgttaaaaaaaaaaaaaaaaaaaaaaagaaaagaaaagaaaaagagaaaaggaaaaaaaaaaaaccctcccatgtttgaagctcagctgtgagacaggggccctttgatctgacctggactgagggctcctggaggaggcagtgatcatcgtctgcctcctcttctcagtgtcctagtgcttgtcttgatagtcactcagtgctgttcaaccaaattagggcaagcctagatctgtgtcatggcgacgcacttcctgctaatttctctgtgaaaagtcagctctgaaaaattaagctttagtttgaagctttt

SEQ ID NO: 65889 - DNA, 825 bp, Homo sapiens
tcccactgcacatgtgtgctggatctcattccacatgtgcattagctctcactgtccttggggatctgtttcctgatttgtgtaatacttgctgggtagggctagtagacaccgctcaaatctctgtcgtttatgactcttttatttgttgtcaactcgataacaaatgtggaagagaaaacaagcttgagactgtgttgtggagggctgattcaccgtggtctttaaaatcctcctggcaagtcacggtggctcacacctgtaatcccagcactttgggaggctgaagcgggtggatcacctgcrgtcagaagttcaaagtcagcctggccagcatagtgaaacctcatctctactaaaaatataaaaattagctaggcatgatggctcatgcctgtagtcccagctactccagaggctgaggcacaattgcttgaatctgggaggcagaagttgcagtgagctgagatcgtgccactgcactccagcctgggtgacaaagcaagactttgtgttaaaaaaaaaaaaaaaaaaaaaaagaaaagaaaagaaaaagagaaaaggaaaaaaaaaaaaccctcccatgtttgaagctcagctgtgagacaggggccctttgatctgacctggactgagggctcctggaggaggcagtgatcatcgtctgcctcctcttctcagtgtcctagtgcttgtcttgatagtcactcagtgctgttcaaccaaattagggcaagcctagatctgtgtcatggcgacgcacttcctgctaatttctctgtgaaaagtcagctctgaaaaattaagctttagtttgaagctttt

SEQ ID NO: 65890 - DNA, 825 bp, Homo sapiens
tcccactgcacatgtgtgctggatctcattccacatgtgcattagctctcactgtccttggggatctgtttcctgatttgtgtaatacttgctgggtagggctagtagacaccgctcaaatctctgtcgtttatgactcttttatttgttgtcaactcgataacaaatgtggaagagaaaacaagcttgagactgtgttgtggagggctgattcaccgtggtctttaaaatcctcctggcaagtcacggtggctcacacctgtaatcccagcactttgggaggctgaagcgggtggatcacctgcggtcagaagttcaaagtcagcctggccagcatagtgaaacctcatctctactaaaaatataaaaattagctaggcatgatggctcatgcctgtagtcccagctactccagaggctgaggcacaattgcttgaatstgggaggcagaagttgcagtgagctgagatcgtgccactgcactccagcctgggtgacaaagcaagactttgtgttaaaaaaaaaaaaaaaaaaaaaaagaaaagaaaagaaaaagagaaaaggaaaaaaaaaaaaccctcccatgtttgaagctcagctgtgagacaggggccctttgatctgacctggactgagggctcctggaggaggcagtgatcatcgtctgcctcctcttctcagtgtcctagtgcttgtcttgatagtcactcagtgctgttcaaccaaattagggcaagcctagatctgtgtcatggcgacgcacttcctgctaatttctctgtgaaaagtcagctctgaaaaattaagctttagtttgaagctttt

SEQ ID NO: 65891 - DNA, 861 bp, Homo sapiens
atgtttttataaaatgccccatcatcattttaatggtctccaagttagaggaatattggtccacatggacagccaggttctgggttctctctgctcctcagcaccactgccgaggtgaacttagagtccacagttgacacctcaatgactctaggccctgactccactgggctatgtcagaggtgtagatgtacactgaatagctgtgtgcacatttagcaaggaggttgcccatgcctcttgatctctttcttgrtttcaaaagccttgcatcagttttcctctgaaattgttgttgctgtgtccacgtgggggacagccctgaggcgtggggcatgctgtgggcatcctcccttgccccgtgaagccacacccattcatcttggcatccagtgttgtgaaacacacacacgtgcattatgtaattgatacagtgagtgtgagttcaccctatttttttcgtggaatacagtaaatcacggtgtgctatgcttcattcaaaacacccaggtccaacctcccacaccttcaggctttatgagcccgccactcaattctgtccccagccctctgtgcctttgttcttaggagggctcagtggttggttgttttagaagaacagagtggatcaccagaggagacaggtgagcttctttcatgccctagtgcccagctcggtttggtaagcggttcttgtgacacacgtatttttctacccaacacctctacacaatattcaaaatggtgattgtgctggagaagggagtggctcctgaatgactcatggccgcttgctgtcatcgctgcctttcccacgtgtagcctctgaggagtcctgcagagtcctaggaacctgtttgt

SEQ ID NO: 65892 - DNA, 2401 bp, Homo sapiens
cctcctgcctcagcctcccaagtagctgggactacaggtgtgtgccaccatgcgtagccaattttaaaattttttttgtagagatgtggtctcactatatttcccaagctattcttgggcttttggcctcaacaatcctcccaccttagcctcccaaatctcttagattacaggcatgagccatgttgcccagctggcaacaatattattgaatacctatgtgcaagacccaagacaaawatatgccaagacagtaactcgtatgggatgtgaccctggcagacacagataaaggggtgggggaagtgaggcagggaagagagacacaccagaaattcatgctgcattgagacttactcggcaagagtcgcatcccatcacctgtttgcagcggtgctctgacctgcagtcctgtctaagagtcttaccagatgagttagctcgagctgggttctcatttaaacataagcattcacatgaagtttcttaacagttgcattgagacctagatattataaattcacccttttcagttgtgccatttggtggtttgagtacattaacagaattgtgtaagcatcatcacaatccattttagagcactttcatcaccacaaaagacactctgtaatttttagctgttcctcctggcttcatcactcagatctctccagcagcaagtgacccctgcaaatatggtatgagggccctggccagagctccagcacagtcctgaacggaagtgaggtagcagacatccttgttcctgctgggcaggtgcagtgggaaaatcatccagactttccccactaagtatgatggtagctctgggtatttgctacaaccctttgatcaggttgatgaaacttccttctatttctagtataagtgttttcgtcatcaaagagtgttagagttctgtcaaatgctttttctctgtctattgcaataattttgtgttttttgccttttattctattgataggatacattacattaattagttttcagatgttgacctaatcttgcactcctagaatagatcccacttggtcatgaggcatacttccttttatacattgctggatctggtttgctgctatattttgtggatttttcatccatatctgtatgagatgttgatctgaatttttgaaaataagacgaaactttactatcttatgttctaaaggccagatatcctaaaattaaagtgtcagccatgctgcgttcactctgaaaccctggggaagacatcattttgttgccttttatagtttctaggggctgcctgcacgtgtttgcacctgagtagtttcatcagcctgttttttcccctgcagaatgctgggagtctgagagcttgtttttatttcaacttttctctatcctttgcagtctaagcccgtcatttttcacaggtgtaacaagtccaaaaagcttgtggatcacctgtgaatatcacagggatttcatctgtttttcagaggctttgctgtgtaactttcctcatctctattttcagtttttgctgggatgtgtgaggaggcccatgaaccacgcccctcaggccttcaaaagaggcctctgtgagaggaatccactgacattttcatcctttagaggcatgagctgcaggtcgtccagcacagccctggctttctctttttaggacgctttcctgataataaatctccacatttaagagtcttctgcactttggacaggctgcaaatttcccagattatgaaatcctgtttttttgttttgttgtgtttcgttttgtttttcctattctgcctgctttattctagctgcgctagaagtgattggagatgaggttcagagtgtgacccacagggaggtgcactatgctccaaaagaactgcttgagttttctaatttacataagcagaaatctggagaacagtcataggaatggatattaacggtgtgagataatgggggaaggaacatagagttggatcgggtggaatttattgatatgggttcactaagcagagattttgcattttatgttgcagctcaagaagctttaaaaaggttctaatagtttatttgcttgattagctgaaatatggatcaaaagatggccctctgtgagtgagctggaaatgcctgatctcccttggtttaatgtagagaaagggattcaaaggcttagggagatggggatgcaagagtagattagtcactttagaccgactcatctcagctgagagggtccagaagacatacccttcactaataccttgagaagcagatttgtgaggggcgcacctgcatccttgagctctatgattgctcttctctgtatgcaagatcttacaatgggcaccactgtcactcaattagaaaacttaaacacaatgggaatcac

SEQ ID NO: 65893 - DNA, 795 bp, Homo sapiens
aagagacaaagagaagatgaaaaaggagaaggggagggagatgattaaagactaaaaaagatcaaagggatacagcaacgcaataaaaggtatgggctgtgtttggacaytgaatcaaacgaactggatacaaaaagatatttttgagacaactgggaaaattagaatatggactgggtattgaaaagccctatggaattattattctttttttagttgtgataatgacatggtgaccatgtttaagggtaaatgttccttattggttagagaagcctaatgcagtgtgtagaaatgacctgatgtctgggctgaggttaggattgggggagaaggaccagaaagatcagggcctctcccctgagacccaagcaagcagctggccaccccctatcacccaaattgactatctagggagtgaaccatgctccctctgcacagggctgacagtttggggtatttctttaaaatgcctaaaatttgtacgtcaccaaggcaaggcatgaggcaggaaaatttgccaacatggccccctgggagttggcctggttgatccatctcacccccttcctttcccataatacctgttcactcaattcatagctaagattgccaccaatattattacaaaatcaataaggagaacatatatctctgtgtttctgtgtttatgactgtggcaccctcagccatgtccttcctgccaagtgtgtaagggtgccgtcgccatcacacactcttctttatgggatatgtgatcaaattaaaaaaaaaaagaaacaacttttggaaaat

SEQ ID NO: 65894 - DNA, 842 bp, Homo sapiens
aggtccactgatgggggagagggaactgcccgggggaagggccgggaggtgcagggctttgtttgggactggtgcaaatcagggcccgggagacactgggcaggaccagagcattcatgtctgagcttcagggcttgggaagctggagatggggcagccccaagcttgatgctcagcctgtcctaggaagccttgctgtgtgtgtgggagggtggggttgagtattatgaaggtggatgaatcccacagtgagggagtaactgcatgtggccttagaaaatattttgaagtcaaataatcatgaaaatgtattaattcactcactcaacccttctgccatattttgttcatgcctgtggcatcccagagactctctaggtagggggctgtggtgttgacaatgcaggctaaggccctgcctggtggctctgaggctcacaggtcctgaggagtgaggaggatgtgaatagagtagggacgaattcagggctcaggatttggtactttcccagaaactcttttacagagaagcattccaacatttggcaaacaaygacaacattcgacaaccacaagggaaggccacacaggagcgtggtgctccggcttggggacgtaacgggtcccacagagctgcttttattaacgataaggaatttcacacccctgtgtttgcccatgagaagcagaatattgtctgatgtgctgagtatcacacacatattttgatcctcttaactaattatttgaataatgaagcccagaaaatgaaaggagtaaataaattccaccttgcaaaaaatacaattttgcagtttacaaagtgttccagtgaagctatg

SEQ ID NO: 65895 - DNA, 853 bp, Homo sapiens
atcgtgcattgtgggaagcttcacagacttgtgtaaaaccaatcagtgggccctcagggagccggtgccagctgtgccgaagcatgaccaggggatagtgagcaccccacgaagccgttctggtgggagagacaccccaacccatggcctcatctgctgacagtcagggctccagcccagagatgcggcagggcctgctggcggcacagaaccgctggggtgtcgtccagatcccaaggccgtggccccacgctgggcctggtctcgggggctcttcctcatcagctacctcatcgggcccctgctactagtgaaggggattaatctacgtggatctgtgcatctgccttaatatcatgcaagaaaacacattcttgagtcagatgtcagaactattcctatatttaactcgggggatgtggaacatggctaatcaacatcaccctttcttttcgtgaaggaccgagatgcccaaatcctggccctcctgctggactttcattttaaagaacaataaaattaatgttaacttctagcagcttccaagctctggtaaggtgatccaaccctaaatccyagtagtcactactggaatacggtgaacctctctctttgaagcctggcttggccgtgtgtcactcccagtggacggaatgcactgtctctggtaaaggggcgtatcccatctctgcaggttttcaaacacaggctaaggacgtgtcagagatactttgacggcgttaacagttctagtgagccgtgtgccaagacagcctggaaagtttaggggttcccgtgcccttttgggtatagtttgcaaactcttatgggcacccaccaggaataaaggatc

SEQ ID NO: 65896 - DNA, 576 bp, Homo sapiens
ttgcatgaaatatttccattctaataagtaaaacaaacatcagacctttaaaggaagatctaaggaagcaggtataacagtgactagcaaataaactgaataacatcaaccatcaaattggggtttcttcattgtgatggttaatactgagtgtcaacttgattggattgaaagatacaaagtattgatcctgggtgtgtctgtgagggtgttgccaaaggagattaacatttgagtcagtgggctgggaaaggcagacccacccttaatctgggagggcaccrtctcatcagctgccagcacggctagaatataagaaggcagaaaaatgtgaaaagagagactggcctagcctcccagcctacatctttctcccgtgctggatgcttcctgccctcaaacattggactctaatttcttcagttttggaactcggactgcctctccttgctcctcagcctgcagtcagcctattgtgggaccttgtgatcgtgtgagttaattcttaataaactcccctttatatatatatacatattcaattagttctgtcgctctagagaacattgactaata

SEQ ID NO: 65897 - DNA, 1218 bp, Homo sapiens
  misc_feature (1)...(1218): n = A,T,C or G
acccatcttccttaaagtaccctccctgcttccaaacccccagcttttttcaactcaaacaatgcccagatttaaaaaaaaaaaaaaaaaaggctgttgatggaatgcatgattacagaacaaatgaaaagtgagttaaaagagttgtgggggaacacttagtctggcagctgtatgatctcacacttttgtggctgtgacttttgtaattgtggtattcttaagtataaaatacaggaaatattgatattgaggttttttttttttttttttggagacggagtctcgctctgtcgcccaggctggattgcagtggcacgatctcagctcactgcaagctccgtctcccaggttcacgccattctcctgcctcagcctaccgagtagctgggactgcaggcgcctgccaccacgcctggctaattttttgtatttttagtagagacggggtttcaccatgttggacaggctggtctcgaactcctgacctcaggtgatccrcctgcctcggcctcccaaagtgctgggattacaggcatgagccaccatgctgggccagactagatgctgtagatagcgaaatttgtggtccttgcatatgggatagttgtcacctatggagccccattggtaatacacaggtgagaatgcccatttcagtatccagaatgccaggccctaggataaaactatcaactcttgtattcaatttggttaatatttttaagtgatgacttttcttcctagcaagaaaataatgggaagataagaaacatttaaatgatttggtaaacaagtgtggttgttgctaaattagaaagcagtctgcaagatgcagcggcaggtgaaggcagctgattcttcaaagcacaacagaaacgaaccaaatgtcatctgtagaatgcaaaacaaagtggtatattcgtacattttagtactacctatcagtaaagaaagcccaaatcactggtataccagtaacaagaataaacttccacatcattatgttgagcagttaagaagccagacacaaaagagcacaatcgtgattccattttaaaaaatggaatgtggtatctatagatatcagaagaatttttgtctctgaggtgggagattgactggaaagcatcaagaggcaacttttggggtgctggaaatattatttgccttgatatgggcaatggttacagggattacacatttgtcaaaattnat

SEQ ID NO: 65898 - DNA, 652 bp, Homo sapiens
attttaaattaatgccttattcctgagcctagtttctactttgtatgtaactgctaaaaatrtagatcttaaattattcccgagtctttctcagtaacctacagtataagtttcatattgcttctgtaacaaattagcataaacttagttgcttttaaaaatacacatttattctcttccagttctgcaggtagacagtcccaaatcaatctcactggatttaagtcatgatgtctgcagagccttctggaggctttgagagaagaatccatttccctgctgctttttgtttgtttaatcttccagaggccacctgccttcctggctcacagaccatgtcttgcatcttgcttccattgtcacatttcctactactgactctgatcctcctgcctccctcttcaagatcctagtgatttcactgggcccacccaataatccaggggaatctccccatcccaggatccttaacttaatcacatctgcaaaatcgtgtaaactgacgtattcacatactcacaagttgcagggataaggatatgggcaccttgggggaggcaatcattctgtctaccacacctaccctgtatccaaaacacacagaaacagaatccttcctagcctttgacacttacccacgcccctctgatgg

SEQ ID NO: 65899 - DNA, 1167 bp, Homo sapiens
gaaattcaaaaattctaataaaaattttacagatattatgcttggacaaatatagactcaaatccatgctatatggctaaaagtttaatccctagtttttgcattaacattgttatattaataaggataagagaggtgttaattcatccatccattaattcatccatccatttatccatccttttattcattcaatctgccactaatttgaagtttataccagctacttttaaggctttgttagattctaaaaggattaacattatgagactatccttacaatgcttaagagaagataagatgtgatgcaaccaataaggaagacatttctttgaacttgaaaccacctttgcaaaattataactaaggaaattatgacagtgaaagatatcagacctactcaactccatcttgcttctaacctctaaactgtcattgtccattcctgggtgtaggccgaactagccttgggaagcaatttagtttatagtttaaatacaataatagcccttcccaaaagctaaactgttcttgtaaaatgaatgaaaggctaccagccaccaagttagaatgagaagggctggaattcaaaatattaccagccattattctggaagtcataagatttgcaacttcctcaattactcttaaaggtaatatcactattttgagtcttttgagatgtcttttcaggtttttgcatttctaaaaaccatacagccccacctggacctgccaaccaggaactgactcagcgtaagacgacagctttgactccctatgatctcatccctgagccaaccaatcagcactccggattcactggccccttacccaccaaattatccttaaaaactctgatacctgagtttttagggagactgatttgagtaataataaaattctggtctcccacacagtcagctctgcrtgaattactctttctctatagtaattcccctatcttgataaattcggctctgtctaggcagttgttgaggtgaactcattgggcagttacaaatttggaggtagcattttactttaaaggaaatagaaagacagagagaaaaaagcttgagctctgaacgcagaatacctgggttcaaatagtagtgcctggtgttactctgtactatctttgagtcccagggcaacctacttaaa

SEQ ID NO: 65900 - DNA, 1167 bp, Homo sapiens
gaaattcaaaaattctaataaaaattttacagatattatgcttggacaaatatagactcaaatccatgctatatggctaaaagtttaatccctagtttttgcattaacattgttatattaataaggataagagaggtgttaattcatccatccattaattcatccatccatttatccatccttttattcattcaatctgccactaatttgaagtttataccagctacttttaaggctttgttagattctaaaaggattaacattatgagactatccttacaatgcttaagagaagataagatgtgatgcaaccaataaggaagacatttctttgaacttgaaaccacctttgcaaaattataactaaggaaattatgacagtgaaagatatcagacctactcaactccatcttgcttctaacctctaaactgtcattgtccattcctgggtgtaggccgaactagccttgggaagcaatttagtttatagtttaaatacaataatagcccttcccaaaagctaaactgttcttgtaaaatgaatgaaaggctaccagccaccaagttagaatgagaagggctggaattcaaaatattaccagccattattctggaagtcataagatttgcaacttcctcaattactcttaaaggtaatatcactattttgagtcttttgagatgtcttttcaggtttttgcatttctaaaaaccatacagccccacctggacctgccaaccaggaactgactcagcgtaagacgacagctttgactccctatgatctcatccctgagccaaccaatcagcactccggattcactggccccttacccaccaaattatccttaaaaactctgatacctgagtttttagggagactgatttgagtaataataaaattctggtctcccacacagtcagctctgcatgaattactctttctcyatagtaattcccctatcttgataaattcggctctgtctaggcagttgttgaggtgaactcattgggcagttacaaatttggaggtagcattttactttaaaggaaatagaaagacagagagaaaaaagcttgagctctgaacgcagaatacctgggttcaaatagtagtgcctggtgttactctgtactatctttgagtcccagggcaacctacttaaa

SEQ ID NO: 65901 - DNA, 1167 bp, Homo sapiens
gaaattcaaaaattctaataaaaattttacagatattatgcttggacaaatatagactcaaatccatgctatatggctaaaagtttaatccctagtttttgcattaacattgttatattaataaggataagagaggtgttaattcatccatccattaattcatccatccatttatccatccttttattcattcaatctgccactaatttgaagtttataccagctacttttaaggctttgttagattctaaaaggattaacattatgagactatccttacaatgcttaagagaagataagatgtgatgcaaccaataaggaagacatttctttgaacttgaaaccacctttgcaaaattataactaaggaaattatgacagtgaaagatatcagacctactcaactccatcttgcttctaacctctaaactgtcattgtccattcctgggtgtaggccgaactagccttgggaagcaatttagtttatagtttaaatacaataatagcccttcccaaaagctaaactgttcttgtaaaatgaatgaaaggctaccagccaccaagttagaatgagaagggctggaattcaaaatattaccagccattattctggaagtcataagatttgcaacttcctcaattactcttaaaggtaatatcactattttgagtcttttgagatgtcttttcaggtttttgcatttctaaaaaccatacagccccacctggacctgccaaccaggaactgactcagcgtaagacgacagctttgactccctatgatctcatccctgagccaaccaatcagcactccggattcactggccccttacccaccaaattatccttaaaaactctgatacctgagtttttagggagactgatttgagtaataataaaattctggtctcccacacagtcagctctgcatgaattactctttctctatagtaattcccctatcttgataaattcrgctctgtctaggcagttgttgaggtgaactcattgggcagttacaaatttggaggtagcattttactttaaaggaaatagaaagacagagagaaaaaagcttgagctctgaacgcagaatacctgggttcaaatagtagtgcctggtgttactctgtactatctttgagtcccagggcaacctacttaaa

SEQ ID NO: 65902 - DNA, 876 bp, Homo sapiens
tttatgcatactgtgatgtgtggtcagatttaggttttactgaatgttcatatctatgggtatgatattttcaattgtaagttttttggaaaagaattgttttctaactctgtcattcttattcttaatttttagttttaaaatatctttcatttatgaaatagtgaaaacggtaaatagtaatagtaaggatattttaaatcacttyttttaatgctgtacttggcaaaataaaaaactggaaatcctaaaaaatataaatataataaaataaaaaatgatcaagatgtacagcttggaaagtaacgtaatttttactaaggcaatcaaaatgtgaaaaaattacaaagtctgttttttcagaattatgagttctggtgttacagagtagaaaaagataagctacaaagggtatgagaatgaatgctcaatgttttctggaaatccaatcaggtatcattaagcaatagatactgttaagccctcataatatgctagttatagtgttgtgtaaaggggagagactcaaagaaatataaaccacaatttctgtcttcccagacctcaaaacacatgagccaattgtatataaacatacagaaaaacatccagtggtaccgataaaaaccacaggactggggcagatgaagagagttcaaaagagggaggaggtcccaggctgccagacacttccattgcccttgtccaaggtcaaacaaccagcaaatggcagagctcagactggaccttgtgttctgtggactctaaagcacagctctgtaatttagagattgcgagctggtggtccaggagttggatccagtccacagacaggtctttactgtcattgtttaggtctgcacagtttcataaact

SEQ ID NO: 65903 - DNA, 886 bp, Homo sapiens
tcaggccctgacctaatgatctcgttttaacttgattaactctataaagaccctgtttccaaacaaagatcacattcataagtaccaggagttaggactccaacataggaagtctggggagacacaacccaatccatcacacccctcttaattattgaggatttctgtatctgtttcttcagtctagaaagctctattccttactctccgcttcattagcatctatttcattcagcaggcaggacccaggttaaatgtagcttcttccgacaggtaatccttgatgcctcctctaggtgaggtcccctgtgacattcactcatagcaccttctgctttgactccctgtgcttgtagcaattctaaattatatatttaggtggggattcttttttctttgytgtgttcctctcctgcatagtttataagttccatgaagactaagaccatgtctgatttgttcatcactgcatccccagtgcctacgaagtggtctacagaaaagtacttaaacattattgactgaacgtgaattaaaaatcattcttagtcctcttctcttccatcttcacctctgatgccattttttttttctcagaaggaacagttttcgcattttctcactagtgtttctaggtaaaccacagcaagctgagcacacaaagctgttgacgtggaagctggggaggtgggttggattcctcactagccaagtgaccttttaccaccccaaggtccatgatttacgtctgtttttcagaaagaccactaatgactatgtcctatgaacatttacgttgcctttttattaacccacaaaggttacatctttgaatgccaaagttctttcaaatgaaagtttatgaaaattgtacccttgcctgcag

SEQ ID NO: 65904 - DNA, 545 bp, Homo sapiens
gcggttgcctataattccagctacttgggaggctgagacaggagaatcacttgaacctgggagacagtggttgcagtgagccgagattgagccactgcactccagcctgggcagctgagcaagactccataaaaaaaaaaaaaaaaaaaaggagctgctaggccagaatcggtttgcagcttccttgctggttccttccacatcactcctgcaaggaacagggaactaaaacatctacataaacctgaattctcaaacctgaatgaacctcacagttccctagccagcttgttaaaacacacattgctgggtgcccccccacccgccgccccagtttctcattcagaagggctgggtaatttgcatttacaacaaataataagagaccctgatacccctggtctggggaagaaaccctgagaatttatgggctggaccttcttggaaacttatcatgggcactgatgtacaatttctgtatgtcttttttttccatgtgcatatctggtttttttgtttttttgtttttttgtttttttkttttt

SEQ ID NO: 65905 - DNA, 1603 bp, Homo sapiens
acccgggaggtggaggttgcagtgagccaagatcgtgccactgcactccagccttggcaatagactgagactctgtctcaaaaaaaaaaagttgttttatttaactaaagttcaaaactcactcaaaagaagcctagaaagattgacatcacatgttgcaaattgaattccttgtaatcaaaaggatgmcaaattagtaaattcttaaaagcaaacagggcttctaactacttctttaccaggaactgagtaatgtatcaatctaataaccaatgcatttacttataggaatacaaaggaaaagattgccatttcagcattttagaacaggaagcagaactagcaacagttatttgaaaatatacaaaaaactggtttgaagtcaatgaatatgtatccaattaaattgctatagttcaacttctctctgatttatggtagtatgccaagtttctcctagtcacccttcgaaaataaagaattgaggttttaatacaaaagatatgagtttcatagggtgataacctatagaacctcctactactgagttaaattatccatctgctatagcaacatggcagatagtggatcatcatctcaggcacaaaatatagggagggtgcttgaaaacttcaaaaatgaaaaaaaaatacccgtcttttcaggatgttcaacatcatcaatagatgactttttgtagacttttgttttgtaattatgaatctatgagtgtggtatttaggtagggtgatgaggttgcgggatggatagagagactgacgttaggaatcaaattcataaagaacataaagcaacgtcaaaggtaaaatggcaggtaagagggattcagatggtggccttgccccctgaaggctctgtgacaggatccttcctaaacctcagcttcttcatcggtaaaacagagattccagtggagccagtaccacagtggtccagaggatgagatgactaaagtatgtcaagtcttagcacagtgcttagttctcaagtgcttgagaaacaaaaagaaagagataagtctttgttactaaaaagagggtgacttcgtacaagggatcattccttttcttcaaagaaaacattaaatccacaatagctgtagctcatctgtgcatacagaaatctgtgcccaagaaatacatactgaatatacacagtaaagagcaatggaggaagaaatctgcaaagaacttatatttaaacctctaaggatctatatgaaagataatgtgaataatagaatttggttttattaattccaggcaagttctaatgatcatgacaacatattttcaaatcataggaatgatactaaaacataaagcattaggctgaagttatgcagttaactgagggtggtaccactcctacctgggggcattgaaaaatgggggtgggaagaagagttggatgcaggcaatgaccagggatgtgaaatgttctgcaatacatgatagggtccccatgcaaaaaataatcccctcacccaaaacatggcaaacaggctcttctttaagatcatgaagttccacttaccatcactcttagcttaatcttcaggacattatatgagcgtgtgtga

SEQ ID NO: 65906 - DNA, 644 bp, Homo sapiens
ataaggcaaatcaaagataaatgattagagatttaaaacctcagcctatcagaaaaacctgagggaaaagattttgaattttttttatttcttccaaaagatcctatttgacatwtttttttaaatctaaatgaccaaagatttcgaatttggaaaggcagacacatatctatttcccatataaacatctacatttcttgccacatagcaccgcaacactcatctggttccaaagcagacggcttggccctctgttatcaagagcactatcaccgttctggcccggagagctaagttttcttatacataggtcgtagccaaagctcagaggaaagaagtgacatttggtgagtgtacaggatatgttctccagccactttttaggtgctaagttacatcttgaaataatgtcagaaattggaagatgccgtatttaaacttcactagcccaagccctaattcacctcgacagtttaatatcttaatgtttcttaaaatttgaggactcttagaatgacccctttaaaaatctgctgaaaaactggatctttttgtgggaaaaactgtccatacctacatatctaaaatgtgtatgtggtttcagtctctcctgtgcacagtccctcctgctttgaagggatccc

SEQ ID NO: 65907 - DNA, 760 bp, Homo sapiens
ttggccaatttatataagattgttccatctcttctccatccttgcttcattttatgtcctctcagctcagctttctcttcagccattgctatagccaatagcttcatgcaaatgtagcaaggcaagacctccccagctgcactgcatatctcttgctttctgtctctgggcttctctccagctccagcctatgagagtccactcagccatcacatgctcaaacctggaaccaaatcaggaaaacccttgacccatggagaatagaagctatggataaatactgctatcttctgtaatttgggtgaataattgaggcacattcaatgaagtccctcagaagatccctataggggkccaggtgcagtggcttatgcctgtaatcccagcactttggaaggccaaggcgggtggatcacctgaggtcaggagttcaagaccaacctggccaacatggtgaaaccctgtctcgactaaaaatacaaaaattagctgggcgtattggcatgcgcttgtaatcctagctacttggaaggcggaggcaggagaatcgcttgaacctgggaggcagaggttgcagtgagctgagattgccccactttactccagcctgcctgggtgacagagcaagactccgtctcaaaaagagaaaaagatcccataaggattacgtcccagtcacccatagcagtaatgaccactgggatgggctttcctccctcactgttgtattcttcccagttgctcaatcctgtttcttggg

SEQ ID NO: 65908 - DNA, 460 bp, Homo sapiens
taacacgttgctaaacatccaaaggcagccagtagatttccaaaaccggaactctccgtttgctatcacctctgcccttctccagggtattgcattgattcaaatgctataaatcaggggtccctaaccccaggccatggaccggtaccttcacttgcttacccaccactcacttcctgttctgtggcctgttaggaatcgggccacacagcagagggtgagcagcargcaggcaagccagccaagcttcatctgtgtttacagccgctccccatcactcacattactgtctgagctccatcttctgtcagatcggcagtggcattagattctcataggagcatgaacctggtgagctgcacatgagagggacctaggttgcatgctctttatgagaatctaatgcttgatgatctgtcactgtctctcatcaccccaaatgggaccatctagttgtagg

SEQ ID NO: 65909 - DNA, 1359 bp, Homo sapiens
ttggtcttataaagtcattgctcactacagccgtgaaaagactggccccaagccaaacaacaacaacaaaaaaatagcaacaaaaacccctgccggccgggtgtggtggctcacgcctgtaatcccagcactttaggaggctgaggcaagcagatcatgaggtcacgagattgagaccatcctggccaacatggtgaaatcccgtctccactaaaaatacaaaaaaattagccgggcgtggtggcccgcgcctgtagtcctagctgctcaggwggctgaggcaggagaattgcttgtacctgggaggcggaggttgcagtgaggtgagattgcaccactgcactccagcccggtgacagagtgagactccgcctcaaaacaaaaaacaaaaccctgccaagatcataatgaggtggaacagaaatggaacggagcttcagtgaaataaagatgatataagcaggaggccattcaaagcagctgcaatgataaatactatagggcttacagaagcccttcagaggctcacacaatcgtttgagaacatctgggagacagtaagcctcatcaggtcccaggaggaccattcccatttaggcagcatggatcgtattccctgaacgcaggcggaaggagttttgataccatatagtttagtacctatttatcctgtgctgctttgcttggttttcagtttcatggctgggatcccccactccccatagaagctcgggaactgtgagctggataaaggcctcctcccaaaagaccaggttctaatatctggaacttttgaacgttgccataaaggaacatggtctttgcagatgtgattaaattaagaatcttgatgtagagaggttatcctgggtgacctgggatatccaatcacaagtatccttataagagacaggcaggagatcatcttcacagagcacatgtaagacagaggcacagattggagtgatgtggccacaagccaaggaatgccagagaatgccagcagccaccacaagctagaagaggcaaggaacagattccacaaacagattctacccctgagccttcaaggggaacgtggccctgcagagagcatgagggagtaagtttatgttgttttaagccacagagtttgtgataatttgtcctagcagccctaagaaattaatacaggctgtaaattttctgagaggtggggtgatgtgttccctgttcctgtcttctgcacagtatgcatgtttctgcacagaacaggcactcaaatacccgagtgcttgaactgacttgacttcttcactggttcagaaattcagagcctaaagatttggatataaaattttattggaagaacagtgagac

SEQ ID NO: 65910 - DNA, 1359 bp, Homo sapiens
ttggtcttataaagtcattgctcactacagccgtgaaaagactggccccaagccaaacaacaacaacaaaaaaatagcaacaaaaacccctgccggccgggtgtggtggctcacgcctgtaatcccagcactttaggaggctgaggcaagcagatcatgaggtcacgagattgagaccatcctggccaacatggtgaaatcccgtctccactaaaaatacaaaaaaattagccgggcgtggtggcccgcgcctgtagtcctagctgctcaggtggctgaggcaggagaattgcttgtacctgggaggcggaggttgcagtgaggtgagattgcaccactgcactccagcccggtgacagaktgagactccgcctcaaaacaaaaaacaaaaccctgccaagatcataatgaggtggaacagaaatggaacggagcttcagtgaaataaagatgatataagcaggaggccattcaaagcagctgcaatgataaatactatagggcttacagaagcccttcagaggctcacacaatcgtttgagaacatctgggagacagtaagcctcatcaggtcccaggaggaccattcccatttaggcagcatggatcgtattccctgaacgcaggcggaaggagttttgataccatatagtttagtacctatttatcctgtgctgctttgcttggttttcagtttcatggctgggatcccccactccccatagaagctcgggaactgtgagctggataaaggcctcctcccaaaagaccaggttctaatatctggaacttttgaacgttgccataaaggaacatggtctttgcagatgtgattaaattaagaatcttgatgtagagaggttatcctgggtgacctgggatatccaatcacaagtatccttataagagacaggcaggagatcatcttcacagagcacatgtaagacagaggcacagattggagtgatgtggccacaagccaaggaatgccagagaatgccagcagccaccacaagctagaagaggcaaggaacagattccacaaacagattctacccctgagccttcaaggggaacgtggccctgcagagagcatgagggagtaagtttatgttgttttaagccacagagtttgtgataatttgtcctagcagccctaagaaattaatacaggctgtaaattttctgagaggtggggtgatgtgttccctgttcctgtcttctgcacagtatgcatgtttctgcacagaacaggcactcaaatacccgagtgcttgaactgacttgacttcttcactggttcagaaattcagagcctaaagatttggatataaaattttattggaagaacagtgagac

SEQ ID NO: 65911 - DNA, 753 bp, Homo sapiens
tgtgttattgtggggcaagttacttatcctttcttgagcctcagctccctcttctgtaaaatggggttactgtttgtctcaggatgtagagataacatttgcaaaggttcttttttgttttgttttgttttttgtgacagagtcttgctctgtcgcccaggctggagtgcagtagcgtgacctcagctcactgcaaccttcatctcctgggttcaagtgattctcctgcctcagcctcccgagtagctggcattacaggcatgcaccaccacacccagctaacttttgtatttttagtagagacggggtttcaccatgttggccagactgggctcgaactcctgacctcaagtgatccgcctgcctcggcctcccaaagtgctaggattaccggcatgagccaccgtgcccagcccacaaaggtcttaactcagaaacattagctactcattgttagccgtaattagttcttatttagtattttcttctgcatgcaaaacttcagagaaaaaaatgggttctttcctatagatgctcgtcttcttttcctratagttgttccacaggcaactcctcattatggcaagaatttcctgtgattctttgatgaaaatgagataattgaattttgtttaaattagttcaacatgggcgactccaggtagttcctgcacagggggcccatgaaggatgccaagaaaactgaagaagggttaacttgggttaacttgtgaggtattgaactgaatttgg

SEQ ID NO: 65912 - DNA, 1105 bp, Homo sapiens
tcccaaagaatttcttgacagtctttatagctgtggcttaataaagcacctagaagtagaacagagtcaaaggggatgacacttgttgactccattagtctaaagactccttatgatatcagctttgaggcttttcaaaacgaatctagtacatatagcctatgatgattgacacttgatgaaagaggcctaactgctaaatacttttgcctgacctggaaagtaaagacatcttccttgtttttttaaggaatttgtttcctcggagtctgtcactccagaagataatgatggatttaaaccaccccgagagcatctgaactctaaaaccaagggagcacaaagtaggctttgtttcttctgtgaatgcctacctcttctgcctgtttctctgtctcttgctcaatacctgtagctcattttcttagattccataataaacatgctgcatttgtcagaaaggttacaacttgtctacataagagatcagcaaaatatcgtgtgtgggccaaatctggccctctacctgttcagtatggcatgtgagctaagaatgatatttatgtttttaaatagttgaaaaaaatcagaaggtgataatattttgacacttgaaaattatatgaaattacaattttagtgtccagaaataaagttttggccaggtgcagtagctcacgcccgtaatcttagcactttgggaagccaaggcaggagggctgcttgaggctatgagtctgggcaatgtagcaagatcttgtctcaacaacaacaaaatagccaggtgtggtggtgcacacctgaggtcttagctactcagggggctgaggtgggaggattgttgaggtcaggagtttgaggttacagtgaactatgattgtgccacggtactgcagcctgggcgatagaacaagaccctgtctcaaaaaaaaaaataaaatgtaagttttattrgaatacagccaatttacattatatattgtctgcttcaacattacagcaagagttgaataatcacaacagagaccaccacatggccagcaaagcctgaaatatttgctattttgccttctgcaggagaactttgctgacctctggtctaatt

SEQ ID NO: 65913 - DNA, 1117 bp, Homo sapiens
aaaatgggaattctcagtaccagtatagaaaagtgagaaaaggaggcaagctttgggcataaagagattaaaaacaaatagttcccccttcctctggccaagggatacctggagattcgttttttcatgttcctttgagctgccagtcaggagtcatatatgggcctgtgttattgttctaatctttgtcttttgtttttttctattttcttaaagaggtcctagattgtatcttttatctcctatactaaatttcttattttagatatcgtatttttaattcacaaagttttctttttgtaattttcctttttatgctttttttaatgaatgctctattttctcttacctttctaaggatagtatatacaattgctttgacttacattttcttttttttccctaagtattttctctgtttacttattatgtggctattttggtgttaaagaatttcctcatttgactggtgattgatttttgactgtgtggatatatttaagatcgagacaccaaactgaattggtagctctgtcagtgggtatcgctcctggactagaaagcttccctgcaggatgacagggtgaacagctaccttttcactaaggatatcctatgtcaatatctataaatcctgtttcctttggttgttcagcttttccagagaaggattctccagtattatcacaagcagttttaaagccaccttctgaaagacagaggaagttttcacactattctgtatgcacacatttacctaatttctccctgtccactttgctccttgacttcctgtgtgcttaccttctttatatttagaacttctctggtcagttttcttcagagattaaacacatagtctccttggggttaaacaaggggagtcagctatgtttgtttacagcggaaacycaaagggtacaactatccctaataaagtcttttatggaatttcctagcccccaaacattcacaaattttatactgaatattacaccaacttcctgggcctttctgtggttccatagagcagattgccatgattctcaccaaaccaccccaacaattgcaagaacattggtaaatatttatcttctcccatctgccttgcatcatc

SEQ ID NO: 65914 - DNA, 1117 bp, Homo sapiens
aaaatgggaattctcagtaccagtatagaaaagtgagaaaaggaggcaagctttgggcataaagagattaaaaacaaatagttcccccttcctctggccaagggatacctggagattcgttttttcatgttcctttgagctgccagtcaggagtcatatatgggcctgtgttattgttctaatctttgtcttttgtttttttctattttcttaaagaggtcctagattgtatcttttatctcctatactaaatttcttattttagatatcgtatttttaattcacaaagttttctttttgtaattttcctttttatgctttttttaatgaatgctctattttctcttacctttctaaggatagtatatacaattgctttgacttacattttcttttttttccctaagtattttctctgtttacttattatgtggctattttggtgttaaagaatttcctcatttgactggtgattgatttttgactgtgtggatatatttaagatcgagacaccaaactgaattggtagctctgtcagtgggtatcgctcctggactagaaagcttccctgcaggatgacagggtgaacagctaccttttcactaaggatatcctatgtcaatatctataaatcctgtttcctttggttgttcagcttttccagagaaggattctccagtattatcacaagcagttttaaagccaccttctgaaagacagaggaagttttcacactattctgtatgcacacatttacctaatttctccctgtccactttgctccttgacttcctgtgtgcttaccttctttatatttagaacttctctggtcagttttcttcagagattaaacacatagtctccttggggttaaacaaggggagtcagctatgtttgtttacagcggaaacccaaagggtacaactatccctaataaagtcttttatggaatttcctagyccccaaacattcacaaattttatactgaatattacaccaacttcctgggcctttctgtggttccatagagcagattgccatgattctcaccaaaccaccccaacaattgcaagaacattggtaaatatttatcttctcccatctgccttgcatcatc

SEQ ID NO: 65915 - DNA, 1117 bp, Homo sapiens
aaaatgggaattctcagtaccagtatagaaaagtgagaaaaggaggcaagctttgggcataaagagattaaaaacaaatagttcccccttcctctggccaagggatacctggagattcgttttttcatgttcctttgagctgccagtcaggagtcatatatgggcctgtgttattgttctaatctttgtcttttgtttttttctattttcttaaagaggtcctagattgtatcttttatctcctatactaaatttcttattttagatatcgtatttttaattcacaaagttttctttttgtaattttcctttttatgctttttttaatgaatgctctattttctcttacctttctaaggatagtatatacaattgctttgacttacattttcttttttttccctaagtattttctctgtttacttattatgtggctattttggtgttaaagaatttcctcatttgactggtgattgatttttgactgtgtggatatatttaagatcgagacaccaaactgaattggtagctctgtcagtgggtatcgctcctggactagaaagcttccctgcaggatgacagggtgaacagctaccttttcactaaggatatcctatgtcaatatctataaatcctgtttcctttggttgttcagcttttccagagaaggattctccagtattatcacaagcagttttaaagccaccttctgaaagacagaggaagttttcacactattctgtatgcacacatttacctaatttctccctgtccactttgctccttgacttcctgtgtgcttaccttctttatatttagaacttctctggtcagttttcttcagagattaaacacatagtctccttggggttaaacaaggggagtcagctatgtttgtttacagcggaaacccaaagggtacaactatccctaataaagtcttttatggaatttcctagcccccaracattcacaaattttatactgaatattacaccaacttcctgggcctttctgtggttccatagagcagattgccatgattctcaccaaaccaccccaacaattgcaagaacattggtaaatatttatcttctcccatctgccttgcatcatc

SEQ ID NO: 65916 - DNA, 1117 bp, Homo sapiens
aaaatgggaattctcagtaccagtatagaaaagtgagaaaaggaggcaagctttgggcataaagagattaaaaacaaatagttcccccttcctctggccaagggatacctggagattcgttttttcatgttcctttgagctgccagtcaggagtcatatatgggcctgtgttattgttctaatctttgtcttttgtttttttctattttcttaaagaggtcctagattgtatcttttatctcctatactaaatttcttattttagatatcgtatttttaattcacaaagttttctttttgtaattttcctttttatgctttttttaatgaatgctctattttctcttacctttctaaggatagtatatacaattgctttgacttacattttcttttttttccctaagtattttctctgtttacttattatgtggctattttggtgttaaagaatttcctcatttgactggtgattgatttttgactgtgtggatatatttaagatcgagacaccaaactgaattggtagctctgtcagtgggtatcgctcctggactagaaagcttccctgcaggatgacagggtgaacagctaccttttcactaaggatatcctatgtcaatatctataaatcctgtttcctttggttgttcagcttttccagagaaggattctccagtattatcacaagcagttttaaagccaccttctgaaagacagaggaagttttcacactattctgtatgcacacatttacctaatttctccctgtccactttgctccttgacttcctgtgtgcttaccttctttatatttagaacttctctggtcagttttcttcagagattaaacacatagtctccttggggttaaacaaggggagtcagctatgtttgtttacagcggaaacccaaagggtacaactatccctaataaagtcttttatggaatttcctagcccccaaacattcacaaattttatactgaatattacaccaacttcctgrgcctttctgtggttccatagagcagattgccatgattctcaccaaaccaccccaacaattgcaagaacattggtaaatatttatcttctcccatctgccttgcatcatc

SEQ ID NO: 65917 - DNA, 1117 bp, Homo sapiens
aaaatgggaattctcagtaccagtatagaaaagtgagaaaaggaggcaagctttgggcataaagagattaaaaacaaatagttcccccttcctctggccaagggatacctggagattcgttttttcatgttcctttgagctgccagtcaggagtcatatatgggcctgtgttattgttctaatctttgtcttttgtttttttctattttcttaaagaggtcctagattgtatcttttatctcctatactaaatttcttattttagatatcgtatttttaattcacaaagttttctttttgtaattttcctttttatgctttttttaatgaatgctctattttctcttacctttctaaggatagtatatacaattgctttgacttacattttcttttttttccctaagtattttctctgtttacttattatgtggctattttggtgttaaagaatttcctcatttgactggtgattgatttttgactgtgtggatatatttaagatcgagacaccaaactgaattggtagctctgtcagtgggtatcgctcctggactagaaagcttccctgcaggatgacagggtgaacagctaccttttcactaaggatatcctatgtcaatatctataaatcctgtttcctttggttgttcagcttttccagagaaggattctccagtattatcacaagcagttttaaagccaccttctgaaagacagaggaagttttcacactattctgtatgcacacatttacctaatttctccctgtccactttgctccttgacttcctgtgtgcttaccttctttatatttagaacttctctggtcagttttcttcagagattaaacacatagtctccttggggttaaacaaggggagtcagctatgtttgtttacagcggaaacccaaagggtacaactatccctaataaagtcttttatggaatttcctagcccccaaacattcacaaattttatactgaatattacaccaacttcctgggcctttctgtggttccatagagcagattgccatgattctyaccaaaccaccccaacaattgcaagaacattggtaaatatttatcttctcccatctgccttgcatcatc

SEQ ID NO: 65918 - DNA, 930 bp, Homo sapiens
tgctgattacccaagaggtgcactgatttccccaggtgagaagtagctccaccacaaattaactttagcaactgggaaaatttgttctattgatttttaatttggggcttatatctaaaaatcattgcttttctattttccagtccagtacgtcccggtgcttacaacgtgttacttctgcctggtgtcacaggatcctctaacttgacttgtctctgctgcttgggagaatgtctgtctctgttactggttcttaggtgcccacatggaaaattgttttgccatataaactatatttcaggttatattatctcaaacataccctctatatttggtgaaaatccatccagttatttgcatatgatgcaagagcagacaatccaataaacacaatctttatttgtatagacatctaccatccaccctacaatgcattatttgtggcaaagaacttataaacagcaatccataatcctttctcttttcatttggaaacaaaacaataaaattatataaataaacccattttgtttaatgctgcacacataaattgtaatatatgttaagatgaattcagtctaaaaacaaacataatgcagataatttcatagtttgttaacacataattgcataattcctgtaaagaargaagtgcagaaagtttcttattaaatgaggaaaaacagaatattttttaaattgtagtaaaaatcacttttcaattatttacaaaaatattttgtattaatagcttaaaatcatttttgtgttattctatggaaaaaaatgacaaaatggtgttaaattcctaaagataattttcctgggattatgtttttcttttaaaagaatttgtgaatcggatacaaaagtgcacagtgaaaggtgcctcccaaaagaaaccaagaaacatgcccagattctgaactt

SEQ ID NO: 65919 - DNA, 1973 bp, Homo sapiens
tggggatactattctatacagaggactaattcacaaagttccctaaatgcattattctaagtatctaaagttctttgctattttggccctgccagccttttacatctcattccttcttcacaccctacatcctagccacactgaagaatctcccggggtctgtgtcctgcccggcttctggtgtccctggctttcttgtgctcttctctcaggctgaaacatcccttctcctatttacacctggcttgtttttttctccccctggggaattccttctagaaccttctcacttgtcagttcctggataatccttccttgatggcccccacccctagttccattaggaagatctaggtccctccttatcctttctccacctttccactccatagctgtatcataatatgtaccacaggacgttgcagctcgccgaccctgggggcccctctgactgactgtcagttccttcagcgcaggctgtgtgccttggcgcttatcacaatatctagctcctccacctggaatgaaaaggtgagtgaatacaacttacagtcagcttgagaaagtgaagctaaggcacagggaagccaggagccaacctgccctaggtcgagcagggctcccacggtgagattccccagactgagctgtaagaaatctgcccatgaaccacatgagctcaagtccttccagtgctgttttgttcttgaagcagtgcattttggggcagagtagaggagcagatgcatctcttccaaaccccaacaggacgggggcaagggctggacacatcccagaaacgagaggcatgtcatgctcatgctgttccatgtggtggctccagagatggtgttgctgtgtggctcatggtgacatggccctgcctgtcactctgtggccccaaatggcatgtacccaatgacagacgtgtatgtcaaaccacgaaagacagcagcctgggggagcttggggcagcttcagcagatctgaaataagatgtcaaaatcggcccctagaagctgggtatgtttttggcctcaccatcctgctcctccaggagtcaattctcagccagctctgtgccaccacactggtgggccactctgctaggcctggcaggtgtgagaagggcctcagagccttgtgaaggatcaggacttaagacaccacatccttcagtaccctgccgtcttatctggatcctctgggggctgaccttaagggcgagatggtggaagaggaactgtctactttgcagttactctacccaaagctccctacacctaggaaccccctacacctacacctacactctgtggcatcttcycttcataagagtaattaccagcacattgcagtggctgaaattaactgagaacatacgtatcaggatctgtgctaggctatttataggattatctcatttaattatcactataatcttatagagtaggtgctgttttttttttttttttttgacggagttttactcgttgcccaggctggagtgcagtggcatgatctcgctctgggattacaggcgtgagccaccgtgccctgccgagtaggtgctattattgcttctattttgaagatgagatgatccagtctaaattagtccagtcccttgcccatgtttcctcaactaatgagtgttgaggcagggactcagacacaagctttaatgtgcttttagccacacgatactgcatcatgcaagacctggagagaccatgggagcaaggacaagcgggatcaaatggagccaagcgacgcaagggtacctgtgggagccccatcacaggggcctcgtgttcctcccttgacccggacaataagaaaccaaaagaaactggctgggacatttctcacttcactccctcagactgagtgtaggatcaggctcacataaacagagttctcttggctactaagaggcactatctgaactcaaagaaggagtgtgtaaccat

SEQ ID NO: 65920 - DNA, 1973 bp, Homo sapiens
tggggatactattctatacagaggactaattcacaaagttccctaaatgcattattctaagtatctaaagttctttgctattttggccctgccagccttttacatctcattccttcttcacaccctacatcctagccacactgaagaatctcccggggtctgtgtcctgcccggcttctggtgtccctggctttcttgtgctcttctctcaggctgaaacatcccttctcctatttacacctggcttgtttttttctccccctggggaattccttctagaaccttctcacttgtcagttcctggataatccttccttgatggcccccacccctagttccattaggaagatctaggtccctccttatcctttctccacctttccactccatagctgtatcataatatgtaccacaggacgttgcagctcgccgaccctgggggcccctctgactgactgtcagttccttcagcgcaggctgtgtgccttggcgcttatcacaatatctagctcctccacctggaatgaaaaggtgagtgaatacaacttacagtcagcttgagaaagtgaagctaaggcacagggaagccaggagccaacctgccctaggtcgagcagggctcccacggtgagattccccagactgagctgtaagaaatctgcccatgaaccacatgagctcaagtccttccagtgctgttttgttcttgaagcagtgcattttggggcagagtagaggagcagatgcatctcttccaaaccccaacaggacgggggcaagggctggacacatcccagaaacgagaggcatgtcatgctcatgctgttccatgtggtggctccagagatggtgttgctgtgtggctcatggtgacatggccctgcctgtcactctgtggccccaaatggcatgtacccaatgacagacgtgtatgtcaaaccacgaaagacagcagcctgggggagcttggggcagcttcagcagatctgaaataagatgtcaaaatcggcccctagaagctgggtatgtttttggcctcaccatcctgctcctccaggagtcaattctcagccagctctgtgccaccacactggtgggccactctgctaggcctggcaggtgtgagaagggcctcagagccttgtgaaggatcaggacttaagacaccacatccttcagtaccctgccgtcttatctggatcctctgggggctgaccttaagggcgagatggtggaagaggaactgtctactttgcagttactctacccaaagctccctacacctaggaaccccctacacctacacctacactctgtggcatcttcccttcataagagtaattaccagcacattgcagtggctgaaattaactgagaacatacgtatcaggatctgtgctaggctatttataggattatctcatttaattatcactataatcttatagagtaggtgctgttttttttttttttttttgacggagttttactcgttgcccaggctggagtgcagtggcatgatctcgctctgggattacaggcgtgagccaccgtgccctgccgartaggtgctattattgcttctattttgaagatgagatgatccagtctaaattagtccagtcccttgcccatgtttcctcaactaatgagtgttgaggcagggactcagacacaagctttaatgtgcttttagccacacgatactgcatcatgcaagacctggagagaccatgggagcaaggacaagcgggatcaaatggagccaagcgacgcaagggtacctgtgggagccccatcacaggggcctcgtgttcctcccttgacccggacaataagaaaccaaaagaaactggctgggacatttctcacttcactccctcagactgagtgtaggatcaggctcacataaacagagttctcttggctactaagaggcactatctgaactcaaagaaggagtgtgtaaccat

SEQ ID NO: 65921 - DNA, 1973 bp, Homo sapiens
tggggatactattctatacagaggactaattcacaaagttccctaaatgcattattctaagtatctaaagttctttgctattttggccctgccagccttttacatctcattccttcttcacaccctacatcctagccacactgaagaatctcccggggtctgtgtcctgcccggcttctggtgtccctggctttcttgtgctcttctctcaggctgaaacatcccttctcctatttacacctggcttgtttttttctccccctggggaattccttctagaaccttctcacttgtcagttcctggataatccttccttgatggcccccacccctagttccattaggaagatctaggtccctccttatcctttctccacctttccactccatagctgtatcataatatgtaccacaggacgttgcagctcgccgaccctgggggcccctctgactgactgtcagttccttcagcgcaggctgtgtgccttggcgcttatcacaatatctagctcctccacctggaatgaaaaggtgagtgaatacaacttacagtcagcttgagaaagtgaagctaaggcacagggaagccaggagccaacctgccctaggtcgagcagggctcccacggtgagattccccagactgagctgtaagaaatctgcccatgaaccacatgagctcaagtccttccagtgctgttttgttcttgaagcagtgcattttggggcagagtagaggagcagatgcatctcttccaaaccccaacaggacgggggcaagggctggacacatcccagaaacgagaggcatgtcatgctcatgctgttccatgtggtggctccagagatggtgttgctgtgtggctcatggtgacatggccctgcctgtcactctgtggccccaaatggcatgtacccaatgacagacgtgtatgtcaaaccacgaaagacagcagcctgggggagcttggggcagcttcagcagatctgaaataagatgtcaaaatcggcccctagaagctgggtatgtttttggcctcaccatcctgctcctccaggagtcaattctcagccagctctgtgccaccacactggtgggccactctgctaggcctggcaggtgtgagaagggcctcagagccttgtgaaggatcaggacttaagacaccacatccttcagtaccctgccgtcttatctggatcctctgggggctgaccttaagggcgagatggtggaagaggaactgtctactttgcagttactctacccaaagctccctacacctaggaaccccctacacctacacctacactctgtggcatcttcccttcataagagtaattaccagcacattgcagtggctgaaattaactgagaacatacgtatcaggatctgtgctaggctatttataggattatctcatttaattatcactataatcttatagagtaggtgctgttttttttttttttttttgacggagttttactcgttgcccaggctggagtgcagtggcatgatctcgctctgggattacaggcgtgagccaccgtgccctgccgagtaggtgctattattgcttctattttgaagatgagatgatccagtctaaattagtccagtcccttgcccatgtttcctcaactaatgagtgttgaggcagggactcagacacaagctttaatgtgcttttagccacacgatactgcatcatgcaagacctggagagaccatgggagcaaggacaagcgggatcaaatggagccaagcgaygcaagggtacctgtgggagccccatcacaggggcctcgtgttcctcccttgacccggacaataagaaaccaaaagaaactggctgggacatttctcacttcactccctcagactgagtgtaggatcaggctcacataaacagagttctcttggctactaagaggcactatctgaactcaaagaaggagtgtgtaaccat

SEQ ID NO: 65922 - DNA, 2939 bp, Homo sapiens
caggaggctgaggtgggaggatcacttgagcctggaagttcaaggctgcaatgagctgtgttgtgccactgcatcctagcctgggtgacagaggggaaccctgtcaaaataaataaatgaataaatacaggaaatcttcaaaacctatttaagccactatggttgagttattaagcaaaattaccaaatacatcattgttctatgatatagtttctcaaccttggcactactgacattttgggacagacaattatttgtggcaagggctgtcctgtgcattgtaggatgcgcggcaacatgcctggcctctactcagggatgccagtggcacccccttctcagatgtaacaagcaaaactgtctccaggcattacgaaatgtctcctgtggaacacaattacctctggttaagaaacactggtgtatggggaaaaatgttccgaatgccaactagggaccctagaaatatatattctgtccctcaatgtcctcacccaagagtctcagagggcttcttttcctccttgttcttatgttttctgtctaaccttagccctgcatcagatacttcattttcctcctcccgtcagcttcctgggggagaaagggcaggaaaagcagcttcagggaagctgctttccaactggagcaagtcaaccccaaagacaggagaagtgggggacctgagtggtgttgccatcacaggcaaagtttgcctcttgattcattttgctaaggatccacacccccccagtcacactccacacagagccctgcggcgacatttactcatgcagtcatgggttcatgtgccccatcgcaggccatgaagaacgtggtttgtatcagcttactttctgctcttctggatgattgagggcagccacatgggatcctctggaggtgcccagcacttgcttcttggtcctatatcgaggcctgcttactgttaagagcaaaagagaccaagatgttggctgagcacggtggctcacaccagcaattccagcattttggraagttgaggggggtggatcacctgaagctgggagtttgagaccagcctgatcaacatggagaaaccccctctctactaaaaatacaaaattagctgggcatagtggcacatgcctgtaatcccagctgcttgggaggctgaggcaggagaatcgcttgaacccaggaggcggaggttgtggtgagctgagatcgagccactgcactccagcctgggccacagagcaagactccaccttcaaaagaaagagaccaagatgtgagctgagtggtgaagataaaatctggatgtggaactgtagtgatgcaaaggcagaggggagcaggggagaggctggaggtgaccactcaagacctttaggagacagaaaactgcacagaagactgtctgcccaaggcctagggcccagctttgcccagggaatcgaaacttagagtatgaagcaatgttataaagcaatttttttttagttgtgcaagtgtcaaatgctgtaaatgaaacaaaatcaggcaatgtgatagtgcctgtttgctgggaggatttccgggagaaggtggctatcactttacaatgaaaggtcagagaaggtatctccgaagaggtggcattgaggttgaaacaaaatgacaggaaggagccttccacacaaagactctggggagaggcagaggaaataatgagttcaaaggcatgaaggctaaatgagcgtggggcatgcaaggcagagaaacagcaggtaaacagtggggtaagagaaaaaggcaggccttggatcaagtagggagagacacattatagaaagagcaaatgatccttaccctgatgggctgtctcggctctttgcagtccctctcagtagcagacacccacctgtgcttgatagttttcaccctgtttcataacattgcacctactcagaaaccactgtctctttgtatctgtgatcacttagagtccatcagcttggtgctgactttcttctcttcatgtagacagctgtgttataaaagacccaaagggagagggacaaaacctaaaaaggctactttggggtatatatgagctttggaattacccatctccctgccaggaggtgaggagggaagagttcacagttggcgtgtcccttgagcaagagaagataactcgctcctgctggttctgcaaggtttcagcagtgatggttgttttgtagtagctctgaacttgccaagaaaaacacattgtttaaaacaagccattcattttgagaaaggctattgtgtaataatttctttttcttcaccccttcatccacaaccacgcagagaccatggtcatcaaaataataggtcttttttatttttacttaggggatcccaatttttctcctgtggctatgaacaagggaaaatatagcaaagggaatgctgattggtttattatgcaagtctgtagttgggatgactataaaacaatgaacattattttcataaactacatgaaaaccagtgtcttatattaagcttacataattacagctatgtcattctttatgttcccatgtcaatgttctctgcttcagatgcccctccaagaggacaggaattggacccactttgggtagccttgtacaatgcaacccagcacccagcaacgtcctgaagaggctgctgactgctctggtcgaagtggagcagggcccttcctccctccactggaaagggtgggcaagaagcatcagtgcttctggtatttgactcagtgagacctagatattgcagatctgccatcaaaaatatttgtaaagccgtttgcaccactattatccttctgctccttttaaaacctaacaggcaggcccaacttggaaacttccaagaatgaaacaccaccttcagaaaacgtggtaattgatagaagagtctggtgctactgcat

SEQ ID NO: 65923 - DNA, 2939 bp, Homo sapiens
caggaggctgaggtgggaggatcacttgagcctggaagttcaaggctgcaatgagctgtgttgtgccactgcatcctagcctgggtgacagaggggaaccctgtcaaaataaataaatgaataaatacaggaaatcttcaaaacctatttaagccactatggttgagttattaagcaaaattaccaaatacatcattgttctatgatatagtttctcaaccttggcactactgacattttgggacagacaattatttgtggcaagggctgtcctgtgcattgtaggatgcgcggcaacatgcctggcctctactcagggatgccagtggcacccccttctcagatgtaacaagcaaaactgtctccaggcattacgaaatgtctcctgtggaacacaattacctctggttaagaaacactggtgtatggggaaaaatgttccgaatgccaactagggaccctagaaatatatattctgtccctcaatgtcctcacccaagagtctcagagggcttcttttcctccttgttcttatgttttctgtctaaccttagccctgcatcagatacttcattttcctcctcccgtcagcttcctgggggagaaagggcaggaaaagcagcttcagggaagctgctttccaactggagcaagtcaaccccaaagacaggagaagtgggggacctgagtggtgttgccatcacaggcaaagtttgcctcttgattcattttgctaaggatccacacccccccagtcacactccacacagagccctgcggcgacatttactcatgcagtcatgggttcatgtgccccatcgcaggccatgaagaacgtggtttgtatcagcttactttctgctcttctggatgattgagggcagccacatgggatcctctggaggtgcccagcacttgcttcttggtcctatatcgaggcctgcttactgttaagagcaaaagagaccaagatgttggctgagcacggtggctcacaccagcaattccagcattttggaaagttgaggggggtggatcacctgaagctgggagtttgagaccagcctgatcaacatggagaaaccccctctctactaaaaatacaaaattagctgggcatagtggcacatgcctgtaatcccagctgcttgggaggctgaggcaggagaatygcttgaacccaggaggcggaggttgtggtgagctgagatcgagccactgcactccagcctgggccacagagcaagactccaccttcaaaagaaagagaccaagatgtgagctgagtggtgaagataaaatctggatgtggaactgtagtgatgcaaaggcagaggggagcaggggagaggctggaggtgaccactcaagacctttaggagacagaaaactgcacagaagactgtctgcccaaggcctagggcccagctttgcccagggaatcgaaacttagagtatgaagcaatgttataaagcaatttttttttagttgtgcaagtgtcaaatgctgtaaatgaaacaaaatcaggcaatgtgatagtgcctgtttgctgggaggatttccgggagaaggtggctatcactttacaatgaaaggtcagagaaggtatctccgaagaggtggcattgaggttgaaacaaaatgacaggaaggagccttccacacaaagactctggggagaggcagaggaaataatgagttcaaaggcatgaaggctaaatgagcgtggggcatgcaaggcagagaaacagcaggtaaacagtggggtaagagaaaaaggcaggccttggatcaagtagggagagacacattatagaaagagcaaatgatccttaccctgatgggctgtctcggctctttgcagtccctctcagtagcagacacccacctgtgcttgatagttttcaccctgtttcataacattgcacctactcagaaaccactgtctctttgtatctgtgatcacttagagtccatcagcttggtgctgactttcttctcttcatgtagacagctgtgttataaaagacccaaagggagagggacaaaacctaaaaaggctactttggggtatatatgagctttggaattacccatctccctgccaggaggtgaggagggaagagttcacagttggcgtgtcccttgagcaagagaagataactcgctcctgctggttctgcaaggtttcagcagtgatggttgttttgtagtagctctgaacttgccaagaaaaacacattgtttaaaacaagccattcattttgagaaaggctattgtgtaataatttctttttcttcaccccttcatccacaaccacgcagagaccatggtcatcaaaataataggtcttttttatttttacttaggggatcccaatttttctcctgtggctatgaacaagggaaaatatagcaaagggaatgctgattggtttattatgcaagtctgtagttgggatgactataaaacaatgaacattattttcataaactacatgaaaaccagtgtcttatattaagcttacataattacagctatgtcattctttatgttcccatgtcaatgttctctgcttcagatgcccctccaagaggacaggaattggacccactttgggtagccttgtacaatgcaacccagcacccagcaacgtcctgaagaggctgctgactgctctggtcgaagtggagcagggcccttcctccctccactggaaagggtgggcaagaagcatcagtgcttctggtatttgactcagtgagacctagatattgcagatctgccatcaaaaatatttgtaaagccgtttgcaccactattatccttctgctccttttaaaacctaacaggcaggcccaacttggaaacttccaagaatgaaacaccaccttcagaaaacgtggtaattgatagaagagtctggtgctactgcat

SEQ ID NO: 65924 - DNA, 715 bp, Homo sapiens
tgctgaaggctttattctatgaagacctttgttgctgaaggtatgaaggatgtggtagtaatggaaagtattttactgatcttttatttccttttaaattttttgagacagagtctcgctctgtcatccacgttggagtgtggtagcgtgatctcagctcactgcaacccctgcctcctgggtttaagcacttctcctgcctcagcctcccgagtagctgggactacaggcgtctgccacccatgtctggctaattttgtatttttagtagagacagggtttcaccatattggccaggctggtctcgaactcctgaccttgtgatctgcccacctcgacctcccagaatgctgggattacaggcatgagccactgcgcccggcactgatctttatttctaaagagcttttctccccttgcaggatctttggtgtcaagatactataaaattccagtaaatatggctgcaaggaagggtaaagagaaagaaagagagacaaaataaagtaccagaagcaaatagtcctttccatattcatgtcacgtccrtaagattcaagaaacggatattgaagtggaagaaccagactttctcttcattcctatgatctaattaaatgtattttcacttaaaaaaggataacaatattagatcttaatgggattaacctaactgaaatttatttgactttgccttgaccataaagattatgaa

SEQ ID NO: 65925 - DNA, 1025 bp, Homo sapiens
cttgttcccaagcctcagtgcatctttgcctgtgattagtggaaatgacagttgtgctgtctcttctatagtggcttaaagctttgcttcctaagaaagaatgttctggggtagtgggcaaggctttttgccagtcccccagcagcaactgattattacccgaagcctgcactatgcagcagggtctctctcatcttctgcccagttcccagtctttcccttcaacagacaaagttccgtgtaaaagagtttaagaaatgaccatttcttgtgcctgaggcctcctgctattctaaacttacaatttacccacatttagcctttaagaatttattaaagtttagctgatttcttatatgattatatggtgacttcctcttcattttttgattggtcaaagatgaaactcattttgtgtcctttccatccttgagggcttgtccctctctggaaccagtttacttggttgccatgcaacttcatctctgatgggctgaaaacaacttatgactttgtagataattcaaatatttctcaccttaagggtgggagcatcattcttttcacctttctacatcctaatcagaagctgaaaatcacactgagtttttagaaattactcttccaagctgcaaaatattaagaatttccattttaaatcytagcagaaaaaaattactctagttggagtttcaccaaataatcttgtaaaatttgaagttttcttgagagacacctgccttcatctggtgtgaattatgaaaaccttagttacacttggaagagtaaatccttacaaatcaatatatttaacattggtaaacagacaagcaataaaaataaattataaagaaacaacaaaaataaatcatttagatatctaacatgatatatatgaggatttatcaaattttacctcatggtttaataatttcttcaaattaaagagaataccttaacactaatctgcctttaacaaataaaatttattgcttatagttcatacatgttgtcttattaatgca

SEQ ID NO: 65926 - DNA, 1025 bp, Homo sapiens
cttgttcccaagcctcagtgcatctttgcctgtgattagtggaaatgacagttgtgctgtctcttctatagtggcttaaagctttgcttcctaagaaagaatgttctggggtagtgggcaaggctttttgccagtcccccagcagcaactgattattacccgaagcctgcactatgcagcagggtctctctcatcttctgcccagttcccagtctttcccttcaacagacaaagttccgtgtaaaagagtttaagaaatgaccatttcttgtgcctgaggcctcctgctattctaaacttacaatttacccacatttagcctttaagaatttattaaagtttagctgatttcttatatgattatatggtgacttcctcttcattttttgattggtcaaagatgaaactcattttgtgtcctttccatccttgagggcttgtccctctctggaaccagtttacttggttgccatgcaacttcatctctgatgggctgaaaacaacttatgactttgtagataattcaaatatttctcaccttaagggtgggagcatcattcttttcacctttctacatcctaatcagaagctgaaaatcacactgagtttttagaaattactcttccaagctgcaaaatattaagaatttccattttaaatcttagcagaaaaaaattactctagttggagtttcaccaaataatcttgtaaaatttgaagttttcttgagagacacctgccttcatctggtgtgaattatgaaaaccttagttacacttggaagagtaaatccttacaaatcaatatatttaacattggtaaacagacaagcaataaaaataaattataaagaaacaacaaaaataaatcatttagatatctaacatgatatatatgaggatttatcaaattttacctcatggtttaataatttcttcaaattaragagaataccttaacactaatctgcctttaacaaataaaatttattgcttatagttcatacatgttgtcttattaatgca

SEQ ID NO: 65927 - DNA, 577 bp, Homo sapiens
tgaaawgtttagttgggaaaggtgttctagaatagccacattggatgggagggtagcaatgtttctccactcaggtgaggggagagtatttataaagctcgatgaatatctccaaaatttaggagtggcacaggagtctgatgtttaattaattattttccagaattagagtaaaagacaaaggctgataagctgttttgctggtaaattaaagaacagctgctaatacatttagattgtcaatttcatgggtttgtgaccactgtagttgtataagaacccacattcagtggatccttcaaaactttactgttactgtcttgaaatccttaataattttatctttgaatttgtgttttgtaagtgaactctgatgggacaatggagcatgagccaggagcatggggcctcagctcacatgtgatctcaccttttgccatcttgctcccccactgatacctagagaccactacaccacctcttacccagcaggggtctgaggccaaatacaaggagactcagggtcatatcctgagtaattttgagcgctctgtgagcatccctgtttccaaggcag

SEQ ID NO: 65928 - DNA, 577 bp, Homo sapiens
tgaaaagtttagttgggaaaggtgttctagaatagccacattggatgggaggrtagcaatgtttctccactcaggtgaggggagagtatttataaagctcgatgaatatctccaaaatttaggagtggcacaggagtctgatgtttaattaattattttccagaattagagtaaaagacaaaggctgataagctgttttgctggtaaattaaagaacagctgctaatacatttagattgtcaatttcatgggtttgtgaccactgtagttgtataagaacccacattcagtggatccttcaaaactttactgttactgtcttgaaatccttaataattttatctttgaatttgtgttttgtaagtgaactctgatgggacaatggagcatgagccaggagcatggggcctcagctcacatgtgatctcaccttttgccatcttgctcccccactgatacctagagaccactacaccacctcttacccagcaggggtctgaggccaaatacaaggagactcagggtcatatcctgagtaattttgagcgctctgtgagcatccctgtttccaaggcag

SEQ ID NO: 65929 - DNA, 577 bp, Homo sapiens
tgaaaagtttagttgggaaaggtgttctagaatagccacattggatgggagggtagcaatgtttctccactcaggtgaggrgagagtatttataaagctcgatgaatatctccaaaatttaggagtggcacaggagtctgatgtttaattaattattttccagaattagagtaaaagacaaaggctgataagctgttttgctggtaaattaaagaacagctgctaatacatttagattgtcaatttcatgggtttgtgaccactgtagttgtataagaacccacattcagtggatccttcaaaactttactgttactgtcttgaaatccttaataattttatctttgaatttgtgttttgtaagtgaactctgatgggacaatggagcatgagccaggagcatggggcctcagctcacatgtgatctcaccttttgccatcttgctcccccactgatacctagagaccactacaccacctcttacccagcaggggtctgaggccaaatacaaggagactcagggtcatatcctgagtaattttgagcgctctgtgagcatccctgtttccaaggcag

SEQ ID NO: 65930 - DNA, 577 bp, Homo sapiens
tgaaaagtttagttgggaaaggtgttctagaatagccacattggatgggagggtagcaatgtttctccactcaggtgaggggagagtatttataaagctcgatgaatatctccaaaatttaggagtggcacaggagtctgatgtttaattaattattttccagaattagagtaaaagacaaaggctgataagctgttttgctggtaaattaaagaacagckgctaatacatttagattgtcaatttcatgggtttgtgaccactgtagttgtataagaacccacattcagtggatccttcaaaactttactgttactgtcttgaaatccttaataattttatctttgaatttgtgttttgtaagtgaactctgatgggacaatggagcatgagccaggagcatggggcctcagctcacatgtgatctcaccttttgccatcttgctcccccactgatacctagagaccactacaccacctcttacccagcaggggtctgaggccaaatacaaggagactcagggtcatatcctgagtaattttgagcgctctgtgagcatccctgtttccaaggcag

SEQ ID NO: 65931 - DNA, 663 bp, Homo sapiens
tgcatatctaacccgtttttcagccagcatgctacagcaaaggaagattcatgttgtccagggctatttctttaaaacagtatggaaattacttttaccataaattaggttgtgctttaatgctgagaaaggtctattttgccttcattttgacccatgacatacttagccttacaacagcataatgagcataatgaggtcaaaactaacactgcaaaataaaacacacacccccacacaaacacacattatttctcaaggaagatgaaaaaaaaaaaaaaggtcacattgattttcttttttttaaagcgggacattctcactacttttttcacctgaagattgaaaaggaaactcatttcagtttgtaacattgcactgactgttccagacacaaaatgaatcaagtctcctgttggattatgtggttagcatttcttctcttctctggtgagataattcgttacttaggacagctgtggtataaaaactcaaacattgtcttttgcagratggatttgaaaagtgggcccccattctatttttgttagaaaataataaaatcacaaattttatcatgtatcaaaaatgaaaagtgaaatataaatgtgaaaggtctgatatttacttaatgaatatttaccaaatacttagcatttgcat

SEQ ID NO: 65932 - DNA, 1231 bp, Homo sapiens
ttgaaatggtgaacagctattcttttctgcctactagggatgagaaagtacaggctgttttcaaattaaaaccagaagggccaaagatgtaaataaatgtgactgatagaggacagcataaaagaaaaaataagtttttttttttaaagcaggactgtgagaattttaatagagtctagattggtgaataaaaaagaatagaatatcccaaaaagtgtatattaatgctcaaaccagtaaagaaatatgagttaccactttgtggaaaaataacatgggtagattcatatgcccctactgcgtgtaagattatttttaaagagattaaagcattaaatgtagaaaataaaaccacaaaggctctagaagtaaacataggacatttcctttataacctttaagtggttaaggtataagtaattataactaaaagtctagaagctaaaagattaaaaaatgggtatatgtgaatacagtaacaataacttcatgaaaaaatattgtaaacattcacttctcagtcttttggctaagatcaagtgaaatattgtaaacaaattgaaactacaagtaatcaagtaaagaataatatttactcttcatatagtataatttctttactatatgaagtgtttctagaaatttatgagcaaaagactcaaactcaaaagaaatataggcaagtatataaacaattgatagaaagtaaatgcaggccgtcgcggtggctcacacctgtaatcccagcactttgggaggctgaggcggtttgatcacgaggtcaggagatcgagaccatcctggctaaagcggtgaaaccccgtctctactaaaaaaaattaaccgggttttgtggcgggtgcctgtagtcccagctactcgggaggctgaggcaggagaatggcgtgaacccgggaggtggagcttgcagtgagcccagaatggcgtgaacccagaaggtggagcttgaagtgagccaagattgtgccactgcactccagcctgggcaacagagtgagactccatctcaaaaaaataaataaataaaataaaaataaaaaattaagtaaatgcaaatgacttttaagtatayaaaagtgtattcaagttcaaccataataaaactacaaataaaactctatcaatattctttcacttattagaatagcatatttaataacacaaacttcagcaaacatatagagaagtaggtactaccattcatgcatcc

SEQ ID NO: 65933 - DNA, 562 bp, Homo sapiens
cacagaaattctatgagccaggcagaggaactgtttttgttcccattttacttctgtaaaaactgagtctcaaaataactgctccccagaagtatagaatgattaaaggtcagaaacagagcctgcatattttcatatttgttacacttttttagctattgttgtccaagagtactcttacttttgagatactttctttatttcactgttcagaatttttatatttgtatgatttaacaaaataattggtaaatttcatttttggggwttaaaaattaggttgtggaagctacattaggttgtggaagttgtgccccatctgagacaaatcttggattaatcagtgattgattaaattattgaaagtttagttattcaaagaaattggcatagaagtacattaagctaagctttatctggtaagatggagaactaacatgatgtgggcttctttctgtgaccacaaccctggaaatgacacagaaatcagcatctaatactaaaagatgtgagaaacctttgcagttacaaactacagtaaagtctgcgagtagagaaaaaa

SEQ ID NO: 65934 - DNA, 637 bp, Homo sapiens
cacatgaatgcaattgaagtaagagggagaagcagaaggaaataaaaatagagattagagattagggcaagataaaataattagataaaataaaccaagaaattcctattttatttatcatgataagaatgtactttaaaaagaggatgactacataaaatgagttagggaggagtacctctttttctattgtttggaataatttcagaaggaatgataccagttcctctttgtacctctggtagaatttggctgtgaatccgtctggtcctgggcctttttttttggttggyaggctataattactgcctcaatttcagaacttgttattgatctattcagggatttgacttcttcttggtttagtcttgggagagtggatgtgtccaggaatttataaattttttctagattttctagtttatttgtgtagaggtttttatagtattctctgacggtagtttgtatttctgggggatcagtagtgatatcccctttatcattttttattgtgtctatttgagtcttctctcttttcttctttattagtctgggtagtggtctatctattttgttgatctgttcaaaaaaacccctcctggattcattgattttttgaaggacttttcatgtctct

SEQ ID NO: 65935 - DNA, 637 bp, Homo sapiens
cacatgaatgcaattgaagtaagagggagaagcagaaggaaataaaaatagagattagagattagggcaagataaaataattagataaaataaaccaagaaattcctattttatttatcatgataagaatgtactttaaaaagaggatgactacataaaatgagttagggaggagtacctctttttctattgtttggaataatttcagaaggaatgataccagttcctctttgtacctctggtagaatttggctgtgaatccgtctggtcctgggcctttttttttggttggtaggctataattactgcctcaatttcagaacttgttattgatctattcagggatttgacttcttcttggtttagtcttgggagagtggatgtgtccaggaatttataaattttttctagattttctrgtttatttgtgtagaggtttttatagtattctctgacggtagtttgtatttctgggggatcagtagtgatatcccctttatcattttttattgtgtctatttgagtcttctctcttttcttctttattagtctgggtagtggtctatctattttgttgatctgttcaaaaaaacccctcctggattcattgattttttgaaggacttttcatgtctct

SEQ ID NO: 65936 - DNA, 535 bp, Homo sapiens
tgggggagctaggatggagakgggtcagacttaatcctggcaactcagaattccactaacttgtacgggtctcagtttcctcaccgggccccagcataggtctgagggtctgaggtctgtcggtctgagggtcctagggaaatccagccactcaggagcctgagatattttagcatcatggctgggccccctctcccaggggactcatttcccagcaccctctccactgtctccgccccattcctcggagaagaaaaaaattttctttcttttgttaatacttcctgaaacttttgcaggtacagaaaccacaaactgatcggctgacaaaaaggggaagaggagaggcaaccagaaaccttcggggactggttccctccatgcccaggtctcttctccccagcacagctcagcccacagcctggaagtgccagcggggaccttcaccctacacgcatcaggatacggccttgatcccttcccccacagcccggtgtctcagtcctgccaaggaaccaaagcaaggggaggtggg

SEQ ID NO: 65937 - DNA, 535 bp, Homo sapiens
tgggggagctaggatggagaggggtcagacttaatcctggcaactcagaattccactaacttgtacgggtctcagtttcctcaccgggccccagcataggtctgagggtctgaggtctgtyggtctgagggtcctagggaaatccagccactcaggagcctgagatattttagcatcatggctgggccccctctcccaggggactcatttcccagcaccctctccactgtctccgccccattcctcggagaagaaaaaaattttctttcttttgttaatacttcctgaaacttttgcaggtacagaaaccacaaactgatcggctgacaaaaaggggaagaggagaggcaaccagaaaccttcggggactggttccctccatgcccaggtctcttctccccagcacagctcagcccacagcctggaagtgccagcggggaccttcaccctacacgcatcaggatacggccttgatcccttcccccacagcccggtgtctcagtcctgccaaggaaccaaagcaaggggaggtggg

SEQ ID NO: 65938 - DNA, 535 bp, Homo sapiens
tgggggagctaggatggagaggggtcagacttaatcctggcaactcagaattccactaacttgtacgggtctcagtttcctcaccgggccccagcataggtctgagggtctgaggtctgtcggtctgagggtcctagggaaatccagccactcaggagcctgagatattttagcatcrtggctgggccccctctcccaggggactcatttcccagcaccctctccactgtctccgccccattcctcggagaagaaaaaaattttctttcttttgttaatacttcctgaaacttttgcaggtacagaaaccacaaactgatcggctgacaaaaaggggaagaggagaggcaaccagaaaccttcggggactggttccctccatgcccaggtctcttctccccagcacagctcagcccacagcctggaagtgccagcggggaccttcaccctacacgcatcaggatacggccttgatcccttcccccacagcccggtgtctcagtcctgccaaggaaccaaagcaaggggaggtggg

SEQ ID NO: 65939 - DNA, 1117 bp, Homo sapiens
cttggctttaaaaagacataggtgcagtggcatgatgttagttacatagcctttgaagccatgttgtatgaaagagcagttggatattgacgttggctacgaaaaccaatgggtaggcatttagattttggttcagtagaaaatctgaaccatctatcgattaagctctcaaaaactaaatagactgctgcctcctaaataaaatatgtctcccaccatggaaatgtcaagctagggtcacaattcaagtaatgtaaatatgaatctaatgacttccaagatgcttttccaacttaaagtgttagacaagtaccttttaaaacagtataccatttgaattacctgcaaccattttaatatttctgagagggttttttttgtgtgtgctccttctttcatcacatggagagttattttgccttttagggtaaaatataaaaacaaatgcaygtcacaatatgatgtggcaaacgttacccagaagccttagtgatgttgttgcgatggtattagcatgcacagagtatgcaactcgcagctctgctgtgtgcacttgttcttttgctttctctcatgtgttctgctccatatattttaagagagtttaatgtgggtgttccaattcaatcccattagagtactatgtatattattgttactaaaccttgccttcataatcattcctaagtatgtggtctattgaaaagcaatcatttatatctttaggaggatgaatgggaagtcacagatctagaacaataatcaacttgaactcatgctgctagcacaggtatggatttttaatataatctcaggcagggaagtgcttgcaggcatgttttctcagtcaggagctgagagcatatgcacgatggcagacacaaggtaactaccctttggctggttgaaagatgaagtcattataaagctggattttaaaccaaatgtagtgctggctgctgtctgaacttacctaaaacatacactatattttaaaaagaaggctgagagtcacagaagtaaaacaaataaattccaaagttggtgttttatattatcatttatctgcaataagtgataattgatattccaaaaatatactttgctttgaattcaa

SEQ ID NO: 65940 - DNA, 858 bp, Homo sapiens
ttaattaacggtttttcttcctaagggctgggatcataccagtttgcttcactgcagtgcctgaacatagtaggcatagtagattcaataaatctttggttccttggctggttgttgcctgctctgtgctgatgagaaaggagccaggcttccaggattcccttggtgttcttggctccctgctctgtctacctctcccctgcctctatggtaccttcccaggactgtctttgggctgctgcttgcattgatagggtctcttcttcagggctgaggaggctggtcatgggataatgagacccctatacgatgctgcatgggagctggagttggatgggggccagtggaatatccgygcaactctgcatccccctccatctactcatccctggttttgtttctctggagtaaggaatagagcaaggactgggatgggtgagccatgaacagagggtctcagctgaaaagtggaagatgttttattccatgcctggacgtctctcattccctctgcttactttttgctgctgtgaggtcaggggaatttaggagccctgaggaatgctgctgctctccctagcagggcgaggtgaccctccactggctcccatccaaccccacctcccatgctggaggtaaccacagaagaggagagagaagtggacagagcggaaagacaagaacaccaagagaatcctggaagcctggctccttcctcatcaccacacagcaggcaagacacagtaagcaacagataaccaccaaccagccaatgaactcaagatttcttgaatctactgtgcctagaatgttcagtcactgcagtaaaagacactggtacaatccagcctgtgggaa

SEQ ID NO: 65941 - DNA, 981 bp, Homo sapiens
aaactcagatctaagattgttaagtagatatttggggaacttttttatcactttaaatgaaaaatttcagccttactgggcattctggaagcaaaatatgttatgctgatgataaagtgagaaccttaagaatacactcatttgatggcggaaaatgtgatggaccaaaatgcagaagctatacacgtcctgtgagtagtaattttagttacaatgcagtaggaaaatgtggcgcatttaaacatttcttctacctcataatggctttgcaagatacttgtaaagaagcaaatgtctagagccttactttaagaaagttaaacaactttggtgaatgatttggattaagattgttacatccagctatagaaatgtggtttcaatagggttgatgtgagtgagtaccttccttttttgaataccacttaaaacagttaactttttaagtcttgaagatgagaaaaatattgcttatctaatataactattttaatagttatctaatttatagttatctactataactatacattctgaatacttagcatgtactgtgctggggcacatatcttattttcccagctgctaaacgattatcttccttttctccctggtattttaatgcccaagtagamaatggaaaatcatgaaggaaaaatatcacttgtgaaaatcgtggcagttagctttatgaagacacagtggcctctgtggggacatgggatatgcagaaagagatggctagtacagttgttctgtcttctgcagttcagtcagggacatattgagagaggaaagtttaagcaggtacattagaaattgataaccagcccagcattcttagaacagatgggtttagagaacacgagttgtagttccttggcagaatgccatggtggatatgagaaactgtgaactgtgttgaaattgagcttgagcagaaaatgagaatactaaaaatttgaagttcagagggtatgc

SEQ ID NO: 65942 - DNA, 1273 bp, Homo sapiens
tcagggagctgctagcctctgcgatgaataacttgagtcaggctgcaacatgtgaaagaattcagctgatcaggatttataacactagctggattttttgctttctttggggttcatgaagcatggtgttgtgagataccacaggagtcccagagtaaagttacatacctatttctcttccttatttttatttttttggcatgttcatactattttattaccaacatcgttggcatccctgagtatgagagttcagaagaaacttagaggctattgtctgattcaatccttgcagcttacaaaaagaaatgtggggagcagtcactgtgtgactagcctgaggtcactcaggaagttagaggcagaactgcagccagggtcacctctctttactgctactagtgtgctcyttctactgcaccctgatcataaaacatctcccaacccaggaacaaggtctaccgcataggtgggcacagcagcgtgatcactctctcagtcgtctgtactcctcctttgctttgaccaaagacacaggaagggaccttttgccccacataaaacacctctcagaggcttggcaacaacaacagataatagagagcattgacctaagaccaacatttcaaccatggtgtcaaaacaatattttatttcagcaaagaaaaactatgtcacaagtggattattattactaataatcagactagtggtacttgcgaatgacttggtttcatactcacacttggacaactatgcacactgagtataactgaccttatgagaacatcattctcactaagattatgatgtgctttctcacgtgggaactgtacataatattgcgtgtacacttgggaggatgtcctgcctgtgatgttgtctttcaggggaagaagaatggttgagaactgagggtatattaaacatttactcctccagatttttcaagatttctgttaagccagatcagaagaaagccatctatttggattgcatcactctaacctggtaagtcgaattgtctacacagaattataatttcacgatatgtccagattacttaccaagagccaatttgagacaccaacaggactagtaaaacatctttgcactgtgggtagcgttgctatcaaagaccttatacattatgccattcaagaacctttatattaagatccttatggaaaatccttcccaaagtttaaccctatgataaagggtttttttctcctggtaacatagtgggcaattgggaactgtttaacccaat

SEQ ID NO: 65943 - DNA, 1273 bp, Homo sapiens
tcagggagctgctagcctctgcgatgaataacttgagtcaggctgcaacatgtgaaagaattcagctgatcaggatttataacactagctggattttttgctttctttggggttcatgaagcatggtgttgtgagataccacaggagtcccagagtaaagttacatacctatttctcttccttatttttatttttttggcatgttcatactattttattaccaacatcgttggcatccctgagtatgagagttcagaagaaacttagaggctattgtctgattcaatccttgcagcttacaaaaagaaatgtggggagcagtcactgtgtgactagcctgaggtcactcaggaagttagaggcagaactgcagccagggtcacctctctttactgctactagtgtgctccttctactgcaccctgatcataaaacatctcccaacccaggaacaaggtctaccgcataggtgggcacagcagcgtgatcactctctcagtcgtctgtactcctcctttgctttgaccaaagacacaggaagggaccttttgccccacataaaacacctctcagaggcttggcaacaacaacagataatagagagcattgacctaagaccaacatttcaaccatggtgtcaaaacaatattttatttcagcaaagaaaaactatgtcacaagtggattattattactaataatcagactagtggtacttgcgaatgacttggtttcatactcacacttggacaactatgcacactgagtataactgaccttatgagaacatcattctcactaagattatgatgtgctttctcacgtgggaactgtacataatattgcgtgtacacttgggaggatgtcctgcctgtgatgttgtctttcaggggaagaagaatggttgagaactgagggtatattaaacatttactcctccagatttttcaagatttctgttaagccagatcagaagaaasccatctatttggattgcatcactctaacctggtaagtcgaattgtctacacagaattataatttcacgatatgtccagattacttaccaagagccaatttgagacaccaacaggactagtaaaacatctttgcactgtgggtagcgttgctatcaaagaccttatacattatgccattcaagaacctttatattaagatccttatggaaaatccttcccaaagtttaaccctatgataaagggtttttttctcctggtaacatagtgggcaattgggaactgtttaacccaat

SEQ ID NO: 65944 - DNA, 1273 bp, Homo sapiens
tcagggagctgctagcctctgcgatgaataacttgagtcaggctgcaacatgtgaaagaattcagctgatcaggatttataacactagctggattttttgctttctttggggttcatgaagcatggtgttgtgagataccacaggagtcccagagtaaagttacatacctatttctcttccttatttttatttttttggcatgttcatactattttattaccaacatcgttggcatccctgagtatgagagttcagaagaaacttagaggctattgtctgattcaatccttgcagcttacaaaaagaaatgtggggagcagtcactgtgtgactagcctgaggtcactcaggaagttagaggcagaactgcagccagggtcacctctctttactgctactagtgtgctccttctactgcaccctgatcataaaacatctcccaacccaggaacaaggtctaccgcataggtgggcacagcagcgtgatcactctctcagtcgtctgtactcctcctttgctttgaccaaagacacaggaagggaccttttgccccacataaaacacctctcagaggcttggcaacaacaacagataatagagagcattgacctaagaccaacatttcaaccatggtgtcaaaacaatattttatttcagcaaagaaaaactatgtcacaagtggattattattactaataatcagactagtggtacttgcgaatgacttggtttcatactcacacttggacaactatgcacactgagtataactgaccttatgagaacatcattctcactaagattatgatgtgctttctcacgtgggaactgtacataatattgcgtgtacacttgggaggatgtcctgcctgtgatgttgtctttcaggggaagaagaatggttgagaactgagggtatattaaacatttactcctccagatttttcaagatttctgttaagccagatcagaagaaagccatctatttggattgcatcactctaacctggtaagtcgaattgtctacacagaattataatttcacgatatgtccagattacttaccragagccaatttgagacaccaacaggactagtaaaacatctttgcactgtgggtagcgttgctatcaaagaccttatacattatgccattcaagaacctttatattaagatccttatggaaaatccttcccaaagtttaaccctatgataaagggtttttttctcctggtaacatagtgggcaattgggaactgtttaacccaat

SEQ ID NO: 65945 - DNA, 1273 bp, Homo sapiens
tcagggagctgctagcctctgcgatgaataacttgagtcaggctgcaacatgtgaaagaattcagctgatcaggatttataacactagctggattttttgctttctttggggttcatgaagcatggtgttgtgagataccacaggagtcccagagtaaagttacatacctatttctcttccttatttttatttttttggcatgttcatactattttattaccaacatcgttggcatccctgagtatgagagttcagaagaaacttagaggctattgtctgattcaatccttgcagcttacaaaaagaaatgtggggagcagtcactgtgtgactagcctgaggtcactcaggaagttagaggcagaactgcagccagggtcacctctctttactgctactagtgtgctccttctactgcaccctgatcataaaacatctcccaacccaggaacaaggtctaccgcataggtgggcacagcagcgtgatcactctctcagtcgtctgtactcctcctttgctttgaccaaagacacaggaagggaccttttgccccacataaaacacctctcagaggcttggcaacaacaacagataatagagagcattgacctaagaccaacatttcaaccatggtgtcaaaacaatattttatttcagcaaagaaaaactatgtcacaagtggattattattactaataatcagactagtggtacttgcgaatgacttggtttcatactcacacttggacaactatgcacactgagtataactgaccttatgagaacatcattctcactaagattatgatgtgctttctcacgtgggaactgtacataatattgcgtgtacacttgggaggatgtcctgcctgtgatgttgtctttcaggggaagaagaatggttgagaactgagggtatattaaacatttactcctccagatttttcaagatttctgttaagccagatcagaagaaagccatctatttggattgcatcactctaacctggtaagtcgaattgtctacacagaattataatttcacgatatgtccagattacttaccaagagccaatttgagacaccaacaggactagtaaaacatctttgcactgtgggtagcgttgctatcaaagaccttatacattatgccattcaagaacctttatattaagatccttatggaaaatccttcccaaagtttaaccctatgataaagggwttttttctcctggtaacatagtgggcaattgggaactgtttaacccaat

SEQ ID NO: 65946 - DNA, 575 bp, Homo sapiens
tgtgcaaaagatgaattggatttgttgggaaggatgctttgaaagcatgaatttaattttccttcttccagggtatctatttcttccatcattgtaagtaggaattgcttgctcacatgcaaaaatgcaaacactggtttttaagtgctatctggaagaaatactagaatacatatattctacatacatataatatttacaatacatattcaagatatctatagatacataaaaataaacatttaatgaaaattgaaaatattagaaaggcctaaggtacttcaggtaggtaatctcatttatttttacaggaaaaggatatttcccaataacattaaagcttatataaaatttgataattggttaagtcaagcttctaataagtggtaaataaagatttacttgttagtatccattatatgagtattagttcattctcacactgccatgaagacatacscaagactggagactgagtaatctataaagaaaataggtttaattgactcacagttctggggaggcctcagaaaacttacaatcatggcagaatgcaagagaagcaggtaccttct

SEQ ID NO: 65947 - DNA, 520 bp, Homo sapiens
gcttggtttcaggggtatttttaaaaatcagaagcttttaaaatacaaggtgggcaggaaaataatggctcagtaattaatatctattaaaatcctcctagatatgtgagagaaaaaaagagaaaatattcaactgaagtattagtactggatgttattttgagattcttaagcctgtatttttataaggttgtttatacctgtctgaggaccctaacttaatccccaaggcacttgtgtccagaccaccaaagttctgacaaaatctttcagtcagaaattttcatgaagactcaactctccataaaagaagccaggaatgcaaagaatgcttaaaacaactcaaaatatcagcccataaagtaatacctgtggtggatctactacccatctaacacagaaataattttcatgcttaaagtattgatacgttggtgacacagatatatcaataattcatagttaaagagaaagtggacctcrgaaaatgttctgtaaaagtgaaactttgtttccaata

SEQ ID NO: 65948 - DNA, 706 bp, Homo sapiens
tctattccaaaattttaatgtacctgccaatcacccagggattttgttgtgatgtagattctgatttactgggtctggggtgaggcctgagtttttacatttctagaaatttcctcgggtgatgctaaagcagcaagtggttatctttctcccgcccttacagccttcctccacactaggccacatgtgggattgggcatgccagtactgtggtggggtggtagggacmgctcagagacatagctagggggcacctggaaggccacagtaggaaggaagcatgccctgcagggcttggcttggcccacacatttcactaagggacacttcttcctcggttttggtcacactttaccctaacatgcaggagacttaatgcaatcaaagcccagaaaggagaacattgatcttgtccacaattttccttcccaccctcaaacacacccactgacccagagggccttcatggttcccctcagcttgattaaagggaatcattaaagccctggtggtcagtgggtgtctaacaaagctttagacggtcttcttcaaggcccccgacctctttcttagagcatttactttagaaaccttgtaaattctttttccacccctttgagatgtaaatcttttaaaactcctcttgccagttttacaacccaagaatgtctttctcaaaggcccaggagccatctctttcaagtgt

SEQ ID NO: 65949 - DNA, 1703 bp, Homo sapiens
aaatctgttgctcttcccagggaatttcagtcttgctcaaggattagaaaagcaaaggtgtgggtttccccatcctcttcagttggaaagttaagtggatgcccttcatatttccagtggaattcacagcaacaggtttaagggaatccttttctatttgctgagctgaatcagacaccatgtctaggaccctagctgtatcagtaaattagtcaaaaatcatgaaaaagaaaaagttggattaatatattgatataatcaattgcttttggaaactgaaagcacaatgtagtcagagtattgtgatggcctcagtttcactatttgtatctgtaggagactaacacctaactcactgaatctttgtgggaataaaataagctatagggagagagctcttacgcagtgcctggcacatgggtaattcagtaaatgaaagcagtgaatgcaaagtggaatttcaacagcaacatttgaaactcatgccaatctgtggccttgccttaccacacttaagtctaaactgcattgtcctttggcttgcgtgttttgtaaaccttcttggattggctctagtgcaacagtgagattccagggtgaaaagcttctagaagtcacacacccttgagggcaaaaagygtcagttacgataatcatccttgtcagcacagcaggatccctgtcgcacacatctgcctgagtgcagtgcttgggacagcattagacaagtatcattttgtcaattaacctttttccattcttagtttattagggctcagcaaatgcatttactaaacagagagggcttttacttttttgacacggtacttgcagctttgaacacagcctacctgcactttcccctgacaacagactcagttgcacctctctggcatattggataaccttgtgtcacactgcataataaaatcattttaatttatggaaggcgtcggtttatttaacataaagagcagtagatgtcacggtgtttaactcagcttttcatatccgatgggtatgagaaagcagtgatgtagatgttgccggtgatagtgactacttactccgctctacgttaaccccctcaaccctccttatcgagtctgtgagacaggtgccacgatgcacacatgtctcagatatacctaatttaaaaagtaaaataaactgtaatctcctagctgtttcttctgtcttaataaatacactcccctgaagtcttctaatgaatatataataacagatactgttttactagcctttgtgatgtgctaagttatgctaaagatgttgctttcatcattgttgtttcaatccccacaataaccctctgagttagatattattacctctattttaaaaatgaggaaactattaaaagcgtcacaactggacagggataaagccaagattggagccagttgtcctaaccattataacctacactaccttcaatccatgccatggcttggatcagatctcccattctataaaaatataaataggaaaggttgtgatttttccactaaataacctgaattttaattgaatgtgatatcaactaagagggaaagccatagttaatagacttaattaagaataaatttaaggcggggggaggggggagggatagcattgggagatatacctaatgctaggtgacgagttagtgggtgcagcgcaccagcatggcacatgca

SEQ ID NO: 65950 - DNA, 1703 bp, Homo sapiens
aaatctgttgctcttcccagggaatttcagtcttgctcaaggattagaaaagcaaaggtgtgggtttccccatcctcttcagttggaaagttaagtggatgcccttcatatttccagtggaattcacagcaacaggtttaagggaatccttttctatttgctgagctgaatcagacaccatgtctaggaccctagctgtatcagtaaattagtcaaaaatcatgaaaaagaaaaagttggattaatatattgatataatcaattgcttttggaaactgaaagcacaatgtagtcagagtattgtgatggcctcagtttcactatttgtatctgtaggagactaacacctaactcactgaatctttgtgggaataaaataagctatagggagagagctcttacgcagtgcctggcacatgggtaattcagtaaatgaaagcagtgaatgcaaagtggaatttcaacagcaacatttgaaactcatgccaatctgtggccttgccttaccacacttaagtctaaactgcattgtcctttggcttgcgtgttttgtaaaccttcttggattggctctagtgcaacagtgagattccagggtgaaaagcttctagaagtcacacacccttgagggcaaaaagtgtcagttacgataatcatccttgtcagcacagcaggatccctgtcgcacacatctgcctgagtgcagtgcttgggacagcattagacaagtatcattttgtcaattaacctttttccattcttagtttattagggctcagcaaatgcatttactaaacagagagggcttttacttttttgacacggtacttgcagctttgaacacagcctacctgcactttcccctgacaacagactcagttgcacctctctggcatattggataaccttgtgtcacactgcataataaaatcattttaatttatggaaggcgtcggtttatttaacataaagagcagtagatgtcacggtgtttaactcagcttttcatatccgatgggtatgagaaagcagtgatgtagatgttgccggtgatagtgactacttactccgctctacgttaaccccctcaaccctccttatcgagtctgtgagacaggtgccacgatgcacacatgtctcagatatacctaatttaaaaagtaaaataaactgtaatctcctagctgtttcttctgtcttaataaatacactcccctgaagtcttctaatgaatatataataacagatactgttttactagcctttgtgatgtgctaagttatgctaaagatgttgctttcatcattgttgtttcaatccccacaataaccctctgagttagatattattacctctattttaaaaatgaggaaactattaaaagcgtcacaactggacagggataaagccaagattggagccagttgtcctaaccattatamcctacactaccttcaatccatgccatggcttggatcagatctcccattctataaaaatataaataggaaaggttgtgatttttccactaaataacctgaattttaattgaatgtgatatcaactaagagggaaagccatagttaatagacttaattaagaataaatttaaggcggggggaggggggagggatagcattgggagatatacctaatgctaggtgacgagttagtgggtgcagcgcaccagcatggcacatgca

SEQ ID NO: 65951 - DNA, 848 bp, Homo sapiens
tattgtattcaagctgtcatttttcatttttaaaatccaggtcccttargtaatcagtaaccttgtaaaaaaactgaacactgaagcacaggtctgctgaaagtcctctgagaaactagaaaacttggtgaaaatatataaacatcagtgcccacactgcacccctccgcctcctccagtgttcctcatcctttccttctgtcttcactttgaatgtttcacaaagttgagacaggtttaggttatcactcaaatgctgtgactcgaactcggggaaattgttcctgtaatggagttctcaatttattggtcaatttcaccttgattttgtgtcactgttagctttgctagcccttcagcttgtattacatgctcgaaaaatgtgaaacattttcaaatattttaaatatcacagataattttattcagctcataatctccttctggaaagataaataaaaataattaaaaaaaaaaaaggagattcttcgcctctgtacttgacttttcataaatagctaaaatctgccaccttctggattttccaggatagctaccacataaagtagcctcctattctttatcacttgcccagatagtctttaactatgcagtgacactgccatctagtgggcattttctagactattaattcagcagaaatgtataaaagaacgtggtttttttgaggaagcaaatattcatttagatcaatgtactcgaattacaatgaccaaaagaaaacaaactttataaagtttattgagagttgaatctaaaagtcagaatttataaaatacattttcagcatggaaataagaagatatttatggtcaaattaatacagc

SEQ ID NO: 65952 - DNA, 848 bp, Homo sapiens
tattgtattcaagctgtcatttttcatttttaaaatccaggtcccttaagtaatcagtaamcttgtaaaaaaactgaacactgaagcacaggtctgctgaaagtcctctgagaaactagaaaacttggtgaaaatatataaacatcagtgcccacactgcacccctccgcctcctccagtgttcctcatcctttccttctgtcttcactttgaatgtttcacaaagttgagacaggtttaggttatcactcaaatgctgtgactcgaactcggggaaattgttcctgtaatggagttctcaatttattggtcaatttcaccttgattttgtgtcactgttagctttgctagcccttcagcttgtattacatgctcgaaaaatgtgaaacattttcaaatattttaaatatcacagataattttattcagctcataatctccttctggaaagataaataaaaataattaaaaaaaaaaaaggagattcttcgcctctgtacttgacttttcataaatagctaaaatctgccaccttctggattttccaggatagctaccacataaagtagcctcctattctttatcacttgcccagatagtctttaactatgcagtgacactgccatctagtgggcattttctagactattaattcagcagaaatgtataaaagaacgtggtttttttgaggaagcaaatattcatttagatcaatgtactcgaattacaatgaccaaaagaaaacaaactttataaagtttattgagagttgaatctaaaagtcagaatttataaaatacattttcagcatggaaataagaagatatttatggtcaaattaatacagc

SEQ ID NO: 65953 - DNA, 848 bp, Homo sapiens
tattgtattcaagctgtcatttttcatttttaaaatccaggtcccttaagtaatcagtaacmttgtaaaaaaactgaacactgaagcacaggtctgctgaaagtcctctgagaaactagaaaacttggtgaaaatatataaacatcagtgcccacactgcacccctccgcctcctccagtgttcctcatcctttccttctgtcttcactttgaatgtttcacaaagttgagacaggtttaggttatcactcaaatgctgtgactcgaactcggggaaattgttcctgtaatggagttctcaatttattggtcaatttcaccttgattttgtgtcactgttagctttgctagcccttcagcttgtattacatgctcgaaaaatgtgaaacattttcaaatattttaaatatcacagataattttattcagctcataatctccttctggaaagataaataaaaataattaaaaaaaaaaaaggagattcttcgcctctgtacttgacttttcataaatagctaaaatctgccaccttctggattttccaggatagctaccacataaagtagcctcctattctttatcacttgcccagatagtctttaactatgcagtgacactgccatctagtgggcattttctagactattaattcagcagaaatgtataaaagaacgtggtttttttgaggaagcaaatattcatttagatcaatgtactcgaattacaatgaccaaaagaaaacaaactttataaagtttattgagagttgaatctaaaagtcagaatttataaaatacattttcagcatggaaataagaagatatttatggtcaaattaatacagc

SEQ ID NO: 65954 - DNA, 848 bp, Homo sapiens
tattgtattcaagctgtcatttttcatttttaaaatccaggtcccttaagtaatcagtaaccytgtaaaaaaactgaacactgaagcacaggtctgctgaaagtcctctgagaaactagaaaacttggtgaaaatatataaacatcagtgcccacactgcacccctccgcctcctccagtgttcctcatcctttccttctgtcttcactttgaatgtttcacaaagttgagacaggtttaggttatcactcaaatgctgtgactcgaactcggggaaattgttcctgtaatggagttctcaatttattggtcaatttcaccttgattttgtgtcactgttagctttgctagcccttcagcttgtattacatgctcgaaaaatgtgaaacattttcaaatattttaaatatcacagataattttattcagctcataatctccttctggaaagataaataaaaataattaaaaaaaaaaaaggagattcttcgcctctgtacttgacttttcataaatagctaaaatctgccaccttctggattttccaggatagctaccacataaagtagcctcctattctttatcacttgcccagatagtctttaactatgcagtgacactgccatctagtgggcattttctagactattaattcagcagaaatgtataaaagaacgtggtttttttgaggaagcaaatattcatttagatcaatgtactcgaattacaatgaccaaaagaaaacaaactttataaagtttattgagagttgaatctaaaagtcagaatttataaaatacattttcagcatggaaataagaagatatttatggtcaaattaatacagc

SEQ ID NO: 65955 - DNA, 848 bp, Homo sapiens
tattgtattcaagctgtcatttttcatttttaaaatccaggtcccttaagtaatcagtaaccttgtaaaaaaactgaacactgaagcacaggtctgctgaaagtcctctgagaaactagaaaacttggtgaaaatatataaacatcagtgcccacactgcacccctccgcctcctccagtgttcctcatcctttccttctgtcttcactttgaatgtttcacaaagttgagacaggtttaggttatcactcaaatgctgtgactcgaactcrgggaaattgttcctgtaatggagttctcaatttattggtcaatttcaccttgattttgtgtcactgttagctttgctagcccttcagcttgtattacatgctcgaaaaatgtgaaacattttcaaatattttaaatatcacagataattttattcagctcataatctccttctggaaagataaataaaaataattaaaaaaaaaaaaggagattcttcgcctctgtacttgacttttcataaatagctaaaatctgccaccttctggattttccaggatagctaccacataaagtagcctcctattctttatcacttgcccagatagtctttaactatgcagtgacactgccatctagtgggcattttctagactattaattcagcagaaatgtataaaagaacgtggtttttttgaggaagcaaatattcatttagatcaatgtactcgaattacaatgaccaaaagaaaacaaactttataaagtttattgagagttgaatctaaaagtcagaatttataaaatacattttcagcatggaaataagaagatatttatggtcaaattaatacagc

SEQ ID NO: 65956 - DNA, 848 bp, Homo sapiens
tattgtattcaagctgtcatttttcatttttaaaatccaggtcccttaagtaatcagtaaccttgtaaaaaaactgaacactgaagcacaggtctgctgaaagtcctctgagaaactagaaaacttggtgaaaatatataaacatcagtgcccacactgcacccctccgcctcctccagtgttcctcatcctttccttctgtcttcactttgaatgtttcacaaagttgagacaggtttaggttatcactcaaatgctgtgactcgaactcggggaaattgttcctgtaatggagttctcaatttattggtcaatttcaccttgattttgtgtcactgttagctttgctagcccttcagcttgtattacatgctcgaaaaatgtgaaacattttcaaatattttaaatatcacagataattttattcagctcataatctccttctggaaagataaataaaaataattaaaaaaaaaaaaggagattcttcgcctctgtacttgacttttcataaatagctaaaatctgccaccttctggattttccaggatagctaccacataaagtagcctsctattctttatcacttgcccagatagtctttaactatgcagtgacactgccatctagtgggcattttctagactattaattcagcagaaatgtataaaagaacgtggtttttttgaggaagcaaatattcatttagatcaatgtactcgaattacaatgaccaaaagaaaacaaactttataaagtttattgagagttgaatctaaaagtcagaatttataaaatacattttcagcatggaaataagaagatatttatggtcaaattaatacagc

SEQ ID NO: 65957 - DNA, 2086 bp, Homo sapiens
tagactgttcatttgctcctggtgatttaagcaaagaaactaccaaaatggggttttcgatactttgatttccaagcctatacacataataaaatgaagaactaataagctagaggaaaggcaggaaggcagtgtggaatatgcgctgaacccagaagacatgcccaggcattgaaacttcaccacacactggttctgtgactttgttaagtgatttaacctcaattttcttatatggaggagaaagataatcacagtacctgcttcacaggattgtactagcactgtacacaggaggagctctactgatattagttattactccatcatcgtgactgatagacataattaattaagaaaggatattccacactctgccttgtccaaggttgggatcagggtagaatactgcctaaagaaggacctgtgggctgtcccctaggaagccttagggacttgcatttattgtctttgtcagttggacataatacaggatccagctttcagatatgcagactcagaaccctggttattcagcaatatgaatgagatccttctctgaatagcagaatcacatcaactcaacctcatggaactaatgtataaaaccaaaacacaatttaatatacaatgaaaattctaatttgcacaagaacacaatgcatgctcttacatgtccagcccattctccccctaaagacatacctacacagaacactacgtcataggcagaaggaggaaggttgctcagggacatggactcaaatgaaccagttatccatgcatttcaggtacctatttctctaaagactcttgagtggattctggtctcagggctgagaagtgggcctggctcctgggatcagagcttgacttattgtctctgtggctgccctttctacggtgacacttagacaggaagtgcaagtaagaaggtgaccagagatgaagctgaaaaccagcaaggaccagtatgccttttataaacatgtctgcaaaaatgtctataaatgtctgtgaatgtcttctgggttatgtaggagatgttctataggttttcctggttttagatggaagaaaaatacctttcagattgagtcctacctggaagactctcttattatgtagcaatgcctcactatcaataatctccccagttacagtggcctgagctagaagctgatcatttacccttttattacttaatgcctcttgcagggtattacaactacaccctgatgggagtatttgggatacagagcaggtagccttacaggttcaattaaacggcacattaacacgtgtcaaagtaagtaaaagggggatacctacttttgtgagattattgtataatctttaaactaaagtatcagtatatttattattactgaactctgatctttccatttaaatacctcatacatctgtcaagattgccactggcttgaaatatagctgtagacaaaatgaccaactgatctaactttataagaactattgtaaaaaaaaaagtttctaccaaggaatatttttaaaatcagtctcatactgctgtcaaaaatattatggtccccagggatttaaatcatttttggtcacctatttgaaaagttagtttaaaaaataataatggtaaccaaccaaaaaagatggaaagtattaattgcaccaagcagaaagaaatagagaaaaaatgtaggaatatttagaatatgatgccaatttaaacaaaggaagagaaaaacgaataatattaatgacattaaaaacatttttggccaggcatggtggctcacgcctgtaatcccagcactttaggaggccgaggcaggtggatcacctgaggtcaggagttcgagaccaacctgggcaacatggtgaaacgtcgtctctactaaaaawacaaaaattagctgggcatagtggtgagcacctgtaattccagctactttggaggctgaggcaggagaatcgcttgaatccaggagccacaggttgcaatgagctgagattgcatcactgcactgcagcctgggcaacagagcaagactccattaaaaaaatctgacattaataataataaata

SEQ ID NO: 65958 - DNA, 607 bp, Homo sapiens
gcaggaaggttgcaggtcttatatggacatttgggaaaaaatcttccatgtttttcagtcatttttagatcttatcttcttaccttttcccaagaactctatttattctcatagtattccatgaatttttttgctggtagccacctgctgaatcaacaagaaaaggccagaacagttgtcccctgtcacattctgaaagggaaatggaagcaggaaatccacccrtgtttcttcactgagagtgattaggactcaactagttagctgagtttttcctggaactaagtgtgcttgaccagaaagatgagtatgaaggagctccttggtaaatctgggaagcaagagacctgttcataggaactagacacaaatccttggttccaacttcaattaggaaaatggtggaggatatcaccactgtctttcctcccatcaacttccccttcagaatgttcctccccaacttatagatctttttcttgctgtgtcaagtatctgttgcagtgaatcaaaccaacatttcgtggcttaagtaaccaacatttcatttgctctgattctgtgggtcagcagtttgggctgagctcagttgggtggtatcttttct

SEQ ID NO: 65959 - DNA, 607 bp, Homo sapiens
gcaggaaggttgcaggtcttatatggacatttgggaaaaaatcttccatgtttttcagtcatttttagatcttatcttcttaccttttcccaagaactctatttattctcatagtattccatgaatttttttgctggtagccacctgctgaatcaacaagaaaaggccagaacagttgtcccctgtcacattctgaaagggaaatggaagcaggaaatccacccatgtttcttcactgagagtgattaggaytcaactagttagctgagtttttcctggaactaagtgtgcttgaccagaaagatgagtatgaaggagctccttggtaaatctgggaagcaagagacctgttcataggaactagacacaaatccttggttccaacttcaattaggaaaatggtggaggatatcaccactgtctttcctcccatcaacttccccttcagaatgttcctccccaacttatagatctttttcttgctgtgtcaagtatctgttgcagtgaatcaaaccaacatttcgtggcttaagtaaccaacatttcatttgctctgattctgtgggtcagcagtttgggctgagctcagttgggtggtatcttttct

SEQ ID NO: 65960 - DNA, 607 bp, Homo sapiens
gcaggaaggttgcaggtcttatatggacatttgggaaaaaatcttccatgtttttcagtcatttttagatcttatcttcttaccttttcccaagaactctatttattctcatagtattccatgaatttttttgctggtagccacctgctgaatcaacaagaaaaggccagaacagttgtcccctgtcacattctgaaagggaaatggaagcaggaaatccacccatgtttcttcactgagagtgattaggactcmactagttagctgagtttttcctggaactaagtgtgcttgaccagaaagatgagtatgaaggagctccttggtaaatctgggaagcaagagacctgttcataggaactagacacaaatccttggttccaacttcaattaggaaaatggtggaggatatcaccactgtctttcctcccatcaacttccccttcagaatgttcctccccaacttatagatctttttcttgctgtgtcaagtatctgttgcagtgaatcaaaccaacatttcgtggcttaagtaaccaacatttcatttgctctgattctgtgggtcagcagtttgggctgagctcagttgggtggtatcttttct

SEQ ID NO: 65961 - DNA, 739 bp, Homo sapiens
atgaatatttttaacaatctctgaactagcaaaaataaaatggaaacctgaccggtaaacaaacaactgttgcttatgcctatggtttgcattttctcaaaaactccaacttatttagttctcgtcagatttttccatcgatttccaattctctctaaatctgtgggaatcccatatctctattaccacatcaccatctgagtaatgccccagagtaaaagtacagcctttttaaaaaagttttttatttctgtaggtttttgggaaacaggcagtatttggttacatgagtaagttctttagtggtgatttgtgtgattttgatgtacccatcacctgagcagtataaactaaatccaatttgtagtcttttctccctcattgccctcccttcctttcccccattctccaaagtctattgtgtcattcttatgcctttgcatcctcatagcttagctcccacttatgaaggagcacatgcgatgtttggttttccattcctgagttacttcacttagaataatagtctccagtttaatccaggttgctgcaaatgccattcattcattcctttttatggctgagtagtattccattatgtatatatcatatatatatatcttrtatatatcatatatatatcttatatatatcatatatatattatatataatatatatcttatatatatcatatatatcttatatataatatatatcttatatatatcatatatatc

SEQ ID NO: 65962 - DNA, 775 bp, Homo sapiens
attctaatatacatccaggcttgaaaccattgatctagttattcctgttttttaattacaagacatgtcatatacacaaatagtgaaaatgtattttaaaactatgtatttactacctagattgaacacataaacttattgccacatttgttttatttttattttttaagaaatacaatgtcacagatatccttagacttcctcatccactatcaaatcccactgcctctcctccgtttccagaggcaattgctatctagaagttggtcatatcctccccattcataatttttatatgtttactatgtaggtatatagacttttgatggttttaaggttttgtacactgagtatcatagcacatgtattcttttgcatttttccctccttcccttccctctctccctcccttccctccttactttctctctctctctctttctctctctctctctctttttctttctctcttttttctccctctctctttctctctccttccttccttccttccttccttccttccytccttccttccttccttccttccttccttctttctttctctttttgaaaaggtctcattctgtggcgtcatcacagctgactgcagcctcaacctcccaggctcaattaatcctcccaccccagcctcctccatgtagctgggactacaggtgcataccaccacacctggctgcatttttcttttcttactgaacattatgcttttgcaactcatccttgtaattcaagctattaatattaactgtag

SEQ ID NO: 65963 - DNA, 1874 bp, Homo sapiens
tgcataatgcttccattttgaagcatatggctggggagccaaaagaatttaaattgccttcaaaatgtgcatcgcattataaatggtgtgaaaaaagatcttactattcagctctcaacttggagcataaagcaaagaagaagcaacacaagactgcttcaaactttatccaaaaactcaacagcttcacttgtttatagaggtacaaaaagtatgcgacacagtttataaaacaagaacgatgtactgtatgcaaaagtaaagttaaaagcaaagtatagtaacagccctatctcgttacaaacacttggcagcatgtctaaagtaccatggtcaaaaacatgataccgtctgcgttgtacttctgccagaaagcactccctaagtccaagtctctttagccatcatcaccacctcatttggcaaactctcccaagcctcagttcatctactcaaaattactccacagaaagcagacaaactctctagctttgtaggctgcaagtatcacaatgaagtagcattggcaagtgacagcgtaagatggagctctgaggttagaaagccaggaccaactaaactgtatcctcaaagcttatttgcatatcaagttgagcagggctgtcttcattttggtaattcagggtttcttctctactctcacagtaattccaatgggtctttctgaatcagccgcagctgagaaagaaagcacatggcaagaatacactcaggcaccgaataccttttaggcaaatgaggggcaaatgtattcggcaattacctgccatttaaccatttctggccaggtcttttgaataattccagaacctcaaaaactgcctcaatagttatgtatgcataacggaccaggccattaccaaggctaagtaaatacaagaatatgcatcaaggtttaggtaataagtagataaatagactatatcagtatcaacatccatatctacctgtggcatttataactaaaaaaacagcagttcataatacataagtataaatgtggcagtgaaaagatgactgataggacagaagtagctgcatgaattattaattttcctagggcacgtaagaattggcttccaaatttttctttaatcgactttctccaaagtagcatattacataattcaaaaaaaaacagatattgtcatcttaagtttacagcttgccatatttcctagaaaataaacaataattaacaacatatctcatagttgttccctccccacctttcttcaagaaactttacactctgaaatgtagatacataagctacttttggatcagggcccacaaccatatgcttccaaaggaataatatgtacaggttagtctggtgtgtaccagatgttaaaaaaaagcaaattcaaaaacagaaatatcagtattcaatgcagaaatatattttaaattaaatcccattcttcctctcctkatagacacagaatcaaagaaagccaattgtatgtctaattttttaacctttttcctgaacaaaaatcccaatttgactcatgactctagattctttatatacataagatcacaagacaagaaatggtcatttataaattatcctgtctcagagtgagcctcctaccatatgctgatattcaaccagaagaatttgtttgaaaaggcaaaaaaaattccagaagttaagcctataaggcaaaccagccagcaaaaggcgacagagtccacatgtctatcagatatttaatatgttaaacctcaattaccaaaagttttaagattctctgtaaacataactagtgagtctttatttttcagatgattctgaatgcaaaatgagcacattatctgcacattgaaagaatttatgtgttttt

SEQ ID NO: 65964 - DNA, 921 bp, Homo sapiens
cccggctcctcctttcggtttccttcccgccgccaggcggaagcgaagagccgcgcttcccgcgcgcccaggccggccgtggtagggtggggcggggcgggccgcgagccggagaaagagaaagccagggaggcgactgcaggaggagcgcgggccgggcgcggaagggtgcgctgctgggtggcggttccggggcagccccgccgcgggccaggccaatccgagggcggggaaggggcgatcgcgcgaccccggggccgtgccggctgcatctgaccggcgcagccccactcctggagcagccccgctaaaacaacaataaaacccaccacacacacacayacatgcacacacgcacacgcgggcgcacacacacacaccatcctggacggcgttcaagtcaagcacgagaaacagccttctgcaagggagaggaaagaaagctggaaatccagacagactgaagggctgcctgcttttagacttgactttgaccgccttttcttctcgggccaagaactgtggcagtgcagaaattacaattaaaaaatacataagactactcccggattgcttttttttttttttttttttttttttaactaaacacaaaaagcgacaccaaaacaacccctgagaaaatccacaaatctgtacctgagacacgtcaagtcagcggcccagggttctgttacagactcaagatctcttttatttaatgcaatacagtgcgatggtatgtggctttgaactgatgggttttgtttgcttcttttattcgttctttgcaccccctcctatccctggcacagtttttcttttcctgtttgtggattgcaaagtggctgttttacccctttcctaaatgtcatttttgttttacaggttgtgggctatagtgctgcatttgcagaactaatt

SEQ ID NO: 65965 - DNA, 631 bp, Homo sapiens
ttgtataatatttttgtgcttatatatcattatacatatagtaactataattttaaatccacagttgtttgtaaattttaagatctasgtagtagagaaaagctaggggacagatgagtttaaaagtctgtgaggtgatttttctcctttttaaaaatgtttttattttttcaatgtatataagcatatatgccattataaaaatttaaacattataaagtggatgctgtagaaaataaaagtgtcttgtaatctctgctttagacataaccactgaaaacaatttatatttttacagatttttttcccatgtatgtttgtgtatatttgtgttaggttattcttgcattgctataaagaaatacctgagactgggtaatttataaagaaaaggtttaattgacctacagttctgcaggctttataggaagcctggtgctggcatctgctcggcttcttgggaggcctcaggaagcttttactcatggtggtaggcaaagtaggaacagacatctcacatggctgagctggagcaagagagaaagagagagtggggcacacatttttaaatgatcagattttgagcaacagctcacttaacaccaaggggatggcctaagccattcataag

SEQ ID NO: 65966 - DNA, 2362 bp, Homo sapiens
gcttgtgatgggccttatttattcgtattgtaggcctcttatactattccaaaaacaagacaagggaactgaaaccactttgcataataatgtcacctattatctccagtgaggctagtctggtcacctctggatcaatagtactctttttttttttttgagatggagttttgctcttcttgcccaggctggagtgcaatggcgcgatcttggctcactgcaacctctgcctcccgggtttaagtgattctcctgcctcagcctcccgagtatttgggattacaggcgcctgccaccatgcccggctaattttgcatttttagtragaacggggtttctccatgttggtcaggttggtctctaactcctgacctcaggtgatccatccgcctcagcctcccaaagttctgggattacaggcgtgagcatccacacctggccatagttgtctttcttattgtggatttaatctgcattgtccctaagaactcagaattactgttgatgcttcaaaagggtgtgtgtgtgtgtgtgtgtgttcagttaatccagaaattcctcccaggaaaatagaagaccccaggaggagtggggcaacaactctttatctgctacgggcagacagatcttcatgaaaacacacatgaacctccagaactcgatgtgctccaccagccggccttagcttgtcaaagccaaccttggaatttcctgctgaagcccccatggaatagctcagctagcaggaactgtagaatagaggatccttacttcagtgcatcttgatgttctgagtgaaggaacagcacagaccctctgggagaccatccctgtgtgttagtgaggtcttgcattgtaaagatcttgaagaaaggagactgtgtctgtgagtcctcaacaaagcagacacctgattggagttaggagtccaaagggtttatccgaagtggcacctgtgaaaggaaaaggaaggaagcaggattgagaagaaagtgttagaccatgagatgcaggtctgacaaatgcctgagagctccaaagcaaagaggacctttagagaagccacatgttgggcagaaatagtgaggtccttgaccacactgtcctgctcagtaaatggccagagccgccctgagaagaacgtaacctccttccagaagctgaagtagaccagaaggagttaacagctggacactcacagctaatcaggctctcagcagctgggccatgagtcctgtctagaaggaaaacctgagctttgacctgcgtctccacatctgccacagggactatctctggaggacagaggaaacctcagttttgaaagcagggctaggaatttgctggtgccaataaaagacccaatgggaacttatattaggcatgctatgcctggtggatttgtccctctgtattgtgattcattctgcccccaaatcttcagtgaatttcttagtgccacggcattgtgaggaataaagaataggcagctggggaagtgtgtgagtccatgttacattgctataaaggaatacctgagactgggtaattcatattgaaacagggtttatttggctcacagttctgcaggctgtacaagcacagtaccagcatggaggaggtcccaggctccttttaacaaccaactcccacatgcactaaaagagagagaactcactcatcaccaaggggagggcaccaagccattcatgagggatccacccccatgaaccaaacacctcccaccaagctcacctccaatattgggaatcacatttcagcatgagatttggaggggacaaacatccaaactgtatcaggaagtatggtattccccatctcatccctgccccaaagcctgcatctcagcatccatgtagaaataatgtaagggccataatcttggagttcccagaagtggccagccccagagagtgctgaggcccaagatggagccacctgctatttgaaaatagactgtggaactgcacagacaaacccccttcccataccaccccttcccaaatacagcagaagaaagcaatcctaggcatgaggggaaagagaagcccatacttgttttataagaatattctgcctgctaggaccatgcaaatactgggatatttccaaccagtattcacaaacaactgcttaaatacttggcactcagtgaaaaaaactgaaaaaccaaaaatttgagtaagctacacaacagagttacaaaattctaggagtcgcttccaagatggctgaataggaacagctctggtctacagctcccagcatgattgacacagaagacaggtgatttctgcatttccaactgaggtgcgtggttcatgtcactgagattgtttga

SEQ ID NO: 65967 - DNA, 2362 bp, Homo sapiens
gcttgtgatgggccttatttattcgtattgtaggcctcttatactattccaaaaacaagacaagggaactgaaaccactttgcataataatgtcacctattatctccagtgaggctagtctggtcacctctggatcaatagtactctttttttttttttgagatggagttttgctcttcttgcccaggctggagtgcaatggcgcgatcttggctcactgcaacctctgcctcccgggtttaagtgattctcctgcctcagcctcccgagtatttgggattacaggcgcctgccaccatgcccggctaattttgcatttttagtgrgaacggggtttctccatgttggtcaggttggtctctaactcctgacctcaggtgatccatccgcctcagcctcccaaagttctgggattacaggcgtgagcatccacacctggccatagttgtctttcttattgtggatttaatctgcattgtccctaagaactcagaattactgttgatgcttcaaaagggtgtgtgtgtgtgtgtgtgtgttcagttaatccagaaattcctcccaggaaaatagaagaccccaggaggagtggggcaacaactctttatctgctacgggcagacagatcttcatgaaaacacacatgaacctccagaactcgatgtgctccaccagccggccttagcttgtcaaagccaaccttggaatttcctgctgaagcccccatggaatagctcagctagcaggaactgtagaatagaggatccttacttcagtgcatcttgatgttctgagtgaaggaacagcacagaccctctgggagaccatccctgtgtgttagtgaggtcttgcattgtaaagatcttgaagaaaggagactgtgtctgtgagtcctcaacaaagcagacacctgattggagttaggagtccaaagggtttatccgaagtggcacctgtgaaaggaaaaggaaggaagcaggattgagaagaaagtgttagaccatgagatgcaggtctgacaaatgcctgagagctccaaagcaaagaggacctttagagaagccacatgttgggcagaaatagtgaggtccttgaccacactgtcctgctcagtaaatggccagagccgccctgagaagaacgtaacctccttccagaagctgaagtagaccagaaggagttaacagctggacactcacagctaatcaggctctcagcagctgggccatgagtcctgtctagaaggaaaacctgagctttgacctgcgtctccacatctgccacagggactatctctggaggacagaggaaacctcagttttgaaagcagggctaggaatttgctggtgccaataaaagacccaatgggaacttatattaggcatgctatgcctggtggatttgtccctctgtattgtgattcattctgcccccaaatcttcagtgaatttcttagtgccacggcattgtgaggaataaagaataggcagctggggaagtgtgtgagtccatgttacattgctataaaggaatacctgagactgggtaattcatattgaaacagggtttatttggctcacagttctgcaggctgtacaagcacagtaccagcatggaggaggtcccaggctccttttaacaaccaactcccacatgcactaaaagagagagaactcactcatcaccaaggggagggcaccaagccattcatgagggatccacccccatgaaccaaacacctcccaccaagctcacctccaatattgggaatcacatttcagcatgagatttggaggggacaaacatccaaactgtatcaggaagtatggtattccccatctcatccctgccccaaagcctgcatctcagcatccatgtagaaataatgtaagggccataatcttggagttcccagaagtggccagccccagagagtgctgaggcccaagatggagccacctgctatttgaaaatagactgtggaactgcacagacaaacccccttcccataccaccccttcccaaatacagcagaagaaagcaatcctaggcatgaggggaaagagaagcccatacttgttttataagaatattctgcctgctaggaccatgcaaatactgggatatttccaaccagtattcacaaacaactgcttaaatacttggcactcagtgaaaaaaactgaaaaaccaaaaatttgagtaagctacacaacagagttacaaaattctaggagtcgcttccaagatggctgaataggaacagctctggtctacagctcccagcatgattgacacagaagacaggtgatttctgcatttccaactgaggtgcgtggttcatgtcactgagattgtttga

SEQ ID NO: 65968 - DNA, 2362 bp, Homo sapiens
gcttgtgatgggccttatttattcgtattgtaggcctcttatactattccaaaaacaagacaagggaactgaaaccactttgcataataatgtcacctattatctccagtgaggctagtctggtcacctctggatcaatagtactctttttttttttttgagatggagttttgctcttcttgcccaggctggagtgcaatggcgcgatcttggctcactgcaacctctgcctcccgggtttaagtgattctcctgcctcagcctcccgagtatttgggattacaggcgcctgccaccatgcccggctaattttgcatttttagtgaraacggggtttctccatgttggtcaggttggtctctaactcctgacctcaggtgatccatccgcctcagcctcccaaagttctgggattacaggcgtgagcatccacacctggccatagttgtctttcttattgtggatttaatctgcattgtccctaagaactcagaattactgttgatgcttcaaaagggtgtgtgtgtgtgtgtgtgtgttcagttaatccagaaattcctcccaggaaaatagaagaccccaggaggagtggggcaacaactctttatctgctacgggcagacagatcttcatgaaaacacacatgaacctccagaactcgatgtgctccaccagccggccttagcttgtcaaagccaaccttggaatttcctgctgaagcccccatggaatagctcagctagcaggaactgtagaatagaggatccttacttcagtgcatcttgatgttctgagtgaaggaacagcacagaccctctgggagaccatccctgtgtgttagtgaggtcttgcattgtaaagatcttgaagaaaggagactgtgtctgtgagtcctcaacaaagcagacacctgattggagttaggagtccaaagggtttatccgaagtggcacctgtgaaaggaaaaggaaggaagcaggattgagaagaaagtgttagaccatgagatgcaggtctgacaaatgcctgagagctccaaagcaaagaggacctttagagaagccacatgttgggcagaaatagtgaggtccttgaccacactgtcctgctcagtaaatggccagagccgccctgagaagaacgtaacctccttccagaagctgaagtagaccagaaggagttaacagctggacactcacagctaatcaggctctcagcagctgggccatgagtcctgtctagaaggaaaacctgagctttgacctgcgtctccacatctgccacagggactatctctggaggacagaggaaacctcagttttgaaagcagggctaggaatttgctggtgccaataaaagacccaatgggaacttatattaggcatgctatgcctggtggatttgtccctctgtattgtgattcattctgcccccaaatcttcagtgaatttcttagtgccacggcattgtgaggaataaagaataggcagctggggaagtgtgtgagtccatgttacattgctataaaggaatacctgagactgggtaattcatattgaaacagggtttatttggctcacagttctgcaggctgtacaagcacagtaccagcatggaggaggtcccaggctccttttaacaaccaactcccacatgcactaaaagagagagaactcactcatcaccaaggggagggcaccaagccattcatgagggatccacccccatgaaccaaacacctcccaccaagctcacctccaatattgggaatcacatttcagcatgagatttggaggggacaaacatccaaactgtatcaggaagtatggtattccccatctcatccctgccccaaagcctgcatctcagcatccatgtagaaataatgtaagggccataatcttggagttcccagaagtggccagccccagagagtgctgaggcccaagatggagccacctgctatttgaaaatagactgtggaactgcacagacaaacccccttcccataccaccccttcccaaatacagcagaagaaagcaatcctaggcatgaggggaaagagaagcccatacttgttttataagaatattctgcctgctaggaccatgcaaatactgggatatttccaaccagtattcacaaacaactgcttaaatacttggcactcagtgaaaaaaactgaaaaaccaaaaatttgagtaagctacacaacagagttacaaaattctaggagtcgcttccaagatggctgaataggaacagctctggtctacagctcccagcatgattgacacagaagacaggtgatttctgcatttccaactgaggtgcgtggttcatgtcactgagattgtttga

SEQ ID NO: 65969 - DNA, 2362 bp, Homo sapiens
gcttgtgatgggccttatttattcgtattgtaggcctcttatactattccaaaaacaagacaagggaactgaaaccactttgcataataatgtcacctattatctccagtgaggctagtctggtcacctctggatcaatagtactctttttttttttttgagatggagttttgctcttcttgcccaggctggagtgcaatggcgcgatcttggctcactgcaacctctgcctcccgggtttaagtgattctcctgcctcagcctcccgagtatttgggattacaggcgcctgccaccatgcccggctaattttgcatttttagtgagaacggggtttctccatgttggtcaggttggtctctaactcctgacctcaggtgatccatccgcctcagcctcccaaagttctgggattacaggcgtgagcmtccacacctggccatagttgtctttcttattgtggatttaatctgcattgtccctaagaactcagaattactgttgatgcttcaaaagggtgtgtgtgtgtgtgtgtgtgttcagttaatccagaaattcctcccaggaaaatagaagaccccaggaggagtggggcaacaactctttatctgctacgggcagacagatcttcatgaaaacacacatgaacctccagaactcgatgtgctccaccagccggccttagcttgtcaaagccaaccttggaatttcctgctgaagcccccatggaatagctcagctagcaggaactgtagaatagaggatccttacttcagtgcatcttgatgttctgagtgaaggaacagcacagaccctctgggagaccatccctgtgtgttagtgaggtcttgcattgtaaagatcttgaagaaaggagactgtgtctgtgagtcctcaacaaagcagacacctgattggagttaggagtccaaagggtttatccgaagtggcacctgtgaaaggaaaaggaaggaagcaggattgagaagaaagtgttagaccatgagatgcaggtctgacaaatgcctgagagctccaaagcaaagaggacctttagagaagccacatgttgggcagaaatagtgaggtccttgaccacactgtcctgctcagtaaatggccagagccgccctgagaagaacgtaacctccttccagaagctgaagtagaccagaaggagttaacagctggacactcacagctaatcaggctctcagcagctgggccatgagtcctgtctagaaggaaaacctgagctttgacctgcgtctccacatctgccacagggactatctctggaggacagaggaaacctcagttttgaaagcagggctaggaatttgctggtgccaataaaagacccaatgggaacttatattaggcatgctatgcctggtggatttgtccctctgtattgtgattcattctgcccccaaatcttcagtgaatttcttagtgccacggcattgtgaggaataaagaataggcagctggggaagtgtgtgagtccatgttacattgctataaaggaatacctgagactgggtaattcatattgaaacagggtttatttggctcacagttctgcaggctgtacaagcacagtaccagcatggaggaggtcccaggctccttttaacaaccaactcccacatgcactaaaagagagagaactcactcatcaccaaggggagggcaccaagccattcatgagggatccacccccatgaaccaaacacctcccaccaagctcacctccaatattgggaatcacatttcagcatgagatttggaggggacaaacatccaaactgtatcaggaagtatggtattccccatctcatccctgccccaaagcctgcatctcagcatccatgtagaaataatgtaagggccataatcttggagttcccagaagtggccagccccagagagtgctgaggcccaagatggagccacctgctatttgaaaatagactgtggaactgcacagacaaacccccttcccataccaccccttcccaaatacagcagaagaaagcaatcctaggcatgaggggaaagagaagcccatacttgttttataagaatattctgcctgctaggaccatgcaaatactgggatatttccaaccagtattcacaaacaactgcttaaatacttggcactcagtgaaaaaaactgaaaaaccaaaaatttgagtaagctacacaacagagttacaaaattctaggagtcgcttccaagatggctgaataggaacagctctggtctacagctcccagcatgattgacacagaagacaggtgatttctgcatttccaactgaggtgcgtggttcatgtcactgagattgtttga

SEQ ID NO: 65970 - DNA, 2362 bp, Homo sapiens
gcttgtgatgggccttatttattcgtattgtaggcctcttatactattccaaaaacaagacaagggaactgaaaccactttgcataataatgtcacctattatctccagtgaggctagtctggtcacctctggatcaatagtactctttttttttttttgagatggagttttgctcttcttgcccaggctggagtgcaatggcgcgatcttggctcactgcaacctctgcctcccgggtttaagtgattctcctgcctcagcctcccgagtatttgggattacaggcgcctgccaccatgcccggctaattttgcatttttagtgagaacggggtttctccatgttggtcaggttggtctctaactcctgacctcaggtgatccatccgcctcagcctcccaaagttctgggattacaggcgtgagcawccacacctggccatagttgtctttcttattgtggatttaatctgcattgtccctaagaactcagaattactgttgatgcttcaaaagggtgtgtgtgtgtgtgtgtgtgttcagttaatccagaaattcctcccaggaaaatagaagaccccaggaggagtggggcaacaactctttatctgctacgggcagacagatcttcatgaaaacacacatgaacctccagaactcgatgtgctccaccagccggccttagcttgtcaaagccaaccttggaatttcctgctgaagcccccatggaatagctcagctagcaggaactgtagaatagaggatccttacttcagtgcatcttgatgttctgagtgaaggaacagcacagaccctctgggagaccatccctgtgtgttagtgaggtcttgcattgtaaagatcttgaagaaaggagactgtgtctgtgagtcctcaacaaagcagacacctgattggagttaggagtccaaagggtttatccgaagtggcacctgtgaaaggaaaaggaaggaagcaggattgagaagaaagtgttagaccatgagatgcaggtctgacaaatgcctgagagctccaaagcaaagaggacctttagagaagccacatgttgggcagaaatagtgaggtccttgaccacactgtcctgctcagtaaatggccagagccgccctgagaagaacgtaacctccttccagaagctgaagtagaccagaaggagttaacagctggacactcacagctaatcaggctctcagcagctgggccatgagtcctgtctagaaggaaaacctgagctttgacctgcgtctccacatctgccacagggactatctctggaggacagaggaaacctcagttttgaaagcagggctaggaatttgctggtgccaataaaagacccaatgggaacttatattaggcatgctatgcctggtggatttgtccctctgtattgtgattcattctgcccccaaatcttcagtgaatttcttagtgccacggcattgtgaggaataaagaataggcagctggggaagtgtgtgagtccatgttacattgctataaaggaatacctgagactgggtaattcatattgaaacagggtttatttggctcacagttctgcaggctgtacaagcacagtaccagcatggaggaggtcccaggctccttttaacaaccaactcccacatgcactaaaagagagagaactcactcatcaccaaggggagggcaccaagccattcatgagggatccacccccatgaaccaaacacctcccaccaagctcacctccaatattgggaatcacatttcagcatgagatttggaggggacaaacatccaaactgtatcaggaagtatggtattccccatctcatccctgccccaaagcctgcatctcagcatccatgtagaaataatgtaagggccataatcttggagttcccagaagtggccagccccagagagtgctgaggcccaagatggagccacctgctatttgaaaatagactgtggaactgcacagacaaacccccttcccataccaccccttcccaaatacagcagaagaaagcaatcctaggcatgaggggaaagagaagcccatacttgttttataagaatattctgcctgctaggaccatgcaaatactgggatatttccaaccagtattcacaaacaactgcttaaatacttggcactcagtgaaaaaaactgaaaaaccaaaaatttgagtaagctacacaacagagttacaaaattctaggagtcgcttccaagatggctgaataggaacagctctggtctacagctcccagcatgattgacacagaagacaggtgatttctgcatttccaactgaggtgcgtggttcatgtcactgagattgtttga

SEQ ID NO: 65971 - DNA, 183 bp, Homo sapiens
cacaggacaggcctgctgacaaggctgagtctaccttggcaaagaccaagatattttttcctgggccactggggaatctgaggggtgatgggagagaaggaacctggagtggaaggagcagagttgcaaattaacarcttgcaaatgaggtgcaaataaaatgcagatgattgcgcggctttg

SEQ ID NO: 65972 - DNA, 696 bp, Homo sapiens
ctgaattaattaaaattagagatgtaactatgtgggaagggagaaggagaggaggcaaagctgtaatgtagagagggaaatcctcacctgttgaaacaggaagtcaaaagataatgtctaaaatgaaccaaatttagcatactgcaaaataggcacacatattcagagatatgaagacaacttccagaagaaacaattgggttttctttgagatagggtcttgctctgtcacccaggctggagtgcagtggcacaatcattgcttactgcaacttcaacttcctaggctcaagtgatcctcctgcttcagctatctgagtagctgagactataggaacatgycaccacgcctggctaatttttgtgtgttttgttttgttttgtaaagatggagttgcatcatgttcctaggcttgtctcaaattcctgggctcagacaatccacccacttcaagcctcccaaagtgctgtgattaaaggtgtgagccattgcgccttgccctagaagaaaaatctaaagagcttttctttagggtttatgaatagaagagaagtacaaccggggcaaggataatcatttttaatgatattaaatatatccatacactgtatatacatacacataacacacacgtatactacgcctccagcttctataacttttaaataaagtatattttattttgatttaaaatt

SEQ ID NO: 65973 - DNA, 510 bp, Homo sapiens
atttccggatcccagacacatgctatttgcctgcccaagaacctgtccagatctgtctctggaccacaaaattcctactgactcaaaaacctcagggtgagtagaaatgggcacactccagcaaatggggaatgtgtaaactgggaaaaattataggagrcagtgagagcaggagagttggtaattgggcaggatgtttctaaaacctcaaaaatatgtctttttcaactccatataccactcggaagaatttatgttagggaaaatataaggctgtgcatgatgatgtagctttatttttgaatataaaatgaaaatttggaagcaaccaaaacaaccaagaactggaaaccagttaaagaaaattctgctacattgatataataaggtactatttagctattaaaacggaaacaggcaaatgttcattggcatgaaaagatgttcatgacagccaggcgcagtggctcacgcctgtaatcccagcactttgggaggccgaggcaggca

SEQ ID NO: 65974 - DNA, 744 bp, Homo sapiens
aaaactctagggaaactttgacccacacatctatagtccagaggataattttccttgtcactatttgttttggctagaggagttttggcaactcttattcattcattcataaggatttattgaggagtctctatgttccagacattgaactagaccttatggactacaaagagggtgaagactaagtttctgcctcagttcacgctatattagggaaaagagactgaaaaacaggtaaattataacccaatatgaaatgtgctaatataatgacaaatcctgggattaataaaagtgagaatctgtaggaccctgagcctggagggtgtgagaaactggaagagcccagaagtaagaacaacacttatagggcaaccacttcttgggaaactggtcaagaccagcaggaaaacagcctgctgactgcgyggggtctgtgaaggcaactgtaccatctggactcaataatggtgaagctgagccttaatgaggttcaatttgggctgtaagacaaacttcggtttttcaactttaaaaactctataaccacagaatctaacccttcggtttctctcagctcaggattcactttgtctcacaattttatttttccttattaatataccaatgaaatgttgtaggagcatggaagaccatgctttatgtgcttgtgtctccaacatcaatgcctggcacagaaaacctggggtggaagatcctcctgtagagaagaaagggagtgag

SEQ ID NO: 65975 - DNA, 744 bp, Homo sapiens
aaaactctagggaaactttgacccacacatctatagtccagaggataattttccttgtcactatttgttttggctagaggagttttggcaactcttattcattcattcataaggatttattgaggagtctctatgttccagacattgaactagaccttatggactacaaagagggtgaagactaagtttctgcctcagttcacgctatattagggaaaagagactgaaaaacaggtaaattataacccaatatgaaatgtgctaatataatgacaaatcctgggattaataaaagtgagaatctgtaggaccctgagcctggagggtgtgagaaactggaagagcccagaagtaagaacaacacttatagggcaaccacttcttgggaaactggtcaagaccagcaggaaaacagcctgctgactgcgcggggtctgtgaaggcaactgtaccatctggactcaataatggtgaagctgagccttaatgaggttcaatttgggctgtaagacaaacttcggtttttcaactttaaaaactctataaccacagaatctaacccttcggtttctctcagctcaggattcactttgtctcacaattttatttttccttattaatataccaatgaaatgttgtagragcatggaagaccatgctttatgtgcttgtgtctccaacatcaatgcctggcacagaaaacctggggtggaagatcctcctgtagagaagaaagggagtgag

SEQ ID NO: 65976 - DNA, 744 bp, Homo sapiens
aaaactctagggaaactttgacccacacatctatagtccagaggataattttccttgtcactatttgttttggctagaggagttttggcaactcttattcattcattcataaggatttattgaggagtctctatgttccagacattgaactagaccttatggactacaaagagggtgaagactaagtttctgcctcagttcacgctatattagggaaaagagactgaaaaacaggtaaattataacccaatatgaaatgtgctaatataatgacaaatcctgggattaataaaagtgagaatctgtaggaccctgagcctggagggtgtgagaaactggaagagcccagaagtaagaacaacacttatagggcaaccacttcttgggaaactggtcaagaccagcaggaaaacagcctgctgactgcgcggggtctgtgaaggcaactgtaccatctggactcaataatggtgaagctgagccttaatgaggttcaatttgggctgtaagacaaacttcggtttttcaactttaaaaactctataaccacagaatctaacccttcggtttctctcagctcaggattcactttgtctcacaattttatttttccttattaatataccaatgaaatgttgtaggagcatggaagaccatgctttrtgtgcttgtgtctccaacatcaatgcctggcacagaaaacctggggtggaagatcctcctgtagagaagaaagggagtgag

SEQ ID NO: 65977 - DNA, 1463 bp, Homo sapiens
attgggctatcaaaaaaaatcagactgaagttgaatcagacttccatatgttcttgattatagataacatgttcctcctttataagttaaattggggtttttgagagggaatggcagttgtgctatcagacaatgaaatggtgggactcaatgcgattaggctttggagggaaggcatagatgtgccgagaatcacaacgtgctccctggccctcctgtggtgaccgtgagtgtccgtgcttcctttacatgccatctatgtgtccatctaatagtctacaagatagtgttggctgaattcagggttagtcattgtagcctggctgggactgaccatgtgggggacaaaatcagctggactgactgagtcacaggccacttatttgggggcgtagagccacatcctgccggttgtagttttcatgaatggccgaggaaacatttgcaaatgacatggcttcagaactcccaccggctgtgctatgttttccgggtgagcctgattgcttttggctctacccagtgcagtgttttccatcaaatcagtctttcctctgcgagggtatttattacgtgccattttgaaaataaaataaaagggatgtggagcaatcatccagcaaaaccatagaacattttattatcctagacggtgaggggtcaggtttgacatacaacgctgggagcggcgatggccgaacaatgtgctactaaagcgtgatttaatgaggcttggaggatttagttcagtcagaaaagttccactctgtcttgggcagaggagaagctgagctggtgtggtcagctgacctagcggcttctcaccaggtaggcctccgccggcagcctctgtttgttcggatcccagacacagttgtcagggagacttgagtgctggaaacctctgactgatttagtggaccccaaacatggcgcagcttccctgttgcttctgttttacaaggccagcagttaattcaacaaaagcctgaattcatttccctctatatgcattgactgtcagctaagagctggcggccatcaacttcattaaaaaaaaaaaaatcccatttcactggaattgagggcctttgccctctgacacatggcagcatgctctctcgggcaacrctttttgtttcacacttttccaggagaaaaactcattagcagatagtggctgatcatcaagtcattgcaagtaatcatacacatcattctgatccagctgaattaaatccaccagttatacttcattattgtgttggcagaacctcagcctttgagttatgaactaagacactcagggacaagttcaagcatccttttgttatcttctttattgagttagatgtgtttattgaatatttatctagtaactatggtatgcttggttccatggggagtgaatggggtgtagaagagctgaaagccctggttactatcctgcaggggctgatgat

SEQ ID NO: 65978 - DNA, 659 bp, Homo sapiens
tacaggctgggctggagtcaggatgagaatgagagatgaaaaaagcagagagggctggcacctggagttcatgagaggtcacagcaggtctccgtggcatgggacatatctcccttagtgcactcctccccagccttacagagcagcatccatctacaccaatgcaacctcattccttctgatgggtttggaaggaaaaagaatgcttgctagaaaatgtctgtgggccctttgtttccaaaagagcctcataacccctgttccctgatggacttcaggtcttagggacctgaagatctctaagagcaaattctagcctgtctacatctgcgtgccytcacccatgtttgagtctggaggattctgagtactgtcacttgtctgtatctgtgggttcatctatggattcaaccaaatgcagatcaaaaatattcagaaaaaaattccacaaagttctaagaagcaaaacttgaatttgcctagtgctgagcattatgttgaatccacgcaaatgaagtgatgtgtaggcattgtattcagtattataagtaatgtagagatgattcaaagtatttgggaggatgtgcgtaggttatatgcaaatgttatgccattttatataagggacttgagcatgcatggattttggtacccacagg

SEQ ID NO: 65979 - DNA, 663 bp, Homo sapiens
ctgtactctcacccccagaccctcaggtcagcagccctcaggtgtgtggaacccaggctctcagttgtccttgggtcaggacaaggactgtgcaggaatgaggtgctactttcctttgactttatggggagaagaaatgaggcatgggkcagttaagcaggtttgccaaagtccatttactctacacatcaccctgctgcatgaaaggtgggaggttaggagctcacactctcaggaggcaggccaaccctgtgggtgaggaagttgttcctatgtgttccaagtggtatgctgctaaggccaagaatgacctgtgctgagggcaaagtaaaacctcaccttcggcacagctgctaaatcatgggctgcaaaggcctggccaggaacacacagggaggtgctaagtagcttgcagaaaccttctattctcaagtggtcccaatggctagaacattttcagagctaatgctcatgatctggcaatatatcttcccttctctcttcttccagtcatttataccactcaaacctttggtggggtcagacagactttataataaacacatgtccattggttcattgaaaagaggctcacaaatagggattctctccaaaattcataccagaagacagaatttctcctttcctcttttgccaatccct

SEQ ID NO: 65980 - DNA, 598 bp, Homo sapiens
ctttggctgctgggcagagtttgtaggagataatgagacctgcatcatccaggagagagatggtggcttggaccagggatggagcagtgaagatgccgaaaggtgtcagattctgtgwctgtgtcgcctcagtttccttatctgtaaaatgcatacactgtgcagggaataaaagctgacaggcttttctgatagacgtgagagtgttggcctacccgactggaatgatgggattgccattaactgaaatgagggaagctgcagaaaaacagatttttaaggcaaaatcagaaattcatattttggatgtgttaattttgagatactctgttagaccaaagtggcggtgtcctgaaatcctgttgtttggtagacaatgaccggtttagggtttttctttccttttctttttttgcaagtagacttaagaaagcataaaatgaatctgtagtcaggaacctctcagatacaaacgagtatagtatttcagattaagattttggacagggagaaagatgtaatatacatgaataacattgagaataagaatatattcaggcgaataaataattactgctatttacggagtgctgtccct

SEQ ID NO: 65981 - DNA, 1871 bp, Homo sapiens
ccaaccccatgcaaaagtgttccttttaacattccttttagggagatctttatttctcccaaagaaccaattttcttcctgccctcccataaccatgagaacaataagactgagcatactttcccttttggcatcagtggccaggaagcttggaattgaatctcaatgtcattattgccaccatgtatttgtggtcagcatggatattcccttcttccctgggcctctgtttcaatgcatattttattgcatgtcatttatgagctgccttaaaatggtcaggacttctcctgtcatacccgtaggccttccttccaagatttctttacttgaaaaggttccctttgttcttttttttttcttaatttttgccctggtgagggcaagggttgtggtacagaagcttcactgatagattcaggagtctagccccaagcccaggctctgtccctgactttctgggtaacctcaggcaactaacatgctttttctgggtttcagtttctttctctatagaatgataggttgtgatgaggtctactccagatcctttccattctgattctgagagtgtgttagtccctgttggtacctggggtaaatgccaggggattaggcatttacctaatcttacatccaggatccaaagaatcaaggcagaaatctggaaaaaatgagaatttttagggatggaagtctcaccattttcctcatcctgtgatgctttagagttggaagcttgggagaagggggaagggagagaagccggactgaggcttgacagctctatcagtcaggaagcccagggaagcatatgctgtggccaaggttgctgaagggcctccatctgccaggagccactagccaggcagccaccaagctggggctggcaccactgcccctccgttcctcacatttctccatgggtgtctgcagaggggcagccgtggagcagctgggatggtggaagcatgggaaccagtgttccccctactactccctacccagacgggaggcctgccagacattgccctggaaagccagcccaggtcacttggcctagcagagtttgccagtcatttcagagtcactcatgcctgggcctgctgatgtccgctgaggtgataaagcaagaattatttctgaagaagggaaaaagagagatctccttcgacaggtaatagtgatagcaagaaatgttcagtcctctaatttcccaagaactacccccatccctccattcattaccttggttggatcccaaagagacagcagggccaggaaggtggcgccttcctgagtgaatgcatgagacagctgagacgaacagaggtcaaagacccaaggtcaccaagatggacgatgtgatatggctcagaggagctgagggtctctcagtggtgggcttgcacagcagctgggctrctgggtgggacgcagcagttgttggaagaggaaagagcagtgctcctcatggaaagggcttctcctttgcctgcgaggctgattcttagaggaacagggaaagtcactagttagggagaaggcacatgaggaatttctttttctttttttctttttttttttgagatggagtctccactctgtcgcccaggctggagtgcaatgtcgtgatctcggctgactacaacctctgcctcccaggctcaagatattctcctgtctcagcatcccgagtaactgagattacaggcacccaccacctcgtccagctaatttttctatttttaatagagacaggtttttgccatgttggccaggctggtcttgaaatcctgacctcaggtgatccgcccacctcggcctcccaaagtgctgggattacaggtgtgagccaccgtgtctggcca

SEQ ID NO: 65982 - DNA, 538 bp, Homo sapiens
tgaaggaggaggacttataagattctgtactaaggcagccgtgggaagggaggagaaccaggtcggcccgcgcgctcccggctgcttttgctctccctttggtttcgaaagcgtcaagtcccaaggtatttcctaccaattgtgacgtcacccttcctcccccgtttctcacccgtttcttgtctggccgtgacttctgacccagtgttgagctaaaaatgccccgcccsaccctacgcagattcaccccgcgtcccacccaccagtgactgagtgactgggcttctgctgcctagggaagggttcttggcttggccgggcaaatcaattcccacagcaaaatcagaccgaaagcctgttatgagggactcaggcagttggatgtggcgtataggaggaaggctagggcaatcaggaaggtctcctggaggaaggaagaagaccctgactgggccgtgtaggatggatgttcaagtgggaagagagtgtgctattccagggacagggaggcccaggcctgagagtccagttgccttct

SEQ ID NO: 65983 - DNA, 657 bp, Homo sapiens
ttttgtaacattatcttaatagcacattattaataatattttgaataatgaaaatacccagtacaaacatttttccctaaactattgcttatctggtgatgccacccaaggtcaaggaccagggtcacatttctgtttttatacttcaggtcaataggagcaataacaatggctaacatttacagaaaatctatgttccaagtcttatttacatatataaattaatttaatcttcataacagtctataaggtaggtcactattatctgtttttagagactaggaaactgtgacacagagaggaaaagtaagttactcactatcgcayagcatgaagctgtggaatgagaattccaacccagacactctgcttgcagccactccaccccaatgtctaccagaaagtgtggttcagtattttgaaagaatgctggtggattcatcttcatttatatacctccactgtgcctcttgtatgtaattctgaacataaaattagaaaaaaccttcacctgaaaacagagatattccctcagcaatagcataggcatgtcatcatgcccttgagctagctagtcataaaaattcttacagatcacacagtaggttttgtagacaataatgaccagccatgggcagacacagaactccccagccc

SEQ ID NO: 65984 - DNA, 657 bp, Homo sapiens
ttttgtaacattatcttaatagcacattattaataatattttgaataatgaaaatacccagtacaaacatttttccctaaactattgcttatctggtgatgccacccaaggtcaaggaccagggtcacatttctgtttttatacttcaggtcaataggagcaataacaatggctaacatttacagaaaatctatgttccaagtcttatttacatatataaattaatttaatcttcataacagtctataaggtaggtcactattatctgtttttagagactaggaaactgtgacacagagaggaaaagtaagttactcactatcgcatagcatgaagctgtggaatgagaattccaacccagacactctgcttgcagccactccaccccaatgtctaccagaaagtgtggttcagtattttgaaagaatgctggtggattcatcttcatttatatacctccactgtgcctcttgtatgtaattctgaacataaaattagaaaaaaccttcacctgaaaacagagatattcyctcagcaatagcataggcatgtcatcatgcccttgagctagctagtcataaaaattcttacagatcacacagtaggttttgtagacaataatgaccagccatgggcagacacagaactccccagccc

SEQ ID NO: 65985 - DNA, 1242 bp, Homo sapiens
tacaaaatttttgttggtcaggacacgatgatacaatttatcatacccatatatgcattagcatcaaaaccaaaagtactcaaacttgcagaatgagtttcaatgacttaggtgaaaatctctgaaaaataataaatatggagggaggtggtgagtcaggagtgttttaactgcctctaagtagaagcaaaaaagaaaaaataggctaactctctatatgatagcaagacagacttaagtcttaagagacttacaagccaatgagttttaaattctttatgaattctcttaagttctgaaccatcaaagacattggcagaggacaatattgtgtaataaaaacagatattgatgactttgactgaaagtgatttagaagtaggaccctgaacctgatgaagttttagcagtatcataactaattcctttagcctaacattttctttttatgtattctcaagagtgatatatgaaaacgttctacatcttgttcgaagagtttttttaaacacataaaataaaaatcctaaatgatacaaaattattgtgtcttactttaataagccagattttagaaaatttattaataatatgtaaaataatggcacatctcacaactgaggcatcttagaagtacaacttcatctacagtgtgtgtacaactatataaaatgtagaatagcagtacttgccataaaacaatagcaagtaaactacaacctcagatgaagttggaagctactgccctactctgatactaccctagtattttatcactgtctatcaaatgtatcaaatagtgaacaataacaaataagtgaggtggtaaacaggttaaaaaaagggcagttttgccttcagtatactgtcaagaaaaattgtctaagacttgacaatggataaaagagatccctgggtgtcactggggtggaaggttgggtgtcaccctccagataatccctctgtgggattatctggttctatgagggtgtattcctttgaccagctttctattcactagactattttacacatctgtacaggtagaaggtaacatgtagaaaacttgtagtaatgaaartgagatttgttcatatcagtgaaaacgaattttgtctgatagaaggaaaggatatgttgtattgtcctgtatgatattagccagtttggaaattttcagtgctcctgaattgtgtgtgattgtatggatatattcagtgtttctgaatgtgtgtgtattat

SEQ ID NO: 65986 - DNA, 556 bp, Homo sapiens
ttttgccgatcctacagaagttaaatgtcgcagttaaaaatgtggaaccagttgatggtagatatagccaggatgggacatcacagttcctctattcaatacagtgctccatttacacagggcctatctcaacagatattctcagaacacctaaaggcacctggcacatagaccaaaaccatctgctaaaccttctggcagtaataggatgccattacttacagctatggtcagaggaatctgcgaggtggtaaattgcaatgtcactctgtgtattctccatgaatgttactttctytgtctctctcctgggtatgatacaacatttaaaagacaataaatatagcaacactgtggtaggccatttacttactaaaatggaagaacgtggccatggagagtcagagcactgtcacctgggcatttaacagtgctgcaggcaagggttcagggtgcagcattctcatatgcagcagttgttgtagaaaacatggccttgactggaggtgttctcccaaactaccccttgatatgcactgaggtatagaatctcaaa

SEQ ID NO: 65987 - DNA, 1279 bp, Homo sapiens
tcatgaaacattgtcttaatcttattcattgtaaatattctacctagaattgcacatactacaaatactttgaagatatctttgtaaattaactttggtaaactctatagacaagtcctaaaacaatttgtgcaactgttttttaaatgggactctttcttttttggttttgtctgaggcccatagacaagaggagccaaccactcacatacacttagagaaaacatggtcaggaaccagctgtgagactcttagctttacttcaacaagagatgttttaaaattggagagggcaaagttggagactaggaaaacagttttgaaagagctgtgtgaattccacctacataaacctcttcacagaagtctggagaaggttgattcaatgaaaccacttagattcagtggtgcttacactggtcaaaaccatgaaatcaaaagaggatagttcttgttctcccaaattcagtgtaataataagaggttttttccttgggtatgtcctgttcttctcgatatgtgaaatcaaaagatgcacttatgttttctttatgtgaccaaggtataggacatgaaataacaaaaccrgagctggcagggagcttagatactcctgaaagattgccttgagtagagaaaattcttggcagagagaagataaaatgtaactttgcatgccttatatttgccaatgagaagagatttccaaagatggggacatgctggggattggaaggaggcataccttagaaagaatctgtcctttttttgacaaaaagaagcagcttaaaatgctggaagtcagagaacaccagtgctgtattactatcacacaactggctaagaaagccctgttgtatgttttacctcctcctggtattcctacttccaccatagaaatgccagagatattttcatgtttgaaacaataagaagcaaaataggtagaaaatcaagaaaaaagtcatcatacttcaatttcccacttcgtgcaaccagtttggagcatgtttaagatgagttaaacaaacaaacaagcaaaaatatttttttttgccctgcttagtttagatgcattattataattactatttttattatttacttcttagagcagttttaggatcacagcaaaattgagataaatgtacagaaatttcttacatatctcctgctcccacacatgcatagctttccccaccatgaacataccccaccagaaaataatttgaatttaagtaaaatagaaattacagtcattagactggggataataatt

SEQ ID NO: 65988 - DNA, 721 bp, Homo sapiens
agaaaatagcagtaatattaacatatcaaaaataaatattatacatatgtacatggtaactatgcattaatacaaggataaaagctgttgcaaataaattgaaatcatataggtcctgggaaaccagctcaattatattcagatataactacccttattcaaattctatgtctagttattccatcatcataaactacttcattcacttcagaaatgtaaggcagaagtcacacagaagttacagacaacttaacccaaacaatcccacatgccctgtaaaaacctatcacaatcactttaccccccacaatatactatttgtrtatttgatgaaataaaccattgcattatttctttcctttactcccatttacagagagcatattgccaaacacaccagcttccagttttcattttaaacaactgcattatatggttctaaagtattcattagttcatagaagaaaatctgttgctagacatttaattgtttccattacattgaaaaactaacttgacctaattcagtattttagttacacaaccctaatgaagtgaatctctctcctttttaaaattacagaatgatttctcttttcttttgggaaatactccaaaatgcttaacaggacttatgcagcctccatctgtattgtctgagctataatctccacagtctccccacattcccctggcctcttctttttctctaggcactact

SEQ ID NO: 65989 - DNA, 1057 bp, Homo sapiens
cagctgtgtggtcgccagggcctccagctgccagtcagatgggaacttgaaaggtgacgtgaccttcagataaacaaagcaagagctgaggtaacagcaaacatcaggcaaatatttgccataggaactgcgtttgaactctcccccgtggtgtaggtccaggtttgctagcacaacctgacctcggcaaccttgccctctacttgttgttttgagataattcattttagtgtgtaggttttccacaggctctgcttgagtcaataagtgatctcatgaccccagagcattctatttggggctcctctacaggaagcccaacatggctccagggcaggtgggtaatcttttcttttctggatggaacacacctagatactttagttatggtactcatgtcttaggaagagtgtaaaaaactgaagaagtaattaagaacatcttgaaccataaggtggctcagatggaatgaaatggatgagtttaccttgaaagcaacacatctcttagcccactacttcttggttcatgcactgttgcttttctatggctgatagaaagtaatcttgattatcagaagatgtgggtctattattaaggctatcattaagaagacagaggaggaagtgggaagaaaaggaagaaggatgaagagagaaggagatggaaaacaggaaggagatgaagaaggagaaggaggcatggggaggggaaagcagggagaaagaggaggaagagaagaagaaggtggcagagaaaagaaggaagagaagagaactgatatctactgagtgcccactgcatgccaacaattttgcatgaattatcttattcaatcatgaaaacagtcctttaatttaggcactagtagttccccatttttcagatgagaacctcactcctagagagggttgataacttctcccaagtcacacatccaggagttacagggctggaactgcgccactcaggatggtgtgaccccacagctccaccyccatctgtgcttgctctagaggcctgtatctacacagaacaccactgttggggaagggga

SEQ ID NO: 65990 - DNA, 724 bp, Homo sapiens
tggggtcaagattcttcacttctcttcctggctggctacagagccctgaatatactgcttctaggagaccagggaagatgacaaggaggtttagtttttagattgtttctrcttgctttggatttgaattgaaatttttttccctcccttgttttgctgagaaatagtttggtttcaatggaagtagattttctagaaccttgaaccacgattgtaaattggtggctcatgggccagatgtagctggcaaatgtgttttttggcttctttaatgcttaaattattttcattagtagccaacatgtaaaagccagagtatttcacataaaaatccagattcagccaggtgcagtgactctcacctctgtgatcccagcactttgagaggctgaggcaggaggattgcttgagcccaggattttgagaccagtctgggcaacgtattgagaactcctctctacaaaaaattaaaaattagctaggtgtggtgacacatacctgtagtcccagctactcaggaggctgaggcaggaggatcacttgagcccaggaggttgaggttgcagtgagctgtgatcacaccactgtgctccagtctgggcgacagagtgagaccctgtctcaaaacaacaaaacatgctgggtgcagtggctcatgcctgtaatcccagcactttgggaggccaaagcaggtggatcacttgaggccaggagttggagacca

SEQ ID NO: 65991 - DNA, 724 bp, Homo sapiens
tggggtcaagattcttcacttctcttcctggctggctacagagccctgaatatactgcttctaggagaccagggaagatgacaaggaggtttagtttttagattgtttctacttgctttggatttgaattgaaatttttttccctcccttgttttgctgagaaatagtttggtttcaatggaagtagattktctagaaccttgaaccacgattgtaaattggtggctcatgggccagatgtagctggcaaatgtgttttttggcttctttaatgcttaaattattttcattagtagccaacatgtaaaagccagagtatttcacataaaaatccagattcagccaggtgcagtgactctcacctctgtgatcccagcactttgagaggctgaggcaggaggattgcttgagcccaggattttgagaccagtctgggcaacgtattgagaactcctctctacaaaaaattaaaaattagctaggtgtggtgacacatacctgtagtcccagctactcaggaggctgaggcaggaggatcacttgagcccaggaggttgaggttgcagtgagctgtgatcacaccactgtgctccagtctgggcgacagagtgagaccctgtctcaaaacaacaaaacatgctgggtgcagtggctcatgcctgtaatcccagcactttgggaggccaaagcaggtggatcacttgaggccaggagttggagacca

SEQ ID NO: 65992 - DNA, 634 bp, Homo sapiens
ctgaaatcagtcgagtgtggtggtgtgcgcctataatcccagctactcgggaggctgaggcagaagaatcacttgaacccaggaggcggaggctgcagtgagtcaagawccgccactgcactcccgcctgggcaacagagtgagactctgtctcaaaaaaagagacagccttatggtttcgttagaatgggaaacggcagcagggctgaaggaaattaccaagactagctgcacacttgcttatgaatcagaacattacacttctatgagaccaagtctcatatatgcattgttaagctggtacagtatttacttccacttacctactgcctcaccgtcatggaccagcctcggatactccccagcgaaaacatccagggagagcgtggccgccacggcacacctcaggccttggtcagggacacagagaaggaagagggtgctccctgggaagggcctcctcttcctcctggaacacagacccaggaaggtctagtgaagctccggaagccaaatctcccacgcgcccacgtctgggtacccacccacgaccagcatcacttagtcatttttatatttaaatcgccagaagcctgaaaactgtagaaaggacttgtcccaggtgattcattgg

SEQ ID NO: 65993 - DNA, 1028 bp, Homo sapiens
tcagctctttaaaaattctgtgttgtttgtcttttgttgtaatcttggtcgccagaaccatctatatactgatctctttaaggtacagttaacttacagtgtctcacttacatgcgctgctgaggtgaaggtgtttaaaatcaataagtgtaagtagtttccctggaagagagaagtaaaacgtaccaatcactcagtgctggaatatttttatgctaagcataatttccttctttagtagttagagcagttttttaaaaaaaatagttaacacgatgcagaagtcaaacagcatgattctgtttccgtattttcctcactttttggtatgctgcggcacatttagaacatgatctgtctggaggttttattcacatggtggcctgcccttcagggagaacttgcttgccttctttctttggcagtttggatttgacctagccctgtggtatgtgcaagtaggaacatctacaaacggttaactctttaagtcttcctacgatttatgttcagttcattcacacacacacacacacacacacacacacasacacaaaagctttgattgtaattatgaacgtgaattaaaactgtttcaggccatcagatttatgtaaaagttaggcttgttttgttcattttaataaaagaatagtgacttaaaaattacagtcgtgataacaaaactgtgaacagcagtggcatctatgtgggtttttgtttttctgaagatgtcgtattgacaagcttattttgtatcggttatgcccttgcattgttaaaataattggactgatttctccagaaccatattcctttacaggctctgtaaagacactcttgtcattcacagactctggctggagcaatgggaaaacactagcatgtgtaattacatagactggaatattaaatatactgttttgtgatgataaactacaaaattatcgtccctgagcttttcacctactgacttataggtttgagacaaaaatactatacactggaacataaagaacatatgtata

SEQ ID NO: 65994 - DNA, 755 bp, Homo sapiens
catctctgcaaattgtgaagtgggtgagtgggcaagggacattattatctctattttagggatgaatgtgacttggcctcatgttacagctgctagactcctgggctcaggacccctgacactaggacacgaagaagacaataatctcttatcagagtctccaggaaatgtctgaaccagaatctgcaattttaaaggcttgaatatggggactcmgggggcatttggttcccacatgtttaatgacactttcagaaactaggctacagagggaagtacatcctacgatgggctctgtattctgtttccagcacagtctgatgtggattcaaatctcagctctcctctctcaaaaatgcagtaagctataatccaaattgactgttgggaggaaaaacatgggatttgacaacatggggtttctctgggaccctttagtgcccacaaggccttttctggtgtcctttttagattctgacatgtctgtatttcagatgactcatcaactgaagaagtagaccaaggaagtgcagatggggttctgaggtgggaaaggtctcttctcattggggtgggagggtgaggagaggagcagaacgagggaaagaaaataacagaaacagtgttaatgaagattgctgattttttagagagccgaaaaagtaacaatgggggaggtctgagatttggggccagcatgcagttggtagccagacacatagatttaagtcccagcacagccacttaccagctaa

SEQ ID NO: 65995 - DNA, 755 bp, Homo sapiens
catctctgcaaattgtgaagtgggtgagtgggcaagggacattattatctctattttagggatgaatgtgacttggcctcatgttacagctgctagactcctgggctcaggacccctgacactaggacacgaagaagacaataatctcttatcagagtctccaggaaatgtctgaaccagaatctgcaattttaaaggcttgaatatggggactcagggggcatttggttcccacatgtttaatgacactttcagaaactaggctacagagggaagkacatcctacgatgggctctgtattctgtttccagcacagtctgatgtggattcaaatctcagctctcctctctcaaaaatgcagtaagctataatccaaattgactgttgggaggaaaaacatgggatttgacaacatggggtttctctgggaccctttagtgcccacaaggccttttctggtgtcctttttagattctgacatgtctgtatttcagatgactcatcaactgaagaagtagaccaaggaagtgcagatggggttctgaggtgggaaaggtctcttctcattggggtgggagggtgaggagaggagcagaacgagggaaagaaaataacagaaacagtgttaatgaagattgctgattttttagagagccgaaaaagtaacaatgggggaggtctgagatttggggccagcatgcagttggtagccagacacatagatttaagtcccagcacagccacttaccagctaa

SEQ ID NO: 65996 - DNA, 750 bp, Homo sapiens
ctcaccttcactacatgtcattccatctcccaaaattcagatgtaagacaactttaggagtttacgtttttcctattaagtaatgaagtaaactgttaagagttaaagtcatcttagaatttaggtttcatactggactttgctctcttcccttctcagtcccagccagtcgaatttggtcttctgkggtcaacccaaacctaggtcagatggtgtaaacatgtgtcatcagttgaggctgctataacaaaataccacatgctgcgcttaaacaaaagaaatttactcccttgcagttctggaggatggaagttcaagatcaaggtgccagcaaggtcgggttctggtgagggctctctgcttggcttgtagtggcagctttctcactgtgtcttcacaatgggttgagtgagagagagctcgggcaccagcatgctagctctcaggtgtgtcgctcttcttataaggacactaatcccctcgtttaaaaaaaaatcattatttatttatttagtgagacagagtctcactctgtgtcccgctggagtgcagtggcatgatctcagctcaccgcaacctatgcctccttggctcaagcaattcttgtgcctcagcctcccaagtagctggaattacaggtgtgcaccaccacacctggctaatttttgttttctgttttttttttgatagagtctctctctgttgcccaggctggagcacagtggcatgatctagcctcactgcaagctc

SEQ ID NO: 65997 - DNA, 658 bp, Homo sapiens
ttatgcatacatatgagtaattgtatctcaccagcagtaacacactgttgtacctcttgttttcacatgtgcttctccttattagactataaactccattcaccatctttctggagctgtcatctttcattaggaacatcgtaatagcctttcagctagtagccygcccccctccactgttacctgcttttgaagtgattctccccatctccagagtaagtgggctcatcaaactatgcttctctgtgtgaaaggtgtggtggtgggaactgggtgaaattagctccaggacaccattagcacttggtctaatttatttactacagtaggtatccatgtgctgagaggttctcaagaaggatggggagtggggaagagtaggagtaagtggagaaagtaggggctgagaaactaggtgaagaatcagaatcaggtgtagacagccatacgagtcacagatctgaaaaggtcgagttagccagagttcaaccagggctgccagaacttgtgtggttagggtgtgccaggcagtgccgttaggagcttccatgtattcaagggttggagtggtcatgaaatgagaaaacgctgtgcagtgacaaaaagtagttgcaaaattctgagtttggagccgagaggaacatacactgtgggagat

SEQ ID NO: 65998 - DNA, 658 bp, Homo sapiens
ttatgcatacatatgagtaattgtatctcaccagcagtaacacactgttgtacctcttgttttcacatgtgcttctccttattagactataaactccattcaccatctttctggagctgtcatctttcattaggaacatcgtaatagcctttcagctagtagcctgcccccctccactgttacctgcttttgaagtgattctccccatctccagagtaagtgggctcatcaaactatgcttctstgtgtgaaaggtgtggtggtgggaactgggtgaaattagctccaggacaccattagcacttggtctaatttatttactacagtaggtatccatgtgctgagaggttctcaagaaggatggggagtggggaagagtaggagtaagtggagaaagtaggggctgagaaactaggtgaagaatcagaatcaggtgtagacagccatacgagtcacagatctgaaaaggtcgagttagccagagttcaaccagggctgccagaacttgtgtggttagggtgtgccaggcagtgccgttaggagcttccatgtattcaagggttggagtggtcatgaaatgagaaaacgctgtgcagtgacaaaaagtagttgcaaaattctgagtttggagccgagaggaacatacactgtgggagat

SEQ ID NO: 65999 - DNA, 658 bp, Homo sapiens
ttatgcatacatatgagtaattgtatctcaccagcagtaacacactgttgtacctcttgttttcacatgtgcttctccttattagactataaactccattcaccatctttctggagctgtcatctttcattaggaacatcgtaatagcctttcagctagtagcctgcccccctccactgttacctgcttttgaagtgattctccccatctccagagtaagtgggctcatcaaactatgcttctctgtgtgaaaggtgtggtggtgggaactgggtgaaattagctccaggacaccattagcacttggtctaatttatttactacagtaggtatccatgtgctgagaggttctcaagaaggatggggagtggggaagagtaggagtaagtggagaaagtaggggctgagaaactaggtgaagaatcagaatcaggtgtagacagccatacgagtcacagatctgaaaaggtcgagttagccagagttcaaccagggctgccagaacttgtgtggttagggtgtgccaggcagtgccgttaggagcttccatgtattcaagggttggagtggtcatgaaatgaraaaacgctgtgcagtgacaaaaagtagttgcaaaattctgagtttggagccgagaggaacatacactgtgggagat

SEQ ID NO: 66000 - DNA, 648 bp, Homo sapiens
tgctccccagggatgcactcactcacagagcggccactgcacacagtgcctctctgtcgccgtctgaggtgccggctgtctttttttttctttttttaaatatttaaaaatgtaaaactttaagtgagactctgtttcaaaaaaaaaagtatagaactttaatcatatgcctgttttgaagagcagagctttcagtgagaaacaaactctgctggcccacccacccccttttaactgcctctcagaggggaccactttggaacgtgtatccacatggccctgcctgtacagccacctcctgaggttgccgagtgagtgtcagctagcgaccgtctggctgcccagccgcagtccgcagagccccggcccagcccacgcagccctggccgactccgcgttgggcgcgcacggcccttggctgtgaacacgctgtttgagtcgagccaagtgctgtgctgcttctgctccctgtgcaggcagctgtgtctcagcagctagaagggctgtgggttcccaggtgcttactgccctgtggccagccccagcgccctggccctccggaccctgtgcctggycatgcctgttcctcccttctgcttcatccttgagagtccccttgtttccttggggttcagtcccatgtttcct

SEQ ID NO: 66001 - DNA, 579 bp, Homo sapiens
tgctgaatgtggacacgggtctgccggsgggggcggtgcagcccagcctttgtggggacagggcagcaaagccaagaggaaacaggctcgacctcagccaactcctcgggtcgggatccccaagaggcttcccacacgcaacctgctgggactccggcacccatcatgcagaaacgcaagcaggaccctagaacagctaccctgagcctcagagtccagctctgccctcaggttgagagccctcagccctgtcctttctagattggaggactgtcctcccctcattcattcagcctctcacctggtcttgagttcagaagagatgttgtcgaagaacgacttggatttgtcatagtagcagttgggccccagaaggtcttcctcagcgggcgcttcggcactctgggtcaccacagccaggtccttctcttcccccttctcagccttgtcatctacaaaaagaagcagaacacgtggagatggaggaggggcagagcgcacagccttttagcagggtggtccctccgggctcactcggaagccaccctcaagctaagacatcaactatgccttgtgcaa

SEQ ID NO: 66002 - DNA, 2599 bp, Homo sapiens
tgaaccctgtgttcatcagagtgcacaccttccattacgaacacacccctccagggggcctgacggcctgtstttggggatgtggtccctggagctcaagccagttaggagctgtctgggcctttagtgattgctcagcttccctaatccctagggaagggcagggctcctgcagattagacccagggctttttctgatatttctgtccaggattagaggccacaggcaaggccagggaaggcaaaggagggagaccctgggctgcttttgagaccctgaggcaatgggttgggggttcatcactgccctggagcaggaaccacgaggtgatttggaagacaagggggtagagggtggggcaggaagtcagggggcaggggttctaaccctggggggacagaggaggcttcttcatggggggagggagagaagagccttgggtcctgatgggcaagaccaaacttcaaaccctaaactgtgctctctctgcccccacatcgttcctgaatctgcccctacctgaaaacaggcagctacaaggggctggggcccagcctttgcctgccttgtggtcgcccttcctggggtgtcgctctcctccaggtggcccagtatggcttgccacccggtctgcattccagccagtgggtgggggaaggaaggagacactcgtgttgcaggatgcgcctggacgtcagacccatcccttctctttccatcctattgaccagaactgagtccagggggccaccccaggatgagggatgccagagaaggtggacttcattctgggcagcctgaggttctgttgatatcaaagaagagagcaggagcgttgagtaacagttagacgtgtctacaaagagacatgtggctagataaagtatctcattctcgggccacctaggccttgcaaagctcaaggaaaaattaaaacgaagcatttccacatctgtagaaatggtccagccatttccacatttgcttcctactggggcccatgcagaagctgggtccttgaaaccctgctgaaacaccctctgagtcacacatgctggaggtaatgccacctgtgtccaccagagtcacgtacttcctcttggcgaaaagaagtgctgctcaaaaaagacgcatttagagaatctgtcaagatcccctctgacactgaagttcttatttgattaataagctaacaagatgcatttccattctcccttgactttaacagaattgaatctgttattccatgcatttttttttctggagacagagtgcaacacagtggcttagagtatggatttcggaggtaccctaacctccctgtgcctcagtttccttatctgtgcaatggagatgataataatctcaggtatagtggtgagaatttaacaagggaattcctatgaaactttcagaacagagcccagcatgcagtaggcatgaaataatgttcgtagggagagggtagccagtattttcttcccctctccccggtggtcaatattaaccagtattttcagcacacacattgcagacttccaccggactgcccatcaccgtgctctcccttagcccactccctgaattctactcgggtgtgtgccagcaacttaacatggccgcttctctttctgtagctgagttggccaagcgctttgacatatgtcacctcagtctgagctcccagcagtcatgagtgatgagtattaggaatttgctctattttaccaaggaaaaaaccttgatccctagaggaaaggtccttcccacagtcaggtgcctgtgaacagccacagcaagactcggatccccggctctcccatgagtcatccagcatggtgggcagccagcagctccgtgccaggtgctgccataggcgctgggcacacgggttcttaagtcaggtcagtcccttcctccttgagctcatacacaggtaaggagggagagagatgttccccaactcatcacgcactcaagttcatttcagatggtggtgaggggtcctgagaagaggaaatggggtgacatgctaggaagtgcctgggtggagggggctcctggagacagggtggtcagggaggcactcacccaggaggtgacacttgacagagccctgaaaagtgaggaggtgcaaccatgcacagggctggggacaggaacacggccacacaggggaatgaacctggccgtttgtggcacagaaggaaggtcagcaagtccaggagaaaggggaggagaagagaacaggcccctggcgcctgcacgtctggaagcatcgccaagtttccaagcatctttccagggcagagaaggctccactctgggcaggaggggcttgcttcaccagcaggaggagttggggagcaggagggagtcctgatgtcctggctacaagtccagggctggaaaaccaggcgggcctccgccgaggctgctccttccccattgggcctccgctatctggttggggcatctcagactgaggagcaggaagtgtgactgtcgcaggccaatgtctgctgacgaatctcccagcccagatggtgggcctgcggtgggcttcctggtgcacgcggaggcgactctggcgagggg

SEQ ID NO: 66003 - DNA, 2599 bp, Homo sapiens
tgaaccctgtgttcatcagagtgcacaccttccattacgaacacacccctccagggggcctgacggcctgtctttggggatgtggtccctggagctcaagccagttaggagctgtctgggcctttagtgattgctcagcttccctaatccctagggaagggcagggctcctgcagattagacccagggctttttctgatatttctgtccaggattagaggccacaggcaaggccagggaaggcaaaggagggagaccctgggctgcttttgagaccctgaggcaatgggttgggggttcatcactgccctggagcaggaaccaygaggtgatttggaagacaagggggtagagggtggggcaggaagtcagggggcaggggttctaaccctggggggacagaggaggcttcttcatggggggagggagagaagagccttgggtcctgatgggcaagaccaaacttcaaaccctaaactgtgctctctctgcccccacatcgttcctgaatctgcccctacctgaaaacaggcagctacaaggggctggggcccagcctttgcctgccttgtggtcgcccttcctggggtgtcgctctcctccaggtggcccagtatggcttgccacccggtctgcattccagccagtgggtgggggaaggaaggagacactcgtgttgcaggatgcgcctggacgtcagacccatcccttctctttccatcctattgaccagaactgagtccagggggccaccccaggatgagggatgccagagaaggtggacttcattctgggcagcctgaggttctgttgatatcaaagaagagagcaggagcgttgagtaacagttagacgtgtctacaaagagacatgtggctagataaagtatctcattctcgggccacctaggccttgcaaagctcaaggaaaaattaaaacgaagcatttccacatctgtagaaatggtccagccatttccacatttgcttcctactggggcccatgcagaagctgggtccttgaaaccctgctgaaacaccctctgagtcacacatgctggaggtaatgccacctgtgtccaccagagtcacgtacttcctcttggcgaaaagaagtgctgctcaaaaaagacgcatttagagaatctgtcaagatcccctctgacactgaagttcttatttgattaataagctaacaagatgcatttccattctcccttgactttaacagaattgaatctgttattccatgcatttttttttctggagacagagtgcaacacagtggcttagagtatggatttcggaggtaccctaacctccctgtgcctcagtttccttatctgtgcaatggagatgataataatctcaggtatagtggtgagaatttaacaagggaattcctatgaaactttcagaacagagcccagcatgcagtaggcatgaaataatgttcgtagggagagggtagccagtattttcttcccctctccccggtggtcaatattaaccagtattttcagcacacacattgcagacttccaccggactgcccatcaccgtgctctcccttagcccactccctgaattctactcgggtgtgtgccagcaacttaacatggccgcttctctttctgtagctgagttggccaagcgctttgacatatgtcacctcagtctgagctcccagcagtcatgagtgatgagtattaggaatttgctctattttaccaaggaaaaaaccttgatccctagaggaaaggtccttcccacagtcaggtgcctgtgaacagccacagcaagactcggatccccggctctcccatgagtcatccagcatggtgggcagccagcagctccgtgccaggtgctgccataggcgctgggcacacgggttcttaagtcaggtcagtcccttcctccttgagctcatacacaggtaaggagggagagagatgttccccaactcatcacgcactcaagttcatttcagatggtggtgaggggtcctgagaagaggaaatggggtgacatgctaggaagtgcctgggtggagggggctcctggagacagggtggtcagggaggcactcacccaggaggtgacacttgacagagccctgaaaagtgaggaggtgcaaccatgcacagggctggggacaggaacacggccacacaggggaatgaacctggccgtttgtggcacagaaggaaggtcagcaagtccaggagaaaggggaggagaagagaacaggcccctggcgcctgcacgtctggaagcatcgccaagtttccaagcatctttccagggcagagaaggctccactctgggcaggaggggcttgcttcaccagcaggaggagttggggagcaggagggagtcctgatgtcctggctacaagtccagggctggaaaaccaggcgggcctccgccgaggctgctccttccccattgggcctccgctatctggttggggcatctcagactgaggagcaggaagtgtgactgtcgcaggccaatgtctgctgacgaatctcccagcccagatggtgggcctgcggtgggcttcctggtgcacgcggaggcgactctggcgagggg

SEQ ID NO: 66004 - DNA, 2599 bp, Homo sapiens
tgaaccctgtgttcatcagagtgcacaccttccattacgaacacacccctccagggggcctgacggcctgtctttggggatgtggtccctggagctcaagccagttaggagctgtctgggcctttagtgattgctcagcttccctaatccctagggaagggcagggctcctgcagattagacccagggctttttctgatatttctgtccaggattagaggccacaggcaaggccagggaaggcaaaggagggagaccctgggctgcttttgagaccctgaggcaatgggttgggggttcatcactgccctggagcaggaaccacgaggtgatttggaagacaagggggtagagggtggggcaggaagtcagggggcaggggttctaaccctggggggacagaggaggcttcttcatggggggagggagagaagagccttgggtcctgatgggcaagaccaaacttcaaaccctaaactgtgctctctctgcccccacatcgttcctgaatctgcccctacctgaaaacaggcagctacaaggggctggggcccagcctttgcctgccttgtggtcgcccttcctggggtgtcgctctcctccaggtggcccagtatggcttgccacccggtctgcattccagccagtgggtgggggaaggaaggagacactcgtgttgcaggatgcgcctggacgtcagacccatcccttctctttccatcctattgaccagaactgagtccagggggccaccccaggatgagggatgccagagaaggtggacttcattctgggcagcctgaggttctgttgatatcaaagaagagagcaggagcgttgagtaacagttagacgtgtctacaaagagacatgtggctagataaagtatctcattctcgggccacctaggccttgcmaagctcaaggaaaaattaaaacgaagcatttccacatctgtagaaatggtccagccatttccacatttgcttcctactggggcccatgcagaagctgggtccttgaaaccctgctgaaacaccctctgagtcacacatgctggaggtaatgccacctgtgtccaccagagtcacgtacttcctcttggcgaaaagaagtgctgctcaaaaaagacgcatttagagaatctgtcaagatcccctctgacactgaagttcttatttgattaataagctaacaagatgcatttccattctcccttgactttaacagaattgaatctgttattccatgcatttttttttctggagacagagtgcaacacagtggcttagagtatggatttcggaggtaccctaacctccctgtgcctcagtttccttatctgtgcaatggagatgataataatctcaggtatagtggtgagaatttaacaagggaattcctatgaaactttcagaacagagcccagcatgcagtaggcatgaaataatgttcgtagggagagggtagccagtattttcttcccctctccccggtggtcaatattaaccagtattttcagcacacacattgcagacttccaccggactgcccatcaccgtgctctcccttagcccactccctgaattctactcgggtgtgtgccagcaacttaacatggccgcttctctttctgtagctgagttggccaagcgctttgacatatgtcacctcagtctgagctcccagcagtcatgagtgatgagtattaggaatttgctctattttaccaaggaaaaaaccttgatccctagaggaaaggtccttcccacagtcaggtgcctgtgaacagccacagcaagactcggatccccggctctcccatgagtcatccagcatggtgggcagccagcagctccgtgccaggtgctgccataggcgctgggcacacgggttcttaagtcaggtcagtcccttcctccttgagctcatacacaggtaaggagggagagagatgttccccaactcatcacgcactcaagttcatttcagatggtggtgaggggtcctgagaagaggaaatggggtgacatgctaggaagtgcctgggtggagggggctcctggagacagggtggtcagggaggcactcacccaggaggtgacacttgacagagccctgaaaagtgaggaggtgcaaccatgcacagggctggggacaggaacacggccacacaggggaatgaacctggccgtttgtggcacagaaggaaggtcagcaagtccaggagaaaggggaggagaagagaacaggcccctggcgcctgcacgtctggaagcatcgccaagtttccaagcatctttccagggcagagaaggctccactctgggcaggaggggcttgcttcaccagcaggaggagttggggagcaggagggagtcctgatgtcctggctacaagtccagggctggaaaaccaggcgggcctccgccgaggctgctccttccccattgggcctccgctatctggttggggcatctcagactgaggagcaggaagtgtgactgtcgcaggccaatgtctgctgacgaatctcccagcccagatggtgggcctgcggtgggcttcctggtgcacgcggaggcgactctggcgagggg

SEQ ID NO: 66005 - DNA, 518 bp, Homo sapiens
gcccgcctcagcctcccgaagtactgggattacaggtgtgagccaccgtgcccagctgataatcctccatttttaaaaagcatcctgtatgtgctatatactgtccttgttgcttttcttaacattaaccaatctaacctcctctttgtagacttggaactgatcagagttataaacaaatggccaggattccccacctagcagagtagggttaactgatcatctgcctttccctaagccacaactctttcactgtaacccacactttctcctrtaggcaagtagagaagggcatgaaatgtgtcatatacggatgaaggaaataatgaattatttctgtgttagtcatcttgaaaatagatgatactgtgttgttatatttttataatgtctttgaacaatggcactttaggaaatctggaataaggtagaaaattactttttactaattataaaaagtaggctgggcctggtggcttgtgcctgtaatcccagctacttgggaggctaaggtggga

SEQ ID NO: 66006 - DNA, 622 bp, Homo sapiens
aatgatgtgtttgggtttttattaagtagatatacagtatcttaaatatgcatgcactaagcactcctgcaagaactttagcaatcaagtgatatctaattttgtcatcttagagttgaaaaaaatggaagccagagaggtttgaagaccaggtcagatcagggttcttctacattgtatgtattagtcaggaccctctgggttgcaagcaacagaagactcaattcaaataacttaagcatcaaaggcagtctgtaggttcatgtggctgaaaagtgtaggcacagcagtgtctgggagctcaacttatatcacctgggccatgagtctcttcatttcttgggtccactttccgttttataggcttcattctcagattctgaatagtgacttctgacagctccaggttcacactattcatattgccagcaaccctagggaaacaragagcacctattttcagttgctcaggaaagtcctgagattagttctggttggactgacttgggtcacgtgtgcatctctgaaccagtcattgtggctgaggggttagattctgctgattggtcaggcctcagtcatgtgtccaccactggaagtttttaaagttagtgtttgcata

SEQ ID NO: 66007 - DNA, 648 bp, Homo sapiens
tcgatagacttgctcaacacagagttgccacaaatcttcaatttgtaaaaaatgcagtatccacaaattgcagtaaaacaaggtatgcctttacatatcagtgaaatgaaccacagggttttttgaaagagacagcatgtgtgtgtgtgcacacacatggacttacacacacacgcacatacttacctgggaattcaaaatatactaaattcctttatatagataggccctttcaaaacagtgaagaaagataggtactttagtaaatgtttttgggaaaattgttcattttatagaaaaatcattaagacgaaaaaagtccatataggtttaatattaaaagatttaaaaagaattctagcaggaaacataagaaagtacttttataattcttaaatataaaggctttaaacttttttgttttttattttttcactttgaaataatttgaaaattattacaaaaaatttccatcacttgtatggaagattgtaaatcgtcactcagatttacaaatattaatattytgcagaagcacagtacaattattaaaatgaggaaactgacatggatacagtattcatatttactccatggcctttactcacatttctccagttgtctcatcaatgccctttttctggctca

SEQ ID NO: 66008 - DNA, 892 bp, Homo sapiens
atgaacacaaaaataatctttaaaggctaggctggccaagacttagagatatcacacagggctctatttctaaatctagaatgattccattttagggcttcctacatctaaaaatatgctcaggagtagggcaacttagatctgaacattataacttgataaatgaggcataaataagctttaataagtggtaaataattctacattaggtatttgttgaataaaactgacaagctaagagtaggggatttgacatctcacagccttgtgttgaatgaatatatatcctatgctctggttgcttaatttacccagaaaaaaaaatgtttgattcatcttggtttttatctaacaaaagtaaatctaacaaaaacgttagaatgaggaaagcaaaatttcttgtttagaatacacagctatagttttttgttaaacttcttgcccagaactcttaaaatagtaataatgtacattcgttcaggtatatgcaggtaaaataacttaggtttctactcccacccccgacagtaacagtgagatttttaggtagctcagtcaccacaggagtgtgccttctcagttcaaaggtaaattccagtgaatgtagcatctagttaattggtcaattaggtaccattgtgggatgtgaattaccaaataggttttattctttagaataaggtgtttcttttcatctcaattttgtaaatgatgttatattacatagtcagaaatatatatattggcaaaattagttaccagtataagcttcaaaatgtcactattttcacaaatttttttttttttttttttttttgasatggagtctcactctgtcgccaggctggagtgcagtggcatgatcttggctcactgcaacctctgcctccca

SEQ ID NO: 66009 - DNA, 892 bp, Homo sapiens
atgaacacaaaaataatctttaaaggctaggctggccaagacttagagatatcacacagggctctatttctaaatctagaatgattccattttagggcttcctacatctaaaaatatgctcaggagtagggcaacttagatctgaacattataacttgataaatgaggcataaataagctttaataagtggtaaataattctacattaggtatttgttgaataaaactgacaagctaagagtaggggatttgacatctcacagccttgtgttgaatgaatatatatcctatgctctggttgcttaatttacccagaaaaaaaaatgtttgattcatcttggtttttatctaacaaaagtaaatctaacaaaaacgttagaatgaggaaagcaaaatttcttgtttagaatacacagctatagttttttgttaaacttcttgcccagaactcttaaaatagtaataatgtacattcgttcaggtatatgcaggtaaaataacttaggtttctactcccacccccgacagtaacagtgagatttttaggtagctcagtcaccacaggagtgtgccttctcagttcaaaggtaaattccagtgaatgtagcatctagttaattggtcaattaggtaccattgtgggatgtgaattaccaaataggttttattctttagaataaggtgtttcttttcatctcaattttgtaaatgatgttatattacatagtcagaaatatatatattggcaaaattagttaccagtataagcttcaaaatgtcactattttcacaaatttttttttttttttttttttttgacatggagtctcactctgtcgccaggctggagtgcagtggcaygatcttggctcactgcaacctctgcctccca

SEQ ID NO: 66010 - DNA, 954 bp, Homo sapiens
catgagtgataccaagtgaggaagagggactcctgattggaatccaagatgaagttaaactctaattcaaagaaacccacctgctagagggagagtgccactgtacatcatggaggtacacactttcccgaaaaactatgaacccggaaggaaatgctctgctcacatccttttgccaggatcctcttagctgcagagatgtctgtgaggttgtctctgccaggcacagacatgctgcttgactatccaagccctcagaggacctccatgctccttaaggaagagaaggcagtgtccctctccccactctactgctgtttatcccctggactctacttagtcttctagagtcttggttgaatttcatttcccattgagctatgtagtcccttgagctcaaattttttggtgggggaagrggagttagttattcctaattatcttgttttttctttgacctcttcatagaaaacccctacttttctgagattccaaaacaaaagctgtcatatacaccaaacctataggagccactggtcacaaaaatagggatatttagagtcagtcttagtttggattataagaaccacttttagtgagtgaaaactacttgggacacttagaagcagtgattatcggcaaaagaaaaactggatgtggtcagatacgtgctaagactttggaaaaacagatttcaaacaattcgggaaaaaagtctaaagtggacttgagaagggaatatccagagatttagtttcaaccctataatctcaaataaaatctatagaagaaagagataagatatcaaaagatttgcatttctctgatggccagtgatgatgagcattttttcatgtgttttttggctgcataaatgtcttcttttgagaagtgtctgttcatgtccttcgcccactttttgatggggttgtttgtttttttcttgtaaatttg

SEQ ID NO: 66011 - DNA, 776 bp, Homo sapiens
  misc_feature (1)...(776): n = A,T,C or G
aaagccatagtttcctctcttcctctctcctacattccctacatggcattgatcctaaaatggctaccttcacantcacccagggaaaaaaaggaatttaggcacaaacataagaaaacatttgataaaaatattacttttgtaatttagtaacctagtgagatagaaaaacatattttatctgtttcaaaagttgaatttcatcagcgtatggcatatgcttcattatactggttagtgatgtctgttacaaacaaggttcccaaatgccatgccagcttgcatagttctgagaaagaggtccaaatatattccattgcatttcccaattaaaattgttcattttggagtgaagttgtaagaatgattgkccaggcagcccactcttttatttatagtcctttcaaattaaatctgaaggcatttcactgatgatttgattctgattttttttttatgtttctcacattcaataaatgtcaaattgctggacagccccgactctatcttacttaactttaattctccagattctagcatatgcctggcacatagtaggtgcttaattcattttttgtcaattaaagggagtatgggtgatacttttacaattgaattatgaccatcctgaggggacttttcccatatgatccactgctttatagtctgccatataaccaatcagaccccaaaccttcaacaaaaagcagaactatagacaaagccacccatcggggcatgagtggtgttgggattacattagtcaattggattga

SEQ ID NO: 66012 - DNA, 776 bp, Homo sapiens
  misc_feature (1)...(776): n = A,T,C or G
aaagccatagtttcctctcttcctctctcctacattccctacatggcattgatcctaaaatggctaccttcacantcacccagggaaaaaaaggaatttaggcacaaacataagaaaacatttgataaaaatattacttttgtaatttagtaacctagtgagatagaaaaacatattttatctgtttcaaaagttgaatttcatcagcgtatggcatatgcttcattatactggttagtgatgtctgttacaaacaaggttcccaaatgccatgccagcttgcatagttctgagaaagaggtccaaatatattccattgcatttcccaattaaaattgttcattttggagtgaagttgtaagaatgattgtccaggcagcccactcttttatttatagtcctttcaaattaaatctgaaggcatttcactgatgatttgattctgattttttttttatgtttctcacattcaataaaygtcaaattgctggacagccccgactctatcttacttaactttaattctccagattctagcatatgcctggcacatagtaggtgcttaattcattttttgtcaattaaagggagtatgggtgatacttttacaattgaattatgaccatcctgaggggacttttcccatatgatccactgctttatagtctgccatataaccaatcagaccccaaaccttcaacaaaaagcagaactatagacaaagccacccatcggggcatgagtggtgttgggattacattagtcaattggattga

SEQ ID NO: 66013 - DNA, 953 bp, Homo sapiens
tgcatggcccatcatccccgctgcagaaagaaactggacaggacctccccttaggagcctgtcagcccttgtcagtaatcagcccaggggctactcagaatgactggaggcactcacatccaccccctaccaaccacactgcccgctctcagcccctgccacctggggagccccacaccagggcagggcaatcaagcttggcttctgcatgccgtgcaaagcttgccagcagccaagctcttgaaatatttatatttatacatgcaaggctcagactctcgctttgtcccgacaggcgccatcgtatgtggggatggggtatggttcgggagggttcattcatcccatgctagcgtgcctacccgccaaggctcacttgcgcagaggaggagggatctcaccagaatagtcaaaaagttggccattgtcatgaatcaaatccatgtgttggaagaaatatacattagaaaattgcatagtctccccttccctttgattcagagattttcgtttcatttgtgcacagggaagagttgaaatgcccctcctgaggggtgcccttctggggatgcaggacccacggattgcagggtgtacaaacacaatatatgtatttattttcaaagacaacatgaaataacaccatagagtttttgtggctacctgttctcttttgaagaactgttcaaaaactagatgatgggcaaaaactctatagaggggaaaggaggcaggaagagccacagtttcagctaagtcagacgggtgcactcgagactcaattagcaattgttcccatatatttcaacacacacaccttaaacacaggttttctgagtgaagtcagtgatgaaagcctgtgggttaggggaattttcccatggtagcgacagctgttcccacagaaacagctcaatttatctcagaratgaaggtttcactagcttgggcct

SEQ ID NO: 66014 - DNA, 2522 bp, Homo sapiens
  misc_feature (1)...(2522): n = A,T,C or G
cattttctgcatgatgaaagatatttattaggcctaagtggaagagccagcattcttgatgaaaagaattactctatgcacacatcctaaggacagtggtttagatcagtgccctcctggtagagatgaacaacacaacgggaaggacaggcactgacgcacataaagatgaggaggctgagcgtggttccaggcaccactgcggtatagaaagtggcacctagagccagccaaggacataaagatggacttggagacactggagcagtgtgggtgcccctcagcccaggaatgttgcagagaggagtcatatgtgagattagggttgccccaagttacctctaagttctgtccaactcaactactctgtgagtctgtgacagtccctagctctgtgtcctaggacacagtgacacccctagagatcttaccaaagacctcaaatagtccaggcactgttcctcttaagggatgtagagaggagagggagagatggaaaagggagaactcacctttgttaacatactgctttctaataactcttttaaagaagtgttcattccattgttcatggaatatgcttccagtcgtggattgcattgaaaagataagtccatgtcctaatccctgggacctgtgaatgtgaccttatttggaaaaatggtctttgccgatgaagttaaggatctcgagaaaagaccatcatggattatctgggtgggcccaaaatccaatgacaagtgtctttttaagagaaatcagagacacacagaggagaagacagacacagaagagaagtcagacacagaagagaagtcagacacagaggagaagacagacacagaggagaagggcacatgaaggaagaggcaggggttgggtggcggcagctgcagggactgccagcagccagcaggagctgcaggaggcaaggaggatccgctagagagggactgcgccctgcacacacctcaagtccacatttctgggctccagaactatgaaagaatacatttttgttgttttaagctgccaattttatggtcatttgttatggtggccctaagaaactaatacacctcagatatattatcattgataccattaatcaggagctgcaaggtctcttttcctaattaacatcatggttgttcttactaataataagaataaaagaactctcagggaggcaggtggagggagagcatcaggataaatagctaatgcatgctgggcctaatacctaggtgatgggttgataggtgcggcaaaccaccttggcacatgtttacctatgcaacaaacctgcacatatatcccggaacttaaaataaaatttaaaaaatgaacaaataaataattaaataaaataactctatcttaaaacacattaacaatattnnnnnnnnnnnnnnnnnnnnnnnnnnnnnnnnnnnnnnnnnnnnnnnnnnnnnnnnnnnnnnnnnnnnnnnnnnnnnnnnnnnnnnnnnnnnnnnnnnnntagaggaaccaccgctacaaaaaaaagggccccatttgattcctcaatccggcctgtttggnactttgtttctggaccagatcacactcaatcaactgtctgtttagggtatttttagcttcatagagcaatagtatcaatacaattctgctgttttattatacatttatcaaacagttcactatctggtcttttggccagaatttcttggcctcttctcagagctctgtctcaatagatcttttgataactgttttccaacacagtcttcatttcaatgttagaatatgatgttaatgaatttactagcttccagtcgaggatgaatagcttacagtgtttgcggcaatattggatgtatttatttccaagggaatgatttttaacagcacattgtgttcttatttgcttttyacaatccagttccagcatctgagaaactttgctttgatggttgactcccattagggaaacactgaaaacaattatcctgtagtggtctcggttcttcctggcagctttgcatttccatggtgcgagaccactgggtcgtaccacttgtttctccctccacgtcctcaaatgatctcttaaaagaacccactttagacctcattgttaccttccctctacttctttttcttcttattgaattcaattcaacaacatgtattaaatacttacaacctggtacccaggtagaagaagccaacgtatagacagggcatgtcattggatagtgataagatctgatggggtgagtatctaggcaacttagactgggtgtggggttgaaccagcatatttaaatttatgtaaaaactgagaaacaccctgaaaaggacttttattgttggacataattctctagtcctgaagttatcattcaagggagttcaagaactcatcccttaagtggactgggcaagctggccatttaccacttgtcacagttagaattaggaacttggctttcatattatccattggtgtcacagagtgggaggaaaacatcagtaat

SEQ ID NO: 66015 - DNA, 1095 bp, Homo sapiens
cacatgtatacatatgtaacaaacctgcacgttgtgcacatgtaccctaaaacttaaagtataataattaaaaaaaaaaggagagttggcctcagaggtccccacttaatgcatatcattgtcttcctgctcagctctcataggattcttgccttcagtgcacaggtgggaactggaaaaataagggtcagggccaggtgtggtggctcacatctgtaatccyagcactctgggaggccaagacaggaggatcgcttgagcccaggagtttgcgaccagcctgggcaacacagtgagatcctgtctatacaaaaagtaaagaaaaattaaccaggtatggtggcacacacctgtaccctcaactaattgtgggggtgaggtgggtggatcgtttgggcctggaaagttgaagctgcagtgagcaccgtaattgcatcactgcactccagcctgggtgacagagcgagaccctgtctcgaaaataaaataaaatgtttaaaaaacagtcatgatataggtcaccaaccaagagcagaaattatcatgatttcaagttgctttagccacaatatttgccagtagtgttgcaagtagaaatgtcacctagtaaaatggagctacctcgtggagatctgtgtgatgggaaaatgctctgtgaggattcatggcacgtgctcaaggggctgctgagttcctcttctcaggcaggtctttcttctctgtgctttgggcactgtttgcccaataggcgaggcatttatgtgtgcaccagcgcagcagcttttcaaccctggccgtccagcagggtcacaaggggagcctttagaagcacgtgtccgagccccaccacacacccatcaaaccaaataaagtggatatccccaagaagagtggagacagaaatctctacataccaaaacgtgtactaagcttcttaaccataaatgagaaacatttttgtaaattacaaatattattttttacatgatatctctggttttccctcctctctgtcaagtggttttaagttctcaaaatcccaatgcttttatatctgtgaatgcttcttgaatacagtttaaaaatgatagtttt

SEQ ID NO: 66016 - DNA, 1095 bp, Homo sapiens
cacatgtatacatatgtaacaaacctgcacgttgtgcacatgtaccctaaaacttaaagtataataattaaaaaaaaaaggagagttggcctcagaggtccccacttaatgcatatcattgtcttcctgctcagctctcataggattcttgccttcagtgcacaggtgggaactggaaaaataagggtcagggccaggtgtggtggctcacatctgtaatcccagcactctgggaggccaagacaggaggatcgcttgagcccaggagtttgcgamcagcctgggcaacacagtgagatcctgtctatacaaaaagtaaagaaaaattaaccaggtatggtggcacacacctgtaccctcaactaattgtgggggtgaggtgggtggatcgtttgggcctggaaagttgaagctgcagtgagcaccgtaattgcatcactgcactccagcctgggtgacagagcgagaccctgtctcgaaaataaaataaaatgtttaaaaaacagtcatgatataggtcaccaaccaagagcagaaattatcatgatttcaagttgctttagccacaatatttgccagtagtgttgcaagtagaaatgtcacctagtaaaatggagctacctcgtggagatctgtgtgatgggaaaatgctctgtgaggattcatggcacgtgctcaaggggctgctgagttcctcttctcaggcaggtctttcttctctgtgctttgggcactgtttgcccaataggcgaggcatttatgtgtgcaccagcgcagcagcttttcaaccctggccgtccagcagggtcacaaggggagcctttagaagcacgtgtccgagccccaccacacacccatcaaaccaaataaagtggatatccccaagaagagtggagacagaaatctctacataccaaaacgtgtactaagcttcttaaccataaatgagaaacatttttgtaaattacaaatattattttttacatgatatctctggttttccctcctctctgtcaagtggttttaagttctcaaaatcccaatgcttttatatctgtgaatgcttcttgaatacagtttaaaaatgatagtttt

SEQ ID NO: 66017 - DNA, 1095 bp, Homo sapiens
cacatgtatacatatgtaacaaacctgcacgttgtgcacatgtaccctaaaacttaaagtataataattaaaaaaaaaaggagagttggcctcagaggtccccacttaatgcatatcattgtcttcctgctcagctctcataggattcttgccttcagtgcacaggtgggaactggaaaaataagggtcagggccaggtgtggtggctcacatctgtaatcccagcactctgggaggccaagacaggaggatcgcttgagcccaggagtttgcgaccagcctgggcaacacagtgagatcctgtctatacaaaaagtaaagaaaaattaaccaggtatggtggcacacacctgtaccctcaactaattgtgggggtgaggtgggtggatcgtttgggcctggaaagttgaagctgcagtgagcaccgtaattgcatcactgcactccagcctgggtgacagagsgagaccctgtctcgaaaataaaataaaatgtttaaaaaacagtcatgatataggtcaccaaccaagagcagaaattatcatgatttcaagttgctttagccacaatatttgccagtagtgttgcaagtagaaatgtcacctagtaaaatggagctacctcgtggagatctgtgtgatgggaaaatgctctgtgaggattcatggcacgtgctcaaggggctgctgagttcctcttctcaggcaggtctttcttctctgtgctttgggcactgtttgcccaataggcgaggcatttatgtgtgcaccagcgcagcagcttttcaaccctggccgtccagcagggtcacaaggggagcctttagaagcacgtgtccgagccccaccacacacccatcaaaccaaataaagtggatatccccaagaagagtggagacagaaatctctacataccaaaacgtgtactaagcttcttaaccataaatgagaaacatttttgtaaattacaaatattattttttacatgatatctctggttttccctcctctctgtcaagtggttttaagttctcaaaatcccaatgcttttatatctgtgaatgcttcttgaatacagtttaaaaatgatagtttt

SEQ ID NO: 66018 - DNA, 669 bp, Homo sapiens
tatgcaaattcggcagcattccctagccatacttaagcctcacatttaaaacactaactgcatacttttgaaactgtagaaattagggtaaattactttttaaatgagtwacagtggaactatgccaattaatgcaggtaaaaagtactaggtttcagaagtagctcggaagtatcaaattattggctctgcagtccaaatgatgtaaaattcaaaactgaattcttctacataactgcaagaactgagtacgataatctcccagcataaatcctgcaaatttagaaatagtgactagagtcttgggatttgcctaatccttgaaggtctccactaattactagagccatcttcttggcataaggggtcactaaactatcttaacaaccttggccattaagagatcttccccttaatgttttaagtaatactttactcaatatttggggatagtggaataaaattaaagggaatatcatggtattccatgatccaatttcttaggaatgtcaaactgggatggtgggcagtggtaaatagtggaagatcatcaggaggtgtgactcttgggcaattagaactttgtttctcaaagtgattccccttccagtgctaatgccagaggaactgagtgctagttttatagggaaactggtggctttcattaca

SEQ ID NO: 66019 - DNA, 633 bp, Homo sapiens
gtgttacattacatattgcatgacatttgttcttttatttttattatggaaaatttcaagtgtacacaaaagtagaaagaagactggagtaagctcctctgaatccaccacctggcttcaaaaataataatcattctgttcttggcacaagtgtgatgatttttaaaaccgtgtcagaaaatatcactcccctgttcaaacctgacgtaattttcattgtcttttggaataaaagcaggaaaacagtgctttacttaattagtccccattgttgaaataataatgttatagtacatatttttgcttacaaaccttatccatctgaagtattattttcataggctaaaattccagaagtggaatgattaggccacaaatataaacatttaaaatatttttgatgcatatatcaactggggttcagtgagagaacaaagccatggagaataatagaaaaatayttattataagatattaaaagccttacagaatccggggagaaagtctagattgaacttccaggaataattctctatgctttcctctgaattgggccagcaagggtactgatgcctcttttatgaatggtcaggaaaccacctgctgaattgaaaagtgaccaccagcactgca

SEQ ID NO: 66020 - DNA, 618 bp, Homo sapiens
aggtgcagtggctcatgcctagaattgaagcactttgggaggccgaggcgggtggatcacctgaggtcaggagttcaaggccagcctggccaacatggtgaaatcccatctcaactaaaaatacaaaaaaattagctgggcatggtcgtgggtgcctgtaatcccagctacttcaggaggctatggcaggaaaatggcttgaacccgggaggtggaggttgcagtgagccaagatcacgccattgcactccagcctgggcagcaagagaacagctctgtctcaaaaaaaaaaawataaaaataaaaataaataaaagaatgtttagtaaccacggttctcaggaaccaaaagccaacatctcccccaaccccagttattgtaataaccagactcaaaccttctttcccttgtccagcagtgtaggtctgcatctgcccagtctacagtaacttcacttagagctgacagtgcccaaatgggcagaaagatggagctgggtgtagccccctttttctaactccgggtaccattctctttccattctattgcacttctactctgagattacatttattttttagctgcctagaaatacactaacatacataaatggatgg

SEQ ID NO: 66021 - DNA, 618 bp, Homo sapiens
aggtgcagtggctcatgcctagaattgaagcactttgggaggccgaggcgggtggatcacctgaggtcaggagttcaaggccagcctggccaacatggtgaaatcccatctcaactaaaaatacaaaaaaattagctgggcatggtcgtgggtgcctgtaatcccagctacttcaggaggctatggcaggaaaatggcttgaacccgggaggtggaggttgcagtgagccaagatcacgccattgcactccagcctgggcagcaagagaacagctctgtctcaaaaaaaaaaaaawaaaaataaaaataaataaaagaatgtttagtaaccacggttctcaggaaccaaaagccaacatctcccccaaccccagttattgtaataaccagactcaaaccttctttcccttgtccagcagtgtaggtctgcatctgcccagtctacagtaacttcacttagagctgacagtgcccaaatgggcagaaagatggagctgggtgtagccccctttttctaactccgggtaccattctctttccattctattgcacttctactctgagattacatttattttttagctgcctagaaatacactaacatacataaatggatgg

SEQ ID NO: 66022 - DNA, 618 bp, Homo sapiens
aggtgcagtggctcatgcctagaattgaagcactttgggaggccgaggcgggtggatcacctgaggtcaggagttcaaggccagcctggccaacatggtgaaatcccatctcaactaaaaatacaaaaaaattagctgggcatggtcgtgggtgcctgtaatcccagctacttcaggaggctatggcaggaaaatggcttgaacccgggaggtggaggttgcagtgagccaagatcacgccattgcactccagcctgggcagcaagagaacagctctgtctcaaaaaaaaaaaaatawaaataaaaataaataaaagaatgtttagtaaccacggttctcaggaaccaaaagccaacatctcccccaaccccagttattgtaataaccagactcaaaccttctttcccttgtccagcagtgtaggtctgcatctgcccagtctacagtaacttcacttagagctgacagtgcccaaatgggcagaaagatggagctgggtgtagccccctttttctaactccgggtaccattctctttccattctattgcacttctactctgagattacatttattttttagctgcctagaaatacactaacatacataaatggatgg

SEQ ID NO: 66023 - DNA, 690 bp, Homo sapiens
gatcctattcctgccttgccacatattggtgttttaagtttggcaaattacaagtcctccctaagcctcagtttcttcatctgtaaagtggagataacaaatagaacatctccagggacgttgtgagaactaacaatggaatttagtgatttcctacctaaatgggtgagatatccctgggtggaagatcatcaacatgttgttgatattgaataaggtgtgtgctatttgagaaattgggccacactaagacaatgtacgtgaggtatcttgtagaactaacatgmgtgggctgaccacagggccatcaccttcctccctcctgggttctctctctctgtccttggtcccgcagccaagctgcccagggaaagtgttgattttatttctagggaatccattgctcaaaggatcgctgcagcagacactgtcttaggtgagttgatggattagctggctctctgtcaacaccctgccaaatgcccacagccctctgaacactaatgcctggaaggtggtgaaagtggccggtatacttctgctccagcaggtgagggattgagttgtgtgcttagaacaaggtttgttctcaaacctgtttgtgcccgtcatgcatttcattgtgctgataaatttatttaaataaaatgaaaattcatgaaattcataaaaaaaactttgtgaaagtta

SEQ ID NO: 66024 - DNA, 1222 bp, Homo sapiens
gatcctgtggagaataaacctcccccctgggatgaagaccttggctgtgtaatttgggacatgctacctcaaagggaaaatgaaagcgtgattctcttctgagggaggaattggacatctcccagactaagcaaatggcagctgcagacggtactgcgaggcacagatctgctgctgggaacgacatccttcgaggtggaagatgtgaggggcccagggtgcggtgggccctgggaacactgtgaactcatgtgaaaattcctaaygttgaacatgcagggagaacccagcgttttgccaaatgttttcaggagcttaaattttaagcatcattttcctgcacttctgttctttttggatattcttgaggacattttagtttctttattttgtccctctctggctccattttgggcaagaaagaaatacaaatcttactctaaaagatactaaccagctctttcaaaagggaaataaagctgagaactccagtgtcagtgggaagtatctcaccaactccatttcagccccccccggggttcttcctcaggagctccagagttgatggggacccattggtcaatgttcagaggggtcacagcaaacacatttcacactcacacagaagcttacagtcctgtcgctcaaagggactgcagggcctctgcagttcacccctggttttaacgatgagcaaacgaaggcttggtgatgggcagtgacctgtcgaaggtcacatagtgatgcaggggctccccagccagcatctcctcccacagcaggctgcccacttccccagcggacgtggagcaacagactggaatgagccccctttcctttccctgaaatactcagtgcagtgactaacataaggttcagaaatattatttgtttgtttataatttatatacaattgcttcctagaaagacttgcaggaggcagggccatgctgctggctgtggatggggtctctcttcacgtctgctcctgacaaacacagagcagtgatgtcagacggcagctgccatgagtgagaccaacgacaggacagcgacagaacagccagaaagcaaagctttgttccagcatccccaggaagtcttcgtgtggcttttccctctctccactggaaacctcactttagggtgaatccttccatgtaggagccacgaagtcattttacatgtctaattaagagtagtcattcttccaagaaacatg

SEQ ID NO: 66025 - DNA, 588 bp, Homo sapiens
caatgcacttaatgaattttagtacattttaattttatttgaataggtttttagactttgagtttcaggaaaaggctaaattactgaattcattttagtattgtggaaatcaaatggaaaccaccccacatatgaaaacatagctgtactctatttgttttatttcaaagtgatccaggtccttttaccaccagagaggaagaaagaggattaagctgaaattaatgttttgatgaagatgaggtggatggtaaattgacccgagggaagcaaaaaaaaatcaacttgccacatgttagcaaccgagacctcatgattgatgttcagtgacttggaaattctctccagggcaaactgcattttcactgcttacttacatacattttgaggcatagattaatttcaaaacaagaatttaaagctaggaggaacctcagacatcagcatagtttgtggtttycaaacttttctctccttttctgtttttaaacattagaacactttattcaatcaaaatcttccatgaaatcccattgtataaaataaataaaaccagagctgtcttggttaaagcagggtgcgagccca

SEQ ID NO: 66026 - DNA, 960 bp, Homo sapiens
gtaaacttgtgccacaggggtttgttacacagattgttttatcacctaggtactaagcctattacccaatagttattttttctgttcctctcccttctcccaccttccagcctcaactagaccccattgtctgttgttcccttctttgtctccatgattcttgtcatttagctcccacttaaaagtgacatgtggtattttgttttctgttcctgtgttagttttatagctgcataatataccatagtatataaatgccatattaggaaaattgacttaggaattttctttagaactttagatttttatgtccacaagaatccttagtcattctcaaagctgatgccaatgtttacacgaaaaaatggggcctgcagaaattggatgctttgcctgacatcacagaatcactacagtcaggcaaaagaagaaaaaagaacatgttcagatctttccagtttaatttttgactttggttgaagtggggttagatgagaaagagatgtgattattggccaagctgaatttgaagatacatgtctctctgacgttccttttcmtatctgtatgcaagaacaatttgtaccactcttggcaagagcctgtctactaatgatcaaagaagtggctctctttcttctcaagtttgattattgtgagaaactgaatatgggttcagctgtaaaggccaaatgtgcagacctattccacttctgtcagttcttcctagacttggggacccatgaagcagaacgtgcccatcgggagtgttctggaagagaaaggccaaaaaagctagtctctaaatgtgatacactgcctgatccattgggttaggagaataaaatattaaaatttcaatttaaaatttaaaatataattgttttctaacttacatgtttcatatatgctttataattaccataatatagtagaatagtagttcatgtatgtaattta

SEQ ID NO: 66027 - DNA, 800 bp, Homo sapiens
tgtgtataatttaatgcctttatataaacataaatgcctttaaagaaaaaagaatgcttttggtattctctttattttccttcatatgagtggctgacagcactcaaacctaaatcccttgccatttctttttttgttttgttttgttttttttgagatggagtatccctctattgcccagtctggagtgcagtggtgcaatctcggctcactgcaacctctgcttcctggattcaagcgattctcctgcctcagcctctcgagtagctgggactataggcgcatgccaccacgcccagctagtttttgtatttttagtagagatggggttccaccatattggccaggctggtctcgaactcctgacctcgtgatccacccgccttggcctcccaaagtgctgggattacaggcatgacccgccgcacccagccatcccttcccgtttcaatactcygttaaaaaagcatgtggttcagtgaggttcagtaaggttcagtaatattattacccagtggtgagattatgagaatcacagttgaagaatatttattaaatgcttcctgtatgtgtcaatttctagtcataatggacaccttgtcctgtaagaccttgtactcagaatgcaaacctgggatgctcggtcagtgttagttgtgaaagcttccgagctgaggtctctagcaaagaacatttttcctctaccctcagtttcctcatctgtggtctgaacaagttgaactaaatgatttctaaggagctcagcagctctgattgctaaacctcgtgtacagaaacac

SEQ ID NO: 66028 - DNA, 1050 bp, Homo sapiens
ataacttgaattgaatggctattcactgctaaaaggaacgagtgttaagtaggactgtgtggtagagctttggctcaagttgcaagagtgccatcaccagttagctatgttcttcctgggcacaagagtgagggatgctagcccgtcatggtctgggcacccaggactttgcactattccaggactaagtaatgtatctcaaatataagtcattctggacttgctgtttcactctctgtaatgctcctcttctgtctaccagactttcttaacaggggttctgtgaggaaaattaagtcctaatgctctaaaaaggccattgtatgtagtgaattaacttctctaaagtgcatctagaatggcagtaattatatcagtccttggagaaaccaaaaaacgttgctaaaattagttttgatgtcctgcggtgaacatgagggaccacttcattgcacctttttatcaatatattttctgtctgtgttagacactttttgcattgttataaaggagtacctgaaactgggccatttacaaagaaaagaggtttatttggctcacagttctgcaggctgtccaggaaatgtggaggtgtcatctgcttctggggaggcctcaggaagctttcaaacatggcagaaggtgaaggggkagcaggcatctcacttggcaggagccggagcaacagcatgaggaggcgccacagtctcttaaacaaccaggtctctggagaactcactcatctccaaagggctgacaccaaaccattcaggagggatctgccccatgatccaaacacctcccaccaggccccacctgcaaccctggggatcatatttgagatgtggagggaacaaatatccaaactatattactatcatcacaaatttcttggcaaagtagctctagatcagtgcctctcaaccttggctatatgctacaattatctggaagctttaaaatagtaatgatgttcaggttctatctaaaaaactgtcagagtctccagggcaggacctaagcattggaaagtgtcagctgcttccccgg

SEQ ID NO: 66029 - DNA, 642 bp, Homo sapiens
cccaaataccattacttytagctttggagccttaagaaagttgcctaatctctctacacttcctcctctgtaaaatagagataatccctacctcaagaattgctaggtacttaagctaaatgatggttgcatgaggccaaacaataaatgggcattattattattattttttgagatggagtctcgctctgtcaccaggctggagtgcagtggcacaatgtcgactcactggaacctcagcctcccaggttcaagccattctcctgcctcagcctcccgagtagctgggtctacagatgtgtgccaccatgcccagctgatttttgtatttttagtagagatgggatttcgccatgtaggccaggctggtctcaatctcttgacttcgtgatccgcctgcctcgaccctccaaagtgctgggattacaggtgtgagccaccatgcccgacctcattatttttaatatttctcacatccaattttgtcaatgtattagtggattatacttatttaacaaagttcatgttccaagaagttttgaaatttgaagactttggttgtatcaccctaatgttaatttcatatacaatgtgttatagccaatgatgttccagaaggtaattagccagacaggtacaaga

SEQ ID NO: 66030 - DNA, 642 bp, Homo sapiens
cccaaataccattacttctagctttggagccttaagaaagttgcctaatctctctacacttcctcctctgtaaaatagagataatccctacctcaagaattgctaggtacttaagctaaatgatggttgcatgaggccaaacaataaatgggcattattattattattttttgagatggagtctcgctctgtcaccaggctggagtgcagtggcacaatgtcgactcactggaacctcagcctcccaggttcaagccattctcctgcctcagcctcccgagtagctgggtctacagatgtgtgccaccatgcccagctratttttgtatttttagtagagatgggatttcgccatgtaggccaggctggtctcaatctcttgacttcgtgatccgcctgcctcgaccctccaaagtgctgggattacaggtgtgagccaccatgcccgacctcattatttttaatatttctcacatccaattttgtcaatgtattagtggattatacttatttaacaaagttcatgttccaagaagttttgaaatttgaagactttggttgtatcaccctaatgttaatttcatatacaatgtgttatagccaatgatgttccagaaggtaattagccagacaggtacaaga

SEQ ID NO: 66031 - DNA, 642 bp, Homo sapiens
cccaaataccattacttctagctttggagccttaagaaagttgcctaatctctctacacttcctcctctgtaaaatagagataatccctacctcaagaattgctaggtacttaagctaaatgatggttgcatgaggccaaacaataaatgggcattattattattattttttgagatggagtctcgctctgtcaccaggctggagtgcagtggcacaatgtcgactcactggaacctcagcctcccaggttcaagccattctcctgcctcagcctcccgagtagctgggtctacagatgtgtgccaccatgcccagctgatttttgtatttttagtagagatgggatttcgccatgtaggccaggctggtctcaatctcttgacttcgtgatccgcctgcctcgaccctccaaagtgctgggattacaggtrtgagccaccatgcccgacctcattatttttaatatttctcacatccaattttgtcaatgtattagtggattatacttatttaacaaagttcatgttccaagaagttttgaaatttgaagactttggttgtatcaccctaatgttaatttcatatacaatgtgttatagccaatgatgttccagaaggtaattagccagacaggtacaaga

SEQ ID NO: 66032 - DNA, 1215 bp, Homo sapiens
aaaagagaaaaacctccctcagcccagaccctcatatcttgctctctgggatgaacatttaatggatgttatgtattgactattaatattaggaaatagagaataaaataaacaatttaacaaagccaacaatgatggcttcttctgattataggaaaccacttagataccaaatgaatatggaaaattaaagaaaatatgacgtggtatttacatttaaaatatattttaatgttttagtgattcaaatttcaaatcccaaatgaagtaatgaaaaaaataatgttaaatttgtgactgaattcaaaagtggcatgtagcttcagtttgagtaagaacatgataatgagctatttgcaaaatcatgttattctgaatctccaaacttgttcagtataaattgatgttacttatagattttaattcatagaataaggaaatggcctgaaaattaacatcacagtttttctagcctctattccatttatattcctttaggaaagtaaatctagatacagttttctgtttgtagttttggaatgttaacttttacttttactctataacttcatgtacagtaatcttcctacactgcacgttatagtttgtattttaggcagcattctrtgatgaataagaatgatttgctttccttagagaataacacttcccacagaggcccatgtgccacggcaagataacattttccaggggcagactttcaaagtgtaaagctctaggcaaagttgccttggagtccccttgagatcttggggagagagataactcacacgaggggagatgccccttcagccaggcaagatgccagcatggacaagagagaagcacatcatctcccgtgggtctaaacacagagctgctggagtgggaggctccagacagccatcaatgtctcaggtccaaatctggcaaggtccctgagcttttggtaaatattattgtactcgctgtctttgtggctttgaggcacacatttctgtaaaagccatgtagcttgaaaacaaggacttaaaagcacacactgtctatgttgcatcttccactctgtctaagaatgtctgtggaacaatagagagtaggaggtcgagcaccggagcggcatttgatgtggccttctgctgctaattactggcatggggagccctgctctcccagttgtgactcaccagtgccccttgattaaatgcagacgag

SEQ ID NO: 66033 - DNA, 805 bp, Homo sapiens
gatcctgaacacagtttctaggatgatgaggacgttgtagttctcctattattctgctgatggaattagtgttcagggtggtgcattctgggatgactgcatctgtcctatgctatgaatagtgctagcctagtactgaaggtaggtcaatgtatcatgcacttgaggtatttgcctgttcatttttagtgttgaatttagcataatgcacagcattggagaagacagaagaagaagaaaaccatttagatttgctcagrtaccaaaattatggcaaagtgtatggcttttagggatgtgtttattcctgtccaagcctatcaacattgtttctcaagactatgaatttacagtcatggagaaggtcttcccattggcttcctcttgatgccttctaagtacttaaacacataacaataaacaataagaatagcagaaatgtgcacataactcgtgccaactctgctggcataaatccgacacttttatttgggccacaacaggacacgaaagggtgagatattatactgacatggggtgtagaatttcttctctgacttctcactccagtgtgcttccaggaattagtgttaattactaccaagaaagctgtgatagataattctgatcacttcttattttagttatatatgaataattcaggaaaagccaacctctccaccctatcaaaaacactccccactttcaaactttctctgagaactgtgcatagctagtaaatcaatttgatgattattctattccaaagagcatgcaatgatttacatttatatgccacaaattt

SEQ ID NO: 66034 - DNA, 805 bp, Homo sapiens
gatcctgaacacagtttctaggatgatgaggacgttgtagttctcctattattctgctgatggaattagtgttcagggtggtgcattctgggatgactgcatctgtcctatgctatgaatagtgctagcctagtactgaaggtaggtcaatgtatcatgcacttgaggtatttgcctgttcatttttagtgttgaatttagcataatgcacagcattggagaagacagaagaagaagaaaaccatttagatttgctcagataccaaaattatggcaaagtgtatggcttttagggatgtgtttattcctgtccaagcctatcaacattgtttctcaagactatgaatttacagtcatggagaaggtcttcccattggcttcctcytgatgccttctaagtacttaaacacataacaataaacaataagaatagcagaaatgtgcacataactcgtgccaactctgctggcataaatccgacacttttatttgggccacaacaggacacgaaagggtgagatattatactgacatggggtgtagaatttcttctctgacttctcactccagtgtgcttccaggaattagtgttaattactaccaagaaagctgtgatagataattctgatcacttcttattttagttatatatgaataattcaggaaaagccaacctctccaccctatcaaaaacactccccactttcaaactttctctgagaactgtgcatagctagtaaatcaatttgatgattattctattccaaagagcatgcaatgatttacatttatatgccacaaattt

SEQ ID NO: 66035 - DNA, 805 bp, Homo sapiens
gatcctgaacacagtttctaggatgatgaggacgttgtagttctcctattattctgctgatggaattagtgttcagggtggtgcattctgggatgactgcatctgtcctatgctatgaatagtgctagcctagtactgaaggtaggtcaatgtatcatgcacttgaggtatttgcctgttcatttttagtgttgaatttagcataatgcacagcattggagaagacagaagaagaagaaaaccatttagatttgctcagataccaaaattatggcaaagtgtatggcttttagggatgtgtttattcctgtccaagcctatcaacattgtttctcaagactatgaatttacagtcatggagaaggtcttcccattggcttcctcttgatgccttctaagtacttaaacacataacaataaacaataagaatagcagaaatgtgcacataamtcgtgccaactctgctggcataaatccgacacttttatttgggccacaacaggacacgaaagggtgagatattatactgacatggggtgtagaatttcttctctgacttctcactccagtgtgcttccaggaattagtgttaattactaccaagaaagctgtgatagataattctgatcacttcttattttagttatatatgaataattcaggaaaagccaacctctccaccctatcaaaaacactccccactttcaaactttctctgagaactgtgcatagctagtaaatcaatttgatgattattctattccaaagagcatgcaatgatttacatttatatgccacaaattt

SEQ ID NO: 66036 - DNA, 805 bp, Homo sapiens
gatcctgaacacagtttctaggatgatgaggacgttgtagttctcctattattctgctgatggaattagtgttcagggtggtgcattctgggatgactgcatctgtcctatgctatgaatagtgctagcctagtactgaaggtaggtcaatgtatcatgcacttgaggtatttgcctgttcatttttagtgttgaatttagcataatgcacagcattggagaagacagaagaagaagaaaaccatttagatttgctcagataccaaaattatggcaaagtgtatggcttttagggatgtgtttattcctgtccaagcctatcaacattgtttctcaagactatgaatttacagtcatggagaaggtcttcccattggcttcctcttgatgccttctaagtacttaaacacataacaataaacaataagaatagcagaaatgtgcacataactsgtgccaactctgctggcataaatccgacacttttatttgggccacaacaggacacgaaagggtgagatattatactgacatggggtgtagaatttcttctctgacttctcactccagtgtgcttccaggaattagtgttaattactaccaagaaagctgtgatagataattctgatcacttcttattttagttatatatgaataattcaggaaaagccaacctctccaccctatcaaaaacactccccactttcaaactttctctgagaactgtgcatagctagtaaatcaatttgatgattattctattccaaagagcatgcaatgatttacatttatatgccacaaattt

SEQ ID NO: 66037 - DNA, 805 bp, Homo sapiens
gatcctgaacacagtttctaggatgatgaggacgttgtagttctcctattattctgctgatggaattagtgttcagggtggtgcattctgggatgactgcatctgtcctatgctatgaatagtgctagcctagtactgaaggtaggtcaatgtatcatgcacttgaggtatttgcctgttcatttttagtgttgaatttagcataatgcacagcattggagaagacagaagaagaagaaaaccatttagatttgctcagataccaaaattatggcaaagtgtatggcttttagggatgtgtttattcctgtccaagcctatcaacattgtttctcaagactatgaatttacagtcatggagaaggtcttcccattggcttcctcttgatgccttctaagtacttaaacacataacaataaacaataagaatagcagaaatgtgcacataactcgtgccaactctgctggcataaatccgacacttttatttgggccacaacaggacaygaaagggtgagatattatactgacatggggtgtagaatttcttctctgacttctcactccagtgtgcttccaggaattagtgttaattactaccaagaaagctgtgatagataattctgatcacttcttattttagttatatatgaataattcaggaaaagccaacctctccaccctatcaaaaacactccccactttcaaactttctctgagaactgtgcatagctagtaaatcaatttgatgattattctattccaaagagcatgcaatgatttacatttatatgccacaaattt

SEQ ID NO: 66038 - DNA, 574 bp, Homo sapiens
attctttagcagtaactaggagggccctttacatcatgcattcatgagtatatgtgacgattaaagctatctcaataatagatttaaaatatcatcctgttcttcatgagccaaaaatcatagtgtacacagagcactgcaattggtctttccagctcaacttgggcagagatctttctctgtgtaattgcaataacaaaagcaagaaaatcctgtctctactagatataatggagagagcttgttctgctgaaataaaggcattaacaggcataccatgcacctgcaacctcagtaaatatcttttaaatactcagacactgcaatagaatgaaatgatatctttacgggmatcagaagacctaatctgtagtattagatcttccatttattgccatataaccttgaatataccagttaaaatattcatttattgattagcagaatgaaaacaaaatggggaaatgtatattaaagtactttgaaaattaatagcttgctatataaataaaaggcgttatatattgggatagaaataaatattcatgatgatgatgaaattatgctggaatga

SEQ ID NO: 66039 - DNA, 539 bp, Homo sapiens
aagtaagaatttcatttctgtataaatgtgcatgaaccctaaatatttttggaaaatcaacttgattttccrgataaatttttgaattcctcaagggacaaagggactattttttattttcttttaatttcttgttaatttattcaagcaatatataggtatataaaaatccctgtttaccacttttattttatttcctttcttgagagataagcagtgttatcagttgggcacataaacttccaagtcttttagcatacatgtcaccaataagataaacaattaccattcaattctttcttttcatctgggatctgtccaggacattcaacctaaaatctttattatgcactcagtattttccaacataaaaccagtactcttgaagtaaagcaatgatatctcagattctttcatatcagatacctaaacaaagttaaaaactggaggaaaaggagggtcaaggccggttattaagttagagcaatttccatttttaataactttgagaggttaggcggtgtcatattttaactgag

SEQ ID NO: 66040 - DNA, 538 bp, Homo sapiens
cattttcaaaatatacagaagataaaaaacatatagtaagtatgatacttgaattgtagtgagacrtttaaaattttccaggaaacaattactgtgttttatggttataaggaagaaacatgtacatcattttggggaagaaaaagagaaattatggagtgataagtttaaattgagaaaatatcaacaaatacaatatacgagagaggctctaggcatttcatttacaaaaatattgtccagtttttgtatgtgtgatgtgtgcttgttccctctttccatatctatctctgtctgtctttctgctatggtttgaatgtatcctccaaaagttcatagattggaaacttaatccctcttctctcatgaatagatttatgtcagtcctgccctcatgaatggattaatgtcactagcatagtagtgggttccttatcataagcccttttgctcttgctctctcactatgtgatgccccctgccatgttgttaggcagcaagaaggccttctccagaggccagcatcatgctcttggca

SEQ ID NO: 66041 - DNA, 538 bp, Homo sapiens
cattttcaaaatatacagaagataaaaaacatatagtaagtatgatacttgaattgtagtgagacgtttaaaattttccaggaaacaattactgtgttttatggttataaggaagaaacatgtacatcattttggggaagaaaaagagaaattatggagtgataagtttaaattgagaaaatatcaacaaatacaatatacgagagaggctctaggcatttcatttacaaaaatattgtccagtttttgtatgtgtgatgtgtgcttgttccctctttccatatctatctctgtctgtctttctgctatggtttgaatgtatcctccaaaagttcatagattggaaacttaatccctcttcyctcatgaatagatttatgtcagtcctgccctcatgaatggattaatgtcactagcatagtagtgggttccttatcataagcccttttgctcttgctctctcactatgtgatgccccctgccatgttgttaggcagcaagaaggccttctccagaggccagcatcatgctcttggca

SEQ ID NO: 66042 - DNA, 757 bp, Homo sapiens
gttttgataaccaaataagaaaaaaaaacagcacagaaaaatataattttggctgttactaaatgggctaataataccagtaatagtattttaaaaattctaaaaaatgtctaattctcacaatagcattctaacagtaaactaagaggtaagctaatatattcaagatacagagcaaccacacttgtttaggagcactgttactttgtctacattgatttgttaaaacattgtccgttgtcaaccaatctaaaaaggacacaataggctaggcacagtggctcacacctctaatcccagcactttgggaggcctaggtgggaggatggcttgagcccaggagttcaagatcagcctgggyaacacggggagaccccaactctacaaaaactttttaaagaaattagccaggtgtcgtggtgtgtgcctgtagtcccaactactcaggaggctgaggtgggaggattgcttgagcccagaagttcaaggctgcagcaagcctgattgtgccactgcactccagcctaggcagcagagtgagactctgtctaaaaaaaataaaaataaaaataaaaatgaatacaatttttaaaataaataaaaagaacataataaaatatgtccagaaatcaatagtcaatatcgtttgattaattttgccaaaatccaatacacggtgtagttacagagctgaactttaataatagaaccaatgtaacatggtaatgcttttcatattttaaactactttcctaaa

SEQ ID NO: 66043 - DNA, 853 bp, Homo sapiens
catcttacccaatttttgttccttgcctaccaatagcggcctcactgtgtgtatatgtgtgtgtgtgtgtgtgtgtgtgtrtgtgtgtgtgtgtgtgtgtggtcagagactggcaccttgcttttcctccctgccttctaatttgactgaggacttctaggagcttccctttccttccctgcttccttagggaatcttcaatagttagagggctacattttgagaaggtgttttcctatgggctatagttgaacatcagaatcaattttcacaaagaagcgatgttgcccaagaaaatatgtcctgtagcataagcaaatggaaaaacattccatcctcatggataggaagaatcaatattgtgaaaatggccatactgcccaaagtaatttatagattcagtgctattcccatcaagatatttgatattcttcacagaattagaaaaaactactttaaatttcatatggaatcaaagaagaccccatatagccaagagaatcctaagcgaaaagaacaaaccagaggcatcacactacctgacttcgactatactaccaggctacagtaactaaaacagcatggtactggtaccaaaacagacatatagacaaatggaacagaacagagacctcagaaataacaccacacatctacagctatctgatcttcaacaaacctgacaaaaacaagcaatgggaaaaggatttcctattcaataaatagtcctgggaaaactggctagccatatgcacaaaactaaaactggacccgttccttacaccttatacaaaaattaactgaggatggattaaagacttaaatgtaaaacccaaaaccataaaacccctag

SEQ ID NO: 66044 - DNA, 853 bp, Homo sapiens
catcttacccaatttttgttccttgcctaccaatagcggcctcactgtgtgtatatgtgtgtgtgtgtgtgtgtgtgtgtgtrtgtgtgtgtgtgtgtgtggtcagagactggcaccttgcttttcctccctgccttctaatttgactgaggacttctaggagcttccctttccttccctgcttccttagggaatcttcaatagttagagggctacattttgagaaggtgttttcctatgggctatagttgaacatcagaatcaattttcacaaagaagcgatgttgcccaagaaaatatgtcctgtagcataagcaaatggaaaaacattccatcctcatggataggaagaatcaatattgtgaaaatggccatactgcccaaagtaatttatagattcagtgctattcccatcaagatatttgatattcttcacagaattagaaaaaactactttaaatttcatatggaatcaaagaagaccccatatagccaagagaatcctaagcgaaaagaacaaaccagaggcatcacactacctgacttcgactatactaccaggctacagtaactaaaacagcatggtactggtaccaaaacagacatatagacaaatggaacagaacagagacctcagaaataacaccacacatctacagctatctgatcttcaacaaacctgacaaaaacaagcaatgggaaaaggatttcctattcaataaatagtcctgggaaaactggctagccatatgcacaaaactaaaactggacccgttccttacaccttatacaaaaattaactgaggatggattaaagacttaaatgtaaaacccaaaaccataaaacccctag

SEQ ID NO: 66045 - DNA, 853 bp, Homo sapiens
catcttacccaatttttgttccttgcctaccaatagcggcctcactgtgtgtatatgtgtgtgtgtgtgtgtgtgtgtgtgtgtgtgtgtgtgtgtgtgtggtcagagactggcaccttgcttttcctccctgccttctaatttgactgaggacttctaggagcttccctttccttccctgcttccttagggaatcttcaatagttagagggctacattttgagaaggtgttttcctatgggctatagttgaacatcagaatcaattttcacaaagaagckatgttgcccaagaaaatatgtcctgtagcataagcaaatggaaaaacattccatcctcatggataggaagaatcaatattgtgaaaatggccatactgcccaaagtaatttatagattcagtgctattcccatcaagatatttgatattcttcacagaattagaaaaaactactttaaatttcatatggaatcaaagaagaccccatatagccaagagaatcctaagcgaaaagaacaaaccagaggcatcacactacctgacttcgactatactaccaggctacagtaactaaaacagcatggtactggtaccaaaacagacatatagacaaatggaacagaacagagacctcagaaataacaccacacatctacagctatctgatcttcaacaaacctgacaaaaacaagcaatgggaaaaggatttcctattcaataaatagtcctgggaaaactggctagccatatgcacaaaactaaaactggacccgttccttacaccttatacaaaaattaactgaggatggattaaagacttaaatgtaaaacccaaaaccataaaacccctag

SEQ ID NO: 66046 - DNA, 853 bp, Homo sapiens
catcttacccaatttttgttccttgcctaccaatagcggcctcactgtgtgtatatgtgtgtgtgtgtgtgtgtgtgtgtgtgtgtgtgtgtgtgtgtgtggtcagagactggcaccttgcttttcctccctgccttctaatttgactgaggacttctaggagcttccctttccttccctgcttccttagggaatcttcaatagttagagggctacattttgagaaggtgttttcctatgggctatagttgaacatcagaatcaattttcacaaagaagcgatgttgcccaagaaaatatgtcctgtagcrtaagcaaatggaaaaacattccatcctcatggataggaagaatcaatattgtgaaaatggccatactgcccaaagtaatttatagattcagtgctattcccatcaagatatttgatattcttcacagaattagaaaaaactactttaaatttcatatggaatcaaagaagaccccatatagccaagagaatcctaagcgaaaagaacaaaccagaggcatcacactacctgacttcgactatactaccaggctacagtaactaaaacagcatggtactggtaccaaaacagacatatagacaaatggaacagaacagagacctcagaaataacaccacacatctacagctatctgatcttcaacaaacctgacaaaaacaagcaatgggaaaaggatttcctattcaataaatagtcctgggaaaactggctagccatatgcacaaaactaaaactggacccgttccttacaccttatacaaaaattaactgaggatggattaaagacttaaatgtaaaacccaaaaccataaaacccctag

SEQ ID NO: 66047 - DNA, 917 bp, Homo sapiens
cgggaatagacagcaaatcaatttagctgacwccaaggtcattcaggctcctgcccaaaggtcacctcttcagagaggccttccccgaccagtccagctaaaacagagactttgattttcttccttgtcatctagactatgagctccaccaagacagagaccttgtctattgcattccccacagtgctcccagcatctgggacatcttctgctcagaagatattcattgaatgagtgaagggaccaagggctcctgcaggggcacttgcaggagctcagtatggagaaatatgtgggttcaactgctattgcctttgaatatcaaactaaggactttggcctactgaagagtattcccatccaactccatgggatgtactaggtcaaaaacaggaatgtcatgctaaggacacttttggaatactggcctaaacaaagtttaacgtttttttcctgtagttctttcatacacatttaccatatcactgtggatatccaagtgtgcccaagtattaatacatagcacccttttttttttttttttttgtggacaccaagtctcactctgtcatccagtttgaagggcagtggcatgatctcagctcactgcaacctctgcctcctgagttttcaaaggatcttagtgcctcaacctcccaagtagctgggaatacaggcacgcaccaccacgccaagctaatttttgtgttttaagtagagacagggtttcctcatgtagccaaggctggtctcgaactcttgggttcaagcaatccactcccctcaacctcccaaagtgctgggattacaggcatgagccaccacagccagccccttttccctttttttttttaatacatcactctgatgacactttgggaaatagagctgcagaaaatgggaagttttaaaaatgc

SEQ ID NO: 66048 - DNA, 744 bp, Homo sapiens
ttttcccaagtctatgattatttatttgcttgtcactgctagtggaaatgctgcatcaaatgacctttgcaattttaawtgaagctacagattctaagaattttcataaagaaggaaaatacctttagcatgaaatttttaattcttttcatctaggtctgatattttgttaatagactgaattaaaagtcaagagtttcatggaaaatactaaattgtgagtaaaacaagatctttcagtctaggaaatcaatcagtttttatctgataaaaaacagatggcttctgtagcataagatttttggtataaataggatctatacactgcacttaaaatatgcagtgcctgggctgggtgcagtggctcatgcctgtaatcccagcactttgggaggccgaggtgggtggatcacttgagaccagcctggacaacatggtaaaaccctgcctctactaaaaatacaaaaaattagcctagcatggtggtggacgcctgtaatcccagctactcttgaggatgaggcaggggaatcacttgaacctgggaggcagaggttgcagtgagccaagatcgtgccactgctctccagcctgggcgacagagcaaaactccagctccaaaaaaatgcagtgcctggcagcacagtgtaaatatctaagattactggggccattatttagacccttatgtgaaaagagttctggtatatatttaaatgttatacatgtaaagagtcctgatgt

SEQ ID NO: 66049 - DNA, 573 bp, Homo sapiens
caataatagataaaatgctaccatggacttcatagatacaaatggaggtgttgatcttcagtgaaacatttcctcttctagaatggagcaaagcaaccattttgacaatagctaagaaaattacatagacgttctgggcaggaacgttgtgaaaatgccactgaggctgggcgtggtggctcacgcctgtaatcccaggactttgggaggccaaggcaggtggatcaccaggtcaggagttcaagaccagcctggccaacatggtgaaaccccgtctctactaaaaactataaaattagccgggcgtgatggcaggtgcstgtaatcccagttacttgggaggctgaggcaggagaatcgcttgaacctaggtggcaaaggttgcagtgagccaagatcgcaccactgcactccagcctgggtgacagagtgagactccatctcgaaaaaaaaaaaaaaagaaagtgtcattgaagctataagaacaattaaagaactggtcccaacctgggtagttatgtcttcccctctcactccaccactgcactccagcctgggtgacagagtgaaact

SEQ ID NO: 66050 - DNA, 813 bp, Homo sapiens
tttactggatatggaagctctcccccaacagtgagctattggaaacacagactatccaaagtcagatatgtttagccatgagactttgcagaatctcctaccaggaaacgagagtaggcactggcccaaacaccaaagcwgaagaatccagcataacagtgcagccctggggcaccatgctggatgcagcttaggacaggggatgggcaccaaggggtttgaccatagaataaaggagaggtccaaagccgtaggtcagtcagtgtgcttgaagaagcattatttctaatgcttgtacatagtaggtttaacagtgttccccaatctcttcacaggggttaggtatccctcttgtacttctccatcatgtcctttatcacactggatgcagggtattgtatatttgctagtctatatccacctctagactataagatctggagggcaaagaccatatatatctttatcaccgtatttccaacacctagactaatgcttgtcccagagagggtgctaaataaatttttattggaagagtgaatgaacaggatttttaaatttggaaattaagttagtgggaagcatgggaaagaaaacatatgtaaaccaagatgaaatttgtacaaagtgcataccatacagtcatgtattattgctagaggtagactgcaaatttcactctaaactgcctaccagtcaaagcaaagaaaaaaaaatcagtgataaaatttatagtgactgtaggattttaaaagataagttgctcccgatgaagtgtaagtatcactgtgttgacttaagagaaatgtctcc

SEQ ID NO: 66051 - DNA, 1416 bp, Homo sapiens
gggactctgggagaatcccatgtaaagattttagctagtccaggcatagtggcacacacctgtaatcccagcactttgggaggccgaggcggacagatagcttgagctcaggagttcgagactagccttggcaatacagcaagacccccatctctacgaaagaatacaaaaattattcaggcgtgatggcgtgtacctgtagtcccagctactcaggaggctcaggtgggaggatcatttgagcccaggaggtcgaggtcgtagtgagccgagatcgagccactgcaccctaacctgggcatcaaagtgagaccctgcctcaaaaaaaaaaaaaatttagctagttatcctttaaatgtatttcacccatacatgcatatgcctgctgtgtacctacaaaaactttttaaatctaaaatattaacatttggaaaaaaaatgtattttgctggggccaaaatccatacttggtagccctgagtatcaacagcattttttgagcgcccattatatataggatatcaaacttataattgtggagaatcacaagggaggtataaaataaatttcttgtccaggcacggtggctcacgcctataatcccagcactttggtaggccgaggcaggcagatcattttgagctcaggagtttgagagcagcctgagcaacatggcaaaaccccatctctactaaaaatataaaaattacccgggtgtggtggcgggcacctgtaatcccagctactcaggagactgaggctggagaattgcttgaacccaggaggtggaggttgcagtgagtagagattgcgccactgcactacagcctgggcgacagagcaagactctgtctcaaaaataaaataaagtgaaaattttttttttggcaagaatgtagaatttagaggtagaagatttagagcttggaaacaaagctgtatacctatatgtaaacacataggaaaaggtctgaaggaattttcacatgattacttaactctaggtagggattaagattgggatgggctgagggaggaagagtgaaagggaattaygtatttttttaactttactgaggaattactagaaatttttggtacatattacacgcataaacacagcaacacaaagatttgttttgagctttggctgccagttattagtggtttaaccccagagatgaattaaatatttatgttgttgttgttgtcattttcatcatgagagctggctgggtcttagaatcatttggtacaatccccactttttatagataaagaaattctaagattcctgcttcaaggcacgtatctctgattgcctaaccattgtgcttacttcttgtgagaggaggtaggccctctgtgcagtctgtggatttcaaggatatggaatacagatgcgtggtctctttg

SEQ ID NO: 66052 - DNA, 517 bp, Homo sapiens
acagaaagacatgtgtaagataattagaaagagccgtttctttttttcttatataatctgtgtatttggcttcatctctttaaatatgtggaatatattatttctgtaagttttaataaataccctttctttcctgcaaacctttattatcaatgaaaaaacaggcatcaatctcagccttcaagtagataaaataggttcctctctcacacagacatgcaaataaataaagattctaatgtgctctcggtgcataggtgttaacgagaataatgtgtaaatgactttttgtttcattttccagggaagtagatcgagattcagatggtcacgtcagctttagagactttgaatatgccctgaactatggacagaaggaagcctaactattgtgaactacttttggtaactctggggagatcaatagattgtaatgtcagcagactckactctactaatgatgtcatgctacagacttgtgattaaacatttaaaaatttttaatttttgtgggtac

SEQ ID NO: 66053 - DNA, 2483 bp, Homo sapiens
tcctgggcctcatgcaattctcccacttcaaccacttcaacctccggagtagctgggactacaggtgcatgccaccacacccagctccaaactcccttttattacagataagaagctggtgttctaaagaggtatgcaccttatccttggtgtatatggtagataagaatataggtgaaagtgtaaagataaaaacgatgaattggttattttacatagtgataatgtcatttactaaatactgcaatatctttgtgctggaatacgtataaattattacttagacctcgactttgctcaaatatgtggtaagaatatgtatggatgtgagtgagtattataactatggctgaaatagagattaagaaaataaagtaacaattctggttaattcagctcaacaaatactaatcatgtgcccatgtgctgggcaaagataaagcactgggtacgtaatgaagcatacgacacgcagggtccttgtccccctcacatagaccacggagagcatgtgggcgttatagtcatagtcccgatgccagctcgggagatccctgggaaggtcatgagaaatggttagatcctggatctattgtgaaggtccaaccaacaggacacacctttagatcaaatgtggcgttgggtgctggggatatagcgacctaaggaacacatgattgttgactttgcggaacttttattacggtctgggtgtcagaccttagtcaaataatcactcacataaatgcaaagttcaaacagtttaagctctgaagaaaaacatgcccagggcgtaagaggggatctgatgtggccagggggtgaagtgttgtcaaggaaaacttctccgtggattcaaaggatccatatgcctgacggagtgggggtgagtagggtggagaggaaatagcacaggcaagtgttctggggaagtggagaatgtctaggaggatctggcagagggccagggaggtcaggcagagggagcctgggggagataagctgtgagaaagagagtaaaactcctgggcaggacgcctgagaaatggaagttgaaatggaaatcagatggcagatcctactctccaaatcattcatagtttccctaatgcaaggactggcagtgggacatggggcaggaggggtgaaactctgattttactattgatgaactgttgataccattgtatcaactctgtatcgagactttttatcagtgagcatgctttacttgttaaaaaagaacatttaggacaggcgcagtggctcacgcctgtaatcccagcactttgggaggctggggcaggtggatcacctgaggtcaggacttcgagactagcctgaccaacatggtgaaaccccatctctactaaaaaatgcaaaaattagctggatgtggtgatgcatgcctgtaatcccagctactcgggaggctaagacaggagaatcgcctgaacccaggagacagaggttgcagtgagccaagatagtgccattgcattccaggctgggccacaagagcaaaactccaccwcggaaaaaaaaaaaaatggaacatttaaagaaaaactgatgtaaaagtgaataagttagccaggatgagatggctcatacctgtaatcccagcactttgggaggcgaaggtgggaggatcacttgagcccagaagttcgagaccagcctgagcaacatagcaagatcccatctttaccaagaaaaaaaaaaaaagaaaaaaatgaagaagttttgagaggggttttttttgtttgcctgtttgttttagagtcatctccagaagacatagactggagggtacatgggattcacgttaagatcctactttctgcccctgggttgatgctgtgagccgccttgacttcttgttgctcatgtctctatccctgagctcttttttttttttgctttaaaaaattattaattatcattattattatggtaaccattcacattacataaaattaatcatttttggccgggcgcggtggctcacgcctgtaatcccagcactttgggaggccgaggcgggcggatcatgaggtcaggagatcgaggccatcctagctaacacggtgaaacgctgtctctactaaaaatgcaaaaagttagccgggcgtggtggtgggcacctgtagtcccagctactcaggaggctgaggcaggagaatggcatgaacctgggaggcggagcttgcagtgagctgagatagcgccactgcagtccagactgggcaacagagcaagactccatctcaaaaaaaaaaaaatcatttttaagtgaatgattaatgataggtgtgagccaccacgcccagtcgagtctttttattagaaacagaaaattcttgcccacaacaaactttcaggaaacattcatactgtgttgttcatttacatgtagacacaatcaatttacgtatatgtttatacataaaaataagataaacaggtttagtatatacttt

SEQ ID NO: 66054 - DNA, 2483 bp, Homo sapiens
tcctgggcctcatgcaattctcccacttcaaccacttcaacctccggagtagctgggactacaggtgcatgccaccacacccagctccaaactcccttttattacagataagaagctggtgttctaaagaggtatgcaccttatccttggtgtatatggtagataagaatataggtgaaagtgtaaagataaaaacgatgaattggttattttacatagtgataatgtcatttactaaatactgcaatatctttgtgctggaatacgtataaattattacttagacctcgactttgctcaaatatgtggtaagaatatgtatggatgtgagtgagtattataactatggctgaaatagagattaagaaaataaagtaacaattctggttaattcagctcaacaaatactaatcatgtgcccatgtgctgggcaaagataaagcactgggtacgtaatgaagcatacgacacgcagggtccttgtccccctcacatagaccacggagagcatgtgggcgttatagtcatagtcccgatgccagctcgggagatccctgggaaggtcatgagaaatggttagatcctggatctattgtgaaggtccaaccaacaggacacacctttagatcaaatgtggcgttgggtgctggggatatagcgacctaaggaacacatgattgttgactttgcggaacttttattacggtctgggtgtcagaccttagtcaaataatcactcacataaatgcaaagttcaaacagtttaagctctgaagaaaaacatgcccagggcgtaagaggggatctgatgtggccagggggtgaagtgttgtcaaggaaaacttctccgtggattcaaaggatccatatgcctgacggagtgggggtgagtagggtggagaggaaatagcacaggcaagtgttctggggaagtggagaatgtctaggaggatctggcagagggccagggaggtcaggcagagggagcctgggggagataagctgtgagaaagagagtaaaactcctgggcaggacgcctgagaaatggaagttgaaatggaaatcagatggcagatcctactctccaaatcattcatagtttccctaatgcaaggactggcagtgggacatggggcaggaggggtgaaactctgattttactattgatgaactgttgataccattgtatcaactctgtatcgagactttttatcagtgagcatgctttacttgttaaaaaagaacatttaggacaggcgcagtggctcacgcctgtaatcccagcactttgggaggctggggcaggtggatcacctgaggtcaggacttcgagactagcctgaccaacatggtgaaaccccatctctactaaaaaatgcaaaaattagctggatgtggtgatgcatgcctgtaatcccagctactcgggaggctaagacaggagaatcgcctgaacccaggagacagaggttgcagtgagccaagatagtgccattgcattccaggctgggccacaagagcaaaactccaccacggaaaaaaaaaaaaatggaacatttaaagaaaaactgatgtaaaagtgaataagttagccaggatgagatggctcatacctgtaatcccagcactttgggaggcgaaggtgggaggatcacttgagcccagaagttcgagaccagcctgagcaacatagcaagatcccatctttaccaagaaaaaaaaaaaaagaaaaaaatgaagaagttttgagaggggttttttttgtttgcctgtttgttttagagtcatctccagaagacatagactggagggtacatgggattcacgttaagatcctactttctgcccctgggttgatgctgtgagcygccttgacttcttgttgctcatgtctctatccctgagctcttttttttttttgctttaaaaaattattaattatcattattattatggtaaccattcacattacataaaattaatcatttttggccgggcgcggtggctcacgcctgtaatcccagcactttgggaggccgaggcgggcggatcatgaggtcaggagatcgaggccatcctagctaacacggtgaaacgctgtctctactaaaaatgcaaaaagttagccgggcgtggtggtgggcacctgtagtcccagctactcaggaggctgaggcaggagaatggcatgaacctgggaggcggagcttgcagtgagctgagatagcgccactgcagtccagactgggcaacagagcaagactccatctcaaaaaaaaaaaaatcatttttaagtgaatgattaatgataggtgtgagccaccacgcccagtcgagtctttttattagaaacagaaaattcttgcccacaacaaactttcaggaaacattcatactgtgttgttcatttacatgtagacacaatcaatttacgtatatgtttatacataaaaataagataaacaggtttagtatatacttt

SEQ ID NO: 66055 - DNA, 563 bp, Homo sapiens
gtcccggaaaatctaagtaacttgattcaggctaagtgatggtgacgggagaagagtgtcagggtagggattcaaacctatcagcctgaccgaaaacatatgcctttcctacgatgctgcattattacctgcagtgggaaaatcatctatgacactgattcatattctatggttacacttcattttcagtctaaaatgaatttacccagattcactggacaatccaagacaagcctttagcacatagtaggtatgaaaaattaatttccaagctgggcttggtggctcacgcctgtaatcccagcactttgggaggccgaggcgggtggatcacctgaggtcaggagttcgagaccaacctggccaacatggtgaaatctcatctctaccaaaaatataaaaattagtccggcgtgttggcgcatgtctgtaatcccagctactctggaggctgaggcaggagaatcacttaaacccgggaggcagaggttgcagtgagccaagatcgtgccactgcactccaaccygggcaacagagtgagactctgtctcaaaaaaaaaaa

SEQ ID NO: 66056 - DNA, 912 bp, Homo sapiens
catgtttcaggcttggtaatgagatggggtcaatgctattgtcacatttacctgttatatcataaacgcttaccttccgcatggtcagcatgtatggtgttgattgtttataaataccagatccatgatatacagtcatttgtaattttgctgagccatgaatttgagtcacaggcttgtgggcgggagtgaatttcttagctagtgagtgatcctagctgactgtcarataaacagagttttgttctcgatgtgtagttctttatgcagtacattttatgatgtgattttttttaaaagagatgtggtcttgctatgtcatccaggctgtatttgaactcctggctcaagtgatcctcccacctcagcctcccaagtagctgggactacaggtgcatgccattgcacctggcttaatgtgatttttttttcttgaggctgtgttcctttgtcaaaaaatcagttctgctagtcctagtgttcgaaataaagagaaaataaagaggcctgagaaagacattcctagcccaataatgaaatttcaaggaacagaatgtcaaatgtgatgatgacttggctttatgatatgaaaacagttggaggatgtgatctcaaaacaaggaagcataattcattaagccattttgccaagaactctgatcagaatgtggtagcttataaaggcattagaagcttcaagatattattcacatttttcagtcaaaatataccagatttggggaggaaatgatatgctattgttatattcaacaatttgtagggcgtttgaaggtgtagggacatatacctcttgcatgtcaacagaatgtagtcgttaaacattacatatgagaccctctcctaggcttgtgcagcattgagaaaaatataagtcattgttcttgctgttga

SEQ ID NO: 66057 - DNA, 873 bp, Homo sapiens
aaggagcatcgctgcaccttcgcagctagagcaaaggcagtttgaaaacagtttattaggctattccgcagatccacacagtttacagtataccgagttttgctcacgtgccaattctcagcgagacattccctggctactagattttaaattctcactatcctcgaccttcgtactgcatcttctcatcctcttctctgctttgttctcctccatggtgcctgggaccttctgttacgcttcagattgcagtccttaacatgctgttcaccacctttcctccatagcgtgggaactccatcacgagggctttgtgtctgcagcttactgckgcatccccagcatagaagccagagaaagacacaggacagacactctgtgcctggatgctgggccaagaaatgagtttctgtaaataagaaactaccaaacaatacagtacacttgatgtggatgcaaagacatgtaagaatttttacaggctgggcgcagtggctcacgcctataatcccagcactttgagaggctgaggcgagtgtatcacctgggatcaggagttcaagaccagtctggccaacatggtgaaaccctgtctctactaaaaatacaaaaaaatagccagggatggtcgtgggcgcctgtaattccagctacttggtaggctgaggcaggagaattacttgaacctgggaggtggacgttgtagtgagcagagattgtgccattgcactccagcctggacaacaagagtgaaactccatctcaaaacaaacaaacaaaaaactttttaaaatttattgttttgaaatgaaataagaatccaatggatttttagctttatatctacgtgtataagatacatgtattaatgca

SEQ ID NO: 66058 - DNA, 873 bp, Homo sapiens
aaggagcatcgctgcaccttcgcagctagagcaaaggcagtttgaaaacagtttattaggctattccgcagatccacacagtttacagtataccgagttttgctcacgtgccaattctcagcgagacattccctggctactagattttaaattctcactatcctcgaccttcgtactgcatcttctcatcctcttctctgctttgttctcctccatggtgcctgggaccttctgttacgcttcagattgcagtccttaacatgctgttcaccacctttcctccatagcgtgggaactccatcacgagggctttgtgtctgcagcttactgcggcatccccagcatagaagccagagaaagacacaggacagacactctgtgcctggatgctgggccaagaaatgagtttctgtaaataagaaactaccaaacaatacagtacacttgatgtggatgcaaagacatgtaagaatttttacaggctgggcgcagtggctcacgcctataatcccagcactttgagaggctgaggcgagtgtatcacctgggatcaggagttcaagaccagtctggccaacatggtgaaaccctgtctctactaaaaatacaaaaaaatagccagggatggtcgtgggcrcctgtaattccagctacttggtaggctgaggcaggagaattacttgaacctgggaggtggacgttgtagtgagcagagattgtgccattgcactccagcctggacaacaagagtgaaactccatctcaaaacaaacaaacaaaaaactttttaaaatttattgttttgaaatgaaataagaatccaatggatttttagctttatatctacgtgtataagatacatgtattaatgca

SEQ ID NO: 66059 - DNA, 873 bp, Homo sapiens
aaggagcatcgctgcaccttcgcagctagagcaaaggcagtttgaaaacagtttattaggctattccgcagatccacacagtttacagtataccgagttttgctcacgtgccaattctcagcgagacattccctggctactagattttaaattctcactatcctcgaccttcgtactgcatcttctcatcctcttctctgctttgttctcctccatggtgcctgggaccttctgttacgcttcagattgcagtccttaacatgctgttcaccacctttcctccatagcgtgggaactccatcacgagggctttgtgtctgcagcttactgcggcatccccagcatagaagccagagaaagacacaggacagacactctgtgcctggatgctgggccaagaaatgagtttctgtaaataagaaactaccaaacaatacagtacacttgatgtggatgcaaagacatgtaagaatttttacaggctgggcgcagtggctcacgcctataatcccagcactttgagaggctgaggcgagtgtatcacctgggatcaggagttcaagaccagtctggccaacatggtgaaaccctgtctctactaaaaatacaaaaaaatagccagggatggtcgtgggcgcctgtaattccagctacttggtaggctgaggcaggagaattacttgaacctgggaggtggacgttgtagtgagcagagattgtgccatygcactccagcctggacaacaagagtgaaactccatctcaaaacaaacaaacaaaaaactttttaaaatttattgttttgaaatgaaataagaatccaatggatttttagctttatatctacgtgtataagatacatgtattaatgca

SEQ ID NO: 66060 - DNA, 873 bp, Homo sapiens
aaggagcatcgctgcaccttcgcagctagagcaaaggcagtttgaaaacagtttattaggctattccgcagatccacacagtttacagtataccgagttttgctcacgtgccaattctcagcgagacattccctggctactagattttaaattctcactatcctcgaccttcgtactgcatcttctcatcctcttctctgctttgttctcctccatggtgcctgggaccttctgttacgcttcagattgcagtccttaacatgctgttcaccacctttcctccatagcgtgggaactccatcacgagggctttgtgtctgcagcttactgcggcatccccagcatagaagccagagaaagacacaggacagacactctgtgcctggatgctgggccaagaaatgagtttctgtaaataagaaactaccaaacaatacagtacacttgatgtggatgcaaagacatgtaagaatttttacaggctgggcgcagtggctcacgcctataatcccagcactttgagaggctgaggcgagtgtatcacctgggatcaggagttcaagaccagtctggccaacatggtgaaaccctgtctctactaaaaatacaaaaaaatagccagggatggtcgtgggcgcctgtaattccagctacttggtaggctgaggcaggagaattacttgaacctgggaggtggacgttgtagtgagcagagattgtgccattgcactccagcctggacaacaagagtraaactccatctcaaaacaaacaaacaaaaaactttttaaaatttattgttttgaaatgaaataagaatccaatggatttttagctttatatctacgtgtataagatacatgtattaatgca

SEQ ID NO: 66061 - DNA, 748 bp, Homo sapiens
ctctggaactgtgtatagttaatcaaagactatttgcccgaatttctccaagccacagaagagtgactggacagcagttaggcccctgtggaacatgcttgtttttcatgttatatcatttatgtaaaatgaaaacctctgaagctaattctaagtggaaaaataagtggtataatctgattttcacacattttatatgcatcaactggttataggatgatttcttctgtgtagttatttgaatgctatattcattttaaagccatctggagggatgacgaatgaagaaacaaatctgtcagagtcggtccatgtgataccaggggtgctgcttcggaacacaggcactcacacagcacygggagagtcgagaggggcactgcaccgatgtggctctgtgcagaaaggctttcccagtggtacttttcactgatagttcaagaagatgtcgagaacttcggggtgaaagaagttttgtgggtaggcaaagaagagtggcctgtgtgtcccgtttgaggcaggaacttgtgatacctgtttctggaaattgtggaaggagaagttgagatcttaaccttagagataacatatcgtctatgattttaaggatgaggagtcagacacacagttccttctggtggcttactcaagattataatacagacaggaagaaagaaacaaaattagaacaccaacttcatcccaagtaccggcatgatacgatacttactctagtgtgtgtgcatgc

SEQ ID NO: 66062 - DNA, 1351 bp, Homo sapiens
tttatttcctctggagaggagaactggcaactgggagataaggacaggacagagagtgtcattgtaaaaagttttgttctcattgatttatgaaacatgtaaatatattattgtttactcaaaaataagtaaatataaattttaaaatatgatcatagtctctacattttaatcctcagagatgccttttaagtttttctgttagaaacttttaattctattacgcatatataggcattactttgctctttaatattttttcagggaaaatgacataaaaatttaaaaaacccaggcaataactttctacattatcaggttttattacgctaaattaaatttactaaatgctattaattaaattttagtaaatgcttttagagtatgtgttcttttaaytgataagatggtactattctcatgatgcattatgtggagtctataaaggaaagttaatatcacaatgcctagaaaagttaaagtttctgcctcatggggaaatatggctggtctttattccagactattttcaaatagcctgctcagccctccaaagctatgttgtcttctctgacctgtttcttaatttatatgtaacttttaaatctgcaaaaggatatttcaatttatttttattttattattattttttgagacagagcctcactgtgttgcccaggctggtctgggatcctcccgcctcagcctcctaagtagccaggattagaggcttgcaccaccctgcccagcaattttagtagtttggacttcctgtgtcttcctttctgcttccctatgtccattattcatctctagtcgctcatcttccatgcacatccaattcctcatgctccttgactgtctcacacctccatgcaagcatagacccaggttggcaaggtcctctttaagaaacagagtataaacttagaaatatatcattaataccaaagtaaatatttgtttagagagacagaaacaacataacaaattatacattttaaaaagctttcaaaggctataaacataaaatccagaaaagtaagatttctttatgtcctaacacaacttcataacattttttctcctgtttttttaggggttcggggggctacttgtattttgccttgacatgtaacaaaaatttcgtaaaagtatgttctgtagggaaaatagaaaaaaaataattcagccttttttccagcattgttggttaaaataatttggaaaagttacttttagcttcacaacgcatctctggttacacgtagattattaggattgttgtcaaatgcggataatcctctactgagtctctttcatagatgagctgtaagagttcaagtcattt

SEQ ID NO: 66063 - DNA, 733 bp, Homo sapiens
acagctggaatgctgctcaattcatgaattgtgaataaaagacagattttaaactaaacttgttgaaattgtgttttttgagagtactaaaattgtattttcataatcttaacatgaatccaaagactggggtgaaactggttgtcatccatcatcatatactatcctataccttatttatctgcatttcaggaagaaatgtaaaataagaataatatttttatttttctattttttactagtcttatataaaagkattttgcttctgttctatttggatatagttgttgggtcttcggagttctatgttttcttaccattcttttaaaattataagtttttcttgattgtaacttttataatcatgaaaaacaaatgcctttcgcatatttgccacccaaagagaacaactgttttggtgtatttctttttatatttgttttacatatgtaaaatcactgcaaatattgaattttaggtactgaaatcagataaactggttcataaattttcagtttataactaatgccaaatgttcccaataagaggagataacaatttacttaactagtttgtcaacactgaatatagaataggtttatatcttccctttttttcatataaagctgttttatattttagattatttttaatctgagtatatgttgtaaattcagatttttattgcagatgattgccttattgaacagtgagaaagggtgagaaaatttta

SEQ ID NO: 66064 - DNA, 2536 bp, Homo sapiens
aaggatgaagtcttgaccactaggtgttgcttcctgtgtgaattaaaaagctgttgggctttttttttttttaactttgtgcaatttttaatgatttttattccttttaacatatccaacatccttgtttttatttcatggcaatggtgttgagttgtgaatgttctaatagagaagccagtctagcagtctgaactcaaacttgccatcaatgttcatacagtgagaaagtgttatggtttggctctgtgtccccacccaaatctcatgttgaattgtaatttccaatgctgggggcaagatgtggtgggaggttattggatcatgcgggtggatttcccccatgctgttctcatgatagtgagttctcacgtactctgatgttttaaaaatatgtgacacttccccctacactttctttctctcctgccgccacgtgaagaaggtacttgcttcccctttacccttccaccatgattgtaagtttcctgaggcctcctcaacaatgcttcctgtacagcctgaagaactgtgagtcaattaaacctctttcttgataaattaccctgtctcaggtagttcattatagcagtgtgagaacagattaatacagaaagtatcctcaatttttggtgcattcattttacrttcacatagttccctgagctttattccataatttcactaactgttctctgtagcatgtgtgggatccttctactagacaggaggcatgttgagggcaaggactgtcattttctctgctttatactcccaggaattagccctgttcctgatacatagtaggcacttaataaatgtttgctgagtgaataatgaagggaaactccaccttaaattcttttcaaattcttcactttaccaataatataactggggcagaaatcagcaaagtcgacttaccaaagatctacatttattgtgtggtagacacaaggcccctcgagtccagaatctatgcctagtgctgttttctccatggataactaaaatctatgagtacaaataggaagaaagagagagtctgcctatagagtgaaaattgcagatatattctgttacctagcgacatcatgagaagtgtttcagtttcatctctcataaaaacaaaggacaccattgttagtatctgactcacatcagtgctgtgacaacgcaaggtgtctcagcacctggaagaaaccagcagcattagtaagtgttcccattatagaaccactaatgaggcaatttgttaaaccagcatccccctgcaaaccaaaatcagacaaatgagctggtacatttgaaggttcagaaaaaacaaattctcagtagaaatagaaatgagtctatgccaggtatttgtgacacattaaattcatctgaggcaattatcatgactcatcatcaaatggaaaacctaggatatccggcctgttctgctggaaaaagtggttgtgagggtgccagcaggtaggatggttttatttgggaggactctcccttctcctaatccactgagtaacaatgcatgaccagtaatattttcaaaggaactgtaaggaaattgtattgatacttatgttctgatatgatgaattagcagacgaagtaatttcttaacctgacactcaagtcttctatgatctgatggccacaagtacctctgtaccccgtaatactcattttactgagagaatatctgcatctctttactcatgctgtctcctaccttgccaacctaacctcctcctgtgcatccacctataagaccccactcttggaaatactgggacttacgccctcctcctacactcagtactgacctagattccagcttcagcaactctagcaacactgcccttaaccttttgcctttggaaacttggcagcatcatcttcgaaggatccaaacccaggctcaagtccagtgagttttctctggtcctgtgcctgagcagcccagctggcacagcatgggtagagaccacctgtttcctgtcagcttcccaatcccccttcaaagtactcaataaatgtgtgctgctaggtgatgtgacacagagagggttttgtcggatagaagaatgctgccacacatctatttttacttgacttatttaacagtttggaaggacatgcacaattgctctacacagtatagatctggccacccaagagatggctcagactcaccaggggacaggggacagccagtgctgaggagtgcctgcctttctgctcctggctacactgtgtcccagaaaagacattttctcacagccaaaaagcaagcagtcacatccctgaaaaagatatttttcttaactctgcacctagaaaatcatttggaggatggtactagcaaggactgctagctcttacagacagatgacctcagagaagagcaggggactgaggggggtggaaatcctgtggtctaagtcttagcttagactctaattgagatgatagaactgttacttaactagcagtttctttttgtctcttcttttataaaataaggaaaata

SEQ ID NO: 66065 - DNA, 666 bp, Homo sapiens
ctgtgctctggtttcagtacttggtcacactggcacccaatgatgcagaggaagctggtgggtgactagaatgtaagtagaggaaagcaaggccctatctgtcttattcatttccctggggctacaaatgtgtagcagtagtgtctaggggagtagtatggagtaagcactcagtacatatctgctaaagaatgagggctctgtctccagaagtgggcctatggtagatatcagagggcaattccaacttctgtggatagcatggagtgactgtaatttgactcaccttgtcatcatcgatgaggggtcctttttattcatccttttgatcatacttcctctcgtgtttccaccttattctttgcattattttttaacaggaaaaggggattgaacatttttttaagtgtcagtctatctcaaaatactgtattttagctatacaaggtatcctgctgtgcatctttggcttatttggagttactttgccaaagcagagaaagtacaaatcctagaaacctgtttctcactaaactcacttcataaacccatccagagtcattttccacaatgggattgaaaaagaaagaagaacaggcagtaatcaattgtagcacttactagtttaccrctcagatctcaatcttctgccatcacttagaagca

SEQ ID NO: 66066 - DNA, 919 bp, Homo sapiens
tgaatttttcatttagaaaccatgtccctgagacaagttggtttattgacatgtcatcaagatagttcatttaagatatatttaatgagccctgtattatattccaagcactgtgcttggtaatacagacatacagatgaataagactaggtaggtattacccttcaagtgtctcaaaatctagtgaagaagttaagcacacaatgcagtttatggggaaagagtaagcatatgtatgaagggcagacgtagcatagagaggttggagtaaaagttactgggggtgggggacaaagcatggcttgaaagtttatggtcttactgaaacatattgcagcatttgaaatgataaatttctctctcatgaaaactctcctttagctcctggataccatatttacctgattctcatccgatctctgttgaccctctttaaattatcttcttatcttccttttttcacttttattttaagttcaggagtacaagtgcaggtttgttacatggtaaacttgtgtcgcaaaggtttgttgtaaagattattttatcagccaggtattaagcctagtatccattaattatttttcctgatcctcttcctcctcccaccttccaacatttgataggccccagtgtgttttatttccctctgtgtgtccatgtgttctcataatttaggtcccacttataagtgataacttttagtagttggttttctgttcttgtgttagtttgctaataataatggctttcagctccattcaygtacctgcaaaatacatgatcttgtccttttttatggctgcatagtattccctgatgtatatgtgcaatattttctttatccagtctatcattgatgggcatttaggttgattccatgtcactgctactgtgaatagtgctacaatgaacatac

SEQ ID NO: 66067 - DNA, 636 bp, Homo sapiens
atgtcatcgcatggcactcattcgcacatcctgaacccttaaacccagaggataataaaatattttaaaagttaagcaacatgacatagccattgaattctacagcttattataccaagcaaataagggaaaaaaaattcaatttgtcttttttgctctttctccccatattctcttgtagccattgtgggcacaagaagtcaggtccccaagactggcctagatcaaatgaccttccagaggaggcataaatttggtacccaaatttgttcagcatttcaacmatttttctaccgtcaacatattttccatgtatattttattcttagatggttagtgtagcttctaagatcctgataataaatatttccaaaaagagattataaattttctccggccacgttacccagacttctatggagtagtgactggctgactccagaagatccccttcttcagaaacagcagtccaggcagactaaggttattgcctgggattgcaaaggtagtacttagcggagttgtgattcaaaggatatgaagattgaagatattatgtggaaaaagcctagcacacagcctagtagtaactaggtacacactctatataccctaattaatcctgactgcagataa

SEQ ID NO: 66068 - DNA, 1161 bp, Homo sapiens
ggcagggaaccttgaacgttttaggaggcaaaagacatgtgtaggatgaattgatgcaaatggctttgcttcagttatataggcccctgaaggcacatttgctagaggaactctcttaagatgggcagctcctagggagggattcaggctggttcccaggcttgcctgccagcttaactgagctgaaagtagcaaactgaaggagaatcaggctgatactgtgttgccactcctgctgtccaccataaagactgaactcttacccgaataggggtgcagagacccagaggttcttctcaggttttagcctcctacaattctgactcaaagctgctctgatggtaaactgcatctgtcttttgtgctctgtccacagaaacctgaaggcaacgctgcagaaggcaccttctatccattcttctttctgcacccctttcaaaaaggcttctaggttgaagcaaggctattcttgccccagggcaaatataaaatgtgctttgaatcaccacccctgaggaaatggtcaacagtggkgccatctcctcagacaagcagagctctgaaggtttttgccgcttgctgttttcttttaggcgatacagcaaacattactgctatttgaatctgcaaaaatggagaatatggaagtcagattcaattcagagctaaattcatttgtgttttaattaatcccctcaagcagtatacttggttctatagaatttcctgtaaaatagtaaacatttcagtcagtacaggacaagtatttgtagctttttggggtgaaagaagcaaagaacaataccttctttaaggttattgcactggtcttatctaggctctatttctagatagatttgagataactagttctttcaaatctgtctttcaggtattgacataagagtcaggtgatgcaccatgtaaaaattaaggcttgagagactgcaagagggaaaagtactcattatgaaacagaaaataaaagatactgaaattctacaacctagttttttgttcctagattttcagcaataaaaacctggcaaaatttaagatcacttaaagatatagagagaaattttgcttctccccaagccaagttttagaatggttcttgcccttttgtgttagaggcaaaataaacatttccaaacccct

SEQ ID NO: 66069 - DNA, 1161 bp, Homo sapiens
ggcagggaaccttgaacgttttaggaggcaaaagacatgtgtaggatgaattgatgcaaatggctttgcttcagttatataggcccctgaaggcacatttgctagaggaactctcttaagatgggcagctcctagggagggattcaggctggttcccaggcttgcctgccagcttaactgagctgaaagtagcaaactgaaggagaatcaggctgatactgtgttgccactcctgctgtccaccataaagactgaactcttacccgaataggggtgcagagacccagaggttcttctcaggttttagcctcctacaattctgactcaaagctgctctgatggtaaactgcatctgtcttttgtgctctgtccacagaaacctgaaggcaacgctgcagaaggcaccttctatccattcttctttctgcacccctttcaaaaaggcttctaggttgaagcaaggctattcttgccccagggcaaatataaaatgtgctttgaatcaccacccctgaggaaatggtcaacagtggggccatctcctcagacaagcagagctctgaaggtttttgccgcttgctgttttcttttaggcgatacagcaaacattactgctatttgaatctgcaaaaatggagaatatggaagtcagattcaattcagagctaaattcatttgtgttttaattaatcccctcaagcagtatacttggttctatagaatttcctgtaaaatagtaaacatttcagtcagtacaggacaagtatttgtagctttttggggtgaaagaagcaaagaacaataccttctttaaggttattgcactggtcttatctaggctctatttctagatagatttgagataactagttctttcaaatctgtctttcaggtattgacataagagtcaggtgatgcaccatgtaaaaattaaggcttgagagactgcaagagggaaaagtaytcattatgaaacagaaaataaaagatactgaaattctacaacctagttttttgttcctagattttcagcaataaaaacctggcaaaatttaagatcacttaaagatatagagagaaattttgcttctccccaagccaagttttagaatggttcttgcccttttgtgttagaggcaaaataaacatttccaaacccct

SEQ ID NO: 66070 - DNA, 554 bp, Homo sapiens
gatcctctatttctgcttctccactacctcataaaggctgataaggaggtgagtttccagctcggagcatccacagtgaggaaacagaatcaactatttttgtttgatctcctctctctccttttaatgatccaaaggtggattctaccttcagatctatkatagtgactagagaaaacatgaatcatatgggccagtgcaggacagagcactactgcacaggccagagaagcagcaccttactcttgatccagtctgaccctggcttgcttgtgacctctgacttgcctgactcactgtgctgtgcaccttactgcttgacaaagcctgacagctaacactcctttatcattaagtattccttacacttgaaatacaaaacaggtatttaaaaattgaccacatgtcttaaagagtctcttctttagtgagagactgtggaataggtaaactggagcgggtccaatagaagctcattaatggtgatgtgctagttgagacttaaggaatcccagatggataaaatttacctttggaatagaaataaagacaca

SEQ ID NO: 66071 - DNA, 1233 bp, Homo sapiens
ggtatttaacaaggtggtctttctgcccataatgttgctgtgagaaggtatacatttcctgactatgaccaccttcttttgccaacaagaggtgatttactaaatgtctgattttttttacatgaactaatcttctactggaattraagaacaaagtggatagaataaatacccttcttgtcctttaagataaaaaatatcagatcttttcaaagtaattaatatagtttgccttgaacaattcaaatctatttttaaaaattatttatttttgtattgtgcttctctttttcattttaatttggtttccagtaactccctttctagtgtataattccacaatagtctttctcttcatctcagtaaatgtgtgatctgggcaaatattccaagatagggacaaagctagagaagagaattgaagattgtgctttataaatgtcaatctgtaggggccgtgtgcggtggctcacgcctgtaatcccagcactttgggaggctgaggcgggtggatcacgaggtcaggagatagacaccaaccttgctaactggtgaaaccctgtctctactaaaaatacagaaataaaattagcccagcgtggtggcgggcgcctgttgtcccagctatttgggaggctgaggcgggagaatggcatgaaggcggaagaatggcgtgaacccgggaggcggagcttgcagtgagtggagatcacgccactgcacttcatccagcctgggcgacagagcgagactccgtcacacacacacacacacacaaattatttaaaaaaaataaaaaataataaatgtcagtccgtgaccacatagttgaaaaaggtgtctgggtcttgggtcttggggaaaaaaaagatgtctttatacttttgcaagtttgttttgttatttttaatttgctttctcaatatagactcttgaaacactaaccttgaccatatcgaaactacgagaaaaaaagattctcccacactctgtcagaatagttatataatttattgtcagatgataggtgatagcaggtaccatcagctccagaatgggaggagagccagtagaatcacactggtggtggggatggtggaaaaaagaaagtgggaaagccagaattaacttaggcagatgcagctgggggcatgagaactttctttaatcttcgagtgcagcctatctctaaatgatgtctgcccttcctccttccccagctcattaaaaata

SEQ ID NO: 66072 - DNA, 1233 bp, Homo sapiens
ggtatttaacaaggtggtctttctgcccataatgttgctgtgagaaggtatacatttcctgactatgaccaccttcttttgccaacaagaggtgatttactaaatgtctgattttttttacatgaactaatcttctactggaattaaagaacaaagtggatagaataaatacccttcttgtcctttaagataaaaaatatcagatcttttcaaagtaattaatatagtttgccttgaacaattcaaatctatttttaaaaattatttatttttgtattgtgcttctctttttcattttaatttggtttccagtaactccctttctagtgtataattccacaatagtctttctcttcatctcagtaaatgtgtgatctgggcaaatattccaagatagggacaaagctagaraagagaattgaagattgtgctttataaatgtcaatctgtaggggccgtgtgcggtggctcacgcctgtaatcccagcactttgggaggctgaggcgggtggatcacgaggtcaggagatagacaccaaccttgctaactggtgaaaccctgtctctactaaaaatacagaaataaaattagcccagcgtggtggcgggcgcctgttgtcccagctatttgggaggctgaggcgggagaatggcatgaaggcggaagaatggcgtgaacccgggaggcggagcttgcagtgagtggagatcacgccactgcacttcatccagcctgggcgacagagcgagactccgtcacacacacacacacacacaaattatttaaaaaaaataaaaaataataaatgtcagtccgtgaccacatagttgaaaaaggtgtctgggtcttgggtcttggggaaaaaaaagatgtctttatacttttgcaagtttgttttgttatttttaatttgctttctcaatatagactcttgaaacactaaccttgaccatatcgaaactacgagaaaaaaagattctcccacactctgtcagaatagttatataatttattgtcagatgataggtgatagcaggtaccatcagctccagaatgggaggagagccagtagaatcacactggtggtggggatggtggaaaaaagaaagtgggaaagccagaattaacttaggcagatgcagctgggggcatgagaactttctttaatcttcgagtgcagcctatctctaaatgatgtctgcccttcctccttccccagctcattaaaaata

SEQ ID NO: 66073 - DNA, 1233 bp, Homo sapiens
ggtatttaacaaggtggtctttctgcccataatgttgctgtgagaaggtatacatttcctgactatgaccaccttcttttgccaacaagaggtgatttactaaatgtctgattttttttacatgaactaatcttctactggaattaaagaacaaagtggatagaataaatacccttcttgtcctttaagataaaaaatatcagatcttttcaaagtaattaatatagtttgccttgaacaattcaaatctatttttaaaaattatttatttttgtattgtgcttctctttttcattttaatttggtttccagtaactccctttctagtgtataattccacaatagtctttctcttcatctcagtaaatgtgtgatctgggcaaatattccaagatagggacaaagctagagragagaattgaagattgtgctttataaatgtcaatctgtaggggccgtgtgcggtggctcacgcctgtaatcccagcactttgggaggctgaggcgggtggatcacgaggtcaggagatagacaccaaccttgctaactggtgaaaccctgtctctactaaaaatacagaaataaaattagcccagcgtggtggcgggcgcctgttgtcccagctatttgggaggctgaggcgggagaatggcatgaaggcggaagaatggcgtgaacccgggaggcggagcttgcagtgagtggagatcacgccactgcacttcatccagcctgggcgacagagcgagactccgtcacacacacacacacacacaaattatttaaaaaaaataaaaaataataaatgtcagtccgtgaccacatagttgaaaaaggtgtctgggtcttgggtcttggggaaaaaaaagatgtctttatacttttgcaagtttgttttgttatttttaatttgctttctcaatatagactcttgaaacactaaccttgaccatatcgaaactacgagaaaaaaagattctcccacactctgtcagaatagttatataatttattgtcagatgataggtgatagcaggtaccatcagctccagaatgggaggagagccagtagaatcacactggtggtggggatggtggaaaaaagaaagtgggaaagccagaattaacttaggcagatgcagctgggggcatgagaactttctttaatcttcgagtgcagcctatctctaaatgatgtctgcccttcctccttccccagctcattaaaaata

SEQ ID NO: 66074 - DNA, 1233 bp, Homo sapiens
ggtatttaacaaggtggtctttctgcccataatgttgctgtgagaaggtatacatttcctgactatgaccaccttcttttgccaacaagaggtgatttactaaatgtctgattttttttacatgaactaatcttctactggaattaaagaacaaagtggatagaataaatacccttcttgtcctttaagataaaaaatatcagatcttttcaaagtaattaatatagtttgccttgaacaattcaaatctatttttaaaaattatttatttttgtattgtgcttctctttttcattttaatttggtttccagtaactccctttctagtgtataattccacaatagtctttctcttcatctcagtaaatgtgtgatctgggcaaatattccaagatagggacaaagctagagaagagaattgaagattgtgctttataaatgtcaatytgtaggggccgtgtgcggtggctcacgcctgtaatcccagcactttgggaggctgaggcgggtggatcacgaggtcaggagatagacaccaaccttgctaactggtgaaaccctgtctctactaaaaatacagaaataaaattagcccagcgtggtggcgggcgcctgttgtcccagctatttgggaggctgaggcgggagaatggcatgaaggcggaagaatggcgtgaacccgggaggcggagcttgcagtgagtggagatcacgccactgcacttcatccagcctgggcgacagagcgagactccgtcacacacacacacacacacaaattatttaaaaaaaataaaaaataataaatgtcagtccgtgaccacatagttgaaaaaggtgtctgggtcttgggtcttggggaaaaaaaagatgtctttatacttttgcaagtttgttttgttatttttaatttgctttctcaatatagactcttgaaacactaaccttgaccatatcgaaactacgagaaaaaaagattctcccacactctgtcagaatagttatataatttattgtcagatgataggtgatagcaggtaccatcagctccagaatgggaggagagccagtagaatcacactggtggtggggatggtggaaaaaagaaagtgggaaagccagaattaacttaggcagatgcagctgggggcatgagaactttctttaatcttcgagtgcagcctatctctaaatgatgtctgcccttcctccttccccagctcattaaaaata

SEQ ID NO: 66075 - DNA, 1505 bp, Homo sapiens
gatcctgtggcagcaggatgccctaatatatgttgtggcatattaaaaaaaaaattgtcaggtattcacaatgctttcagttatatctcagaagtaaaatttgttttactttctaatataaaataattgaaatacttattgtaatgtaaaataataaaataatgtaaaataaaataagtgaaataatactttcacgtcatacattaggaagtatgatgtactcattaggatctgtgagtgcatagcaaagaatgccacttaaatmaacactggctaatgcttccagcacagccctggggactcgactggagttcccaagtctggcttgatggcagcagctgttaagattgcccaacttgctctccttgcttgactttcatctcctcaaacttctttctgataataatttggctttccttgtagatttgtctacagggtagcaaacgaacaaacaagaggattcagtctgctgttttctacatctttcattgtaaacaaatacattgccatcctggttattatgcatcaataattgagggtccaattaacatgagttctccaaggagagaagcgtctgctcctcatgttctgattgattgggttgcagggctctggactagacctcgaatagtgatgagttcataggggacatcacttggtattctttgctacgtttggtttttctctcaaagcgtaacaggaagtctgataagactaacttttacacacaataatcttttgggtacattattgatatacttggtacaattaaactgactgacttacctgtgtcttgatccaccataaattctggaaactgtcctgtttcagatattgcccatcataaaactgtcttacaaatcaattaactgaaagaacaaggaccaaatttgaaaaggataaagtcttcccttttgttttctttttgggcaaagttgatactataagaaattacatatgtcttaacccaaatacaaaagtaaaagtagaagagtgaattctggaaaacactaggataatgagaaaatatatatatatatttttcccagtttttttaaaattatactttaagttctagggtacatgtgcacaacgtgcaggtttgttacatatgtatacatgtgccatgttggtgtgctgcacccattaactcatcatttacattaggtatatctcctaatgctatcccttcccactccacccaccccacaacaggccccggtgtgtgatgttccccaccccgtgtccaagtattctcattgttcaattcccacctatgagtgagaacatgcggtgtttggttttctgtccttgcgatagtttgctgagaatgatggtttccatcttcatccatgtccctacaaaggacatgaactcatccttttttatggctgcatagtattccatggtgtatatgtgccacatttgcttaatccagtctatcgttgatggacatttgggttggttccaagtctttgctattgtgaatagtgccgcaataaaca

SEQ ID NO: 66076 - DNA, 1505 bp, Homo sapiens
gatcctgtggcagcaggatgccctaatatatgttgtggcatattaaaaaaaaaattgtcaggtattcacaatgctttcagttatatctcagaagtaaaatttgttttactttctaatataaaataattgaaatacttattgtaatgtaaaataataaaataatgtaaaataaaataagtgaaataatactttcacgtcatacattaggaagtatgatgtactcattaggatctgtgagtgcatagcaaagaatgccacttaaataaacactggctaatgcttccagcacagccctggggactcgactggagttcccaagtctggcttgatggcagcagctgttaagattgcccaacttgctctccttgcttgactttcatctcctcaaacttctttctgataataatttggctttccttgtagatttgtctacagggtagcaaacgaacaaacaagaggattcagtctgctgttttctacatctttcattgtaaacaaatacattgccatcctggttattatgcatcaataattgagggtccaattaacatgagttctccaaggagagaagcgtctgctcctcatgttctgattgattgggttgcagggctctggactagacctcgaatagtgatgagttcataggggacatcacttggtattctttgctacgtttggtttttctctcaaagcgtaacaggaagtctgataagactaacttttacacacaataatcttttgggtacattattgatatacttggtacaattaaactgactgacttacctgtgtcttgatccaccataaattctggaaactgtcctgtttcagatattgcccatcataaaactgtcttacaaatcaattaactgaaagaacaaggaccaaatttgaaaaggataaagtcttcccttttgttttctttttgggcaaagttgatactataagaaattacatatgtcttaacccaaatacaaaagtaaaagtagaagagtgaattctggaaaacactaggataatgagaaaatatatatatatatttttcccagtttttttaaaattatactttaagttctagggtacatgtgcacaacgtgcaggtttgttacatatgtatacatgtgccatgttggtgtgctgcacccattaactcatcatttacattaggtatatctcctaatgctatcccttcccactccacccaccccacaacaggccccggtgtgtgatgttccccaccccgtgtccaagtattctcattgttcaattcccacctatgagtgagaacatgcggtgtttggttttctgtccttgcgatagtttgctgagaatgatggtttccatcttcatccatgtccctacaaaggacatgaactcatccttttttatggctgcatagtattccatggtgtatatgtgccacatttgcttaatccagtctatcgttgayggacatttgggttggttccaagtctttgctattgtgaatagtgccgcaataaaca

SEQ ID NO: 66077 - DNA, 1034 bp, Homo sapiens
cacactccgtgggctgcacccactgtctgagaagccccagtgagatgaacccagtacctcagctggaaatgcakaaatcacctgtcttctgcattgctcatgctgggagctgtagactggagctgttcttattcggccatcttgggacctcccctttttgagaaaatattgagtaaagaggcaatgatagaaatggaaagctgaagctttgttatccctctgcctgagtgaagttttgtccctcagatcaagaagttgaaccatgcattatatttgcaagtcaaagcctgataaactgaatgccttagaaattctggggagatacaagtaaagcattcaaacttgcttatcttctacttatttacagtttatgtatgtcctaaaaggattgtatggtaatttacaatatcatatagtgtgcataaaataaaagataaatccagttatataagtgtgaattgctgaaccacttgaatgaaagaaatcttagtttttctttttccaaatagcaagtaaaatctgtctttgagcaagattttgtaagacatacaaaatcaaatattaatttgtgtattttccttacctctgttagcttatagaactctgttccagcaacacaggaaagagtctggttcccagttgatggactgtgttactctatgattagcttcagaaataatccaacctgtctcgtgggctctgatgtttaatgaggattgcagagatacccctacaacagcttgttctttcatgccaggctttaccatgtagacactgctatttttcaggatgagaacaaaaaaaattctcagtccccctacagactgaacagaccccctcttggccaagaagaccccagggaaaccttggaagctgagttcccagccacggtgggatgggaggttgaacatgcctccttaaactccctcgttggctaaccactattagacttccttccctaagggtttaacagaaaccagccctttgggaagactcaagctgatacccaccagctgcctaatgctgcccctcca

SEQ ID NO: 66078 - DNA, 1034 bp, Homo sapiens
cacactccgtgggctgcacccactgtctgagaagccccagtgagatgaacccagtacctcagctggaaatgcataaatcacctgtcttctgcattgctcatgctgggagctgtagactggagctgttcttattcggccatcttgggacctcccctttttgagaaaatattgagtaaagaggcaatgatagaaatggaaagctgaagctttgttatccctctgcctgagtgaagttttgtccctcagatcaagaagttgaaccatgcattatatttgcaagtcaaagcctgataaactgaatgccttagaaattctggggagatacaagtaaagcattcaaacttgcttatcttctacttatttacagtttatgtatgtcctaaaaggattgtatggtaatttacaatatcatatagtgtgcataaaataaaagataaatccagttatataagtgtgaattgctgaaccacttgaatgaaagaaatcttagtttttctttttccaaatagcaagtaaaatctgtctttgagcaagattttgtaagacatacaaaatcaaatattaatttgtgtattttccttacctctgttagcttatagaactctgttccagcaacacaggaaagagtctggttcccagttgatggactgtgttactctatgattagcttcagaaataatccaacctgtctcgtgggctctgatgtttaatgaggattgcagagatacccctacaacagcttgttctttcatgccaggctttaccatgtagacactgctatttttcaggatgagaacaaaaaaaattctcagtccccctacagactgaacagwccccctcttggccaagaagaccccagggaaaccttggaagctgagttcccagccacggtgggatgggaggttgaacatgcctccttaaactccctcgttggctaaccactattagacttccttccctaagggtttaacagaaaccagccctttgggaagactcaagctgatacccaccagctgcctaatgctgcccctcca

SEQ ID NO: 66079 - DNA, 649 bp, Homo sapiens
tggttttgttttcattacaaagacaaaagaataaatatttgaacttgaggacttggagaatctatcaggttacactggaaaaacattgattgcctttttccctcaagttcattcagaaagaacaaaaacttcttcccttggataagaaagacacaatcactttcatgaagttcsacccatatcccaggatacgaattttttcctcccacatgacactgactcttcattaaaaatattttaatgtcttctagatgccagacatataccaatcctaaaaaataaccacagccaaatagcaagaggaagattatggcataaggcgatggttcttttcaaaggtaagagggtttttaaaaaattactattgttttattttgaaatattttttcatgttggatgcacactaagagcatgacatctttccccagaaatgttactaatgagaagaaataacctaggaagaacccaaataagcaatagcaatttttaaaaccttttatttgtcagaaaaatatcagagtcattaacacatggagccagagatcaaaatagaaacataaggccaatacatttgagactttcttaaggacataatttttaaagacttaaagattgtgaagtaagtatgtttatttacatatatcaatgc

SEQ ID NO: 66080 - DNA, 636 bp, Homo sapiens
aaagttcaaagaatggaaaatctaacagttataaacactgagttcccacacccaaaagattttcataaaagccaaatagaaacatacagaaaggtgcggttgctcactctcattttcttttaagttgagtgattatttcctattagacttcacctggtttgtttatttaatgattctttccagtaggctgttattacctgaaggagcataaaatagaaactacaagcatgagttagagaaaactgcaatcttcctacgagagcatgggaaataattaatactctaggaacatttttccacccaaatcctgaaattatgctcagaactgtggttcatacgcgtaggtgcactgttcccctttaggagaggagccatagcttttttgggggtcttcaataaagtccatagcttcaaagaattgttaaaacacatttttcaacagtgttttccttttgctatactttcactcagtaacatttccacacctggaaagatactttaaaaagcaaacacctttgtttaagtgctcataaattaagcctgagcmacataatgtacaataagtataaaaataatatggacgttaaacagtgtggcaaagtggtcaccagtccaatcatcagaaaatatcgagag

SEQ ID NO: 66081 - DNA, 608 bp, Homo sapiens
gcactacatgcatgcacagactgagggcagccttctcagcatcagcacaacctctgcagtgagtactgctcataagatcagtgcagggagcagcagatgtttgctccaaccttctgcagtacatgtagtagcaatcgcagggctgaggctctgtgggcagtctcccaatttcctcctagggagaaatgcatacagaggcttagcaccacagttgggtgctgttcacttctgtctagttaaggagtcattattagccagaaaggractatgatgtcagtttggtctttgtggatttcctgactcagtgtttatgaaggagacacattagtaatggtctaagatatctggtccaatttgtatcaaacaatagtcgtttctcattttccattgctgtggtaattttaatgcattctcctctgtgaggcagtggaaataaataccatggaggaagattcaaggagatggtgcttttttagtcttttttcccttctagcaacaggatgagggtgtaaaaaaggtcatggaccaaggcaatttggagaatcattattttcagagtctgtcctgtaatgacagagctgtggctttgtgtgctctatcttccccaa

SEQ ID NO: 66082 - DNA, 550 bp, Homo sapiens
gggattaaatgcttcaaaagataagtgcatattagaaaatacaaataagaagaggttttaaaatgaaattctacctttcataactgaaaaaaaaaaacagctactctttaaagtccctttttttaaagtataaaaataaasacttaaggaatttaggtaatgacatcatattttgaaaaaaattggtagtgtattgcttcttttataactctgaatctctaatatttgtgatacttgatcacacataaaggaggttataatattaacggaaataaggatggtgagtaaagtgaattcagttatcccatctgagcagttcaaagcctttcctcaaaagttctgagtagaaatattttagatttaattactgttacaggagctaaatactcagtattaaattatcttcttgaccaaattactgtgagagaagaaggcaaatagttttgctcttaactcatttctaactactctaaatgcatcaaaggtagttatgcttagagatgatatactatggtctgtatatatcactttctgatggtgcaagagggat

SEQ ID NO: 66083 - DNA, 547 bp, Homo sapiens
agattctccttcagcaaaacagagacaagaacatctacctgatgttggagggaatgtgaggatataatgatcaatgacgccacagacatggtagttaagtgtctaggctttagattctgacagatctgagctgggtcagttctaccacttactagctgtgtggtcagaaggaaagtgaatcaccaaaagccttggatttctcktatgttaaatgggggataatagcagcaatttggcaggagtgctgtgtgatgcgtgtagaacagcacctggcaccataaaagcccaatcaatggtagtttatgatgggttgggcaatattataattaatagcatagcattcagcacagaaagacgctcgctaaaagttaggctgccctttcctcaattttattaacattagttggaagggggaaagaagcataatattagttatactaaccttgcaataattaggaggaaagatagtaacaactggaatgaagtaaaaataaacttgataaccattttaaaaagtatctctaagcatatgatttgtacaaaaaat

SEQ ID NO: 66084 - DNA, 547 bp, Homo sapiens
agattctccttcagcaaaacagagacaagaacatctacctgatgttggagggaatgtgaggatataatgatcaatgacgccacagacatggtagttaagtgtctaggctttagattctgacagatctgagctgggtcagttctaccacttactagctgtgtggtcagaaggaaagtgaatcaccaaaagccttggatttctcttatgttaaatgggggataatagcagcaatttggcaggagtgctgtgtgatgcgtgtagaacagcacctggcaccataaaagcccaatcaatggtagtttatgatgggttgggcaatattataattaatagcatagcattcagcacagaaagacrctcgctaaaagttaggctgccctttcctcaattttattaacattagttggaagggggaaagaagcataatattagttatactaaccttgcaataattaggaggaaagatagtaacaactggaatgaagtaaaaataaacttgataaccattttaaaaagtatctctaagcatatgatttgtacaaaaaat

SEQ ID NO: 66085 - DNA, 605 bp, Homo sapiens
tcccataggccagccacttcctctgaaccagcttcattaacattgtgtacacacaaactaactctctgtgtgccctgatataaaaagggtggggtgcactggtccatactagtcatttgatgcttaraaattatcttgaatatattttcttttacactaggtaggcattcttctaggttaaattataaaccctcctaagagtgataaatattatcacttatatcttcatcgagcagcaatatggtatctgcttggtgaaatgtgtttcttaaagcaagtctccatggcatgagtgtaagtcttaactttgctagttaaaagccttatggtaagttagacatccataatgcccaatctgtaaagtcctaatctgctaagagtataaactgatgtcctccacacaggactggtttgagaattaaatgagcaagtgtatctgaaggtcctgtcgcacaaaaatttgcaataaatgacaccacctctcttaagtaacttcaaaactattgctgaagataaagaagatgtgaaattaatacctgcataaacaagatggaaacttcctggaaaagaaacatctatttaaaagttaaaaataaaagtttatc

SEQ ID NO: 66086 - DNA, 605 bp, Homo sapiens
tcccataggccagccacttcctctgaaccagcttcattaacattgtgtacacacaaactaactctctgtgtgccctgatataaaaagggtggggtgcactggtccatactagtcatttgatgcttagaaattatcttgaatatattttcttttacactaggtaggcattcttctaggttaaattataaaccctcctaagagtgataaatattatcacttatatcttcatcgagyagcaatatggtatctgcttggtgaaatgtgtttcttaaagcaagtctccatggcatgagtgtaagtcttaactttgctagttaaaagccttatggtaagttagacatccataatgcccaatctgtaaagtcctaatctgctaagagtataaactgatgtcctccacacaggactggtttgagaattaaatgagcaagtgtatctgaaggtcctgtcgcacaaaaatttgcaataaatgacaccacctctcttaagtaacttcaaaactattgctgaagataaagaagatgtgaaattaatacctgcataaacaagatggaaacttcctggaaaagaaacatctatttaaaagttaaaaataaaagtttatc

SEQ ID NO: 66087 - DNA, 526 bp, Homo sapiens
ggaagagtagtagataggcagtgataaaattttaaatgtcattagggcttcatcaaatgtgtattcacatctgtctatatgggtgttcagtacatatctaacacacacacataaacacaatgcagcttaatgacaattatacttcaccaataaaaaaacgatcaacacactcagaagcaaaactgagatgtctgatttttaagtgttttmattatttttgtaaatgaattaactccagaagttaaaaaaaaacacatacctatgatcaccttataaaatttattaatataggacctaaaggacaattcataaatactgaaagtattcattttctcaaagattttgaaaattatagacctctggagttgataaactattagaactaaatccctgtcttccgtttaaaagttatatatacaataaagttttttttttctttttctgagaaagggtctcactctgtcacccaggctggagtgccattgtacaatcatagctcactgcagccgcaaactcctgggctggg

SEQ ID NO: 66088 - DNA, 526 bp, Homo sapiens
ggaagagtagtagataggcagtgataaaattttaaatgtcattagggcttcatcaaatgtgtattcacatctgtctatatgggtgttcagtacatatctaacacacacacataaacacaatgcagcttaatgacaattatacttcaccaataaaaaaacgatcaacacactcagaagcaaaactgagatgtctgatttttaagtgttttaattatttttgtaaatgaattaactccagaagttaaaaaaaaacacatacctatgatcaccttataaaatttattaatataggacctaaaggacaattcataaatactgaaagtattcattttctcaaagattttgaaaattatagacctctggagttgataaactattagaactaaatccctgtcttccgtttaaaagttatatatacaataaagttttttttttctttttctgagaaagggtctcactctgtcacccaggctggagtgccattgyacaatcatagctcactgcagccgcaaactcctgggctggg

SEQ ID NO: 66089 - DNA, 537 bp, Homo sapiens
tgagtgtatattccaatacatgtctggataatggatatatccttgcaagcaggtccttgagccctgtacagctcataagcaaatggcatctattacaactagcaaattgcatctatttttcttcataagcaaattgtatctatttttctattctgacaccatatcagaccctcatcaattcacatacagttcattaaaatagtctcccatttttggtgactgttctcacctatcgtcttacacaaatccataataataattgttctagttcctcgcamtttcagcctatggtgatcattcccacaaaagatgcctttggacatttacttttcatgtgactcatttactccagaattataggcttgcttctaggaattctgtgtttcattctacattcttgttgaactctccagtgctgtaggttgcttagccaaaatctctggatatgaaacacattatctacactatatataaaatttcaaaaataatgagaaagataattttgttgactcatggtgcctaaattaccataaatga

SEQ ID NO: 66090 - DNA, 831 bp, Homo sapiens
agtcaaaaagtagatgataataagtgaattctgagccacagaaatatgttttctctgtctactattattctgttgttgcaagtaattttcaaattgcaagttgctgggcgtggcccctagaatccacaatatctagtgtttccaagttaagagaggggacaaattctctctccatcatttcattttctatacttttttttgtagaacttggctacccacatcagtgctgcctgaccttttatagaatattttagtagattacataacatttgagaattgtgcttactctgagagaataaaagtgttctggaactaagtcattgatctaaaatgaacacacatggaggaggacccagctgacatttatgcctgcagtgggagaaacacatgatttttaaaagcctggataaagaaattgtaacaagattttgatttttacaacaggagacttaagaaataggatagacctattctattgaatcctatatcaggattaaattttagtggtctttgactgtaattgactagtattttagggaaaaatacgagaatgaaaaaagtgattaaaagtcttgaatttccttaagactctgttaaagaaaaattagtattttttgtccaatttttgtattttgtgtgtatgtgtgctgattccttattcagtacagaaggaaacgacacatttttgatcagttatggttattgaaagacctgacatctctatgtaccatttcasttataataattgtcagttgacgtgactcatgaacttgaatatgatttttaaaacaaccacttaaaccatgtgtatgtttagaagtttcccagaca

SEQ ID NO: 66091 - DNA, 1369 bp, Homo sapiens
  misc_feature (1)...(1369): n = A,T,C or G
actgttccaaanaccatagggattttaagattccttctagctctcaaccagttgtaacaagacacaaatatttaatctatttttaatatgaaatctcaattgtattccatgactttattgttttggctaagaaggaggacaaccttcccctcaatggaatttgaatctttgctctcagatgtgaggaataagaatcagatactgtgtttctaaagaggaagcctttctacctaaagggagaggaaggtgagttttctgtttttctacatttgtttttggaagcaattttaaacgagagattgcagaccttccagatcagatatcaaggtcaatgttatgagagagaagaaaaagaataagtttcttgcatagggaaataaaaccagggaagagtagaaagtggggagcttgggaaggaatggaaggaagacagatggagaaaggaacctaattgccatgggccaccaaactaagagagttacaaaagtggagtgttgctttgggaggttctggcaagtgacccaggcaagaactgctgctgtggcctctgctcaagtctagaagctctgttgttgaacagtcttagccagcttgctacactgtctgcatcgagtaaacgaacttccctttaccttcaaagagtaccttaacccattattgtggaaatgagaaccacacacaagctaagcttcagcaacccattgaggacaccccatgaatacctaatggattggtgaagagaggttctgtcctctgaacttgaaagccaaaatgagtacgcctaggcaccccatgagatggaactagcaccyctagtacctgagggcccaaatgggcatggatactaagatgctacagtcaggcaggcaacagagctgagagtttgagcccaggctctaaaaatagacttgcctgggtgcttatccacctcagacacttgctagctgtgtgaccatgagcagttgcacaatcccttcatatctcagtttctaaacctgtacaatggggataaaaaaacaatgccaacttcacaggatcaatatcaggatttcaaaagttaatatatataaagaacttaaagccatgcctgacacataagaaacactcggtaaatgatattgctgccatctagtatctggattaaacttgagaatcatcaccagtattccagaattgttagcactattccataacctaataagtccaataatatttagaaaatcaaaagaactgatcttacctattgagtaagggaccagttgtctgtgaaacttcagcatctattattacagttcctttctgaaatatgtttccacaatgtggtccaggagacagcgcatagcccttggagccaggcagacaacccaga

SEQ ID NO: 66092 - DNA, 713 bp, Homo sapiens
tgcaccctatcctacagatgttccagttttgacaggaggagtttgcatttaggargacattttgctcctgcagtgtcagagtccaattgcagaaatgcatcaagtctagattaataaagttaggtacttgaggtgtcagaaaagtctatggttagggaaacatccatttgtggcacagcaatcagagcattacttaattttctggcatgaagggtttaaaatcaaaatagtcaaaaataacaacagctacaattagtggctaaggaagacataatagataaagaagcaaattacagccacaaaatatgaattatgagtggaggggaaaagtctagagtatttttatgcaatcaaaattaagttgctatcagtttaaaatagtctattataactatagcacttttaatcctagccccatggtaaccacaaagaaagaaattgcagcagatacacaaataagaaggagaaagaaaacaaagtttagcaccacagaaaaccaccaaactacagaggtaaacaataagataggaagaaaaaatcaaaggctgtgcaaagaaactagaaataattaacaaaatggcaagagcaagtctttatcagtaataaccttgaacgtaaattgattaaattcttcaactaaaaaatgtatagtagccaaatggatttttttcaagacccaaatatgtgctgccaagaagagactcacctcgctg

SEQ ID NO: 66093 - DNA, 531 bp, Homo sapiens
taaagcattaccctcactgagtcaagtataaacactgaacaaatatatgttcatttttttcaaaaaataaacatatgaggtacaacattcatgagtctttactctcatctctagtgacaaagatttgagtgagagaaagataataattatttaaaaactaataatgaacgtaagcaagttaacctaatatcacaatcaaaaccagaacttttcaggactggtagaaaaggattaagggaaagtatattccaggcaatgagggcttggttgactggacttgtgtcagttttaaagttaaagctcttggatttctagaggaaaagaactgtgagcttcaagtargtatgtctgaatcgaattctcattttgtatggataagccttgggatctagaagaggtttccaccccgccatggttatacattgtacaatatggtgagaggtaggagggaatttctgcctgaattcagcaggagatcacctttatcaacttgggccctttcagcaacaacaccatgggtagaaatatgat

SEQ ID NO: 66094 - DNA, 621 bp, Homo sapiens
cacgctttgttcctgccaccctttaaggctcttacagggcagtgttcctgtccttaattacgagtaaacacctaagcaaataaagaagctgtcatcattcaccactgatttagggtggggagggtgaaggttgagaattctttcacgttttgctcagtatttttcccttggccttgaaaaaaatgtgccaagcagtcaaacaagatatccatatacttcacctttatattcttcagcttatttttgatgcttaaaatatttaaaataatatttccctttatctggtgtgtctgacaaggttgtggtttttcgtttttgatttttttttttttaagggtgactgtgcttgcttcaaggccacactgattgtggtgatcaccttcacactgtcattggccttccaggccctttatgggacaaggtcattgccagcactccttttttttttgagacggagtcyagctctgtcgcccaggctgctagagtgcagtggcgcgatctcggctcactgcaacctccgcctcccgggttcacgccattctcctgcctcagccttcctagtagctgggactacaggagcccaccaccacgcccagctaatttttttgtgtttttagtaga

SEQ ID NO: 66095 - DNA, 621 bp, Homo sapiens
cacgctttgttcctgccaccctttaaggctcttacagggcagtgttcctgtccttaattacgagtaaacacctaagcaaataaagaagctgtcatcattcaccactgatttagggtggggagggtgaaggttgagaattctttcacgttttgctcagtatttttcccttggccttgaaaaaaatgtgccaagcagtcaaacaagatatccatatacttcacctttatattcttcagcttatttttgatgcttaaaatatttaaaataatatttccctttatctggtgtgtctgacaaggttgtggtttttcgtttttgatttttttttttttaagggtgactgtgcttgcttcaaggccacactgattgtggtgatcaccttcacactgtcattggccttccaggccctttatgggacaaggtcattgccagcactccttttttttttgagacggagtccwgctctgtcgcccaggctgctagagtgcagtggcgcgatctcggctcactgcaacctccgcctcccgggttcacgccattctcctgcctcagccttcctagtagctgggactacaggagcccaccaccacgcccagctaatttttttgtgtttttagtaga

SEQ ID NO: 66096 - DNA, 621 bp, Homo sapiens
cacgctttgttcctgccaccctttaaggctcttacagggcagtgttcctgtccttaattacgagtaaacacctaagcaaataaagaagctgtcatcattcaccactgatttagggtggggagggtgaaggttgagaattctttcacgttttgctcagtatttttcccttggccttgaaaaaaatgtgccaagcagtcaaacaagatatccatatacttcacctttatattcttcagcttatttttgatgcttaaaatatttaaaataatatttccctttatctggtgtgtctgacaaggttgtggtttttcgtttttgatttttttttttttaagggtgactgtgcttgcttcaaggccacactgattgtggtgatcaccttcacactgtcattggccttccaggccctttatgggacaaggtcattgccagcactccttttttttttgagacggagtccagctctgtcgcccaggctgctagagtgcagtggcgcgatctcggctcactgcaacctccgcctcccgggttcacgccattctcctgcctcagccttcctagtagctgggactacaggagcccrccaccacgcccagctaatttttttgtgtttttagtaga

SEQ ID NO: 66097 - DNA, 1103 bp, Homo sapiens
gcatttccttaacctaaccaactaatttcctacacctgtcagtgtcattatcttaatttgggaatccatttcacatgctgtgaagggagcacctctcggtgcacacagagttaccataaacatgaagagcctctctacaaatacaggtccccaagccctcaaagtcaagaaatggtctgaatccactgggctactatttgatcagcgaagctggttatctaagatttaccagtgggcaaactttccccacagtcttttatcctgagctgccaagatgagatctttctccagctgcagttttgtgggagggccctatatggctatattaatagtagctctcctatgaartcatgtcttctgagatttgggccagatttgaaaatatgccagaggatactgtggagagccgatgccaggtttgtctagtctgaaacctgtgagttttccccagaattaagttctatccactggtatccatgactcctcattctcaaaactcctcatatcaaggcaaattaaggcacttgcagtggtgtttgttctacatttaagaacataggtatcagcaaatactaggaaaaatgaatttatagcaaaggtgtgtgtccagccctggcagagaagaaaaacagtaaacagcaagactgacctttctggaagacaggaactccatgcctctggccacttgaaaactgtaagaaatcagatcttccatagtgatgggctccttgtagaaaccgtcagaatctggaaagcattagaaccgtaactgtttgtaatggctcttgttatcccaccaaatcccagtttattggaacaatgttagcaaaacataaaacaaaccaacaagtagatcagagttcatttttaagagtatttgagtttcaacatgaacaccagagatttttccaggcctccagcccactttatccaagcatgggggcagggggatgatccattaagatgaaaatccctgaggggagaaaacggtacagttccctgtcaaaattagtaactctgtaaattatcttaattcaaatcttatctcctcaggacattaccattcgagtctcccacggatgtttattagagtgataaataag

SEQ ID NO: 66098 - DNA, 621 bp, Homo sapiens
agattatgttcctgctctctctttcagttccagcaatggggtcaatttcttctcccaacccataccagattgccagccttcacactgggcccagtatttcctaagcccttgggatgctagtcatggctatgatatccagcaagggtaaccacattcttagtgtctttagaaagcactggatttggccgggcacggtggctcatgcctgtaatcccagcacttcgggaggccgaggcgggtggatcacctgaggtcaggaattcaagaccagcctggccaacatgrtgaaaccccgtctctacttaaaaatacaaaaaattagctgggcgtggtggtacatgcctgtaatcccagctactcgggaggctgaggtaggagaattgcttgaacctgggaggcagaggtttcagtgagccgagatcgcgccattgcactccagactgggagacaagagcaagacttcatctcaaaaaaaaaaaaaaaaaaaagcagtactggattctgccagtcttggaccaccaaacccggccccaccaccaccaaaaaaaaaagtcattcttgtcctaagaaggtcaaggaatgtcatgatgaaactgatgtacttgccaccatgtgtcccca

SEQ ID NO: 66099 - DNA, 621 bp, Homo sapiens
agattatgttcctgctctctctttcagttccagcaatggggtcaatttcttctcccaacccataccagattgccagccttcacactgggcccagtatttcctaagcccttgggatgctagtcatggctatgatatccagcaagggtaaccacattcttagtgtctttagaaagcactggatttggccgggcacggtggctcatgcctgtaatcccagcacttcgggaggccgaggcgggtggatcacctgaggtcaggaattcaagaccagcctggccaacatgatgaaaccccgtctctacttaaaaatacaaaaaattagctgggcgtggtggtacatgcctgtaatcccagctactcgggaggctgaggtaggagaattgcttgaacctgggaggcagaggtttcartgagccgagatcgcgccattgcactccagactgggagacaagagcaagacttcatctcaaaaaaaaaaaaaaaaaaaagcagtactggattctgccagtcttggaccaccaaacccggccccaccaccaccaaaaaaaaaagtcattcttgtcctaagaaggtcaaggaatgtcatgatgaaactgatgtacttgccaccatgtgtcccca

SEQ ID NO: 66100 - DNA, 641 bp, Homo sapiens
ccacccaagtagctggggttataggcgtgtgccaccatgcccggctaatttttgtattttttggtagagacagggtttcaccaygttggccagactggtcttgaactcctgacctcaagtgatccacccgccttggcctcccaaagtgctgggattaccggccaaagccatggcacccagcccccaatcacttcttaaaggcctcacctctcaatactgccacactggggattaaatttccacatgagttttggagggacaaacattcaaaccatagcagtcccaaactccaattttttgtctccccatcaccttgagacttgaaagctttactcagcttttcagctgcttttggtaagccctcttagcttcttgctaaacttctaaacatagcttaggaattaaccaacgactggaggggaaaccagtgaggagcttcaggattccttctccacatctctctcctctctggcattttggccccacctctcagttgccctgacagccacagctccattttttgtttgcctagacctgagggatagccaaaagctctgcactgattcttatcctctagctcaaaactgcttgaaaaccagcaaatgaagtgttggctctctccaggagcttccattctttct

SEQ ID NO: 66101 - DNA, 641 bp, Homo sapiens
ccacccaagtagctggggttataggcgtgtgccaccatgcccggctaatttttgtattttttggtagagacagggtttcaccatgttggccagactggtcttgaactcctgacctcaagtgatccacccgccttggcctcccaaagtgctgggattaccggccaaagccatggcacccagcccccaatcacttcttaaaggcctcacctctcaatactgccacactggggattaaatttccacatgagttttggagggacaaacattcaaaccatagcagtcccaaactccaattttttgtctccccatcaccttgagacttgaaagctttactcagcttttcagctgcttttggtaagccctcttagcttcttgctaaacttctaaacatagcttaggaattaaccaacgactggaggggaaaccagtgaggagcttcaggattccttctccacatctytctcctctctggcattttggccccacctctcagttgccctgacagccacagctccattttttgtttgcctagacctgagggatagccaaaagctctgcactgattcttatcctctagctcaaaactgcttgaaaaccagcaaatgaagtgttggctctctccaggagcttccattctttct

SEQ ID NO: 66102 - DNA, 1354 bp, Homo sapiens
gagggctaataatttaacatacaatttctgaagtgttccatctcctagaatgatggttgccctggggccttccagtcatgaagcaatggatttaagatcttcagggaaagggtggaggccaactctagcaatggagttatttctcatctttgactagcaaataggatttttgagtcactagcaagataatagtcttcaaagtcaggctttggtgaagaaaaataaatttctaaattccttgagctcccattaacatgtcaggaatcattgctggtggactggctcatagagtttctataaaccttgatagagaaaacttagcatataatgtaagggaagccttggctacaccggaaaggcagggagaaatcttgcatctttagggttgaggaattgtgggaagaagaagataggaaccagggaacagccaaagagttaaacacatgtgttcacagtttcgcttcttgggagaatcttgagtgaatccaacamtgaggttggtggcctgctaccctcactggaacctctgtgctttgcaactgcaggggcaccagttacattgtattctttgtgaacggccattcctggagttttgtaatgctgtggcccttttttcaagcaaggccttatgaggacttcaggtctctaggaaaaatctggtagaaggatatggggcagcaccagtagaggaaagtggcttgaggggcgagcctctggaagctctcttggctctgctgaactttggtgtgttgggtaaaaggtctgaagcttgcttcatggcctggtgagaactcacagagctgccaagaagggcctggcatcagaaataagcaactaccaaggacaggaaagtcaacaacaaatgccagccatgagcatcagatgataaacttcatgccacgaggccaggtgaaattgtcagaattggcaaatgccaatcctgagatcagatcgacaccccatgccaggttggcagagaggggcagtacccaggccagctttctctcaccacctcaacccccttcctatgtctccactcccccagttatcagaaataccctcaagctttcacctccacccagaagccatcttgaaaagcaggaagaagacgggggtaaacagctctgttcaaagagtttaagttaaaattatatgaatgtttgttcccaaaaaagcatttgaatatgtagatactattaatttccaaattctgcccttattctcaccccatctccctactatctagcaagattgggagggagactggcagttaataaggaagactggatcagttaaagactataaagaagcttgtattttgttttgttttgtttttgccagcttagtgaagtat

SEQ ID NO: 66103 - DNA, 607 bp, Homo sapiens
ggccgtttctaaatcaaaggacatggctcctctcaaagtgaccctacgggaacctctctttttgagtcccagtaaatactctcccctcttsccttccagcacgcgagtagtaatgtctccactgtggctgaccctatgttactgcatcagcccttgaggttctcctgcctgcattccccctcctgtgaaagtttccctttatacgtatatccctttggacaacattttgggtgtgctacaatttcccagttggtactctggctgatacagcatttgagaatgcgtggacagacagatcagagacaaagagtggaaaaacgtacagtgtgtttgggagccattgtagagttcagagatgctgcggtataaggcgctctctggtggggcagaagtgtcagatgtttgtacactatggcgtcaggacacgacaggattagatctgagattagaagggccaacctggcagcaatgtggagaacgaactggaaagaaggagttgagagactcccctgtggctccgtctgcctccagaagatattgctgtggttccaggtttagctaggtgacatcagcggctgggcttctgaaacacaacccctttcctctg

SEQ ID NO: 66104 - DNA, 607 bp, Homo sapiens
ggccgtttctaaatcaaaggacatggctcctctcaaagtgaccctacgggaacctctctttttgagtcccagtaaatactctcccctcttgccttccagcacgcgagtagtaatgtctccactgtggctgaccctatgttactgcatcagcccttgaggttctcctgcctgcattccccctcctgtgaaagtttccctttatacgtatatccctttggacaacattttgggtgtgctacaatttcccagttggtactctggctgatacagcatttgagaatgcgtggacagacagatcagagacaaagagtggaaaaacgtacagtgtgtttgggagccattgtagagttcagagatgctgcggtataargcgctctctggtggggcagaagtgtcagatgtttgtacactatggcgtcaggacacgacaggattagatctgagattagaagggccaacctggcagcaatgtggagaacgaactggaaagaaggagttgagagactcccctgtggctccgtctgcctccagaagatattgctgtggttccaggtttagctaggtgacatcagcggctgggcttctgaaacacaacccctttcctctg

SEQ ID NO: 66105 - DNA, 607 bp, Homo sapiens
ggccgtttctaaatcaaaggacatggctcctctcaaagtgaccctacgggaacctctctttttgagtcccagtaaatactctcccctcttgccttccagcacgcgagtagtaatgtctccactgtggctgaccctatgttactgcatcagcccttgaggttctcctgcctgcattccccctcctgtgaaagtttccctttatacgtatatccctttggacaacattttgggtgtgctacaatttcccagttggtactctggctgatacagcatttgagaatgcgtggacagacagatcagagacaaagagtggaaaaacgtacagtgtgtttgggagccattgtagagttcagagatgctgcggtataaggcgctctctggtggggcagaagtgtcagatgtttgtacactatggcgtcaggacacgacaggattagatctgagattagaagggccaacctggcagcaatgtggagaacgaactggaaagaaggagttgagagactcccctgtggctscgtctgcctccagaagatattgctgtggttccaggtttagctaggtgacatcagcggctgggcttctgaaacacaacccctttcctctg

SEQ ID NO: 66106 - DNA, 1692 bp, Homo sapiens
cttcccatgccaagccctaatctggtagtctgaaaggaacatgatttccatgcctgcatcagcagcctggggctgggcagagggttggagcagaagttttggggaagtgggccatccagagccagccccattgattctggagagacctactgggcaggggtggggggtgcatggcaggggaggaccacactttgcagatcctcccagaggaagccatgatggaagtccctggacaaccctgggccagttcctcctactagccagagcctcctgccacctctggagccaggtcttaggaccctggagatgacaagtcacacacaaggcagaggccaggggttcccaacctggaaccagggaaccctggaggtgctgggttgatgagtttgttataaattagagactcgttaagagaaggtgagaagggctcagtaacagctttcggggtccatcttttcgatttcttgttcggtttgtttattgctattgttcctgtctcataagcttattgcaaaaccagtaaaaatgatctattccgaaagggaagttgctcttttgactggaagctgcctcttggtcctggaccccacccctccccctcctggtggctgcagcctagcctggttgaccagctgtctcctgccgcggggtcagcagagggtgccagattcctgctcactagaaactgtgtccacctgccatgtagccaccctgggctggcctcaggcctccaacctggtcccatcaccccratgaccgctgcaccccagccgtccagctcacctctgatagacacaccagggctgttatgggggaacaggaggccaggataggatccaaggacagtcactggagtcttaagttttgggcgtgattttggctcagtttcccctctgcgcctcagtgagtgtttgcctttagcatgggcttccctgccatgaggtagccctaagggctaatgattgaacaaagaggcctccaaggttcccaagaatcagaagtcctggttttgaccttgaaggcagaacagagacccctggccctttgcacatccaggaacctagttacagttgggggccaggggttcaggaatcccaatcccgaatgagttggctctcaccccatccctgttctgcaaataacattagttccgtttagtgactgtaatattcctgagacactgcagatttctctgggctactaacttggtttcagagtctttcagatgattattgtggggagtacagggttgagggggatcaagaaaaagccaacagactccttcactgattcatacagaatttcagagcgtcagagcctgaagagacttcttttttttcccccctgagatggagtttagctcttgtcgcccaggctggagtgcaatgtgcaatctcgacccactgcaacctctgccccccagaatagctgggattacagatgcccaccaccatgcctggctaattttttttttttttttttagatcgtgcctcgttctgtcgcccaggccacgtctggctaatttttatatttttagtagagacggggtttcaccatcttgcccaggcttatcttaaactcctgacctcgtgatccaccctcctcagcctcccaaagtgctgggattacaggtgtgagccaccatgcctggccgcgaagggacttctgagatcactctgtgaaaccccttc

SEQ ID NO: 66107 - DNA, 563 bp, Homo sapiens
ggcagtcacaagcgattgttctactcgctgatattctaggctcccaaatgtggcctgttttgtttcaaaaaaaaaaaaaaagaaagaaagaaagaagaaaagagagagtcagggaagaaaacaaataggccagggtctccatgatgagatggttaaatataccaaggctgggtctcgctccttagctagctgcacaggccctgggcactcctgtcactgttgcagccagctttgcggaaggagcaataaacacataagcaaaccaagyggtgaagaaacttcgtgtcccctaggcgcatcagcagccctgagcactcacgccaggcgaggtgccctccatgattcctgctctcccctgtgccagctggggggttctccaaggaggcagatgcccccatatcctgctgtttctagctcctcctcccttcaagggaggaaccacacttccccttaactctgcctcttctccccctgccaggccccttccaaaccctctgatgcaggaacctccaggactatccatggcctgcccagggggaccctagtttagccccctcaggatc

SEQ ID NO: 66108 - DNA, 1170 bp, Homo sapiens
cattacatttatttcttttctaacatcaagttaacactaaattcctgaaataaattcaacttggtcatgatctatttatatgttctgttaatatcattttgattcaagtgctaatatttcatttagaatttctgcatttctttttatgatggatttgtctgtagtttccctgtttctaatatatttgtcagatttgctaagagcttattcatgcctcagcggggaaaagagttgggtttacttgtcttctttttccatttcttccttttccttgccttcctgaaaaaaattctgaaaaaaaaaatcagtgctaaagtcattaaatgggctagaacaaggaaaacatccatattagctgaaaggagtctatcagagtccaagcaggttgaggaggtcatccacgtaatagagatatacagcacaaggtatcaggccttaggtaaaaggaggaggtgacctgggaaggatggtcacccggcatgaatatcccagctcagatagtaatcccagattaggtagtaatccctgtggggaggcatcccaatatgagagcccagccaatctgagaaggacatccatgcagcctgtaaggaayaagagacagaatgagaacccatgcgtgagagtggcccaacagagtgaagtatgtagacaacccaattgcagggagccagagcttgagcagagacaagagggtgctcacacaaaaggggcctgatgtcaggtgagagagcccaatcttaatgtttacgggaggccactgttttagacaagcatcctacacagccccagcagaccagggcaagtcagaaggtagtcatttatgctacaggtgtcacataatcaaactgaaatttaaaatgggccagttttctgaaacacaggagattctagtcaaccctagtcagagtaataagaaagtctctcctctgctttaaccctgtaagtaactttgcaatgatcaatccactttttgttctgtttctactttcttcagcccttttctgtctataaagccaaaatcctctggtcagctcattcaagcaatcattctatcttgtaaaatgaagtgttgccaattctagaatggcaaataaaggcaattactatatttaaactaaatttgttttaattttgtcttttgacaccaagcagcacaacacatatgca

SEQ ID NO: 66109 - DNA, 1170 bp, Homo sapiens
cattacatttatttcttttctaacatcaagttaacactaaattcctgaaataaattcaacttggtcatgatctatttatatgttctgttaatatcattttgattcaagtgctaatatttcatttagaatttctgcatttctttttatgatggatttgtctgtagtttccctgtttctaatatatttgtcagatttgctaagagcttattcatgcctcagcggggaaaagagttgggtttacttgtcttctttttccatttcttccttttccttgccttcctgaaaaaaattctgaaaaaaaaaatcagtgctaaagtcattaaatgggctagaacaaggaaaacatccatattagctgaaaggagtctatcagagtccaagcaggttgaggaggtcatccacgtaatagagatatacagcacaaggtatcaggccttaggtaaaaggaggaggtgacctgggaaggatggtcacccggcatgaatatcccagctcagatagtaatcccagattaggtagtaatccctgtggggaggcatcccaatatgagagcccagccaatctgagaaggacatccatgcagcctgtaaggaacaagagacagaatgagaacccatgcgtgagagtggcccaacagagtgaagtatgtagacaacccaattgcagggagccagagcttgagcagagacaagagggtgctcacacaaaaggggcctgatgtcaggtgagagagcccaatcttaatgtttacgggaggccactgttttagacaagcatcctacacagccccagcagaccagggcaagtcagaaggtagtcatttatgctacaggtgtcacataatcaaactgaaatttaaaatgggccagttttctgaaacacaggagattctagtcaaccctagtcagagtaataagaaagtctctcctctgctttaaccctgtaagtaactttgcaatgatcaatccactttttgttctgtttctactttcttcagcccttttctgtctataaagccaaaatcctctggtcagctcattcaagcaatcattctatcttgtaraatgaagtgttgccaattctagaatggcaaataaaggcaattactatatttaaactaaatttgttttaattttgtcttttgacaccaagcagcacaacacatatgca

SEQ ID NO: 66110 - DNA, 756 bp, Homo sapiens
  misc_feature (1)...(756): n = A,T,C or G
aattataagttaaatgacagttgcagagaaaaggcatatgtataacttgctnnnnnnnnnnnnnnnnnnnnnnnnnnnnnnnnnnnnnnnnnnnnnnnnnnnnnnnnnnnnnnnnnnnnnnnnnnnnnnnnnnnnnnnnnnnnnnnnnnnnaaggcctcagtcttttccagatatattccactttagaaaacaatgggacaattcacacaaattcctgaagcaagaaccaatattgttaaaatggccatactgcccaaagcaatctatggattcaacaccattcctatcaaactaccaatatcaaaaagaacaaagccagtggcatcgtataacccaacttcaaactatactataaggctacagtaaccaaaacagcatggtactggttcaaaaacaaataaaccaatgaaacagaatcaagaacccagaaattaagctgcacacttccagccatctgatctttgacaagtcaacaaaaataagcaatagggaagggactccctattcaatcgatggtgctgagatagctggctggccatatgcagaatgaaacacaagactcattacaagtattagcaataacaataaaaatattaatgagacctaactcattcttaaaactaagggcatgtaactatgattgtgaattagtgygatacagaagagtgcaatcctatagcagccatatcctttcccacaactacctcctgaaaaccaaccatgccactcctttctccctgatactgaacaaaatc

SEQ ID NO: 66111 - DNA, 834 bp, Homo sapiens
ttgtcaccccagccaggtatccccaaggcagagcacctctcgtttggccctctgaacaaggtgcacgcgagctgggggatgaagacggctcccacttccttttccttaataagaaccatatggtgggtgtatgtgtgtacaagaggggttcatctgtgggggcttcctctccttccaccctctggttccaatttcctgttctaagcaggactagggcccaggaggctaaggctgggagagaaagggtgccaacaggtcccttgggaatgagttggctctggacgtttctgccctgttccccgatcagagctcctctgcaggaaacaggcaggatgcccctcccaacccctcagtccctacgtcaagcggagtggataaggctgagatgagtgctgggagtggtggacattcctgctcgtgcaaagatggccactttccccgcagctgcagggcctcgcgctcggccctcgccaggccagccccactccttgtaccaagtgtgaactggggtcattcggtctgtgatctcgttgcactgctccaagtctggctgtgtccaggcggtccatgttgaaaatggaggatggctgctgacttctgactggctgagcagtgggttccttcaggttycttgccaaccctcctcccctgcccacaacttctccaaacaaagcaggctgtttgctcacttcttcaaaaggaggaatgataacccaaatctgcccaagtgacacttgagaaggttttggctggggttcctggtggatttcttactacctaacgcccaagaaaaccaactaaggactctcaaaccatacctggtgggggttcttc

SEQ ID NO: 66112 - DNA, 578 bp, Homo sapiens
gtttggagagggcacaaccctgagagaggtaactggggtatgagaagcaatgctctggtggcacacgcctataatcccagctactcgggaggctgaggcaggagaattacttgaccctgggaggcggagkttgcagtgagctgataacacgcctctgaactccagcctggggaacagaacgagactctgtctcaaaaaacaaaatgaaacaaaacaaaacacaaaaaaaccagagaagcaatgctcaatattcaaccatttctttaaaaaaagaagggaaaaaaaatcatgtttgtcttattgtctagtactgtattgtctggtattgcctagtatttctaggggttggaaaaatattaacatttaatcttcacaactaataggtgaggtgggcattgtccccactttcttaggtaacaaaagagacacactgctaaaaagcagggagggaaacccaggtgttctggccccacccagaggacactctgctgtgctccacactgcctctcatggggggctgggatagagaggaagacaggtgtgcaggcctggtcctgttctgaggactctgctgaacc

SEQ ID NO: 66113 - DNA, 1308 bp, Homo sapiens
tgcatgtagtaccagctactctggaggctaaggcaggaggatcacctgggcaatatagcaacagcacatctcaaaaaaaaaaaaactctcatatattaaaaaggaacagcaaggatgcgattaacacaaaattcaggatattggttttctctggtggagagggatgagggataatcaaagagggtcacacaatgggcttcaagtattggaaatgttccccttcttaaattgtgtggcaggttcaaaagtttggatgtatccttgacagagaagccaatgaggtgatgcttttgtctgtggaattagtactgaattccttaagtaagaattctccctagacagaactaaatagaacagctccaaggaacttgagctggcctcagatggctggctgcctactaccattccccttgaatcattctgcatcttcttctctctcatgctgtgtgggctatgcagagacctaggtgcaggggcttgggattgatgcagaaagcccctctcttagaaaacgggtgacacccactggcattcactgaatatttgtggggaatgtgatgccaagccattgtaaaagattccttgttgggtcagaaatatattagagggataatagctaccctgccgaaatctattcattcaataaatatttattgagcacctactatgtacgaggcacaatttaaggtgacacaagagtttataaaaataagtaaacaagtgtaaaggaaatttatctttaaaaaatgtggggkttttttgctgctacatgaaaaaggcaagaaaaaaatgtttttaaatgacactttaaatctgtcatataaactctaaaatataacagtctctctttcaaatttgtaaatcatatttttagttctcccagagcattaaaaaacctattattgatgctaagcaatatgctaataggtgcttggtttataagagacttctattttgttttgcagtgttattcatgaatctagccacactgtggagaaactaggtgcactcacaatgctgttgggagtataaattggtctaatacctgtggaggcagtttggcattatctatcaaacaaacaaatactcagcttcctgagtagctgggactacaggtactcaccaccacgcccggctaatttttgtatttttttgtaaatatggggttttaccatgttgcccaggctggtctcgaactcctgaggctcaagcgattcacccagctcagcctcccacagttctgggattacaggcgtgagccagcatgtctggcctgtagcttcttttatatacacacattgaattata

SEQ ID NO: 66114 - DNA, 1189 bp, Homo sapiens
gttctgaaatttggtaaatttattataaattcctggaactggaagaatcttagatatctacttcaacttcttcattttacaaatgagaaaattaagaaccaggggagggatttgccaaggtctcatagttaattaatggcaaagccaagattagaatcaatattccttgactccttcctagagcagtgctcgttctagcacactacaaagcctttcatagttacagtaaattctgaacttatgaatggattgtactttaaatattcatttatgaatcatttgtggctagaactgggaattcattttcccctggaaataattcttaaaatttgactgagtttctaatataacacccacataaaggtcctgtaaggaactaatagtttttaattcaacagcctgcacaatgaggaagaattaaagttaaagggaaggctagttttatgtgaaagtccttacacctcatagatgaagcttcctgaacacatgttactaatgattcttgcagttgaaaaaggcaggatgactttctaaccaggtattactgtgattctagaacactttcccacctttaatatccaacttcgtaaggattagatttggggatatttttcctttgtacttagaatatctgccagatgtcttgtagttgccagccatcctcagctgcgtgcctgcctgactccaaaacttttctgtaggagctggcaagacttgcattaaatatgacagtttcaacatacttgttggcttaagtccagccaacactgactacccagggtaactaaatgttcttattatcttaaataatctaggcctaccccagatatggcagcagtgtgactatctccctaaactcataggaagtatataaaagagatgaaagacctaagaaaaatctgggtattataagggaaatagatgctgagtgatcaatcaataaatgtctgctacagcaagagagaatgttccttgttttataattttcttctagacacagtgtcatttccagattttcacggcagtctttcctcaacacaaaattcacaaactaccttttcctctayaaatctccttctaccagtcattttcataccctgagtttgtcagatttcccatgtatacaatatagttacaaagcagccagccaaatcatttttctgctttatgaatgaacataaacataatg

SEQ ID NO: 66115 - DNA, 1190 bp, Homo sapiens
tatgcattatctcatttcactctcactgtgacactgggcttgttaactgggtgttgttaactctgatttaccgaggcctaaaaagcctcctcattttccccttgatctgagcatcagaacgagcattaggatcaggtccatctaattctttttttttttttttttttttttttttttgagatggagtctcgctctgtagctcargctggagtgcagtggcgcaatcttggctcactgctacctctgcctcccgagtcccggttcaagcaattctcctgactcagcctccggagtagctgggattacaggcatgcaccaccatgcccagctaatttttgtatttttagtagagatggggtttcaccgtgttggccaggctggtcttgaactcctgacctcatgatctgcctgcctcggcctcccaaagtgctgggattacaggcgtgagccacagcacccggccaggtccatctaattcttaaccattttgctatactgctaaatacagaaaggccaggcttacaatgtttacatttattatgaattattaatgacttataaactgaatgggatcttgcttgaatgttttaattattattattattttgagacagggtctcatgctgtcacccaggcaggagtgctgtggcacaatcacagctcactgcaaccttgacctactgggcttgggtgatcctcccaccttagcctcccgggtagctgggaccataagtgccaccactaaacccagcaatttttgtgtgttttttctgtagagaaaaggtttcaccatgttgcccaggctggtctcaaatccctgggctcaagtgatctccccgccttgaactcccaaagtgttgggattacaggcatgggccaaggtacccagtccctgttttaattatttgtatgaagacaaaatgcgtgaactgatctccttgactaggaagtagatggtgatcatgtttgtgactgagaatgtcttgtgggagctgcctaatatttgtacaggagaaccagtgtggtgttgtggaaagaggacaaggctggaggaaggcaggcactgtcagcctgatagggtgatgttggggcatttttaaagcctctgtgagtctcagtttactcatcaatgaaatgggaatacttacttccacagtgcctgtatcacagggtttttgtatgataatgca

SEQ ID NO: 66116 - DNA, 1258 bp, Homo sapiens
tcttttcatgatccctgtatgctgtgtgtcctgagggcactaactcagagtgtcctgttactccctcatcagtgtgtcacctggacaattcactgagctcgttctctctctctctctctstctgtgtgtgtgtgtgtgtgtgtgtgtgtgtgtgtgtgtgtgtctatctgtctttctctttcattcttttccatttggccctgttctgtcccaacatgaaggcaataatttgttacctcattaatggatctatccttttagttttttaaccacttccctatgctacccatgaaacctagttggggctctgttgtgtctgatttcccctggcttattctttactttttcctccttttccaggctcagcagggagctgctggaggtagtagagcctgaagtcttgcaggactcactggatagatgttattcaactccttccagttgtcttgaacagcctgactcctgccagccctatggaagttccttttatgcattggaggaaaaacatgttggcttttctcttgacgtgggaggtgagtacctttctatgaaggtgataaggatccactgagtcttccatataaagatcatattcctgctccaagtggccattactgagctgagagatgtcattgccacagggaggacctataggcacatgtaggttgaatgaaactctagttctacctggaagcccagacaagggatgggtcagtgagcaagactctcttcctagtctcaggccatacctgtggcgccctgatcctattctcatgacattggacctgggcagatgtgacaaattcagagaactatgattttgactcaagggtttgtagatttcctttttcactctaatttcagtgtctaaagtcctcacaaccatgaacaatctgagtatttgatgagacagggctaaatattgcagtttttctcctagaaatcatttgagggtatttgctttaagttgattggaaaaatatggcgtaactgtttgcacaaacttgggacaaatgatattgggataacgatctactagaatagggacattttacccacagtttctgggagaaaaaccgaggaatttctatcatgaccagccttcaggcctcctgaaatatatctctcacagtgtcctattcttatgctgaggagcctgaggtccctgtgtgaggattagacagtggattgttatgtgtgtaggggaatcagcttaatgtgtctgtccatgtctgaatttattgcagaaattgaaaag

SEQ ID NO: 66117 - DNA, 1258 bp, Homo sapiens
tcttttcatgatccctgtatgctgtgtgtcctgagggcactaactcagagtgtcctgttactccctcatcagtgtgtcacctggacaattcactgagctcgttctctctctctctctctctstgtgtgtgtgtgtgtgtgtgtgtgtgtgtgtgtgtgtgtgtctatctgtctttctctttcattcttttccatttggccctgttctgtcccaacatgaaggcaataatttgttacctcattaatggatctatccttttagttttttaaccacttccctatgctacccatgaaacctagttggggctctgttgtgtctgatttcccctggcttattctttactttttcctccttttccaggctcagcagggagctgctggaggtagtagagcctgaagtcttgcaggactcactggatagatgttattcaactccttccagttgtcttgaacagcctgactcctgccagccctatggaagttccttttatgcattggaggaaaaacatgttggcttttctcttgacgtgggaggtgagtacctttctatgaaggtgataaggatccactgagtcttccatataaagatcatattcctgctccaagtggccattactgagctgagagatgtcattgccacagggaggacctataggcacatgtaggttgaatgaaactctagttctacctggaagcccagacaagggatgggtcagtgagcaagactctcttcctagtctcaggccatacctgtggcgccctgatcctattctcatgacattggacctgggcagatgtgacaaattcagagaactatgattttgactcaagggtttgtagatttcctttttcactctaatttcagtgtctaaagtcctcacaaccatgaacaatctgagtatttgatgagacagggctaaatattgcagtttttctcctagaaatcatttgagggtatttgctttaagttgattggaaaaatatggcgtaactgtttgcacaaacttgggacaaatgatattgggataacgatctactagaatagggacattttacccacagtttctgggagaaaaaccgaggaatttctatcatgaccagccttcaggcctcctgaaatatatctctcacagtgtcctattcttatgctgaggagcctgaggtccctgtgtgaggattagacagtggattgttatgtgtgtaggggaatcagcttaatgtgtctgtccatgtctgaatttattgcagaaattgaaaag

SEQ ID NO: 66118 - DNA, 1258 bp, Homo sapiens
tcttttcatgatccctgtatgctgtgtgtcctgagggcactaactcagagtgtcctgttactccctcatcagtgtgtcacctggacaattcactgagctcgttctctctctctctctctctctgtgtgtgtgtgtgtgtgtgtgtgtgtgtgtgtgtgtgtgtctatctgtctttctctttcattcttttccatttggccctgttctgtcccaacatgaaggcaataatttgttacctcattaatggatctatccttttagttttttaaccacttccctatgctacccatgaaacctagttggggctctgttgtgtctgatttcccctggcttattctttactttttcctccttttccaggctcagcagggagctgctggaggtagtagagcctgaagtcttgcaggactcactggatagatgttattcaactccttccagttgtcttgaacagcctgactcctgccagscctatggaagttccttttatgcattggaggaaaaacatgttggcttttctcttgacgtgggaggtgagtacctttctatgaaggtgataaggatccactgagtcttccatataaagatcatattcctgctccaagtggccattactgagctgagagatgtcattgccacagggaggacctataggcacatgtaggttgaatgaaactctagttctacctggaagcccagacaagggatgggtcagtgagcaagactctcttcctagtctcaggccatacctgtggcgccctgatcctattctcatgacattggacctgggcagatgtgacaaattcagagaactatgattttgactcaagggtttgtagatttcctttttcactctaatttcagtgtctaaagtcctcacaaccatgaacaatctgagtatttgatgagacagggctaaatattgcagtttttctcctagaaatcatttgagggtatttgctttaagttgattggaaaaatatggcgtaactgtttgcacaaacttgggacaaatgatattgggataacgatctactagaatagggacattttacccacagtttctgggagaaaaaccgaggaatttctatcatgaccagccttcaggcctcctgaaatatatctctcacagtgtcctattcttatgctgaggagcctgaggtccctgtgtgaggattagacagtggattgttatgtgtgtaggggaatcagcttaatgtgtctgtccatgtctgaatttattgcagaaattgaaaag

SEQ ID NO: 66119 - DNA, 1258 bp, Homo sapiens
tcttttcatgatccctgtatgctgtgtgtcctgagggcactaactcagagtgtcctgttactccctcatcagtgtgtcacctggacaattcactgagctcgttctctctctctctctctctctgtgtgtgtgtgtgtgtgtgtgtgtgtgtgtgtgtgtgtgtctatctgtctttctctttcattcttttccatttggccctgttctgtcccaacatgaaggcaataatttgttacctcattaatggatctatccttttagttttttaaccacttccctatgctacccatgaaacctagttggggctctgttgtgtctgatttcccctggcttattctttactttttcctccttttccaggctcagcagggagctgctggaggtagtagagcctgaagtcttgcaggactcactggatagatgttattcaactccttccagttgtcttgaacagcctgactcctgccagccctatggaagttccttttatgcattggaggaaaaacatgttggcttttctcttgacgtgggaggtgagtacctttctatgaaggtgataaggatccactgagtcytccatataaagatcatattcctgctccaagtggccattactgagctgagagatgtcattgccacagggaggacctataggcacatgtaggttgaatgaaactctagttctacctggaagcccagacaagggatgggtcagtgagcaagactctcttcctagtctcaggccatacctgtggcgccctgatcctattctcatgacattggacctgggcagatgtgacaaattcagagaactatgattttgactcaagggtttgtagatttcctttttcactctaatttcagtgtctaaagtcctcacaaccatgaacaatctgagtatttgatgagacagggctaaatattgcagtttttctcctagaaatcatttgagggtatttgctttaagttgattggaaaaatatggcgtaactgtttgcacaaacttgggacaaatgatattgggataacgatctactagaatagggacattttacccacagtttctgggagaaaaaccgaggaatttctatcatgaccagccttcaggcctcctgaaatatatctctcacagtgtcctattcttatgctgaggagcctgaggtccctgtgtgaggattagacagtggattgttatgtgtgtaggggaatcagcttaatgtgtctgtccatgtctgaatttattgcagaaattgaaaag

SEQ ID NO: 66120 - DNA, 1258 bp, Homo sapiens
tcttttcatgatccctgtatgctgtgtgtcctgagggcactaactcagagtgtcctgttactccctcatcagtgtgtcacctggacaattcactgagctcgttctctctctctctctctctctgtgtgtgtgtgtgtgtgtgtgtgtgtgtgtgtgtgtgtgtctatctgtctttctctttcattcttttccatttggccctgttctgtcccaacatgaaggcaataatttgttacctcattaatggatctatccttttagttttttaaccacttccctatgctacccatgaaacctagttggggctctgttgtgtctgatttcccctggcttattctttactttttcctccttttccaggctcagcagggagctgctggaggtagtagagcctgaagtcttgcaggactcactggatagatgttattcaactccttccagttgtcttgaacagcctgactcctgccagccctatggaagttccttttatgcattggaggaaaaacatgttggcttttctcttgacgtgggaggtgagtacctttctatgaaggtgataaggatccactgagtcttccatataaagatcatattcctgctccaagtggccattactgagctgagagatgtcattgccacagggaggacctataggcacatgtaggttgaatgaaactctagttctacctggaagcccagacaagggatgggtcagtgagcaagactctcttcctagtctcaggccatacctgtggcgccctgatcctattctcatgacattggacctgggcagatgtgacaaattcagagaactatgattttgactcaagggtttgtagatttcctttttcactctaatttcagtgtctaaagtcctcacaaccatgaacaatctgagtatttgatgagacagggctaaatattgcagtttttctcctagaaatcatttgagggtatttgctttaagttgattggaaaaatatggcgtaactgtttgcasaaacttgggacaaatgatattgggataacgatctactagaatagggacattttacccacagtttctgggagaaaaaccgaggaatttctatcatgaccagccttcaggcctcctgaaatatatctctcacagtgtcctattcttatgctgaggagcctgaggtccctgtgtgaggattagacagtggattgttatgtgtgtaggggaatcagcttaatgtgtctgtccatgtctgaatttattgcagaaattgaaaag

SEQ ID NO: 66121 - DNA, 547 bp, Homo sapiens
cttatacaaggaccaaagagcttctgctatctagcataggagagggcactataagggcacccaggccacaagttcagcatcccaaattgtagcaattttcttctaagccagacattaaaattcatgggctagaaagtagtaacaagttaagctaaaataaaaaacacagacctcctatctcagtgccttttacagtggaagaytgcatgcaagtgtttttttgagacagagtctctctctgttgcccaggcctgagtgcagtggcatggtcctggctcactgcaacatccacctcctgcgttcaagcgattgtcttgcctcagcctcccgagtaggtgggattacaggtgtctgccacaacgcctggctaatttttttttattttttagtagagacagggtttcaccatgttggccaggctggtctcgaactcctgacctcgtgatccgcctgccttggcctcccaaagcactggcattacaggcatgagccactgcgccggcctgcatgcaagttttaattacacacctgaaaagcaccagaaatt

SEQ ID NO: 66122 - DNA, 547 bp, Homo sapiens
cttatacaaggaccaaagagcttctgctatctagcataggagagggcactataagggcacccaggccacaagttcagcatcccaaattgtagcaattttcttctaagccagacattaaaattcatgggctagaaagtagtaacaagttaagctaaaataaaaaacacagacctcctatctcagtgccttttacagtggaagactgcatgcaagtgtttttttgagacagagtctctctctgttgcccaggcctgagtgcagtggcatggtcctggctcactgcaacatccacctcctgsgttcaagcgattgtcttgcctcagcctcccgagtaggtgggattacaggtgtctgccacaacgcctggctaatttttttttattttttagtagagacagggtttcaccatgttggccaggctggtctcgaactcctgacctcgtgatccgcctgccttggcctcccaaagcactggcattacaggcatgagccactgcgccggcctgcatgcaagttttaattacacacctgaaaagcaccagaaatt

SEQ ID NO: 66123 - DNA, 547 bp, Homo sapiens
cttatacaaggaccaaagagcttctgctatctagcataggagagggcactataagggcacccaggccacaagttcagcatcccaaattgtagcaattttcttctaagccagacattaaaattcatgggctagaaagtagtaacaagttaagctaaaataaaaaacacagacctcctatctcagtgccttttacagtggaagactgcatgcaagtgtttttttgagacagagtctctctctgttgcccaggcctgagtgcagtggcatggtcctggctcactgcaacatccacctcctgcgttcaagcgattgtcttgcctcagcctcccragtaggtgggattacaggtgtctgccacaacgcctggctaatttttttttattttttagtagagacagggtttcaccatgttggccaggctggtctcgaactcctgacctcgtgatccgcctgccttggcctcccaaagcactggcattacaggcatgagccactgcgccggcctgcatgcaagttttaattacacacctgaaaagcaccagaaatt

SEQ ID NO: 66124 - DNA, 547 bp, Homo sapiens
cttatacaaggaccaaagagcttctgctatctagcataggagagggcactataagggcacccaggccacaagttcagcatcccaaattgtagcaattttcttctaagccagacattaaaattcatgggctagaaagtagtaacaagttaagctaaaataaaaaacacagacctcctatctcagtgccttttacagtggaagactgcatgcaagtgtttttttgagacagagtctctctctgttgcccaggcctgagtgcagtggcatggtcctggctcactgcaacatccacctcctgcgttcaagcgattgtcttgcctcagcctcccgagtaggtgggattacaggygtctgccacaacgcctggctaatttttttttattttttagtagagacagggtttcaccatgttggccaggctggtctcgaactcctgacctcgtgatccgcctgccttggcctcccaaagcactggcattacaggcatgagccactgcgccggcctgcatgcaagttttaattacacacctgaaaagcaccagaaatt

SEQ ID NO: 66125 - DNA, 545 bp, Homo sapiens
acaggtgtgcaccaccttgcctggctaatttattttatttttccagagatgggggtcttactaggttgtccaggctgtttttgaacacttggcctcaggtgatcctcctgcctcagcctcctgagaagttggaattacaggtgtgagccatcatgcccagccagataaataattttgcagctttttagtagtttttaaaggcagcacttcacatagcatttaaagttttaaattcagaacttatttttctccaaggtagttttactttgcttgtttttgttttttgtttttttctaagagacatagtcttgctctctkgcccaggctggagtgcagtggtgaactcctgggctcaaatgagccttctgcctcagccttctgagtagctagaactacaggagcatgttaccatacctggctattttaaacattttttgtgtgtgtgcatagaaatggggtctcactatgttgcttaggctgatcttgaactcctgcccacaagcagtcctcttgccttgcctcacaaagtgctgagttgataggca

SEQ ID NO: 66126 - DNA, 1734 bp, Homo sapiens
tggattctggccattctgcctcagcttcctgagtagctggaactgcaggcacctaccaccacacgcctggctaattttttgtatttttagtagagacgggatttcaccgtctcgttagacaggatggtcttgatctcctgacctcgtgatctgcctacctcggacctcccaaagtgctgggattacaggtgtgagctaccacgcctggcccccccccctccttttcttttttgagrtggagtcctgctctgttgagcaggctagagtgtagcggcactatctcggctcacttcaacctccatctcctgggttcaagcaattcttgtacctcagcttcctgagtagctaggactataggtgtgcaccaccatgcccggctagttttttgtatttttagtagagatggggttttaccacattgcccaggccagtctccaactcctgagctcaggcaatccatctgcctcagcctcccaaagtgctaggattacagtcgtgagccactgtgcccagcccaagtccattcattttctaggtcagaaatgaccctgacttctcccacctgggtcactcgaacttcctctttcctggcctgtcctctatctgtgcccgatgtggcagctgtaggcctgatggctgttcctgctcaagattccaggtgacttatttcaggggatcctaagctagatttaccttggccactagaaccccaagagatccaggaactgtagcatcctcagaccttctgcacggcactgccagctgcctccatctccagctcctccaacgtgccagcagatggctgcagctgcggccgtggctgcccctggttaggcactgccctgggtcctcggcctcttgctctgggttagagccccagcagccctcccgatggactctgcagttctgcagcagcccctccttggaggccctggggatgctggttacaggcccagcctcagtcctgctgctggctgtgagggaactgggcccaccgggaccactcctgtgctagttcctgcttctcatctacctagatgcttcaccagccctgagccaggcctcatggggcaagaccagacaaggcagtcttcccccaggaacccctgcaacttcccagtgcagacacagccctcttgacctgcgatagcatcagcaggcccacggcatgcagcccaagaggtgccacacacctagggcctgctcctgttctggggacctgggctccctgtggccattccacccaagggtgattcaccaccaggcagtgagggcgagagggtcacagtctgtttgccacaatcccctactggctggctctcctgtggttgaccttctgggggcccctctcacagatagtttgttgtgaagcatagctaacatttcactgtgggctatctttgctaggagctgtggtaggtgtttcaggctcatgggctcacatcctcaggaccctttgaagcaggcatttgttgtccccattaaacagaagcatgggggaggccagaagccctgcgacccaagtacacacaatagctgcctctacctggaaggccctccctgccctcagtcctcacagagctgcccaggaggccttagctacctcaaactctccctacccaccctgggggcatattaaagggctccctccagcctctgctgggtcctcgactgtctgtccatctgtcgtagcaggctctgagagcaggtaacatggtttattcttccagagct

SEQ ID NO: 66127 - DNA, 624 bp, Homo sapiens
gatccatttccccacccctgttggatcagttccatctatacatctgcccgtgtactaccagcttcagacacgctcgactgcgtgctggcccctgtaattaccaccacacatctccctttacggagagagaattctttctgtggcctagatttactgtgcctccccatttcaacctggcttttcactgttattatcagggtcactgatgactgccattctgaggattgtgactttactatgggcttgggcatcttagtctatcccacagcatttgccrgggttggccactgccttactttgcccagactggagtgcagtggtgcaatgtcggctcactgcagcctctgcctcccgggttcacatgatcctcccgcctcagtctcctgagtagctaggattacaagctaaagccaccacacctagctaattttggtatttttagcagatggttttaaccatgttggccaggctggtctcaaactcctgacctcaaaagtgatccaccagtcttggtctactcaaagtgctgggattaaggcatgaaccaccacgcctggccaggcttctttataaaaataatcttatctcagagtcaaggtctcactgtgttgccaaggctggtct

SEQ ID NO: 66128 - DNA, 2637 bp, Homo sapiens
cctcagtgaccttggggtgggggacccagcggtgacaccagccccacgggctcttcatgacatgtgttgtgactgtatctggggacaaattgcaaccctgaacatgcccccactctgtccaaatggcttggctgagaaagcaaacatttgtttgtaaatccttcctccctcatccgaatatatgactgcaaggtcattccaataaaatagatccgtgtgccccacagcatgatatggtgacccttgtcccacatgagactgacccaggtgaccttctaaacatattcatagccacgtcttagttagggccggggaagcattgtcctttcgtggcctggacttcctgactccttcactaaccaattgcatgaccttggacaagtctgtttagctcttgtgcctcagtttcctcacctgtaaaatgggatgataataataataccaatttcactggattgctgtaaggattaaatgtaaagtcttagcacagtgcctggcaattgagtaagtgctgtagtattattacttaaatatgcattaatgaatgaaatgcattaatgaaatgaaacctgaagattctatatgctacatattatatatatatgtgtgtgtatatatatattttttagtttttgagactgggtctcactctgtcacccaggccggagtgcagtggcacaatcatgtagtcttgaccttctgggctcgagcaatcctcccacatcagcctcttgagtagctgggactacaggcacatgccaccatgctcagctgtttttttttattttttgtagagacaggatctcactatgttgcccaggttggtctcaaactcctaggctcaagcgatcctcctgcctccgccttccaaagcgctgggattgcaggtgtgagccaccatgtctggctgctacttatatgtttaatacacataatgatactaatcatgatattattgttcaaaatgaggtcaagtttaagaatggattttatttaaagaagaacattacataaatatgagtataggtggatcattgatatggcagaaatggtgaagatgagatataaataatggaatttgaggaacactatctatattcttgtataagacagtgtcattatctactttttgttakagatatttgaggtatcaaaaaggaatagagggcctggcgcagtggttcatgccagtaatccgagcactttgggagcctgaggcaggcagatcacctgaggtcagaagttcgagaccatcctggccaacatggtgaaactccatctctactaaaaatacaaaaattagccaggcgtggtggcaagcgcctgtagtcccagctactagggacgctgaagcaggaggatcgcttgaacctgggagacgcaggttgcagtgagccgagatcatgccattgcactccagcctgggtgacagggtgagactccatctcaaaaaaaaaaaaaattaatggagatgcatatattgaaaatccaagttcctacttcctaacttgagaagcaaaatgttaagatataattaaaattccccgcaccaccactgccacattgtatttctttgtggttcactgactaaggatggaatatttcgaactcccagatgtctgactggctagaaaccatgctttttctctactcagtctaaagtaagctccaggtgtagtttctcctacagagacatcctgcagggattaggaggtgggcaggggatgagacggcactctaggatcctggttgtcacttacccaccccggtgaggtagagtagagctttgactggtggagtcttgggtccgtagtatgaaatctgaacctatgggagagcagatcactaatgacttctcttagtcattcaacaaacacccactggaccccctcctatgtgccggctcagggtagggcactggggagacaaagttgggcaagaactggtcctagcctgtaaggagtggccccatccgatgggaatggagggaaagcaaaaagcttgaatgactggtgctacagaagagcatcctatgggggcccagcaatggagacactctgcctggcagggtcgtttgtgaaggagtgtgctttgaggtagatctgggaaagggagtaggggcccagcagctggagatggggcagaagaggcgctagagagagctgatcataagccacagaactgactctggcaagcagaagggatcaaggaaagacccgaagaaccagaccctggaaaggccgggtcctgggggatctggggagcaggagctttgagtggatggaggtttcttcaggaagagatgagaaaacaccaatccactgtgcccaaggttcagaaatcctaggagaacacctcggattggccagaggagggtggagcatctgggttgacacatccaagcaaaatggcggtggggagtttccaaagcagagccaaagagctgccaccagaggaagaggagctcctgaggggccacgcggaggtgctcggacctgccctgtagacagtggaaatccaggaaaacgccacggccatcactgcctctgcctggaccatggtgtcagccttctgtctggtctccctgcctcccacccactccctagatcctatctacttgctaggccacagccattg

SEQ ID NO: 66129 - DNA, 1277 bp, Homo sapiens
gcctcctgaagtcgggggggcagagaaggcaggctccccacgggcggctctggaggttttttttttttaatgtcccccaggctggagtgcagtgtcacaatcttggctccccgcaacctcctcctcccaggttcaagtaattctcctgcctcagcctcctgaatagctaagattacaggcacaggccaccacacccggctaatttctttgtatttttagtagagatgaggtttcaccakgttgaccagactggtcttgaactcttgaactcaggtgattcctcccactacctcagcctcccgaagtgctaggattacaggcatgagccaccgtgcccggcctttggctctggggttttctcacctgcaaagctgctgcctcctgctattgtcctgccccgtcaagccagcagcctttctggccaatgtcctccacactaagcggctccttaagctcccagggaagagtgaaaagggctggaaggatggcgaatggggaaggggacttgccggttcctacccagccctgctttgccccgaacacctgccccagccccacattgaagggcggggacctgcggaagcgccacgcgggatggtcaagctggagggtctcaggatccagcttagctggtgttcacaccagacaatagcaatggagcccactctccagactgggaggactcagtaggcagggatgcagggaggagggaaggggagacaggaacagccccttcaaggctttggaagggaaatgggggtcgccccctgctaaaagcattctgggcactgaagcagcctggaggggagaggactcggtgcctctagagaactaaaagatggcctgttgcaggttgggaggcacatgggagggctggaatctccaaaaccctcagctgcccccacactgggtccccagcactctcccacccaccccccaccccgccagcatttcctgtgatttttgttcttttttttttttgagacgaagtctcactctgttgcccaggctggagtgcggtggcatgatcttggagcctctgcctcctgggttcaagtgattctctcaactcagccactcagcctcccaagtagctgggattacaggtgcatgccacaatgccccgactaatttttgcatttttagtagagacggggtttccccatgttggcctggctggccttgaagccctggcctcaaatgatccacctgcctcagcctcccaaagtgctgggattgcaggcatgagccactgcgcctggccccgtgtctgctat

SEQ ID NO: 66130 - DNA, 1277 bp, Homo sapiens
gcctcctgaagtcgggggggcagagaaggcaggctccccacgggcggctctggaggttttttttttttaatgtcccccaggctggagtgcagtgtcacaatcttggctccccgcaacctcctcctcccaggttcaagtaattctcctgcctcagcctcctgaatagctaagattacaggcacaggccaccacacccggctaatttctttgtatttttagtagagatgaggtttcaccatgttgaccagactggtcttgaactcttgaactcaggtgattcctcccactacctcrgcctcccgaagtgctaggattacaggcatgagccaccgtgcccggcctttggctctggggttttctcacctgcaaagctgctgcctcctgctattgtcctgccccgtcaagccagcagcctttctggccaatgtcctccacactaagcggctccttaagctcccagggaagagtgaaaagggctggaaggatggcgaatggggaaggggacttgccggttcctacccagccctgctttgccccgaacacctgccccagccccacattgaagggcggggacctgcggaagcgccacgcgggatggtcaagctggagggtctcaggatccagcttagctggtgttcacaccagacaatagcaatggagcccactctccagactgggaggactcagtaggcagggatgcagggaggagggaaggggagacaggaacagccccttcaaggctttggaagggaaatgggggtcgccccctgctaaaagcattctgggcactgaagcagcctggaggggagaggactcggtgcctctagagaactaaaagatggcctgttgcaggttgggaggcacatgggagggctggaatctccaaaaccctcagctgcccccacactgggtccccagcactctcccacccaccccccaccccgccagcatttcctgtgatttttgttcttttttttttttgagacgaagtctcactctgttgcccaggctggagtgcggtggcatgatcttggagcctctgcctcctgggttcaagtgattctctcaactcagccactcagcctcccaagtagctgggattacaggtgcatgccacaatgccccgactaatttttgcatttttagtagagacggggtttccccatgttggcctggctggccttgaagccctggcctcaaatgatccacctgcctcagcctcccaaagtgctgggattgcaggcatgagccactgcgcctggccccgtgtctgctat

SEQ ID NO: 66131 - DNA, 1277 bp, Homo sapiens
gcctcctgaagtcgggggggcagagaaggcaggctccccacgggcggctctggaggttttttttttttaatgtcccccaggctggagtgcagtgtcacaatcttggctccccgcaacctcctcctcccaggttcaagtaattctcctgcctcagcctcctgaatagctaagattacaggcacaggccaccacacccggctaatttctttgtatttttagtagagatgaggtttcaccatgttgaccagactggtcttgaactcttgaactcaggtgattcctcccactacctcagcctcccgaagtgctaggattacaggcatgagccaccgtgcccggcctttggctctggggttttctcacctgcaaagctgctgcctcctgctattgtcctgccccgtcaagccagcagcctttctggccaatgtcctccacactaagcggctccttaagctcccagggaagagtgaaaagggctggaaggatggcgaatggggaaggggacttgccggttcctacccagccctgctttgccccgaacacctgccccagccccacattgaagggcggggacctgcggaagcgccacgcgggatggycaagctggagggtctcaggatccagcttagctggtgttcacaccagacaatagcaatggagcccactctccagactgggaggactcagtaggcagggatgcagggaggagggaaggggagacaggaacagccccttcaaggctttggaagggaaatgggggtcgccccctgctaaaagcattctgggcactgaagcagcctggaggggagaggactcggtgcctctagagaactaaaagatggcctgttgcaggttgggaggcacatgggagggctggaatctccaaaaccctcagctgcccccacactgggtccccagcactctcccacccaccccccaccccgccagcatttcctgtgatttttgttcttttttttttttgagacgaagtctcactctgttgcccaggctggagtgcggtggcatgatcttggagcctctgcctcctgggttcaagtgattctctcaactcagccactcagcctcccaagtagctgggattacaggtgcatgccacaatgccccgactaatttttgcatttttagtagagacggggtttccccatgttggcctggctggccttgaagccctggcctcaaatgatccacctgcctcagcctcccaaagtgctgggattgcaggcatgagccactgcgcctggccccgtgtctgctat

SEQ ID NO: 66132 - DNA, 3427 bp, Homo sapiens
  misc_feature (1)...(3427): n = A,T,C or G
catttggataagtccaaccacttcctgccacgacataatttagagatgaggggaaggacagcaactgatgtagccaagtctctccccccacacaagcaggccagcatggccataggtatctcagctcagccttgtcctcagttgtcacttatcccctccccaaacaaggaggtcactgccaagatgcattcacacccaccagccctttattggctatttagtaaacgtcacttggctgaacacttttgcatcttttccccataggggttcaagctggcggcatttgccatcctactgggtccgagggtcggtcggggcagacagggaagaaagggttctgttgcctggactctccagcctcctctactgggcaaagaatcatgctgttgcatggtgacagtgggccatccacgctggggcagagctggcagctccagggcctgggtctaaggtaccatcttccaccatttgaaggcaaagggcacccggcggatgttggcacaggcacagatgtctccgacctctgtcaggtaacagtcaaagtcattgatgaaggtgcacttgaagcccaggggctccagcaagcagcaaatcttttcttccaggcagcaggtccccttgatttggggcccaaaaggcttggggatccccaggttcttgcccatcacaatcatccgcaactgttagaaagacagggtgggtgaggcctggacagggatcagaggcctgaaagccagccgcccacctgcctctctgcggtcagaccaggcgtagcaggcaggcagccgcctcctccaggtcagtgaaacccagctcacttttgcttagccctacaatggctgtttctcaacagccagataaaatcctgcctggccaaggtctgggattgtcaacttctctagtttctacgtttcgattattctggcctcttgtcacctggatacaacacatggctgctgcctccactgaaacactctccccacccccgctttgtcagttgactgctgcgcatcttttgtatctcaactcctcctcaaagcagcttcttaccgttactcacccctgccggaccacactgagctgatcaagttagaagacacccatgtacaattggagcatgcagggcctgtgtccctaggacccagggaagaggtcagcaggtgtttagagaattggggcactcaaatgcctcagttcattttacacacctatataaggggtcagttgttacatgagaaagttcagatgtgagccacagtcggcataggcttggtgaagccaggacctcttgtactcacagccccactcttgactataacttctggtttagaataagtaggaacagaatttaaaaaacaaaaacaaacaaacaaaaaaacaaaacagttttgctcttgttgcccaggctggagtgcaacagggtgatctccgctcactgcaacctccacctcccaggttcaagcgattctcctgcctcagcctcctgagtagctgggatgacaggcatgcaccactacacctggctaattttgtatttttggtaaagacagtttctccatgtaaggctggtctcgcagtcctgacctcaagtgatctgcctgcctgggcctcccaaagtgctgggattacaggtgtaagacaccacgcccagccccagaatgtttttttttttttttggtttggtttatcagacaaggtcttggtttgttacccaggctagagtgcagtggctcattgtagcctccacctccggggctcaagaaattgtcctgcctcagcctcctgagtggctgagactacargcatgtggcaccacacccagcattttttgttttgttttgtttgtttttttgggagacagtcttgctgttgcccaggctggagtccagtggtgcaatcttggctcactgcaacctctgcctcctgggttcaagggatcctcctgcttcagcctctgattagctgggattataggcatgcaccaccacacccagctagttttttgtattcttactagagagtttcaaccatgtttgcagggctgatctcgaacttcagacttcaagtgatccacccacctcagcctcccaaagtgctgagattacgggcatgagccactgcaccctggccccagcattttttttttcttttttttaaagttgcagggtctcactatgttgccctagctgctctccaactcctgagttcaagtgatcttcccacctcagcctcccaacgtactagaactacaggtgagccaccacgaccagccaagcagaataaatattagagacggagtttcagtcttgttgcccaggctggagtgcaatggagtgatctaggctcaatgcaacctctgtctccggggttcaagcaattctcctgtctctgcctcctgagtagctgggattacaggcatgtgctaccacacccaactaattttgtatttttagagacagggtttcttcatgttggtcaggctggtctcaaactcctgacctcaggtgatccacctgcctcggcctcccaaagtgttgggattacaggcatgagccactgcgcctggcctagaatgttattttaagggctgatgtacctctatgtatcagacactgctgccctggaccctggagatagcggacaggaagacccaccctgaggtaggttgctcaaggcctcgctgctggcagatgcgcggcaacctcgactctgggttgcatagcaccccatccgaagtgggcctcacaggttcacccttttagactgggggcgcagctcactgaggctcctaaagcacctggcccagggcctggcccatagtaactgcctggggaacctccaagccttcaggccctgtacacttgctctctgggtggggcgtccctaaccgagatgggggagaaggggtctccctcccatttcctcataggtaccgttatctgctgtccaccatatctgcagtccagcacagtgaggtggcagccagtgttgcctggacaggccctcccccacccagggatgcgcagtcgcccctcaccaggtcagggaagtatggcctcgcaaaggactcttgggctgctggtcagaggggatgttagtcagcttctgcaagcagaacagctggggaaaaaagatgatgtcctgttcccccaggcccagctccgtcttcaggatgtcncggttcaggtgaatgcacttctgtgggtgggtgggtgggttnggggggggcgggggagcaaggagagctcatcaggaattaaaaccagtttccttccatactgaaggtaggtgatggcctgacaccactaccatccccatcacttgctgtgtgccaggagcctcacacttcataccagccttacgaaataggcagttcccttttcacatggggaagtaggggctcaggaatggcctagtctttagtcca

SEQ ID NO: 66133 - DNA, 3427 bp, Homo sapiens
  misc_feature (1)...(3427): n = A,T,C or G
catttggataagtccaaccacttcctgccacgacataatttagagatgaggggaaggacagcaactgatgtagccaagtctctccccccacacaagcaggccagcatggccataggtatctcagctcagccttgtcctcagttgtcacttatcccctccccaaacaaggaggtcactgccaagatgcattcacacccaccagccctttattggctatttagtaaacgtcacttggctgaacacttttgcatcttttccccataggggttcaagctggcggcatttgccatcctactgggtccgagggtcggtcggggcagacagggaagaaagggttctgttgcctggactctccagcctcctctactgggcaaagaatcatgctgttgcatggtgacagtgggccatccacgctggggcagagctggcagctccagggcctgggtctaaggtaccatcttccaccatttgaaggcaaagggcacccggcggatgttggcacaggcacagatgtctccgacctctgtcaggtaacagtcaaagtcattgatgaaggtgcacttgaagcccaggggctccagcaagcagcaaatcttttcttccaggcagcaggtccccttgatttggggcccaaaaggcttggggatccccaggttcttgcccatcacaatcatccgcaactgttagaaagacagggtgggtgaggcctggacagggatcagaggcctgaaagccagccgcccacctgcctctctgcggtcagaccaggcgtagcaggcaggcagccgcctcctccaggtcagtgaaacccagctcacttttgcttagccctacaatggctgtttctcaacagccagataaaatcctgcctggccaaggtctgggattgtcaacttctctagtttctacgtttcgattattctggcctcttgtcacctggatacaacacatggctgctgcctccactgaaacactctccccacccccgctttgtcagttgactgctgcgcatcttttgtatctcaactcctcctcaaagcagcttcttaccgttactcacccctgccggaccacactgagctgatcaagttagaagacacccatgtacaattggagcatgcagggcctgtgtccctaggacccagggaagaggtcagcaggtgtttagagaattggggcactcaaatgcctcagttcattttacacacctatataaggggtcagttgttacatgagaaagttcagatgtgagccacagtcggcataggcttggtgaagccaggacctcttgtactcacagccccactcttgactataacttctggtttagaataagtaggaacagaatttaaaaaacaaaaacaaacaaacaaaaaaacaaaacagttttgctcttgttgcccaggctggagtgcaacagggtgatctccgctcactgcaacctccacctcccaggttcaagcgattctcctgcctcagcctcctgagtagctgggatgacaggcatgcaccactacacctggctaattttgtatttttggtaaagacagtttctccatgtaaggctggtctcgcagtcctgacctcaagtgatctgcctgcctgggcctcccaaagtgctgggattacaggtgtaagacaccacgcccagccccagaatgtttttttttttttttggtttggtttatcagacaaggtcttggtttgttacccaggctagagtgcagtggctcattgtagcctccacctccggggctcaagaaattgtcctgcctcagcctcctgagtggctgagactacaggcatgtggcaccacacccagcattttttgttttgttttgtttgtttttttgggagacagtcttgctgttgcccaggctggagtccagtggtgcaatcttggctcactgcaacctctgcctcctgggttcaagggatcctcctgcttcagcctctgattagctgggattataggcatgcaccaccacacccagctagttttttgtattcttactagagagtttcaaccatgtttgcagggctgatctcgaacttcagacttcaagtgatccacccacctcagcctcccaaagtgctgagattacgggcatgagccactgcaccctggccccagcattttttttttcttttttttaaagttgcagggtctcactatgttgccctagctgctctccaactcctgagttcaagtgatcttcccacctcagcctcccaacgtactagaactacaggtgagccaccacgaccagccaagcagaataaatattagagacggagtttcagtcttgttgcccaggctggagtgcaatggagtgatctaggctcaatgcaacctctgtctccggggttcaagcaattctcctgtctctgcctcctgagtagctgggattacaggcatgtgctaccacacccaactaattttgtatttttagagacagggtttcttcatgttggtcaggctggtctcaaactcctgacctcaggtgatccacctgcctcggcctcccaaagtgttgggattacaggcatgagccactgcgcctggcctagaatgttattttaagggctgatgtacctctatgtatcagacactgctgccctggaccctggagatagcggacaggaagacccaccctgaggtaggttgctcaaggcctcgctgctggcagatgcgcggcaacctcgactctgggttgcatagcaccccatccgaagtgggcctcacaggttcacccttttagactgggggcgcagctcactgaggctcctaaagcacctggcccagggcctggcccatagtaactgcctggggaacctccaagccttcaggccctgtacacttgctctctgggtggggcgtccctaaccgagatgggggagaaggggtctccctcccatttcctcataggtaccgttatctgctgtccaccatatctgcagtccagcacagtgaggtggcagccagtgttgcctggacaggccctcccccacccagggatgcgcagtcgcccctcaccaggtcagggaagtatggcctcgcaaaggactcttgggctgctggtcagaggggatgttagtcagcttctgcaagcagaacagctggggaaaaaagatgatgtcctgttcccccaggcccagctccgtcttcaggatgtcncggttcaggtgaatgcacttctgtgggtgggtgggtgggttnggggggggcgggggagcaaggagagctcatcaggaattaaaaccagtttccttccatactgaaggtaggtgatggcctgacaccactaccatccccatcacttgctgtgtgccaggagcctcacacttcataccagccttacgaaatrggcagttcccttttcacatggggaagtaggggctcaggaatggcctagtctttagtcca

SEQ ID NO: 66134 - DNA, 1057 bp, Homo sapiens
  misc_feature (1)...(1057): n = A,T,C or G
tttacgtgcaatgatctttgcagagtatttgggcccatcttttgcacagcgtggtgctttttacatgattttaatgaaaattgtgtaatgacattgatcccattttaaagaacaaaagctgaggtggatatcagaaagtaaaaacgtgcttttttttaataaaaactcagatttttctcagttctaggtttcagcctcctatttttttttttttttttttttttgcaggaggacatctgaggtatttaytcactgcctaggctacccatgtgctatcacatttttcctggttagaatacatataagatggagagcaggaggggacagagctgccctggctgatggcaccttcaggggaagctctgcttgggccaaggccccactcgtgggggcacctgctggcatccctcatccggctctgggtgacaccctgctgttgtccttgagggcagtgagggttcactccaacggtgtggccaggcgagctgcctggggaaagggagaggatccaatgaccggaaagacacagtgtgctttccctgcatcctctgggtgggaagagtccatcctttgtgaccaaacccctgagaaagacatactggccaaatgtctgagacaccttcaaatgggcccagtgccagccaactgggctcctcactggcaccacgtcccagatgcccttctctgcccacaccctgcaggctgaggccagaggaggtcagccctcgggagatggtgtgtgtgtgtgtgtgtgtgtgtgtgtgtgggagtgggggtgagcgtgtgtggagggctgagagaagacgcagtgagcagagctgcagnnnnnnnnnnnnnnnnnnnnnnnnnnnnnnnnnnnnnnnnnnnnnnnnnnnnnnnnnnnnnnnnnnnnnnnnnnnnnnnnnnnnnnnnnnnnnnnnnnnnccatgctcagcagagaagggcatgaaggcatgctcttggctcctggcagccccacatgggacttaaaaacaggggaagagactagtggccctggggtcatggcagaaggcaggggcagggaaataaattaaaa

SEQ ID NO: 66135 - DNA, 1057 bp, Homo sapiens
  misc_feature (1)...(1057): n = A,T,C or G
tttacgtgcaatgatctttgcagagtatttgggcccatcttttgcacagcgtggtgctttttacatgattttaatgaaaattgtgtaatgacattgatcccattttaaagaacaaaagctgaggtggatatcagaaagtaaaaacgtgcttttttttaataaaaactcagatttttctcagttctaggtttcagcctcctatttttttttttttttttttttttgcaggaggacatctgaggtatttattcactgcctaggctacccatgtgctatcacatttttcctggttagaatacatataagatggagagcaggaggggacagagctgccctggctgatggcaccttcaggggaagctctgcttgggccaaggccccactcgtgggggcacctgctggcayccctcatccggctctgggtgacaccctgctgttgtccttgagggcagtgagggttcactccaacggtgtggccaggcgagctgcctggggaaagggagaggatccaatgaccggaaagacacagtgtgctttccctgcatcctctgggtgggaagagtccatcctttgtgaccaaacccctgagaaagacatactggccaaatgtctgagacaccttcaaatgggcccagtgccagccaactgggctcctcactggcaccacgtcccagatgcccttctctgcccacaccctgcaggctgaggccagaggaggtcagccctcgggagatggtgtgtgtgtgtgtgtgtgtgtgtgtgtgtgggagtgggggtgagcgtgtgtggagggctgagagaagacgcagtgagcagagctgcagnnnnnnnnnnnnnnnnnnnnnnnnnnnnnnnnnnnnnnnnnnnnnnnnnnnnnnnnnnnnnnnnnnnnnnnnnnnnnnnnnnnnnnnnnnnnnnnnnnnnccatgctcagcagagaagggcatgaaggcatgctcttggctcctggcagccccacatgggacttaaaaacaggggaagagactagtggccctggggtcatggcagaaggcaggggcagggaaataaattaaaa

SEQ ID NO: 66136 - DNA, 1057 bp, Homo sapiens
  misc_feature (1)...(1057): n = A,T,C or G
tttacgtgcaatgatctttgcagagtatttgggcccatcttttgcacagcgtggtgctttttacatgattttaatgaaaattgtgtaatgacattgatcccattttaaagaacaaaagctgaggtggatatcagaaagtaaaaacgtgcttttttttaataaaaactcagatttttctcagttctaggtttcagcctcctatttttttttttttttttttttttgcaggaggacatctgaggtatttattcactgcctaggctacccatgtgctatcacatttttcctggttagaatacatataagatggagagcaggaggggacagagctgccctggctgatggcaccttcaggggaagctctgcttgggccaaggccccactcgtgggggcacctgctggcatccctcatcsggctctgggtgacaccctgctgttgtccttgagggcagtgagggttcactccaacggtgtggccaggcgagctgcctggggaaagggagaggatccaatgaccggaaagacacagtgtgctttccctgcatcctctgggtgggaagagtccatcctttgtgaccaaacccctgagaaagacatactggccaaatgtctgagacaccttcaaatgggcccagtgccagccaactgggctcctcactggcaccacgtcccagatgcccttctctgcccacaccctgcaggctgaggccagaggaggtcagccctcgggagatggtgtgtgtgtgtgtgtgtgtgtgtgtgtgtgggagtgggggtgagcgtgtgtggagggctgagagaagacgcagtgagcagagctgcagnnnnnnnnnnnnnnnnnnnnnnnnnnnnnnnnnnnnnnnnnnnnnnnnnnnnnnnnnnnnnnnnnnnnnnnnnnnnnnnnnnnnnnnnnnnnnnnnnnnnccatgctcagcagagaagggcatgaaggcatgctcttggctcctggcagccccacatgggacttaaaaacaggggaagagactagtggccctggggtcatggcagaaggcaggggcagggaaataaattaaaa

SEQ ID NO: 66137 - DNA, 1020 bp, Homo sapiens
actttattttagaattttagaaatgagtctttagaaaacaggtttgcctatttttttctttttctttttytttttttttttttttttgagacagggtcttgctctgtaccccaggctgtagtcttaacctcccagcctcaattgatcctcccacctcagcctccccagtagctgggaccacaggcgtgtgccatcatgcctggctaattttttaattttttgtagagacaggattttgctatgttgttcaggcagggttcgagctcttgggctccagtgaacctcccatctcagcctcccaaagtgctgggattataaccatgagccaccatgctcgacctacctattttagtttcttacctacctcaccttcacaatcattctttttttaaaagaaagggaaacagtttcccccaatgaaccttaatatgatggcttggcctaggtctaaaaaaatctctgcatgccaaagagacatttcaagaatacatagctcggccgggcgcagtggatcacgcctataatcccagcactttgggaggccgaggcgggcagatcacgaggtcaggagatcgagaccatcttggctaacatggtgaaaccccgtctctactaaactacaataagaaattagccaggcgtggtggcaggtgcctgtagtcccagctacttgggaggctgaggcaggagaatggcgtgaacccggaaggcagagcttgcagtgagccaagatcgcgcccactgcactccagcctgggcgacagagctatactccatctcaaaaaaaaaaaaaaaaaaaagaatacatagctcatgaacaagagtcccaggactgcaagcattaagcttggttatgaaatattgaagggcggtggttactttcatccaagtgactagaagaaaggaccctgtctttatctttttaatttatccttctttctatcttagaaatagaattttaaaatgagatggttgtcatggagatgagtatgaaagcatatttatttgaattgaaacata

SEQ ID NO: 66138 - DNA, 1020 bp, Homo sapiens
actttattttagaattttagaaatgagtctttagaaaacaggtttgcctatttttttctttttctttttctttttttttttttttttgagacagggtcttgctctgtaccccaggctgtagtcttaacctcccagcctcaattgatcctcccacctcagcctccccagtagctgggaccacaggcgtgtgccatcatgcctggctaattttttaattttttgtagagacaggattttgctatgttgttcaggcagggttcgagctcttgggytccagtgaacctcccatctcagcctcccaaagtgctgggattataaccatgagccaccatgctcgacctacctattttagtttcttacctacctcaccttcacaatcattctttttttaaaagaaagggaaacagtttcccccaatgaaccttaatatgatggcttggcctaggtctaaaaaaatctctgcatgccaaagagacatttcaagaatacatagctcggccgggcgcagtggatcacgcctataatcccagcactttgggaggccgaggcgggcagatcacgaggtcaggagatcgagaccatcttggctaacatggtgaaaccccgtctctactaaactacaataagaaattagccaggcgtggtggcaggtgcctgtagtcccagctacttgggaggctgaggcaggagaatggcgtgaacccggaaggcagagcttgcagtgagccaagatcgcgcccactgcactccagcctgggcgacagagctatactccatctcaaaaaaaaaaaaaaaaaaaagaatacatagctcatgaacaagagtcccaggactgcaagcattaagcttggttatgaaatattgaagggcggtggttactttcatccaagtgactagaagaaaggaccctgtctttatctttttaatttatccttctttctatcttagaaatagaattttaaaatgagatggttgtcatggagatgagtatgaaagcatatttatttgaattgaaacata

SEQ ID NO: 66139 - DNA, 1020 bp, Homo sapiens
actttattttagaattttagaaatgagtctttagaaaacaggtttgcctatttttttctttttctttttctttttttttttttttttgagacagggtcttgctctgtaccccaggctgtagtcttaacctcccagcctcaattgatcctcccacctcagcctccccagtagctgggaccacaggcgtgtgccatcatgcctggctaattttttaattttttgtagagacaggattttgctatgttgttcaggcagggttcgagctcttgggctccagtgaacctcccatctcagcctcccaaagtgctgggattataaccatgagccaccatgctcgacctacctattttagtttcttacctacctcaccttcacaatcattctttttttaaaagaaagggaaacagtttcccccaatgaaccttaatatgatggcttggcctaggtctaaaaaaatctctgcatgccaaagagacatttcaagaatacatagctcggccgggcgcagtggatcacgcctataatcccagcactttgggaggccgaggcgggcagatcacgaggtcaggagatcgagaccatcttggctaacatggtgaaaccccgtctctactaaactacaataagaaattagccaggcgtggtggcaggtgcctgtagtcccagctacttgggaggctgaggcaggagaatggcgtgaacccrgaaggcagagcttgcagtgagccaagatcgcgcccactgcactccagcctgggcgacagagctatactccatctcaaaaaaaaaaaaaaaaaaaagaatacatagctcatgaacaagagtcccaggactgcaagcattaagcttggttatgaaatattgaagggcggtggttactttcatccaagtgactagaagaaaggaccctgtctttatctttttaatttatccttctttctatcttagaaatagaattttaaaatgagatggttgtcatggagatgagtatgaaagcatatttatttgaattgaaacata

SEQ ID NO: 66140 - DNA, 623 bp, Homo sapiens
tgtcttgagcttgcctttgcttaggctggactgtgtaagacaarcactgtgaagtgttccaactttatttaaaaccagacagccctgctaccatgcccccgctcctcagcattgctctaggggaggagctggatgaactatggcccttctgccaagcccaggtgctaggggaggaaccccttgcttgagatgtacaggatggactcctcacttcttctgggcttgtgccctggcccgttgaatcttgtcagctgtggccccatctgtggctcccgtgcagtgggacaatacgaggctcagctcagcctcattccggtgttcgatggccacatctgcagcctgagccacatcgctgtggtttgagcaagagaggaggtggtgttggggctgctcaagggcacaaaccctgcctctcaccagcccacagctcagccacccagcacccacaggccctcagttgacgcacccaacaagaagcaaagccttgaccttctgctcgggacccacgcgggaagcatacttcttggcttcgtatttgttatgttgtttcatgcagatctccacaaaaggcttggaggagaggaagcgggtggagggagaaggtaatgcacagccctcctgtc

SEQ ID NO: 66141 - DNA, 623 bp, Homo sapiens
tgtcttgagcttgcctttgcttaggctggactgtgtaagacaagcactgtraagtgttccaactttatttaaaaccagacagccctgctaccatgcccccgctcctcagcattgctctaggggaggagctggatgaactatggcccttctgccaagcccaggtgctaggggaggaaccccttgcttgagatgtacaggatggactcctcacttcttctgggcttgtgccctggcccgttgaatcttgtcagctgtggccccatctgtggctcccgtgcagtgggacaatacgaggctcagctcagcctcattccggtgttcgatggccacatctgcagcctgagccacatcgctgtggtttgagcaagagaggaggtggtgttggggctgctcaagggcacaaaccctgcctctcaccagcccacagctcagccacccagcacccacaggccctcagttgacgcacccaacaagaagcaaagccttgaccttctgctcgggacccacgcgggaagcatacttcttggcttcgtatttgttatgttgtttcatgcagatctccacaaaaggcttggaggagaggaagcgggtggagggagaaggtaatgcacagccctcctgtc

SEQ ID NO: 66142 - DNA, 548 bp, Homo sapiens
tagtagatgctgtaagtgccatggcctcatccccttagctgccaccattccagtacacacgtacagcatcctaccaaagacacctgactttcacctaarggctttctttcaacctcatatggggcagatcagaaatgttgagatgctgacaccattgagaacagccctcagaaagagaggataggagtgggtgtttaaatacccccactttcacacccctcacgtaggacaacttggtggcatattctatgctctgtcctggagttccccagaaagatagggactcaactgttttcagtggtagcctgttccataacacacttagttgagtgttcttttctttcctttctctctctacctcctccgttgggatttcctgggattttcctgggatctatcccaggaaatcacatcccaaataaaccacttacatttgaaatctacttcaagatggactcccccccaaaaaacaatggggcaccacattttatgtgtccttctctgctttgagaattagctataattttgtctcattaggagaagtttca

SEQ ID NO: 66143 - DNA, 872 bp, Homo sapiens
aaggatgagaagatggacagctcatcttcactggaggtagaacagagaacaaccatgaacaacagcctttggaacatgtgcctgagtgagggtatttccgggagggtctggcccaactgggtgcttcctttcccatctctgcccctgaagatccccttagtcttcctgcctccttctgcttctcttgccctttcttaagttcttctgatctcttcattctctttacaattgaaaagctattaaaatctaccagtaagcaagatatttcagaattctccataacccatcactcatagtccttaatctttatgattaagtcacttaatctttatgaggagaacttgaaaaacctatttattcacactcttcaggaggaatgaagagacagaaaacaaaaacacggaagtagagatttctctgactagttggatataagcttttattgagttttacaaaaaaggtatctttcccatctctgccttctttcagtgccatgtcaacaccccctcatttaaaaatgtgataaactttaaataagacaattagaaaaaaatgacaatattacaaatggtaaaaacttatgatacttcatatacacatgacagacactggatagtatgtttctatatttaaaattatatacatatataattatatgwtatatgtccaagttaatcatatatatgtatgttccaggtatcctggactcaaactgatgtatatggcaggaatgtaaagctgaaatatataaacggttcttttatatcatttttcttcccactgcaaattctagtagttaaatgttacattaactcattcaatgccaggattaaatcattggatgtcatagaaacaatgtatgattctggaca

SEQ ID NO: 66144 - DNA, 1448 bp, Homo sapiens
tggctgctggcaactgatacagaacaaagaccttgctctcttgacctccatcggggctttcccaccacactatcctgcttaccaatagtaggaagcacgtgctgagcctattagcaggctaatgagagtcagccattaacaatccagcaaagacattttcaggactgggttccacattctttgcaccctacggaaggtgctctggggaaaaaaacctattaattaaacgatgtgaaaacaatcctaggacttagctgttacttttttctaaataacaaaatatttttggcaagtaaacaatgtagttcatacttcagtggaaggaacatagccrgggtacggggcaggccaagttacacacatacaagtaaacaagcggtcaactatttttaaatgtacctaccctgtccaatgattaggtgacccaaattctgatcttctcagaggatggaaataggttatttttattttgcaacccactgtttccttctatatataatactgcatttttgaacaaaattatatgaagtttattctcatttaaagttctgtgggagctgaatgatatgatacacagccttctacaattccttcggtccaagggtcttgagagggcctatcattttataatgtgtaggcattttccaggcctacagcactctatttttgtttcattcttttttttgaaactttttatgaaataattctaacacatggaagagtacaagagtaacatatcagacttcatattcccaccattggctctatcaaaatctaatatcttttgccatacttgccttcagattttttttttaataaaatattacagatatagttgaaggctattggacactcctgtatgatatcgcttattctcttccctacttcttctcctgagatgaccattatcctgaatttggcatttggcattcccatgcattttgcaattttgtttgtttttttgagacagagtctcgctcagtcacccaggctggagtgcagtggcacaatatcggcttactgcaacctctgcttcccaggttcaagtgacaatcctgccctagcccactgagtatctgggactacaggcatgcaccaccacacctggctaatttttgtgtttttagtagggactgggttttgccatgttggccaggctggtctcaaactcctggcctcaagtgatccacccacctccgcctcccagagttctgggattacgggcatgagccaccatgcccggattccatgcatgtttttggactctaactgcatatatatgaatccacacttagtgttcttttgcatgttttcaaactttaaataaatgacatatttaaatatttggtcattccactcaacaaaatgtttctaagattaggcaaagcgatccacataactctatttattttaacccattattatgtgctattgtatttgtgtagcac

SEQ ID NO: 66145 - DNA, 1448 bp, Homo sapiens
tggctgctggcaactgatacagaacaaagaccttgctctcttgacctccatcggggctttcccaccacactatcctgcttaccaatagtaggaagcacgtgctgagcctattagcaggctaatgagagtcagccattaacaatccagcaaagacattttcaggactgggttccacattctttgcaccctacggaaggtgctctggggaaaaaaacctattaattaaacgatgtgaaaacaatcctaggacttagctgttacttttttctaaataacaaaatatttttggcaagtaaacaatgtagttcatacttcagtggaaggaacatagccggggtacggggcaggccaagttacacacatacaagtaaacaagcggtcaactatttttaaatgtacctaccctgtccaatgattaggtgacccaaattctgatcttctcagaggatggaaataggttatttttattttgcaacccactgtttccttctatatataatactgcatttttgaacaaaattatatgaagtttattctcatttaaagttctgtgggagctgaatgatatgatacacagccttctacaattccttyggtccaagggtcttgagagggcctatcattttataatgtgtaggcattttccaggcctacagcactctatttttgtttcattcttttttttgaaactttttatgaaataattctaacacatggaagagtacaagagtaacatatcagacttcatattcccaccattggctctatcaaaatctaatatcttttgccatacttgccttcagattttttttttaataaaatattacagatatagttgaaggctattggacactcctgtatgatatcgcttattctcttccctacttcttctcctgagatgaccattatcctgaatttggcatttggcattcccatgcattttgcaattttgtttgtttttttgagacagagtctcgctcagtcacccaggctggagtgcagtggcacaatatcggcttactgcaacctctgcttcccaggttcaagtgacaatcctgccctagcccactgagtatctgggactacaggcatgcaccaccacacctggctaatttttgtgtttttagtagggactgggttttgccatgttggccaggctggtctcaaactcctggcctcaagtgatccacccacctccgcctcccagagttctgggattacgggcatgagccaccatgcccggattccatgcatgtttttggactctaactgcatatatatgaatccacacttagtgttcttttgcatgttttcaaactttaaataaatgacatatttaaatatttggtcattccactcaacaaaatgtttctaagattaggcaaagcgatccacataactctatttattttaacccattattatgtgctattgtatttgtgtagcac

SEQ ID NO: 66146 - DNA, 1448 bp, Homo sapiens
tggctgctggcaactgatacagaacaaagaccttgctctcttgacctccatcggggctttcccaccacactatcctgcttaccaatagtaggaagcacgtgctgagcctattagcaggctaatgagagtcagccattaacaatccagcaaagacattttcaggactgggttccacattctttgcaccctacggaaggtgctctggggaaaaaaacctattaattaaacgatgtgaaaacaatcctaggacttagctgttacttttttctaaataacaaaatatttttggcaagtaaacaatgtagttcatacttcagtggaaggaacatagccggggtacggggcaggccaagttacacacatacaagtaaacaagcggtcaactatttttaaatgtacctaccctgtccaatgattaggtgacccaaattctgatcttctcagaggatggaaataggttatttttattttgcaacccactgtttccttctatatataatactgcatttttgaacaaaattatatgaagtttattctcatttaaagttctgtgggagctgaatgatatgatacacagccttctacaattccttcggtccaagggtcttgagagggcctatcattttataatgtgtaggcattttccaggcctacagcactctatttttgtttcattcttttttttgaaactttttatgaaataattctaacacatggaagagtacaagagtaacatatcagacttcatattcccaccattggctctatcaaaatctaatatcttttgccatacttgccttcagattttttttttaataaaatattacagatayagttgaaggctattggacactcctgtatgatatcgcttattctcttccctacttcttctcctgagatgaccattatcctgaatttggcatttggcattcccatgcattttgcaattttgtttgtttttttgagacagagtctcgctcagtcacccaggctggagtgcagtggcacaatatcggcttactgcaacctctgcttcccaggttcaagtgacaatcctgccctagcccactgagtatctgggactacaggcatgcaccaccacacctggctaatttttgtgtttttagtagggactgggttttgccatgttggccaggctggtctcaaactcctggcctcaagtgatccacccacctccgcctcccagagttctgggattacgggcatgagccaccatgcccggattccatgcatgtttttggactctaactgcatatatatgaatccacacttagtgttcttttgcatgttttcaaactttaaataaatgacatatttaaatatttggtcattccactcaacaaaatgtttctaagattaggcaaagcgatccacataactctatttattttaacccattattatgtgctattgtatttgtgtagcac

SEQ ID NO: 66147 - DNA, 629 bp, Homo sapiens
atttcactgtcttttccagcatctaaaggccacctgagttcttcagcttgtggtccatttcctccatctgcagtaccaacaatggcaggttgagtcttcacatcccattattctaaactctgcttctacggccatatcactctctctggctctgaccctcctgcctctcttttacaagaacccttgtgattacatgggactcactcatacaatccagaatcatctgcccctctctggagccttaacttaagtatacctgaaaagtcccttttaccacataagataaaatattcacaggtctcaggaacaaggatgtggatatctttgggggccattcttctgctttccrcaaatggtaaatcagacactgtctgacttaatgaggtttgctaatgatcaccaaaaaaggttaacaataagaggcgaaatggtttgcagaggccactgagaaggccagggttgctaagcattgtcagaccaactattttaagatttgggaaattgagcttttacaaactactcaaggttcttctctaaaaatataacatctcagattaaaaagaaagaaaagagaaagaagttagtgttgttaaagatgtctattatgatactctcattacctgcccttt

SEQ ID NO: 66148 - DNA, 619 bp, Homo sapiens
attctccacctctctgcatgaacacatctcttctacacttgctgaattccagctcaagcatcacctcctcagtgcagccttccctgatgctgggacagaattaatcaatccctcccttgtgccaccattgtacccatcttttttttttttttttttgagatagaatcttgctctgttgcccagactggagtgtgtggtgtgatctcggctcactccaacctccacctcccagattcaaacgattctcctgcctcagcctccagagtagctgggattacaggcacctgccaccatgcccagctaatttttgtatttttagtagacatggggtttcaccacgttggccaggctggtctcgaattcctgatctcaagtgatccgcctgcctcggcctcccaaagtgctgggattataggtgtgagccaccatgcctggcccatcatacccatcttgatctccactctagcactcatggscttgtattatggttatttgtttacttgtacattctccagtatctgacaaaaagaagaatccaagcatgtttgatagataattggatactgatgtgtcaaggttggaggtggggcctggtgggaggggcttgggccacgggagg

SEQ ID NO: 66149 - DNA, 1415 bp, Homo sapiens
acatccatatagtcaagactgcatattgccaagtcacctatgagcttgaatataaacacaagacagcttcttacctacgtaatcacatacagatgtgcacacttgtgagcagttttaaatttaatttgcttagtttgatttcttatttagtaaaataagctagaacacgtgtccctgctctgcaatggtggatgtcacagtagggagtgaggaacagcttccctagcaacacagtgaacccgaggcaagccctatgacaaggcagaggacttcagcgatgaaagtcatggcaacgctgggcagatgcaggggcactggcggccgctgcatcctactgtggggctgcacacccagcacagaggcagatgaatcttggagaatgacacaggattaccataaacgtagccacggcgtgacttcaattccaacctctgctccagatagagtctctatgggaacacacggacacagccccagccacctcttaattggttgttatggaaatggtttctccccttcactagcaatggmcgcagaacctcctgagccagcagtggtgcccatcactgtctgacttcccggctccctcaaccttctgactctttcccctgatttattgtgcaagggccctgaaggttgaggccaactcccaggattcatgctggttcaacacagtgataaccttatgctcattgaacatggcaagcagggatgatggataccctcaaggccacagggcaggagacgaactcccaggaaaattcaggggcctgcccctgtgggcagggtttttgggatccagtggtccttggcatgttgcaatatttctgccaaaagtaaaagataagttgctacatcttgaacctgctaccacttaaaaggaggtgcagcacttggtgatgtctgcattttgaaggcatccacgcacatttgatcatgctcctctcacttatttgctgagtgaattacggctgccaattttggtgaagcccataacgagagctgacgggcagctggtctagactgcagtaccaaagagaagatcccatggtgcccaaacagacagaaaggaagtttcaaaggagcaattgacaaaccttgaccagaaaaacagcacaaaccctgggaattctttcaaagcttcttctgcaaataactattctcggttagagaaatagttgctggcttgccactgatgtccctgaaggcccaaatacctcaggcttccatggagccagttcatgctgtggaattcctgtttctccctcagcccatccccgcagtctcatggggcattctatgagatcagccagatcaggaagggaaagtccaggtggttccattcggcacagggcaaagaaatacggagtgggaagaggaggaagggacttcacaaatatcaaggactccctgaa

SEQ ID NO: 66150 - DNA, 739 bp, Homo sapiens
ttcctcccagtattctttcacctttccatgactactgctgttgaaattggcttgccatgaacctgctcattcttcgttaattcatttactaagcagcgactgcatgcatacaataagaatacaaagggaggtaagtaaataacagctttgctttcaaaacactctacatttatttgacatatgtttcttgagcatttaccttgttccaggcactctgccaagtgttaatatttttaaaaattcagataatataaatctctgggaatctgatttgatatggacatcacctctcagagcctaaatatgctgaaaactgaagtcaccagagaagcatcttgataacattcactgtttcagattaatagagggagttaaatacacaagcggcatcgaaatggcattatatctcctgcaggctgttagactaaatgaaatttagtctgyaatgcttgctggagaaggttaaaaagccttaaaaggcccatacaaaagccatttcctacccagtggggtcaggccgtcttgccctcgggaggtcttcatcccagcagactccctgagtcggccccgggagctcctcagcttgcctggctgcctgtgtcttctgacacgtgtgttcttcccctgtgccgactatgtctactctgcgccttttgctgtcctcgttgacgaggcgctcctctgccactccacgcttactgctgcccgggcactctgtctggtcagcattccagaaaat

SEQ ID NO: 66151 - DNA, 739 bp, Homo sapiens
ttcctcccagtattctttcacctttccatgactactgctgttgaaattggcttgccatgaacctgctcattcttcgttaattcatttactaagcagcgactgcatgcatacaataagaatacaaagggaggtaagtaaataacagctttgctttcaaaacactctacatttatttgacatatgtttcttgagcatttaccttgttccaggcactctgccaagtgttaatatttttaaaaattcagataatataaatctctgggaatctgatttgatatggacatcacctctcagagcctaaatatgctgaaaactgaagtcaccagagaagcatcttgataacattcactgtttcagattaatagagggagttaaatacacaagcggcatcgaaatggcattatatctcctgcaggctgttagactaaatgaaatttagtctgtaatgcttgctggagaaggttaaaaagccttmaaaggcccatacaaaagccatttcctacccagtggggtcaggccgtcttgccctcgggaggtcttcatcccagcagactccctgagtcggccccgggagctcctcagcttgcctggctgcctgtgtcttctgacacgtgtgttcttcccctgtgccgactatgtctactctgcgccttttgctgtcctcgttgacgaggcgctcctctgccactccacgcttactgctgcccgggcactctgtctggtcagcattccagaaaat

SEQ ID NO: 66152 - DNA, 739 bp, Homo sapiens
ttcctcccagtattctttcacctttccatgactactgctgttgaaattggcttgccatgaacctgctcattcttcgttaattcatttactaagcagcgactgcatgcatacaataagaatacaaagggaggtaagtaaataacagctttgctttcaaaacactctacatttatttgacatatgtttcttgagcatttaccttgttccaggcactctgccaagtgttaatatttttaaaaattcagataatataaatctctgggaatctgatttgatatggacatcacctctcagagcctaaatatgctgaaaactgaagtcaccagagaagcatcttgataacattcactgtttcagattaatagagggagttaaatacacaagcggcatcgaaatggcattatatctcctgcaggctgttagactaaatgaaatttagtctgtaatgcttgctggagaaggttaaaaagccttaaaaggcccatacaaaagccatttcctacscagtggggtcaggccgtcttgccctcgggaggtcttcatcccagcagactccctgagtcggccccgggagctcctcagcttgcctggctgcctgtgtcttctgacacgtgtgttcttcccctgtgccgactatgtctactctgcgccttttgctgtcctcgttgacgaggcgctcctctgccactccacgcttactgctgcccgggcactctgtctggtcagcattccagaaaat

SEQ ID NO: 66153 - DNA, 328 bp, Homo sapiens
tacttaccatttaacaaattgtctagtgtgccataagcatcttcacaaagtgtggattcatactcattttccctttcaaaattctttatttcgttctgtattaataaaaaaggcatcaatacttcaagcaaacatcacaagcttcttctaaaggtatttgcacattgttacataattctgctattagaatatttcattacataggtagaatgtgctttctagtatctttccccagcatgtatttggctcccttttagtaaaactatgctawcagagtcccaatattaaacaacaatgtaacaaatagcttgttattttaatattttgg

SEQ ID NO: 66154 - DNA, 549 bp, Homo sapiens
gagctggagcagaagtagaaaatgttcaagtattttcttcttctagggaaacagttcattatattaatattaattttttctatgtttattttttcaacagaaggtcatacatatgctattggagagttcacagctagcccctcactactcaaattgtgggtgttattgccagactgcggagatgcacaagaattgacttgagaagcaaggagattattcatgytcctgcacactctgttatctctgggagctcttaatcaatgcagggtgagagccagttagcatgactgaggttagggtaaacgggctgttcagggaaagataaattaaaatgtgattattattcaaattggaatatagagaacataatccatgatggaagagaaggagaataatagaaataaataaaaatttacctactgaatcacttgctctattgaatctagtccttgaaattccaaagacattataatatgctatgactaaagggaatgatttgggagatttatactctatctttattggctcctgcagatatgctgaaataca

SEQ ID NO: 66155 - DNA, 1019 bp, Homo sapiens
aattcctatttgaaagacgtccttcttataccagaaggttttaatattcttattatgaagaatggaaagttctgcataataagtctgagtaaataaaaatttaattctcacttcttgccaaaaaaactacgaggatagagataaaatttttcctcctatacagtttcttattacagataaattaaagataggtgggactattagtaaacatagtttgtgccacactgaaaaattatattatgaaaaagcacatgctcctagaaattataattcatagatttgaaagtctactctgtagatgctagtgtgacatatagtttacaattgcttgcttcctagtgtttgctagaaattaaggtcattaaagactaagaattctaatgaatatatgtaaataatgttgttagaaatgaaaagggaaacaactttatatgcaagtatatgagaaaagcaagatgtgcttttggcaagcaaagctataaggtatgggaaagtgtttggttgtgttaaggaaaaaaaagtaatttttatcgtgaagtacaactggttgttccaatgaaaaagaaaaagtataagactaaactgaatagacataagcaagttgtagaaaatttgtagaacatgaattttggaaaataaattttatatgtgaacaagctaagattagaagagaactattcataagtcttttctaaaattgagcaytaatatcaaaactacactaatataaaaatagaatttgattctctctgtgaaaaaacacaattttattggaatattagtctgctttaaatataaaattgtaaaaggttatattattacttttttaggtaattggcctagaaaaattcaatatttatcaagatgatctgctatacttcatgttatctttttttctttttctttttcttttactttaagttccgggatatatgtgcagaatgtgcaggtttgttacataggtatacatgtgccatagtggtttgctgcacctatcaacccaacatctaggttttaag

SEQ ID NO: 66156 - DNA, 719 bp, Homo sapiens
gttttccccaaagcaggtgtgtttttagtctgtttattctaaacatatgcttaatttactccacagtagcagacagaaaggccgagaattttttcccagatggtatttgtggactacctcatattccattcatgtaaacacagagtgtgttctggtttgctgaactacatatacatgctctggcttagtacaaagtatgaacgtttagttagcaagaagactgtttccatcctatgattcattaggtccccatggtacctctgcttcctttattttatgcaatcacaaattatattagtttgtcctattttgataacccttataattgaaattctacataggaaactttattactattttaaaacacacccataaaacattactgaggtggcataagtgacagcctcacagaactggtgatgaggacagaacagagctttgcatgaactgcttctaccagggaaattaaaaagcattacaggagggaggggtgaattcagtgcattttaatccagatcggagattaagccataactcttcacacttataaatttgttctttattacttttcataattaaggagaattagctaaacatgataaattggttctgatgtgaaaactagtgtaaccaactayacagcttactactgactggtagattcatacagtgaaaatctaatatgatttttaaatggaatggtaattacattctatgca

SEQ ID NO: 66157 - DNA, 1175 bp, Homo sapiens
gcataaataataaccctttatagatatttatatacactattaacactgaaactcatattaacctttaaattttactatgaaaagatcagtatgtacttgtagaagcttacaatgaacatataaagtctttaagtatactgaaaatattagtgaaaacatacatctctgtatctacctactaccaccctgtacacgattaagatcttcataggtacaagctctgtggtagcaaataaaaatattaataggcaataccaggcaattaattatttataatagttaatatcaataaaacagtaattaagaccctagcttagagccttcacagaatcctacaactttcaaactcctctgtttattatataaaagtctttgacatctggcttctctctggttccacccttatttctagccatgcaccatttgttcctaaaatatcaaactccctatggacagctgaccacacaataggtttcaggtcttctcacttttgtacatgatattttctctgtcaartaagtctttgtttcttcttccattcagccaatgccttccaaacttagttcgaggggtacgacccttgggaaattttccataatactcatttgctgctctaaggcatattgcactgattgccctaactcacctttcacctcatattatattcattcccattgccaagtaactttaagtagccctgcactataaccctgagctcaaccctgttatgttctttggccaatgggatattattagcagcagaggctaagaagtgcttaagcatttcaacttgcactcttgcactctgccactgccatgaaagtatgacaaggctaatctgctggaaaattagagatacatgaagcagagctcagtcaccccagttatcgtagttgagttatcatagatcagctggcagtcagctgaccctcagatagataacagagcacagctgagattggtggggttgtctaatctactgtcatagacatataatcataaatgctgaggtttcacaatgttttgttatgcagcattattgtggcaataaataacaaatcccactcctagatgcttccatagcactcttcacaacctcctcatagtatagttacatagttgtatagttatgtagttacatagtcatacttttacatgaactaatttgtctctat

SEQ ID NO: 66158 - DNA, 512 bp, Homo sapiens
agaatgaaacaagaataaaaaacaaaactttcaacacattgggattttgattggaattatattaaatttgtagattaactgtagagaattttatatttccaatgtgtttctaagaatatttatcactcaatttatttgtctttaaaaaaatctctcagtaaaatcctgctgtttccttcacaaagattcttatttttctgtttaaatttactcccataatttatactttggttgatattttgagtgcatttttccttgtttattttataactgattattgtsagtctacaggacaagtattgaagtcatttatttacacattgcaacagtgtctaagttgatttccttaggttaaccgggagacagtcacatcatttgaaaataatgatgcatttattttttctcttccactgctatcttctatttctttttcctgtcttgatgcattagttaggctatctaggatgacacttaatcctagcattggtagtaaaaatcttgtttgcccttga

SEQ ID NO: 66159 - DNA, 1481 bp, Homo sapiens
gtgatgctgagtaaaggcaggatcattctacatttcaccgaatcataaaaaaaagataaacrtgtctttaaaacttatataaattattaaactataaatattttgatgctcttcagagatgaggttcagttaacaggaaaaaaattcactagtgtagaatgcttcataactaaaatatgtcagggaattatgatatgcagtcatgcctaggtatctgtgggggtaggtttcaggaccccctgaggataccaaaatccacagatgctcaagtaccttatataaaatggtacagtatttgcatataacatgagtacatcctcctgtattctttaaatcatctctagattacttataatacctaatataatgtcattgctatgtaaatagttgttatactgtgtagtttaggaataatgacaagtctatacgtgttcagtacagatgcaaccatacatttttttccaaatatttttgatctgcaactggttgataccacagatgtggaacccacagatacaaaggtccaactgtatatgcacagatgaggctatcattttttcttttgtctttttcttgaacaaagatcaccaatcctggattttgtatattttaatgatttctgatgtctgaaagcagtagtaaatagaacatccccaattttaaccctatgatgtcacatattaacatctatgtagtggagtccataaattcagttagaaatcatagccagatagagtatgtgtgctttcataattcccatctctttagtaggcattatattttttaaaatatgtcttccttttgatgtgaaatgtattttcagaaattatttgtcatatttagtgtaaacattattcactatatactgcatatttttctaaatgtcatgttggcgatttgcccattttttaaacctaaaattgagatagaatgagtagctttaggcactgtataatgacttggattactgtggtgttcttgctgtaatttattattatttatcattcttgggcaggtattttagtaattagaaagcctacaataacacatgtggtacacttaagaatagtttgaagcactagagctgtatagccattgggtttcctctcccttttttaacttccatattgaatgcatattagaaggacatgtaacttttatcatactatttccttgctcccagcccgctacttatttatgtgtacaaaagcatatactttcttcttgaggaaaatttttttaaaggaccctaattatttcttaagatttattttccttctatcaggtagccaatacagtattttttttgatgttgtcgttcatatatgtttgcctcttacactcagaaaagtcccataaccaatgagagctactgcctttcttcctgccctatttctcataaccttgatgacccagaaatctctccacttaccataaatgggaggcactaaagtagtgttaggacttccttaagacatctg

SEQ ID NO: 66160 - DNA, 1481 bp, Homo sapiens
gtgatgctgagtaaaggcaggatcattctacatttcaccgaatcataaaaaaaagataaacatgtctttaaaacttatataaattattaaactataaatattttgatgctcttcagagatgaggttcagttaacaggaaaaaaattcactagtgtagaatgcttcataactaaaatatgtcagggaattatgatatgcagtcatgcctaggtatctgtgggggtaggtttcaggaccccctgaggataccaaaatccacagatgctcaagtaccttatataaaatggtacagtatttgcatataacatgartacatcctcctgtattctttaaatcatctctagattacttataatacctaatataatgtcattgctatgtaaatagttgttatactgtgtagtttaggaataatgacaagtctatacgtgttcagtacagatgcaaccatacatttttttccaaatatttttgatctgcaactggttgataccacagatgtggaacccacagatacaaaggtccaactgtatatgcacagatgaggctatcattttttcttttgtctttttcttgaacaaagatcaccaatcctggattttgtatattttaatgatttctgatgtctgaaagcagtagtaaatagaacatccccaattttaaccctatgatgtcacatattaacatctatgtagtggagtccataaattcagttagaaatcatagccagatagagtatgtgtgctttcataattcccatctctttagtaggcattatattttttaaaatatgtcttccttttgatgtgaaatgtattttcagaaattatttgtcatatttagtgtaaacattattcactatatactgcatatttttctaaatgtcatgttggcgatttgcccattttttaaacctaaaattgagatagaatgagtagctttaggcactgtataatgacttggattactgtggtgttcttgctgtaatttattattatttatcattcttgggcaggtattttagtaattagaaagcctacaataacacatgtggtacacttaagaatagtttgaagcactagagctgtatagccattgggtttcctctcccttttttaacttccatattgaatgcatattagaaggacatgtaacttttatcatactatttccttgctcccagcccgctacttatttatgtgtacaaaagcatatactttcttcttgaggaaaatttttttaaaggaccctaattatttcttaagatttattttccttctatcaggtagccaatacagtattttttttgatgttgtcgttcatatatgtttgcctcttacactcagaaaagtcccataaccaatgagagctactgcctttcttcctgccctatttctcataaccttgatgacccagaaatctctccacttaccataaatgggaggcactaaagtagtgttaggacttccttaagacatctg

SEQ ID NO: 66161 - DNA, 646 bp, Homo sapiens
ccccaaagagagcaggggctcttgggaagagggaaaagacggaggggagaagttgaggggaagaacctgtgttcaccatggatgcccggagaccactgtgtaggattcctcctgtctagaccagtccttcagcctgggggtgggagggccgtgaagggaggggcccagaatcctagggaagaggcccctcaggcaacttaygtcttcacattcacgccaaacagtctccatagaacctgcccattttgccctctcagcctgctgcccctgttgcgttgcccccacccctaatggctttaacaaggattctggggggaggtggaggaggaagggcaggtctgtaggcttgtggacaggaagacctgagaagggcctaagacactctgaggagggacccttggtggatttctctggtcctcacggagcctgctgtgtcatcctgcacagcctcacccccaccgagaggcgctttatttatgcaatctctttcttcagggcagccatcttgtccacaagcctgagcacctcccagatagctgttctcaccagaaccccccactaatctctgaaagctgcagagtggagcggctgctccctctggggagctccttctcccgctccttctatgctgcccaggagccaccca

SEQ ID NO: 66162 - DNA, 663 bp, Homo sapiens
tgcactcactcgctcctgcgaggggctgagtatggcgggccaagtagacagggcacctcttccgtgagtctgggaaatgggctgagaaaaatcatgcatcagttgtgaatgtatggatgagtgtgtgtgtgagagagagagtgtgtgagacggagtatgtgtgtgagtgtgtgtggggggggtgtgaatgtgtgtgtgtgtrtatatatgtcgtttaacctggttccatccctccacaccactccatccctggtccttgggaacatatctggaatcaaaatagaaattaacagggataatagggttgaacatacccatttctgtcccccgaaaccaaccactgctacttcagaaattgatatggaaatgttaaaatccagacaaaactctagagcaagaaacagccttcagactgttaggaaaaataaacattacacaggacccatatgtccatgcgcataacttaaacaaggattcatagaaatttactcctcccagcttgtcacacactcatacacttggatatattctacttgtttctctctctctctcttttttttttttgtaatgctggtcacagcccatgaaattgatttcactacacaccaatgaatgggttcttatcttgctgttcaagtcatcatctttgagcatctcccctcc

SEQ ID NO: 66163 - DNA, 1527 bp, Homo sapiens
aaagcctcaggaaacttacaaacatggcagaaagggaagcaaacacgtccttcttcacatggcggcaggaaagagaatgagagtgagggaagggggaagccccttataaaaccatcacatcttgtgagaactcactatcacaagaacagcatgggggaaactgcccccatgatccaattatctccacctggtcccgcccttgacatgtggggattattacaattcaagatgagattttgagtgagtcacagccaaatcactcccctcacctcctcttgtccttctccttccctcagttcttgaggccagcagcaattcagtggctcagtcactaccaggatctggccaaaggggcttcctgtctagatcctggcccacctcctggctcatggccctggatgagccccatgcttaccctggggtgctggcccttgcttctgagagtcctcagatgggctgatggctatgctgggctagaggcctgtaggtgaagagcctcagagccctgcccattggttactgggtcattagtaatgggggtagggagggatctgtagatgttggtatttgttttaatgctttctagagcacagcccatcccaagcatataattttcattatatgatatcaacatttagcttcagcaatggaaatgtcaacattaattattttcaaggagtcttgatggctctgggaataaatcaatataaataatgtttccataaactctgaatcacgctcctaatagtgttatagctataattttaatattcaaaacaatttttctttgcatcttagcaattaattgctgctaagtgctcattttttgggatccttattgctgtcagctcagagccagaggctggggtccctggccctgaaaccattcctagctctccttgcccaaagagtcaggcttggtagaacatctcttccccccaaaaacatgctttttgctctcagcccatttagagtttactcaccctttggcctactcactccaagatccctgttctggctgccacacctggcagcgtggcactcaccagcttcatccaggactcctcgggtagacagtggggcaggtggggcagtccagggagttgggcttacccactcaccagctgtgtgactctggacaactgayaagtggcagagcctagggtcatctaccaggcagagttcttatttgcaggttacagagaatgactcaggtggatatgaggagaaacagaatttattaaaggatagcacatagcaaaggcaattgaccaggaatagcatctgaaattccactgagaagctggttccagaggatgccactggcaccccggaaaggtcctggtccctgtggtttgcacagcagatagggccagatgttggggagctgctggtttctgttcttacaaagctgcctttgaaaaccagacatggtcatggccacctccatcaccagaatggggggttttcccttccccagcatgctgcttgaggcctgggtgctccactgacgtggccagggacacc

SEQ ID NO: 66164 - DNA, 598 bp, Homo sapiens
tttcctgaagatgcccgaagatttaagattggagtcaaacaaggagagcagacacagaattgattaaagcagcrggggatgggatggtcctgccctgtgcgcattgctttaaaaggcctaacaaaggcatcaaatgcttttttctttatgtatgaagagaaaagagggaaatgtataagctcctttttttcaaatgttgttccttccgccaaagaaaagatacaagtatttgtactatagcgctagctgtccatttgattactatacccaggacaacaaatttatattattcctgagcgagatctttggaggttaactttccatcccatagttcattaatctctgccatccagggttcgagtgagtacattggctatgctggagaatgtttttaatctccaaatttactcaagaagtttcttctaacggttgcattatttcaacctcatctgcttcactcctgttccaggtctcctcccatccttcctaccaggccagcatttctactctgtgcagctaccagcgaggagggcctgtgggctcaaagacccaacaggaattcctgcagaagccccatagcttgaagagggaccgtggg

SEQ ID NO: 66165 - DNA, 598 bp, Homo sapiens
tttcctgaagatgcccgaagatttaagattggagtcaaacaaggagagcagacacagaattgattaaagcagcgggggatgggayggtcctgccctgtgcgcattgctttaaaaggcctaacaaaggcatcaaatgcttttttctttatgtatgaagagaaaagagggaaatgtataagctcctttttttcaaatgttgttccttccgccaaagaaaagatacaagtatttgtactatagcgctagctgtccatttgattactatacccaggacaacaaatttatattattcctgagcgagatctttggaggttaactttccatcccatagttcattaatctctgccatccagggttcgagtgagtacattggctatgctggagaatgtttttaatctccaaatttactcaagaagtttcttctaacggttgcattatttcaacctcatctgcttcactcctgttccaggtctcctcccatccttcctaccaggccagcatttctactctgtgcagctaccagcgaggagggcctgtgggctcaaagacccaacaggaattcctgcagaagccccatagcttgaagagggaccgtggg

SEQ ID NO: 66166 - DNA, 598 bp, Homo sapiens
tttcctgaagatgcccgaagatttaagattggagtcaaacaaggagagcagacacagaattgattaaagcagcgggggatgggatggtcctgccctgtgcgcattgctttaaaagkcctaacaaaggcatcaaatgcttttttctttatgtatgaagagaaaagagggaaatgtataagctcctttttttcaaatgttgttccttccgccaaagaaaagatacaagtatttgtactatagcgctagctgtccatttgattactatacccaggacaacaaatttatattattcctgagcgagatctttggaggttaactttccatcccatagttcattaatctctgccatccagggttcgagtgagtacattggctatgctggagaatgtttttaatctccaaatttactcaagaagtttcttctaacggttgcattatttcaacctcatctgcttcactcctgttccaggtctcctcccatccttcctaccaggccagcatttctactctgtgcagctaccagcgaggagggcctgtgggctcaaagacccaacaggaattcctgcagaagccccatagcttgaagagggaccgtggg

SEQ ID NO: 66167 - DNA, 598 bp, Homo sapiens
tttcctgaagatgcccgaagatttaagattggagtcaaacaaggagagcagacacagaattgattaaagcagcgggggatgggatggtcctgccctgtgcgcattgctttaaaaggcctaacaaaggcatcaaatgcttttttctttatgtatgaagagaaaagagggaaatgtataagctcctttttttcaaatgttgttccttccgccaaagaaaagatacaagtatttgtactatagcgctagctgtccatttgattactatacccaggacaacaaatttatattattcctgagcgagatctttggagrttaactttccatcccatagttcattaatctctgccatccagggttcgagtgagtacattggctatgctggagaatgtttttaatctccaaatttactcaagaagtttcttctaacggttgcattatttcaacctcatctgcttcactcctgttccaggtctcctcccatccttcctaccaggccagcatttctactctgtgcagctaccagcgaggagggcctgtgggctcaaagacccaacaggaattcctgcagaagccccatagcttgaagagggaccgtggg

SEQ ID NO: 66168 - DNA, 598 bp, Homo sapiens
tttcctgaagatgcccgaagatttaagattggagtcaaacaaggagagcagacacagaattgattaaagcagcgggggatgggatggtcctgccctgtgcgcattgctttaaaaggcctaacaaaggcatcaaatgcttttttctttatgtatgaagagaaaagagggaaatgtataagctcctttttttcaaatgttgttccttccgccaaagaaaagatacaagtatttgtactatagcgctagctgtccatttgattactatacccaggacaacaaatttatattattcctgagcgagatctttggaggttaactttccatcccatagttcrttaatctctgccatccagggttcgagtgagtacattggctatgctggagaatgtttttaatctccaaatttactcaagaagtttcttctaacggttgcattatttcaacctcatctgcttcactcctgttccaggtctcctcccatccttcctaccaggccagcatttctactctgtgcagctaccagcgaggagggcctgtgggctcaaagacccaacaggaattcctgcagaagccccatagcttgaagagggaccgtggg

SEQ ID NO: 66169 - DNA, 706 bp, Homo sapiens
ctcctgtgtccagcaggtccaaagttgtaaggtgctgaccagggcactgagcattggtgggtgcccaggaaacaggaatgcagtcctctcttcaagggctaactctctcggggggtacggagagcaacagggccactttctctcaggaggtgcagcctaaggggccaatcctggggggccaaggaggccaaactcactgaggccaccaggagggagtgctctcctccacgatgggtggggcaggggacttaagcataatttggtgatgggaggggctgaagcaagagagttctccctgaatcacgctgtattgctgggtggggagagactatgagagcccaggggcyagagagtgccaaaggggagccacggggtatgaactctggggcctcagcctggtgctgctgcaggccccttccccagctgtgccccatcccaccaccacccacctgctggcccgggtgtgacaggttccaccggccttcctgctttcatgtcggcatttcagttcgctgatttaacatttcctcagaaagcaggattggatttttccctcacttgatttcctagggtttgtctcctcattgtttttcttcttaaaagaacaaaggcaaagacaatcacctgtcttttatgctctgggctgaaattctgcagctgttggtggtaaaggaggttgggggaggcgggagagaatgtgtttggg

SEQ ID NO: 66170 - DNA, 597 bp, Homo sapiens
atggaatgcagaatgtracaaaacaatctatctatattacaaatgtatgcaacaacctcactgaaggggataggggaaaagggtactgacctaagtaactagaaataagtagagtctgttaaaatcaaatgtaaaaggagtgcatataagcgccatcttctagttgataaagttgtttcccatagggattgagttaacaattctgatattgctgtacatatatactacaactgaacaattaagggaatggatacggatggtgggaaccacaggtttgtctctgttggagtaggagtttaaagacaggcaaagaaagggggctagtgcaacccatgtagtaatggattagaatcgaagacatcaaatgagctgatgtttagcttgatatagatgctgatggttacaaatggaaatatttgtagatatgtatacgccaataagaatacacacatatattttcttgctgtcatgtgagagatcttagaaacaattacatttcagtagcaacaagtacacttggcatcccttatcttggtttcttttcttttcttttttcttcgtcttttttttttaaacagtcttgctctgtcacccagg

SEQ ID NO: 66171 - DNA, 570 bp, Homo sapiens
tcctgcctcagcctcccaagttgctgggattacaggcatgcgccaccatgcctggctaatttttgcatttyggtagagacagtgtttcactatgttggtcaggcggtctcgaattcctgaccttgtgatcggcccacctctacctcacaaagtgctgggactacaggcgtgagccaccgtgcccaggacccttttgtatttttacatgaaaactataaatgcctctaacctaccactgtatctgctccctgctgtcctgggccatctgaaacttacccttgggtgtgtaattctccagctgaatgtcaagcagttgctctgtaagtatgtccaccacctctctcagtactgggttctgtgctttccaggccattgtgacatttagtttcttccccaggggactgacgggtgtgactgtcttgttgccacagtcatagtgaagaaaagtcttttcatccacctggccttgaaccgcacaccaccgtggtccaggtctgaacttagggatgacggtgatgtcatagcaaagagagtgagggtctgtggagaaaggcaggtgaggggtgggtg

SEQ ID NO: 66172 - DNA, 570 bp, Homo sapiens
tcctgcctcagcctcccaagttgctgggattacaggcatgcgccaccatgcctggctaatttttgcatttcggtagagacagtgtttcacyatgttggtcaggcggtctcgaattcctgaccttgtgatcggcccacctctacctcacaaagtgctgggactacaggcgtgagccaccgtgcccaggacccttttgtatttttacatgaaaactataaatgcctctaacctaccactgtatctgctccctgctgtcctgggccatctgaaacttacccttgggtgtgtaattctccagctgaatgtcaagcagttgctctgtaagtatgtccaccacctctctcagtactgggttctgtgctttccaggccattgtgacatttagtttcttccccaggggactgacgggtgtgactgtcttgttgccacagtcatagtgaagaaaagtcttttcatccacctggccttgaaccgcacaccaccgtggtccaggtctgaacttagggatgacggtgatgtcatagcaaagagagtgagggtctgtggagaaaggcaggtgaggggtgggtg

SEQ ID NO: 66173 - DNA, 570 bp, Homo sapiens
tcctgcctcagcctcccaagttgctgggattacaggcatgcgccaccatgcctggctaatttttgcatttcggtagagacagtgtttcactatgttggtcaggcggtctcgaattcctgaccttgtgatcggcccacctctacctcacaaagtgctgggactacaggcgtgagccaccgtgcccaggacccttttgtatttttacatgaaaactataaatgcctctaacctaccactgtatctgytccctgctgtcctgggccatctgaaacttacccttgggtgtgtaattctccagctgaatgtcaagcagttgctctgtaagtatgtccaccacctctctcagtactgggttctgtgctttccaggccattgtgacatttagtttcttccccaggggactgacgggtgtgactgtcttgttgccacagtcatagtgaagaaaagtcttttcatccacctggccttgaaccgcacaccaccgtggtccaggtctgaacttagggatgacggtgatgtcatagcaaagagagtgagggtctgtggagaaaggcaggtgaggggtgggtg

SEQ ID NO: 66174 - DNA, 570 bp, Homo sapiens
tcctgcctcagcctcccaagttgctgggattacaggcatgcgccaccatgcctggctaatttttgcatttcggtagagacagtgtttcactatgttggtcaggcggtctcgaattcctgaccttgtgatcggcccacctctacctcacaaagtgctgggactacaggcgtgagccaccgtgcccaggacccttttgtatttttacatgaaaactataaatgcctctaacctaccactgtatctgctccctgctgtcctgggccatctgaaacttacccttgggtgtgtaattctccagctgaatgtcamgcagttgctctgtaagtatgtccaccacctctctcagtactgggttctgtgctttccaggccattgtgacatttagtttcttccccaggggactgacgggtgtgactgtcttgttgccacagtcatagtgaagaaaagtcttttcatccacctggccttgaaccgcacaccaccgtggtccaggtctgaacttagggatgacggtgatgtcatagcaaagagagtgagggtctgtggagaaaggcaggtgaggggtgggtg

SEQ ID NO: 66175 - DNA, 570 bp, Homo sapiens
tcctgcctcagcctcccaagttgctgggattacaggcatgcgccaccatgcctggctaatttttgcatttcggtagagacagtgtttcactatgttggtcaggcggtctcgaattcctgaccttgtgatcggcccacctctacctcacaaagtgctgggactacaggcgtgagccaccgtgcccaggacccttttgtatttttacatgaaaactataaatgcctctaacctaccactgtatctgctccctgctgtcctgggccatctgaaacttacccttgggtgtgtaattctccagctgaatgtcaagcagttgctctgtaagtatgtccaccacctctctcagtactgggttctgtgctttccaggccattgtgacatttagtttcttccccaggggactgacrggtgtgactgtcttgttgccacagtcatagtgaagaaaagtcttttcatccacctggccttgaaccgcacaccaccgtggtccaggtctgaacttagggatgacggtgatgtcatagcaaagagagtgagggtctgtggagaaaggcaggtgaggggtgggtg

SEQ ID NO: 66176 - DNA, 768 bp, Homo sapiens
aagtcacaatgccagctggggacctcagttatacaaagttatgcccatggctcatagaacaaaggggtccaaagtccaaaagagatggaaacccaccccggatactgctggatttaaataattacaagaaacagagataaaccaaatcaggaggctgaaagtagccagtccatcaagaacgaggctgctttgcctaatttgcagaatgaagccacttctcagaccctgaacccatgactakaagaagacaccagtttctagtgaggaaggaccctttaaccctgcagccaggacagtgagtccttgtggccttctccagagatatttatggccaatagagtttgctgtgaagggcaattttgtaaacatgtaaaggtgttcagggaatatattctccattgtaactactcaactctgctgttgaagctcaaaagcagccatagacaatccatgaatgatgagcgaggctggacctaccttaagtgcccaatgacccaagaccccctaagatcctagaggtacatgtggtcacaatgtctaattggagaatcacaacagagattccatgtgaatattcagagacaaggcaatgccactcacagcaaggaaatcgcaacattaagcagtggctcctgtagagtactgcaccttggcagagatggggccttttgccatgcatataaagaaggccccatgacaaggcaccagaatggaatgaagcttagggatgcctattcctgaaggcctcagagctgcccattactggtg

SEQ ID NO: 66177 - DNA, 612 bp, Homo sapiens
ggggaaaacaaaggcagggagtcctgggggtgctggagggtttgtgtggtagagagcaggtgagagcagagcaggcttgtggctggtgggggcgtctgtgattgtatccctgtggtaccccccttcacccagtcctgaccccagctctgttcccgggggggctctggtttctccttccgaaaggcgggtgggactgccgggctgcactaggaatccgggccccacctagccctcgcagccctctggcccctccaccctcctgccagcctcgttttcaccctgctctttttcgcccctactggggcaagaacagccttggggagtggacccggcgggaaggagcccaggaggggaactgagctgggggcgcagttcggggagatctcccttgtccttccagaagccttccctcctctgaaacccgctgcagtccacagtccctcaggtttggcccccgccccgcttaggctccatccaccagctcaccgtctcgccyagcccgggaccagccgaacagcaggaacagaagcgggaggcacagaagcaaagctgggatggcggctgctgccattggggaccaggagggctggggacaagagatttaatcaaggt

SEQ ID NO: 66178 - DNA, 558 bp, Homo sapiens
  misc_feature (1)...(558): n = A,T,C or G
aggaaaatacatttctttgaactnccaaagactcagttttcttcctttgtgaaagtggcaataaaacttgaagtactcaccttaaggagcttttatgagaccaatgaagttctaaactctgccaattattaagcactatgcaaaggtagatggtaaagttacagccacctaaatgaaaatgggctcaactattttgaaaacctcattgaaaagtcaactttactctacgttaacgtataataataaacactgcaatgtctgcctgagcattgcctgagcatgtcatacgtcataccgtaaaagcatcctctgcctatactagattctctaactgtagccacaaaagcaaaaatcacataattgaaagttaagcagggtccttccattgtcattcatcttcttgccattacctactttttttttttttttgagatggagtttcattcttgttgcccatgctggagtgcagtggcgtgatttccactcactgcaacctccaccttctggtttcaagcgattctcctgyctcagcctcccaagtagctgggattacaagcg

SEQ ID NO: 66179 - DNA, 534 bp, Homo sapiens
tgcaattccccagaggattctgaaactcaccagatgctgctggtggtggtccaagggctgtatttaaacagcaaggtgwtatgaaaccagcctaaggagaaaaaggaggaatgatagcatcaggtgacggtatggtacttgtgttaagagatctgagaggaggccaggcgcagtggcttacgtctgtaatcccaacactttaggaggccgaggtgggtggatcgcctgaggtcaggagttcgagatcagcctggccaacatggtgaaacctcatctctactaaaaatacaaaaattagccggttgtggtggcccacgcctgtaatcccagctactcaggaggctgaggcaagagaatcaattgcttgaacccgggaggcggaggttgcagtgagccgagatcgtgccgtcgcactccagcctacgcaacagagcgagactctgtcaaaaagatctgagagtaggaaaggttgtttgatgttgaatttcaccctccccctcccaccactttaaaaaattccttagggcaaagttg

SEQ ID NO: 66180 - DNA, 2302 bp, Homo sapiens
atgatcatttccttgtcagcttcagatcctttcttttgtcaccttcttagtgaggccgtccctgccccttctctaacactgccccacgcacacaccaccctcccatgccctttccttgcttggttctccctcattttacaatagactgtatattatttcttttcatgcccgttacggtccccccacaacacactagagcgtcagcccttgacagtggctaaggtgttgtctgttctttgtctgttcactgctgtatccccagtacacacagcaggcccattataggtacttggtacatattttgggggaaaataccagtacctagtcagcatttagtaactgacggttgttgctggaattcattactatgtccaggcactgtgctctgtgcttataagccttgattattaatcctcgaaacagcctcacatggctggcatgaccatcctccaatcatggatgsggaagcttaagtgactcatccaaggttaagtggcttgcccaaggtcacacagtcacgaagtttcaaaaacaagcttcaaacccagtgctgctgagcccaaagcccctgctccttgtgttccaggcttgtagcagcctgagccgaagggcaggtcccatcttgtttctgtggctgctggagacacatgagcttggcggagtggctgcttctgctgcagcagggtctaactgctcactgcagagtaaggggccgtgggacagggacactgtagtggaataagacttaggaagttctcaataaagctcatgggcaaatgaccggggaggggtgaaaggggcatctgagttctacaaatagctgttcctgcccgcatcattcctccgagcagattccagatgctgaccaagatgactggtgctgtgtgcaggcaggctctgctgtctctcctggatggagccaccactgtggctgtgcgagggccggacccaaagagccagagccaggggacactgaagggaccaggcataagcctgagatatgagcctgacctgtcccagccactctctagctgtatgacctgggataattcatgcaggctctccaggcctccattttcatctctggaaaatcggaataatgacactatctgtaagtattttataggacttgcctgccagtcaaatgactctacaaaaccacagtgaaatctgaaaactgcagtgaagagataagcccctgggaagctgtgcttctatcactctggatactggttcattgccacattaacaaccccatctccaataaatatgggtgatagaagtgtaagtgtggtatgtggaagcaatagaagcaggagacgcaggccgccttctgaaagcccatctgtgagtttctgttggatgctctgcaagggccccaggctgagccatgacaccttcacagtcagaactcaagaacaggtgatcagtcctgcagctcagactggatcctctagcctgcaggaggcatggagaagggaaggcgcctgcctcagaggagggtctggaaacatcatgcttattccctccaccccaaagaccccatggcaacacactcgccctcccatcctgatgcagcctcctcccctgggtcttccttccttctctcctgccacccctggccctgtaagctgactcaacccatcctccatttcaagccatttcaaagaaatgagttcaccccactcaactcaggaacaatctcatcctgaatatgcacacaggagggagtactggaaccttcccccaaggttcattttccacctttgaagttcaccttaactaaaacaagaaacatcattactggctccagaagttctttgtgtttttacttagccatcctcacccctcttgaaaacgagctttgcacaccttctttttcatggtcttgctaaaggtctttgcatacctagaattgattttgccttcttccctcgccagctaagagaatgcccagcaagtctctgttgtctacagaaaaaaagtgtcccccacccacacacattcccagcccagcatctcagcctgcaggagctaactccattctacttctccaaccttgtttcacagccaaaggaatcgcttaggagctgtcttgctctctctaacctctggatactgtcatgctgtaccctctgtctgggtcacccttcccttccactgccacatgtccaaacctaaaatgctgcctcctccaggaagccttccccaatttctctagtgggcaggacctcccttctctgcacactacagcactctccctgtccctttcagaggacatgtatcacatttatacctcata

SEQ ID NO: 66181 - DNA, 1059 bp, Homo sapiens
gggagaacagggaagctgcagcctaggttttctcatcaaatagctacaaagccatttccacaaggaaaaaactcagggaggaaacgcacatttactgaactcctgctcttgccagcaccacgctgggctgtatgccgtgcttctccgttagcagccagccgagagccctggcaatgagcatgcactttggaggccagaatacctgggttcaaatcctagtcccaccacccctgactgtgtgcccctgactgtgtgcccgtgatgggtcacctcctcttccaattctcagagtccyctcccgggggggtatggtgaagtgtcagtgggggatttacatgaaacccacacagagcttgtgatgtcacagaagattcccagtggtggtgatattttttagtgcgctaagtactgtaaacatcttgtgcgtgttatctgttttgtaccttctacactgccaggaagagcagcatctggtaggaaaacagatcccaacacaggagtttgaacatggtaaatgatcatcaaatgttcagaccaatagatgcacccagtgctttaacacattgtctgcataatcatcagtatccccattttagagatgaggaaacctgaacagagaaggtaagtaacttgtctgctactttactattattcccattacaatttcactgaagaggaatctgagaatcagagacgttaggaagctggttcaaggccccacagctagaaagtggcagagccagtcttggaaacccagggcttcggagctcaggctcgagcactgtggggcatcccttctctctgctgttggggcaaagacgcaacccctcaagtcaacaaaacctaggtgtaaatcctggctctgtcactttccacctttgggatgactggcaagtgacaaactcttggcaattttggaaaacaaagtgatgaaaatgatacctacttgaacttcacagggtgattatgaggcttaactgagtttatacacgtacactgaaaacagtgtctggttcattctaagccctctatcaaaggttattatcatacaatgagcaa

SEQ ID NO: 66182 - DNA, 1059 bp, Homo sapiens
gggagaacagggaagctgcagcctaggttttctcatcaaatagctacaaagccatttccacaaggaaaaaactcagggaggaaacgcacatttactgaactcctgctcttgccagcaccacgctgggctgtatgccgtgcttctccgttagcagccagccgagagccctggcaatgagcatgcactttggaggccagaatacctgggttcaaatcctagtcccaccacccctgactgtgtgcccctgactgtgtgcccgtgatgggtcacctcctcttccaattctcagagtcctctcccgggggggtatggtgaagtgtcagtgggggatttacatgaaacccacacagagcttgtgatgtcacagaagattcccagtggtggtgatattttttagtgcgctaagtactgtaaacatcttgtgcgtgttatctgttttgtaccttctacactgccaggaagagcagcatctggtaggaaaacagatcccaacacaggagtttgaacatggtaaatgatcatcaaatgttcagaccaatagatgcacccagtgctttaacacattgtctgcataatcatcagtatccccattttagagatgaggaaacctgaacagagaaggtaagtaacttgtctgctactttactattattcccattacaatttcactgaagaggaatctgagaatcagagacgttaggaagctggttcaaggccccacagctagaaagtggcagagccagtcttggaaacccagggcttcggagctcaggctcgagcactgtggggcatcccttctctctgctgttggggcaaagacgcaacccctcaagtcaacaaaacctaggtgtaaatcctggctctgtcactttccacctttgggatgactggcaagtgacaaactcttggcaattttggaaaacaaagtgatgaaaatgatacctacttgaacttcacagggtgattatgaggcttaactgagtttatacacrtacactgaaaacagtgtctggttcattctaagccctctatcaaaggttattatcatacaatgagcaa

SEQ ID NO: 66183 - DNA, 585 bp, Homo sapiens
acttgtagctggcattgggggacagcgtgttcagggtgcctctgctcctatatatcgcggcctgcaccttcgctgtctgcatactcgtagacatcagaacctcaggctggctctgcagaacscttgtgccggccctgactggggctggctttggtgcacatgtgacagttcagtgtggtccccatggggcacctctgctcttctcgggctgcttgggccttcgcttgcccccaagtctacagagctcaacacctatcacctcttcccggcaaacgtatggctggcacgggcagccctgggccatggggcggcactgcactagcagcccgcaccttgcatcacccctgtaccctgagctgacttgtctgctaaaaaaaaaacttgccaacctgtctggtttattttagaagggtccggatgcaacaagcctgagagctgtgtctgggggaggagagagcacaaatggattcatcctcctttcaccactgcccaacaactgaagaccaccaactgcggaccacagactgaagagaaacaactgagggtgccaactgagggcactaactgaaggcaaccaatgagggc

SEQ ID NO: 66184 - DNA, 656 bp, Homo sapiens
aaacagttttcacctaagtttttttgtttctgtttttcatattatttcttttggtattgactgatatctttctaattgatgagatagtccctgagctggaaggaaggaataggatggggtcaaacagatgcaccttccaacagcgtggccttcagcaagcccattggcctctctgagcctaaatgcttatctataaaatgaagacaatctctctgtgttcttgtgattatgagtatttctgttactctcagagtcagtattattatttattttgagaaggagtctcgctctgtctctcaggctgtagtgcagtggtgtgagctccgctcactgcaacctccaccacccaggttcaagcaattcttctgcctcagcctcccgagtagctgggattacaggctcccgccaccatgcccagctaatttttgtatttttagtagagacaaggtttcagtatgttggctaggctggtcttgaacttctgacctcaagtgatctgccagcctcggcctcccaaagtgctgggattttacaggcatgagccmctgcgcctggccttattattattttttgagacagggtctcaccctgttgcccaggctggagtgcagtagcatgatcatggcttactgcagcctcgaccttctggactcaag

SEQ ID NO: 66185 - DNA, 674 bp, Homo sapiens
tccatcactgctctgggctgtgctcctgggccctcccaaggctcttatgacggtgagcaggttttgaacatcctgtcatgaaattcatctaatggggaaccggaacgatcacatcatttttagtgaggctctattctctggtcctaaaatctcaccccagagttagccaaccttacatgtctggataagacacccatattcttacagtatctctttttgacatttagaaacactcaaggaatggaaatttagtgccagactgtgtggaactcacctttaattctacagtcaggtagtaaaatctatgatcacctgcagattctcaacaaggaggctccagtggccttcactggccctcggaggggtgggggaggacataagatggggagaagagacaaccaggcaccttcgyagggagatgctagaacatcgtagcacccagagcttctttgagtggaaacagatacatttccaaggcgttaacagctcctgtgaaagctaacccagtaggatacagactcttggactaaataatattttgaaatctacaaaagcacctttctcttcccaagcagcttttctgaaacgtattctgcagcctttctctgttggcctctggcacacagatatgagaaatctgattcctgcacttttcctttctgtttgtgaaggaa

SEQ ID NO: 66186 - DNA, 698 bp, Homo sapiens
caaaacatttgtagagtgaccccagtgtgtaatctttctcttttaacccgagaaaagatcagccttagagtagtaagacacaaatgggctgaggtaacccgtaccttctttaaaacaaagggagagttaaaggtaccataatcgcggtttcacagtgacccgaaattaaaatgcttgctccaatgttcagagcattcggaaaacccttcctcgagtgtaggaacagacatgctggcaatttgcttttataattgcggtcttcgtcatctctaattttaaatagtaatgtgaagaggacagctggaaatttagctrgctgttctctcaattcccaacaagaacaaagaagtgccaaccctaaaggaacctctctaggcatggatatgggaaaattaacaatctatgctgaaaacatatgttgtacagaagcagcgtcttaataataataatgccagctcggtgtccagaccatgggaccatcctacaggtgaacccattttataatgagaaacttgtgctactaaattacctggatggaggccaaaacagatttgctgaatgccaagttttgcctggaggaaacggtgcaggaaacaaaacaaagaacagcattctactattgaaccgaaccttcagagaaggacagcaaaatgatcaaggagcctgaatagctgcaactgggaggcttcatagcttgg

SEQ ID NO: 66187 - DNA, 1015 bp, Homo sapiens
ggttgtgttccaggctgtggccacacagtagtttgtgccctcatggttcttaggttctagtgaaggaagatgaataataatatgttatagaagcatagagaaaaataaagagggataaggaagacagggtatgtggcagaggggcagggattgctatttgatagaggacagtgatggaaaacctctacaacgaggcaacgcctgagcagaaagacctgaagaaggggaaggagtgagttgagcatctggggaggaagaggcctccaagctgatggactagaaaatggctatttggtattgtaggggagatacacattcatgagctgaggctatgcacaggcacatattctccaargtaaaaaaattagcaaactccatatagttcatttaatattcttatccagatattctttattttattgtcatcataaatgtcagaactgacaacaactcttcatgctattattcaagagataactctttatgctattattcaattgtcaatggtagaacaattgacaattgcagccaagatcccagctcccatggcctgctaatcgtgactatgcaaatttgatcatctgagcaggtagaaaaaacctgcctgcccatggatgggtatgacaatcaactaagcatagagggcagatggggactggaaggacaggacaccaagcaattatagtttaaggctggattgggatggaagaaaagtctaaccagagattgataactctacccctgagaacttgttttgaggatgaattgaataataacaacttagaaacaattgcaaaataaagaaaatgagttggaatgccttctatgtcagatgtttaatgttgttgcagtcagctgcagtggagctgcagactcatggcgtaccagcatggtagagtcagcatacgcaagaggagggtaccctcgtggatgaagaaggctgttggtgtcacgtgcacctgagtaaaacactccaaaacgtgaccacaacaagcttactcaacctctcttaaca

SEQ ID NO: 66188 - DNA, 679 bp, Homo sapiens
ctcagtaacaaggttaaaaaatttttttattgagctcatattagttgccacatatccgagatacttggggtaaatgtatttggtgtaaacgaattacttttccctggagacaagaaagccaagtgttaagagaacagcagmcttctttttgggggaaaggattattcaagggacagaagagagggaacatccaagacaaacaagtatgaccttccactccatcctgaagaaacttgtctctcagagctttccaagttgtggagatgatgattccatttccattcaaaatcatcctctgtcatttcaacttaacgggaaaaaccaatggcattttgaagacaagatgtctgggtgcatgtttatttttagaaggagacagaccacagcacattcattctgcaagaaagaagcaagtcctggctctgcatactgaatcagtgagcaatacctcaaaagtggaaagattaaactctccaaagaatgggggcagtggcctcagcttatttattttctcccaggaaacagcacagcactgggtgtgccagaactgcagaagcagcaccataataaacaaactgtcttctcaagccttctgactctgtttgggtacccatgaatgaatagtatctatttcaattcctaaaatgtatgatgcatgatgacttgtttgtatttgcct

SEQ ID NO: 66189 - DNA, 728 bp, Homo sapiens
tctcaaaaaaaaaagtttttggaaaggctgattaaaataagtattgtttataagataggattccgctaatgtttgtggtattttaagtgtgtttaacggatttgatttaccatgatagttttagtattctatctgacacacagtgtgtatgtgaaatctttggacccttgtccatatcttttgccttccctttgctagctctaggtttgttttcaggatggagatattctcatcttcactgtaggtgtttgtcacacacctaaacatcacataggaattcctctgtccccctctgtatatccaccagtaagaagagtcaaacattttctcataaaacaaagtgcttgctgcacaatcagggaagctcctgatgaaacctttatattgaaacatccccactctaaggacctggtggctctgtcactagaaggaatcgctagaaaccccatgggygagtgagtgagtagatgagttatgaaattgctggcctttatgatacaattgaggcattggaaaatctcaggcaagtccaaaccaattcaggttatttgtcttcagatatttgggaaggtcaccagaatggctttagggttcgtaccctctagcagttctgccagggctggagtaacatatggttccttgggtccattttccaagtgctgctgggcctgggaaggggcaaggtatgaaggtacctgtaggagtggggacatggtatgtggcaggat

SEQ ID NO: 66190 - DNA, 737 bp, Homo sapiens
accacaattctaacttctttgagaagaattggcagaagggacctttgcactgcagatttcccagtatgaactccaagttacaccaaaaatttccagtcccatttgtaacaaatcgtgtagccaatgtgggacatgtctaattttggatgacctaaaactgctagatggttaatacttccgtgctcaacctactatcctaaaacagggattcttttatttcgaaaggttatttttaaattagtctttggaactgtgagaattgcagtttttgagtttgtagtttctaagtgactgattatgggttttttttagatacttttcctgaaataagatgtaactaggggacagctgggacctggtcataatctcaccttctaaccgcaacaggaagggctgaccatattaatatcttccttgtttaataacacattgaaactttaagcctctttggtatctttattattgtgtttattataataaaccttaaatatagagttaacagatgtcctatgatcacagctttaaactattgccctggcatcctgtttagtactcattatgaatttactatttttaaataractattataatttatagttacattaaaataaaactggatgggatagatagaccctcactttgtttttccagctagtctcatcttttggtgtgtaagctgtatgtgcagtaaacacagttctcactttaacctgtggccaaatgggaaacaggatcc

SEQ ID NO: 66191 - DNA, 737 bp, Homo sapiens
accacaattctaacttctttgagaagaattggcagaagggacctttgcactgcagatttcccagtatgaactccaagttacaccaaaaatttccagtcccatttgtaacaaatcgtgtagccaatgtgggacatgtctaattttggatgacctaaaactgctagatggttaatacttccgtgctcaacctactatcctaaaacagggattcttttatttcgaaaggttatttttaaattagtctttggaactgtgagaattgcagtttttgagtttgtagtttctaagtgactgattatgggttttttttagatacttttcctgaaataagatgtaactaggggacagctgggacctggtcataatctcaccttctaaccgcaacaggaagggctgaccatattaatatcttccttgtttaataacacattgaaactttaagcctctttggtatctttattattgtgtttattataataaaccttaaatatagagttaacagatgtcctatgatcacagctttaaactattgccctggcatcctgtttagtactcattatgaatttactatttttaaatagactattataatttatagttacattaaaataaaactggatgggwtagatagaccctcactttgtttttccagctagtctcatcttttggtgtgtaagctgtatgtgcagtaaacacagttctcactttaacctgtggccaaatgggaaacaggatcc

SEQ ID NO: 66192 - DNA, 1281 bp, Homo sapiens
agaaagatggtgactagtatacatttgaattgtttttgagattactacttgataccgagcctttacaggtttgggggtatcaaaatgaatgataaggtactcatgggggctagaagtttggaagggtctgccagagatgggctcagaacggctcactctattggtgatgcctaggaagaattgacccagaaagtgaggtctgagctatgtttttagagrgacctttgccaaatggagaatagtgatccaggcttaaatgggaggatcctataccttacaacaatgaaccctgggaaaggtacatctgaaaaagagaccagtaaattgttatctggcctctatttcttgccgtatctcctttatcaaagagaataataagtggatggaaaaatactgatataaggaataaaacctacaatcgttggaaagattgcacttgattcttagtctcttagacctgcaagatgataagagagcatggtcttccattattgagatctcctgttggatccttctgcaggcaaatctgcatgtctggagagatgatgaggttaatcagaaagggaaatagaaaaaaggagaaaacatggaggaaatgatatcttctgactaggctcaggagaacataagctccaatggagtgctctgttttgggggatagtgttgtcagcgtgctccagctatttcatttctattatgttgtgtgaaactcacatattactgataaaaagactgagactcagtgagtttgagtgatttgcccaaggtcacatgtcagagagcttgcgattgtaggtaagttggttcacagctggggcttcagtcttgttttcattatgcctttaagtcaattatcagtacaaggtgtgaaatgaagctatatgttagcagttcttctggcaatagataatagctgtttctcatcatcaaatccaataaatgtcctgcactaaaatacagagttagacttaataattgcttgaaaagagacttgttcttagttaactattttgctaaagaataaaactcttctcagctctccattttaatgagatttctagatttttttaaatagaaaatttattgatctttccctcattttacaaaatgtgatataaattcattactaaatctgccttaaattttatttaaaataaacatttttttctactttatggactttttgattttataattgtatttatagctaaattaataattcctcatgtctataattcagctaatttgtgtacctttctgtgattcattatttagttgaca

SEQ ID NO: 66193 - DNA, 2114 bp, Homo sapiens
tagcccacagcccaccagcttaaaatgtctagatacagttttatctacctttttatcatcacatgaattctcttttcctttaaaagacttttatcactactactccctaaataataaaaaagtgctatttcctttctcactacaaaaatattttttaagccaaaaatgtgtgtgctcttaaggttaatttgggagaactacagaaatctctttattaaggaacatggctttcggaattttcccaagatatcagttttaattctattctcttatttttcccatattttagtgtacttcttttaattggcaaataaaattgtatacatttatcatgtttagttttttgaatatataagtttcccaaattctgtcactttaccttcaaatatagctcttgaaactcctctccctcattacctctcaaaattgtctctttgtattaacagcctcagctctggttccttaatttctcactcaaacattaattttctgactggttctctaggaagttagaaacttattctcttttaaattaccaatatctagcacagcctggctcatagtaagcattcaacaaatgttggttaactaaaatttgggactagccagaagccaaactggatcagaaaatatctatttctatatatagatctcaggatccaaaagcctaattctcacaaaaaaaggccaactcattgttcaaatgaagcaacaaagaagatgcccataccattattagttctgactgcaactgacacctggggaccttgtttcaagagatttgaaaatgtacatttatctatgaaaaaaatcattaaagtcattgggggaaaaacttgataattacaatgaaaactgaaatttaaagttgattttatagagatgtgtgctgttttagcatggatataaatgtaaaggctgtgcgactttgttgtttgagcccagctgttcatttggggtcaaatgtctctagggtcataaggaaggattatctcttagtaccctttctgtyttcagattcgtaatcttagggtttaagtgctgctttcttcatgcatataattaagctcacttactagacttcaaattaattgagatggaaagagtaactctaagagatttttcatgtgttaggtccttcagggattaaaagggtaactatctcaaattcggatgctgttaaagttactgggacattggtctttgaatcaaaggaggaagttagaacattacttatttaatggaaattatgtcatttccaaaaattcctcagatctttgctgagagcagtttaaaatgtttataagatctacatttttcaaggttactttgcctataactttacaatgtgaaattagctaaaagatgaatactcactctaagttcaggaaccttttggtaaatattttgaaataccaccatatgttttaagaatttttggagagtagggattaagaattactcaacttcaaattgctggggttactgtagtacttgatatatacctgggatttacaaatatatttcaagaataaaggaacaagtgaatgaagaaatgaaatcaaaccattttggtaggtgatatccagggctactgcactgaattttgagcaggcttaatggcatagtaaggcataaatccccagggaactacattttataaccattgttgtagcaagatattttgtttatggcaacggagtagacccctgagtgctgacatttccttctcctttccgttcccagattgagatgatatagaaacacagtgaacccatacctaatcctgggcttctctgacctggtgatttctgctgtgtggctgctgtgaccactaacttccaaccatatccacaaggaacaaaggagaccctgaatagctgagccctctcatgccgacatggattcttgatcacaaatatgcctttcgcactgcttgctgctgatttgataataaataataagaaatattaccttaaccccatctaaattgttattcttatctgttctcaaactttgtaaggtggctgaacttgcccatcaagacatcaggcagaacaaagttaaatgtatgtaaaatacgacttgaatctaaccaacttgaaagttttgtc

SEQ ID NO: 66194 - DNA, 2114 bp, Homo sapiens
tagcccacagcccaccagcttaaaatgtctagatacagttttatctacctttttatcatcacatgaattctcttttcctttaaaagacttttatcactactactccctaaataataaaaaagtgctatttcctttctcactacaaaaatattttttaagccaaaaatgtgtgtgctcttaaggttaatttgggagaactacagaaatctctttattaaggaacatggctttcggaattttcccaagatatcagttttaattctattctcttatttttcccatattttagtgtacttcttttaattggcaaataaaattgtatacatttatcatgtttagttttttgaatatataagtttcccaaattctgtcactttaccttcaaatatagctcttgaaactcctctccctcattacctctcaaaattgtctctttgtattaacagcctcagctctggttccttaatttctcactcaaacattaattttctgactggttctctaggaagttagaaacttattctcttttaaattaccaatatctagcacagcctggctcatagtaagcattcaacaaatgttggttaactaaaatttgggactagccagaagccaaactggatcagaaaatatctatttctatatatagatctcaggatccaaaagcctaattctcacaaaaaaaggccaactcattgttcaaatgaagcaacaaagaagatgcccataccattattagttctgactgcaactgacacctggggaccttgtttcaagagatttgaaaatgtacatttatctatgaaaaaaatcattaaagtcattgggggaaaaacttgataattacaatgaaaactgaaatttaaagttgattttatagagatgtgtgctgttttagcatggatataaatgtaaaggctgtgcgactttgttgtttgagcccagctgttcatttggggtcaaatgtctctagggtcataaggaaggattatctcttagtaccctttctgttttcagattcgtaatcttagggtttaagtgctgctttcttcatgcatataattaagctcacttactagacttcaaattaattgagatggaaagagtaactctaagagatttttcatgtgttaggtccttcagggattaaaagggtaactatctcaaattcggatgctgttaaagttactgggacattggtctttgaatcaaaggaggaagttagaacattacttayttaatggaaattatgtcatttccaaaaattcctcagatctttgctgagagcagtttaaaatgtttataagatctacatttttcaaggttactttgcctataactttacaatgtgaaattagctaaaagatgaatactcactctaagttcaggaaccttttggtaaatattttgaaataccaccatatgttttaagaatttttggagagtagggattaagaattactcaacttcaaattgctggggttactgtagtacttgatatatacctgggatttacaaatatatttcaagaataaaggaacaagtgaatgaagaaatgaaatcaaaccattttggtaggtgatatccagggctactgcactgaattttgagcaggcttaatggcatagtaaggcataaatccccagggaactacattttataaccattgttgtagcaagatattttgtttatggcaacggagtagacccctgagtgctgacatttccttctcctttccgttcccagattgagatgatatagaaacacagtgaacccatacctaatcctgggcttctctgacctggtgatttctgctgtgtggctgctgtgaccactaacttccaaccatatccacaaggaacaaaggagaccctgaatagctgagccctctcatgccgacatggattcttgatcacaaatatgcctttcgcactgcttgctgctgatttgataataaataataagaaatattaccttaaccccatctaaattgttattcttatctgttctcaaactttgtaaggtggctgaacttgcccatcaagacatcaggcagaacaaagttaaatgtatgtaaaatacgacttgaatctaaccaacttgaaagttttgtc

SEQ ID NO: 66195 - DNA, 726 bp, Homo sapiens
tgcataagtagaccttccttcctctatgctagtcaggtggaggtttggacttctagaacacactatggcaattccactcctaatgagacagacctcaagcaagcctcagatatttcctatgctgtcatcaccagagcaatgcctaggttgtcctaagataatatatgcctcttttgttttttaacattgcttatgaattttaagtaatttctgattgtccgtatttttcttcatgattcacagtacagaacttaacttacagtaatcatcatagtgtttaatgattaaattacaatatactaaagttaaatattaagctcccgtctttcaatgcaatagcataggaaataatttggtatcttgtaaaaatgtaaatgactcataaattttcctttgttagatmaaatctaagaagtcgggctaaaattacattcgtaaaagagcgtgttattttaactataaatcaaataactgggtgagtttcacctctcacctgctatttggttattaaagggttcagatatactggctcgctcatgaagtggccagttccataaagtcataggatgacaacttaggatttcatggagaaactagggaatttaggtttgggttctataacccccacttatttcgctctctgccctttttaatataaactgctcatattgaattttgtcactatctgtgagtttcttaattcttccattcacatgactatatatt

SEQ ID NO: 66196 - DNA, 1018 bp, Homo sapiens
actcaaaatagtataattagtaagtgacatagctgggattaagcatcggttggctctaatgctaatcatgactgcattgtgctgactctggactgagttagacacatactgtttatcaaagttttttaggttattggcttttgggtataagaacataattcctttgcttgaacctgggagacggagcttgcactgagccaagatcgcaccagtgcactccagcctgggcaacagagcaagaccccatcttgaaaaacaaacaaacaaaaagaacataattcttcacataattctttattatgcaggatggccccatccatacattgcaagatatttagaatccctggactcctctttatatgaatcttattcacttaagatacaaaattgccctacatatttccaaataacttcctaggtggcagtattaggcccagtggagaaatacaagtagtagatgagaacaagagagcacattttagatgtgaatgaagttcaacttaagagacagaaatttgcgcggcaaagtttaacagactcgaatatcctggccttggtcaaaatgtacatcatagctgggcacagtggtgcacacctgtaattccagctactgggaagggtgaggcgggaagataccttgagcccaggtgtttgagaccagcctggagaacacagtgagagtctgtctcaaaaaaagaaagaaaaagaggatatcacaagatgtagtagaagacaatactggaaagactggaacaaggtggtggaaggcttgcattgacacatttttcagacattctttaacagatgacaggaagcctttgaaggtagcacaaagctgcattaagttcaggttttagagtcatgcagagtttgatctaattccagttccctcacatctatccattcattatttaatccattcattcaatctatatttttgatracctactgtgcgccaggcaccttattaggtgctgaggactcaatgaatgacaatcacagttcctgccctcatgaa

SEQ ID NO: 66197 - DNA, 1018 bp, Homo sapiens
actcaaaatagtataattagtaagtgacatagctgggattaagcatcggttggctctaatgctaatcatgactgcattgtgctgactctggactgagttagacacatactgtttatcaaagttttttaggttattggcttttgggtataagaacataattcctttgcttgaacctgggagacggagcttgcactgagccaagatcgcaccagtgcactccagcctgggcaacagagcaagaccccatcttgaaaaacaaacaaacaaaaagaacataattcttcacataattctttattatgcaggatggccccatccatacattgcaagatatttagaatccctggactcctctttatatgaatcttattcacttaagatacaaaattgccctacatatttccaaataacttcctaggtggcagtattaggcccagtggagaaatacaagtagtagatgagaacaagagagcacattttagatgtgaatgaagttcaacttaagagacagaaatttgcgcggcaaagtttaacagactcgaatatcctggccttggtcaaaatgtacatcatagctgggcacagtggtgcacacctgtaattccagctactgggaagggtgaggcgggaagataccttgagcccaggtgtttgagaccagcctggagaacacagtgagagtctgtctcaaaaaaagaaagaaaaagaggatatcacaagatgtagtagaagacaatactggaaagactggaacaaggtggtggaaggcttgcattgacacatttttcagacattctttaacagatgacaggaagcctttgaaggtagcacaaagctgcattaagttcaggttttagagtcatgcagagtttgatctaattccagttccctcacatctatccattcattatttaatccattcattcaatctatatttttgataacctactgtgcgccaggcaccttattaggtgctgargactcaatgaatgacaatcacagttcctgccctcatgaa

SEQ ID NO: 66198 - DNA, 1153 bp, Homo sapiens
gatttttctaaaacttgtgaaaatctaaggattatgtcttaattaatatcttgttcttccattaaattgattatttaattaagtatggaggggtcaagcatcatgggcaccattagatggcagcattacacaaaactgttgtttgcattttgtacaaaatcatgttttaagttgccaaaaaagttagtttacaatctaatgtayatactctacagatttctttaatagtaagtttttaaatttataaaaaggcaagttggagattctggtacaagagaatgagacaaaacttagagagaaggaaaatagaaaagatgagaaagagacataagaacatgtaaaccaatgacaggtaaaagattatctcaggaagacaaataggacttctgtctatcatgctgactccattactatctgatggcatacaggatattgcaaaattctgtaactgttttgatcaaaattattttgttaaagaagtactaaaagtaaagtcttcactctgcgatgttctctcttaatgtcagaataaaaagtaaccacaggacaggtgcagaggccacgcctgtaatcccagcactttgggaggccgaggcgggtggattatctgaggtcaggagtttgagaccagcctgaccaacatggtgaaaccctgtctctactaaaaatacaaaattagccaggcgtggtggcacatgactataatcccagctactcgggaggctgaggcaagagaatcgcttgaagcctggaggccgaggttgcggtgagccaagatcacgccattgcactccagcctgggcaacaagaacaaaattccatctcagaaaaaaaaaaaaaaagtagctacattctatcaatcaataaatgagtagagattgacaattttgagttcctaggagttgggtatttacttaagtataattttatatgatagtgatttagaatgaaaaaatacttttttgaagaaaagacttcagtttaataaatctcttttagtaataacccaattcctttttggagacaggtgttatcttacacatttgaatatagtatatggaatgtaatttgctctaaagatttgacttgcctagtagacatcctatgtgataggtgttaacaggaagaaaaatgcgagagtaactccaaacat

SEQ ID NO: 66199 - DNA, 2065 bp, Homo sapiens
ctaaatcactggttagatctctggtgatttctcacttgagagatgtgaagaaaatggcacattcagggtaacagcaaagccgtagcaacttgtcaaaatagtatctaacatacaggcttaaaattattcttaaaatgatcttgatagagctactggaaatattcccaccaggtattttattcagcagtgacccttgaagaagcaagtcagtgaatgtggaagcatcgggattcatctgatagactttgtctgggatcgtcaaccactttggtcatagttaacatagtttacataatgaagggttcttttacggctcaagatagagatgagaactaagtgacacaaaattatgagtcttttcttaaattgactaggtaattacattgactattctctcttttacttttgaatagctgcactgcagtcaaaccatctatgacattattattcaataaattagacagtactgagtgttaggctaatttctggcacaaattaaaatactggtaacagatcctgatgctgattattccctcttataattagagtttacatgatagaaataaaaatttgatttttttgtcctttgtaagggagttataccttcttttgttttattttagagacagggtctcactttgtcacccaggctggagtgcagtggtaggatctcagctcactgtagccttgacttcctaggttcaagagatgctcccacctcagccatccaagtagctgaaactacaggcatgcaccaccacacctggctactttttgtattttttttttttttttggtggagacagggtttcactatgttgccaaggttaatctcaaactcctgggctgaagtgattcacctgcctcagcctcccaaagtgttgagattacaagcataagccactgtacccagcctataccttaattgagagtaccttactttcagttaaggtataggctgggtacggtggcttacgcttataatcttctttcattttgaagatgcataaattgagcgtctcttctctatttgtttagctagatgcattgttgtttgcaatttaatttgcatgtgttcatggggacattctatgtgttaggtagtatgggagtttgagattaatgaaactcacagtccttagaggtttttttttttttttttttttgagactgaatcttgctttgttgcccagactggagtgcagtggcacaatctccactcactgccacctccgcctcccgggttcaagcaattctcctgcctctccttctcccaagtagccaagtagctaggattacaggtgtgtgccaccacacccagctaatttttgtatttttagtagatactgggtttcaccatgttggccagrctggtctcgaactcctgacctcatgatccacctgccttggcctcccaaagtgctggggttacaggtgtgggagttgaaggaagaaggaagcggataagtgggaggaaaactaaagaaaacagagcagaataaaaaaatatatataatgtcagtttttattctgctaaaatataatctagattatgtagtttgtgtttccatattcaacagcagtgtttctgaatcatagaagtctcatgtttagaagagtaaaacattttattaagatttggattagatgataactaactttgctaccagctgtgtgattccagtgtcagatcttaacaaaggtagagagtttttcttacttttcatctgataattataaaattaaaataaatatcaaaatgtttccagatatgtcagaaagctgaagggtttcatgagcctagatggtttctgttatccgcaaaaatagatttttaattaatccatggcccaagatgttggtttagttgtgttctccttcattttagttcagaatctggagaggatacaaaattcaatagatttttctttttccccccccagcataggaactacagagtaaggatagctctgcaggtatatgtaaaagctaattctatgaggagccaaagacagggtttcagaaagtccagtttaagacacgagagagagatgaacgatgtgcc

SEQ ID NO: 66200 - DNA, 2065 bp, Homo sapiens
ctaaatcactggttagatctctggtgatttctcacttgagagatgtgaagaaaatggcacattcagggtaacagcaaagccgtagcaacttgtcaaaatagtatctaacatacaggcttaaaattattcttaaaatgatcttgatagagctactggaaatattcccaccaggtattttattcagcagtgacccttgaagaagcaagtcagtgaatgtggaagcatcgggattcatctgatagactttgtctgggatcgtcaaccactttggtcatagttaacatagtttacataatgaagggttcttttacggctcaagatagagatgagaactaagtgacacaaaattatgagtcttttcttaaattgactaggtaattacattgactattctctcttttacttttgaatagctgcactgcagtcaaaccatctatgacattattattcaataaattagacagtactgagtgttaggctaatttctggcacaaattaaaatactggtaacagatcctgatgctgattattccctcttataattagagtttacatgatagaaataaaaatttgatttttttgtcctttgtaagggagttataccttcttttgttttattttagagacagggtctcactttgtcacccaggctggagtgcagtggtaggatctcagctcactgtagccttgacttcctaggttcaagagatgctcccacctcagccatccaagtagctgaaactacaggcatgcaccaccacacctggctactttttgtattttttttttttttttggtggagacagggtttcactatgttgccaaggttaatctcaaactcctgggctgaagtgattcacctgcctcagcctcccaaagtgttgagattacaagcataagccactgtacccagcctataccttaattgagagtaccttactttcagttaaggtataggctgggtacggtggcttacgcttataatcttctttcattttgaagatgcataaattgagcgtctcttctctatttgtttagctagatgcattgttgtttgcaatttaatttgcatgtgttcatggggacattctatgtgttaggtagtatgggagtttgagattaatgaaactcacagtccttagaggtttttttttttttttttttttgagactgaatcttgctttgttgcccagactggagtgcagtggcacaatctccactcactgccacctccgcctcccgggttcaagcaattctcctgcctctccttctcccaagtagccaagtagctaggattacaggtgtgtgccaccacacccagctaatttttgtatttttagtagatactgggtttcaccatgttggccagactggtctcgaactcctgacctcatgatccacctgccttggcctcccaaagtgctggggttacaggtgtgggagttgaaggaagaaggaagcggataagtgggaggaaaactaaagaaaacagagcagaataaaaaaatatatataatgtcagtttttattctgctaaaatataatctagattatgtagtttgtgtttccatattcaacagcagtgtttctgaatcatagaagtctcatgtttagaagagtaaaacattttattaagatttggattagatgataactaactttgctaccagctgtgtgattccagtgtcagatcttaacaaaggtagagagtttttcttacttttcatctgataattataaaattaaaataaatatcaaaatgtttccagatatgtcagaaagctgaagggtttcatgagcctagatggtttctgttatccgcaaaaatagatttttaattaatccatggcccaagatgttggtttagttgtgttctccttcattttagttcagaatctggagaggatacaaaattcaatagatttttctttttccccycccagcataggaactacagagtaaggatagctctgcaggtatatgtaaaagctaattctatgaggagccaaagacagggtttcagaaagtccagtttaagacacgagagagagatgaacgatgtgcc

SEQ ID NO: 66201 - DNA, 2065 bp, Homo sapiens
ctaaatcactggttagatctctggtgatttctcacttgagagatgtgaagaaaatggcacattcagggtaacagcaaagccgtagcaacttgtcaaaatagtatctaacatacaggcttaaaattattcttaaaatgatcttgatagagctactggaaatattcccaccaggtattttattcagcagtgacccttgaagaagcaagtcagtgaatgtggaagcatcgggattcatctgatagactttgtctgggatcgtcaaccactttggtcatagttaacatagtttacataatgaagggttcttttacggctcaagatagagatgagaactaagtgacacaaaattatgagtcttttcttaaattgactaggtaattacattgactattctctcttttacttttgaatagctgcactgcagtcaaaccatctatgacattattattcaataaattagacagtactgagtgttaggctaatttctggcacaaattaaaatactggtaacagatcctgatgctgattattccctcttataattagagtttacatgatagaaataaaaatttgatttttttgtcctttgtaagggagttataccttcttttgttttattttagagacagggtctcactttgtcacccaggctggagtgcagtggtaggatctcagctcactgtagccttgacttcctaggttcaagagatgctcccacctcagccatccaagtagctgaaactacaggcatgcaccaccacacctggctactttttgtattttttttttttttttggtggagacagggtttcactatgttgccaaggttaatctcaaactcctgggctgaagtgattcacctgcctcagcctcccaaagtgttgagattacaagcataagccactgtacccagcctataccttaattgagagtaccttactttcagttaaggtataggctgggtacggtggcttacgcttataatcttctttcattttgaagatgcataaattgagcgtctcttctctatttgtttagctagatgcattgttgtttgcaatttaatttgcatgtgttcatggggacattctatgtgttaggtagtatgggagtttgagattaatgaaactcacagtccttagaggtttttttttttttttttttttgagactgaatcttgctttgttgcccagactggagtgcagtggcacaatctccactcactgccacctccgcctcccgggttcaagcaattctcctgcctctccttctcccaagtagccaagtagctaggattacaggtgtgtgccaccacacccagctaatttttgtatttttagtagatactgggtttcaccatgttggccagactggtctcgaactcctgacctcatgatccacctgccttggcctcccaaagtgctggggttacaggtgtgggagttgaaggaagaaggaagcggataagtgggaggaaaactaaagaaaacagagcagaataaaaaaatatatataatgtcagtttttattctgctaaaatataatctagattatgtagtttgtgtttccatattcaacagcagtgtttctgaatcatagaagtctcatgtttagaagagtaaaacattttattaagatttggattagatgataactaactttgctaccagctgtgtgattccagtgtcagatcttaacaaaggtagagagtttttcttacttttcatctgataattataaaattaaaataaatatcaaaatgtttccagatatgtcagaaagctgaagggtttcatgagcctagatggtttctgttatccgcaaaaatagatttttaattaatccatggcccaagatgttggtttagttgtgttctccttcattttagttcagaatctggagaggatacaaaattcaatagatttttctttttccccccccagcataggaactacagagtaaggatagctctgcaggtatatgtaaaagctaattctatgaggagccaaagacagggtttcagaaagtccagtttaagacacgagagagagatgaaygatgtgcc

SEQ ID NO: 66202 - DNA, 675 bp, Homo sapiens
agtttcagctttctatatatgtgtgtgtttaactttataagcaacagtacaattgaaattttgccagtagagtaatgagagttcagttgcttcacatcctcccagcatttgctattgtcagtttcttttagctttacccttttcagtagcaggataatagtatttcaytggggttttaatttgaatttctctaatgcgtaatgatgttgaatgtattttcatatgcttatttgctgttcatttatcttttctggtgaagtgttcagaccttctgcctcttataaagtgcttttttaaactgttgacttttcagagttgtttgtatattttagatgcaaggcctttatcggttatgtgttatgcaattatttcctccaagtctgtggcttgtcttttcattttcttaacaatatttcaaactattatatttttgaatgttaacagcactagtattacaattagtttttaatgttctatgtttttaaaagaagaatcaactaatgagaatagtaaaaccttttctttgatggacaattttaaaatgatactcatgaatattataatacgaaataggatttttttatcatgccacagctttatcttcaatctgaaccttagtcatgacaataaatgctagactcacagatattctctgtcatatatttaattttgaag

SEQ ID NO: 66203 - DNA, 675 bp, Homo sapiens
agtttcagctttctatatatgtgtgtgtttaactttataagcaacagtacaattgaaattttgccagtagagtaatgagagttcagttgcttcacatcctcccagcatttgctattgtcagtttcttttagctttacccttttcagtagcaggataatagtatttcattggggttttaatttgaatttctctaatgcgtaatgatgttgaatgtattttcatatgcttatttgctgttcatttatcttttctggtgaagtgttcagaccttctgcctcttataaagtgcttttttaaactgttgacttttcagagttgtttgtatattttagatgcaaggcctttatckgttatgtgttatgcaattatttcctccaagtctgtggcttgtcttttcattttcttaacaatatttcaaactattatatttttgaatgttaacagcactagtattacaattagtttttaatgttctatgtttttaaaagaagaatcaactaatgagaatagtaaaaccttttctttgatggacaattttaaaatgatactcatgaatattataatacgaaataggatttttttatcatgccacagctttatcttcaatctgaaccttagtcatgacaataaatgctagactcacagatattctctgtcatatatttaattttgaag

SEQ ID NO: 66204 - DNA, 675 bp, Homo sapiens
agtttcagctttctatatatgtgtgtgtttaactttataagcaacagtacaattgaaattttgccagtagagtaatgagagttcagttgcttcacatcctcccagcatttgctattgtcagtttcttttagctttacccttttcagtagcaggataatagtatttcattggggttttaatttgaatttctctaatgcgtaatgatgttgaatgtattttcatatgcttatttgctgttcatttatcttttctggtgaagtgttcagaccttctgcctcttataaagtgcttttttaaactgttgacttttcagagttgtttgtatattttagatgcaaggcctttatcggttatgtgttatgcaattatttcctccaagtctgtggcttgtcttttcattttcttaacaatatttcaaactattatatttttgaatgttaacagcactagtattacaattagtttttaatgttctatgtttttaaaagaagaatcaactaatgagaatartaaaaccttttctttgatggacaattttaaaatgatactcatgaatattataatacgaaataggatttttttatcatgccacagctttatcttcaatctgaaccttagtcatgacaataaatgctagactcacagatattctctgtcatatatttaattttgaag

SEQ ID NO: 66205 - DNA, 769 bp, Homo sapiens
tgagattctggttttggaacaaggtgaggacaggcaagatggtggtcttatttaattattcaatagagctgacattacaagacttgatcacctggaaagcaaaaagatgcatctgaaggcaggtcagctttttctttgtcttttctcaggattaatctaaaacaattatgatccacaacagatacagaaagttcttttctaaggccagtggtagagaaagcaacttatttgaggggctttggtcatcgtgttggctcctgaatcccttcagggcatttatattgctcagaaaatgtcacaagctatgaaattcagctccaacattctcccaagtcatcctagcctagaagcagaaatttcatggtattttcctgaggtgatgctagagattcacagcaatctgggagagcatgaaggacaggaatgtggtgagtatcctctggaggaaatcccagagcctggtatcactcttcacagaactttttcctagaagaggagacatggggtccaaatgtgactcaaaggcagtgatccacataggggccacaggsagtgaaatgccagtcctggcttttttcccctcaaaatccgtctggttatattctatatccagttgaggcattctgggctgcccagggttttagaggctaaccttatggcagttctagggtgtgtccagttaagaagtgtccttagaagaccgatttgaccttgcacctaagagacatgaatatatattttcaagattggtccgatgtggctgtgcagg

SEQ ID NO: 66206 - DNA, 628 bp, Homo sapiens
catagggagcaaaaattcaattagcctttttcttcctcaagattctgggtacaggctgggaaagaagccaaatgatgaagctttaagaatgagtctgtcttgcctcccccaaactgcacagctttcctccttggcttgcaggccttggtacttatcagcagttttcctagtttgattagatttaatgatagaatcttttctttcatgaaaccttgggtggacactgagaatatcatcacaacatctgagatctaggcagtctcttctgcggttcttaattcaacccaaccgtggtatctttaagtggcccttaaaatcaccaytgccaggtaagtgtcctttctcagcaatgctgttgctgtctccagaatctggaagcagcggtaacaggctggagccaatggagaggggacgctaccttggtggcctgacgatctgagagacatggccatctgccagcctaagaaagtggcccacatgaaagccaccgcttgagctgaggcattagctatacaacggtttgtgaaatataagtatctgacctggaagagataacatattttctgggaagagtaacaaaactggttcagcaatccctactcaagagctggccttccggaagtgaggt

SEQ ID NO: 66207 - DNA, 1281 bp, Homo sapiens
gtgacagaatgttatctggaggtcaactttaggatctgtgaaaaacaagaaaaagaaaactggtttgcagtgcatgttagcatgaatacatgattccttccctccttctgtcctttctgcctctcccttctttcctacctcctagtgtcacatggatcaaaccactgaatgtaacttgtagttcctgtcgaatcaatcagtgaggtcacagaaatcataggcatgttttgtcatttgagtgaatgagccttggtcccacattgaaaacaaagtactagtgcatcttaccagtgtatgtgggtacaaagacaccactgattttggcatccctggttgaatgtcaagggatacggataggaagtataatgtggttacttctatagccagttcttgcttaattctccaggctttacccgtttgttgcaaccccaaagccctgcaaatacattacaaactataaaatatcaatggattaaaggcaackgggttcaacctacaagaatatgacaacagggtaataaattgtttgtgtgcattttattgtgaaaaaaatacataatacttagaaatgttttaaaagaaaactactacctagatttctttcacccaagtacaattgtctttgttttttatgtttctggacagctatggctgtatgtctaaattttcaaattgttgtaatcataacgcatatgtacttctgaatagaagtagattggaagcattcttgaacttgacattctcaatttcaattatttgcctaggacttcaaagatcacagtggtttgtaatgttgagggctttgatttggaaatggctagattttaaagctgatgggctgggtgtggtggctcacacttgtaatcccaacactttgggaggctgaggggggcagatcacgaggtcaggagttcaagaccagcctggccaacatagtgaaaatacaaaaaattagctgggcatggtggtgggcacctgtaatcacagctacttgggaggctgaggcaggaaaatcgcttgaacccgggaggcggaggttgcagttaactgagatcgcaccattgcactccagcctgagcgaacgtgcgagcctccgtctcaaaacacacacacacaaaaagctggtgtgcaagaaagtaagaatcacacagtcagtaaacaagcccagcccaccattggtgggaccagcatttcaacacagcttttgtgctttcatatgaagcttgcaaagaactctcatgacgtgataaagacgttgtttctttgcagatttaggtaaat

SEQ ID NO: 66208 - DNA, 700 bp, Homo sapiens
cttgacacaggtaggaggatgcagagscttcgtgggtctggtagctcctgctctcccctggacttttctgaacctctgggacctgcccacgccctgatcgcctgccctggaacgcctgctgtccctccctttcttggcatctctcctccccgctgtctcgcctgcccacagttcctctcctgcagcctgttctgctgtttaaaaagctttgttcacccactgttaagttattaacttgtcagggtctagactccccgcttcctttccctcttttgaactcactgctggctcccttcccatttgccgcctcagaaagtcagcatttggaaggctgaggttactctgcaggtcagtattggcaggtacacagaattacagttaatataattagaatgtgtaagttttcttaaagacaatgatacaactgaaaaagaaataataaacacagtcatctctctgttatcttgtggaggtaaatggtgaacttaaaaaaatagactttattcaaagtagtgtctccaagaaggttcatctgtgaacatgttaaggatcgctggactcttatatgttaattcatggattcaattatgatcaggaatgatcctcagtttttaaagcaaactcaaagaactaggtaagttgttttaatatcagtgtcgctgttctgagacgtgcaaactttatcttagattctttctat

SEQ ID NO: 66209 - DNA, 700 bp, Homo sapiens
cttgacacaggtaggaggatgcagaggcttcgtgggtctggtagctcctgctctcccctggacttttctgaacctctgggacctgcccacgccctgatcgcctgccctggaacgcctgctgtccctccctttcttggcatctctcctccccgctgtctcgcctgcccacagttcctctcctgcagcctgttctgctgtttaaaaagctttgttcamccactgttaagttattaacttgtcagggtctagactccccgcttcctttccctcttttgaactcactgctggctcccttcccatttgccgcctcagaaagtcagcatttggaaggctgaggttactctgcaggtcagtattggcaggtacacagaattacagttaatataattagaatgtgtaagttttcttaaagacaatgatacaactgaaaaagaaataataaacacagtcatctctctgttatcttgtggaggtaaatggtgaacttaaaaaaatagactttattcaaagtagtgtctccaagaaggttcatctgtgaacatgttaaggatcgctggactcttatatgttaattcatggattcaattatgatcaggaatgatcctcagtttttaaagcaaactcaaagaactaggtaagttgttttaatatcagtgtcgctgttctgagacgtgcaaactttatcttagattctttctat

SEQ ID NO: 66210 - DNA, 790 bp, Homo sapiens
tgccacataccatgtccccactcctacaggtaccttcataccttgccccttcccaggcccagcagcacttggaaaatggacccaaggaaccatatgttactccagccctggcagaactgctagagggtacgaaccctaaagccattctggtgaccttcccaaatatctgaagacaaataacctgaattggtttggacttgcctgagattttccaatgcctcaattgtatcataaaggccagcaatttcataactcatctactcactcactcrcccatggggtttctagcgattccttctagtgacagagccaccaggtccttagagtggggatgtttcaatataaaggtttcatcaggagcttccctgattgtgcagcaagcactttgttttatgagaaaatgtttgactcttcttactggtggatatacagagggggacagaggaattcctatgtgatgtttaggtgtgtgacaaacacctacagtgaagatgagaatatctccatcctgaaaacaaacctagagctagcaaagggaaggcaaaagatatggacaagggtccaaagatttcacatacacactgtgtgtcagatagaatactaaaactatcatggtaaatcaaatccgttaaacacacttaaaataccacaaacattagcggaatcctatcttataaacaatacttattttaatcagcctttccaaaaacttttttttttgagacggagtcttgctctatcacccaggctggagagtacagtggtgcgatctcggctcactgcaagcgcc

SEQ ID NO: 66211 - DNA, 609 bp, Homo sapiens
ctgacatgtaaaacaacttagaacaaaaacctgtattgtaagtcactaagagttgtttgtaactgcagcagaaccaagaataacttggctctgatacacctaatacatacccttgatttacagggttggggtaatttggaaaggcaaagatttcagctatgatcccacctgcctttagaggttctactccaagcctcccatagtattaatattcggcggttcagaatcttgaggaggccattgtggcaaaacaatggaataccttcacaagttatttttatttctcaatcacttctaatcatctccagctcaccccacactaaaaccctcatctatgtttgcatagagcatctaactagaacatcttcaagtgcaaagaggaatggatacyaaaaatccttaagacatactgttggggaaacaatgcctacgatatagaaagaatcttaagaaacatgtctggcaaatatataggagcagaaaaaaaagggcattttcctccagtgagaaatctgtgaggctttgttgagccgccactgttctaagagttgtagagaatacaaatgtgattaaggtacatgccctgtcctccacgaggttatgggtgaa

SEQ ID NO: 66212 - DNA, 774 bp, Homo sapiens
ttcatttctgccttttagtttttacttcttctttctttggaggcagaaattgggcataagacaatatgaggggtggtctccttccttaaaccttattagtcatttaggagctaaaaatttaaaccactgggagattccatttaataccaattagaaaaaataaaggaatttctcttcactaaggctagtagagatgtagaacagggcttctcaaacgctgcaggtgggagcgtaaattcacaacgtaaaagactttgaacatttgcatactcacatattctggaggagtgtctgtaaaccttttgaccattcaccataataagaaacacattttatatcccaacccaggtgtgccaacatgctttacagtaaaatcagtttacaaaacatactgccccttactgtatgtgatatgctctgatattttatattttttcatataacagtcttcaygtcttttgtaccagtcctacataaatttatagagtcaattctggcagtttagactctttaccttgggccttcattaacagatttttttggggtgaagtaggatgaaccctgttgtttctgttttttcgctttcgttttttttccccattgtttctcttcacgttcctggaagttatctcagttaattacaggacttaatatacttaaattgcacattaattctcccgacaaataccttctttgatccaacaatttcccccgcatggtatttcacattttagattctttccagttttgctgtgataacatttgtgggatctt

SEQ ID NO: 66213 - DNA, 570 bp, Homo sapiens
ctggctgacaaagtcagaagccatttcacgcctggacctgatttgcgctcttctgatttccctcacatcagtgtattgatggcttggttgcctggggaaagagaggaatttctgtttctgaagttttgattaatctctctctcttttttttttaattacactttaagttctggggtacatgtgccgaacatgcaggtttgttacataggtatacatgtgccatggtggtttgctgcacccatcaacccatcacctacattaggtatttctcctaatgttaaccctcccctagccccgcaccccyaaacaggccctggtgtgtgatgtttccctccctgtgtccaagtgttctcattgttcaactaccacttatgagtgagaacatgtggtgtttggttttctgtccttgtgatatttgctgagaatgatgttttccagcttcatccatgtccctgcaaaggacaagaactcatccttttttatggctgcatagttttccatggtgtatatgtgccacattttctttatccagtctattattgtggacatttaggttggttccaagtcttt

SEQ ID NO: 66214 - DNA, 562 bp, Homo sapiens
cttatgtggctattaaaattattttaaataatttaaaaattattttctattaattattttctaaaaattattttctatgaatattaaccagaatgaattgaagaaactgaagccattacacttttacagctggaaagaaccttggcaattcacctgatatttgctttcttccagtgaaaaaatacagtggtccagaggagttatgtgacttgcttaaagtcacacagcaaagatagagccagatcttgaactctgtccagaggttttcctgctcatggttcctttcaaaattgggtttcttttaggtccaaacaccagcatcatattaatgcaaatctcaggctctgattctctgtgaggattgtycttagagactcaacacccacctgctgtacccttagctgacgggctgcaatttggtcttgggttgctctgattcaacacagtcctggccctgattgtggggcaagaatgacttatgggaggtgcagagcccattcctggaagcaactgccagctttttttgagaaagaagaggagagggccctggaaggataaaccc

SEQ ID NO: 66215 - DNA, 848 bp, Homo sapiens
cccttacaactcccactactgtgatagttacgagagatgcactcatttcttttattagcatttaaaatgggtgggtgacacattatggaatttacttgctgaatataagaggcatcattacataagatgccaaaataggccgggcgcggtggctcacgcctgtaatcccagcactttgggaggctgagacgggcggatcacgaggtcagcagattgagacctacctggctaacacggtgaaacyccgtctcaactaaaaacacaaaaaattagccgggcgtattggcgggcacctgtagtcccagctactcgggaggctgaggcaggagaatggcgtgaaccctggaggcggagcttgcagtgagccgagatcgtgccactgcactccagcctgggggacagagcgagactccgtctcacaaaaaaaaaaaagatgccaaaattttgctctactggcaaatgggtaccctggctcttttaagccacactttatatgctagccattacagcactaatagaatatgtaggtgctggtgctgggaggctgagatcagatatgaatagaatttcaaggtctgggaggtaaagcaagagtgaagcaagggtggtattagataagatatgcacttaatagaagtagctgccaaggatgggaagggccaatggtctgggctgggccagacctgctgaattggcaaggtagaaggaaaggacagtgggactagagaacatatctgtgagatcaggtaaattcacactgataaccattcttggtgtggccagacctgttttcaacccatccctgacagccttggagaagctgtattctgtgccggggcatctgagaa

SEQ ID NO: 66216 - DNA, 848 bp, Homo sapiens
cccttacaactcccactactgtgatagttacgagagatgcactcatttcttttattagcatttaaaatgggtgggtgacacattatggaatttacttgctgaatataagaggcatcattacataagatgccaaaataggccgggcgcggtggctcacgcctgtaatcccagcactttgggaggctgagacgggcggatcacgaggtcagcagattgagacctacctggctaacacggtgaaaccccgtctcaactaaaaacacaaaaaattagccgggcgtattggcgggcacctgtagtcccagctactcgggaggctgaggcaggagaatggcgtgaaccctggaggcggagcttgcagtgagccgagatcgtgccactgcactccagcctgggggacagagcgagactccgtctcacaaaaaaaaaaaagatgccaaaattttgctctactggcaaatgggtaccctggctcttttaagccacactttatatgctagccattacagcactaatagaatatgtaggtgctggtgctgggaggctgagatcagatatgaatagaatttcaaggtctgggaggtaaagcaagagtgaagcaagggtggtattagataagatatgcacttaatagaagtagctgccaaggatgggaagggccaatggtctgggctgggccagacctgctgaattggcaaggtagaaggaaaggacagtgggactagagaacatatctgtgagatcaggtraattcacactgataaccattcttggtgtggccagacctgttttcaacccatccctgacagccttggagaagctgtattctgtgccggggcatctgagaa

SEQ ID NO: 66217 - DNA, 897 bp, Homo sapiens
gttattttatgttttatttaacagccttcggggtggctgttctggcaggctgggaagcacagccttcagccagaagccagaaacagatacttttcaaatctgtgttctttttactttactcacaggaatagttgtagacagaaaaaattgttactctaataattacagctaataagaacccattatcttagatgtcaaatagcgaatggactaatccataacactggacatgaaaataatttaaaaaatcaattaaggggtaatttttattatttcctaaattattggaccctttaggggatttttttcaacttctgagttctgagagtgtgtttgaaacatgcagtgacttgcctctgtgctcctggatgcttgctctgtgggaatggagctcctgtacttgccaatagcatgcgaaaagtaagagtttaatatctctctacccaagcgctcttcccaaattggacatagatgcaagagttaagtcccattgataacagagaaacaaaatcacaggtatcaggcagcctcagtcctgctgccaccctgttaaggtcaaggtaaacaatgcctttcagacaaagaaaaattgtatctccatcagttgaaccaaaccctggtggcagccctgtgtcaagagactatggagacatcagccagaaagacccacgaccgtgtcactcaattcagcagtgtgaaagatccaagaaagagaaaactacctgtccaactgggaactacattgaagtgagacattttaatctgtcagttctwtccacaacacacaactaataaaagatatttctatactactgaactatgtcttgaggaaaactgaaggtattcataacagaacaaaatcagctagaggtcttaggaaaaaatcttcaccggaat

SEQ ID NO: 66218 - DNA, 897 bp, Homo sapiens
gttattttatgttttatttaacagccttcggggtggctgttctggcaggctgggaagcacagccttcagccagaagccagaaacagatacttttcaaatctgtgttctttttactttactcacaggaatagttgtagacagaaaaaattgttactctaataattacagctaataagaacccattatcttagatgtcaaatagcgaatggactaatccataacactggacatgaaaataatttaaaaaatcaattaaggggtaatttttattatttcctaaattattggaccctttaggggatttttttcaacttctgagttctgagagtgtgtttgaaacatgcagtgacttgcctctgtgctcctggatgcttgctctgtgggaatggagctcctgtacttgccaatagcatgcgaaaagtaagagtttaatatctctctacccaagcgctcttcccaaattggacatagatgcaagagttaagtcccattgataacagagaaacaaaatcacaggtatcaggcagcctcagtcctgctgccaccctgttaaggtcaaggtaaacaatgcctttcagacaaagaaaaattgtatctccatcagttgaaccaaaccctggtggcagccctgtgtcaagagactatggagacatcagccagaaagacccacgaccgtgtcactcaattcagcagtgtgaaagatccaagaaagagaaaactacctgtccaactgggaactacattgaagtgagacattttaatctgtcagttctttccacaacacacaactawtaaaagatatttctatactactgaactatgtcttgaggaaaactgaaggtattcataacagaacaaaatcagctagaggtcttaggaaaaaatcttcaccggaat

SEQ ID NO: 66219 - DNA, 796 bp, Homo sapiens
acccgggaggcggaggttgcagtgagccgagattgcaccattgcagtccagcctgggcaacagagtgagagtccatctcaaaaaaaaaaaaaaatcattttctagtcaatcaaaataagatccttttatcttccttatcagatttggaaggagcttccaaaccatcgagggcacagcataagcacacttgatgtcagagttatccatcctgccctggccatccatgactgcccaccagtgaccctgcccatcactgactgcctgccagtgaccccgcccagcagtgactgcccagcagatactgcccaccagtgaccctgcccaccagtggcccagcacaggtttccatttgctttggtcatctttcggtcttgcaaatctttcttcctttctctcttttgctatattatgatccattaataaaatgccactagaaaattttctgtgaaaacatttcatagtttagatgccaatctgtgtaatttattcagattgcagataaaatattcagtatcttctgctgcattgcatataacctgggttccaagtcaaagacatattaaaattgtgattataattataatttgtaatttgtgattataatttcttaggaattaytagatttaaaataatctttgctctaggaaaaattaagtgtaaaatgctatatgtaggatgaatgtatttattatccaaaccaggagatctttgaaagtgaagggatggaaaggactatcaataagtaagccagaataacagaaataaactggaagtgtcccaggcaagctagggcgta

SEQ ID NO: 66220 - DNA, 1168 bp, Homo sapiens
ggtgcatggtatgtatcagcacatgggaggaagatttgaaaaacggagcttggaaacgcttccctaaagaaatgagaccgaaacctaagggaccacggagcaatgatgtacttctgtatcatgacagacttcttagttggggctgtgcccttctcatgtgatcttgggcaagtcaattgattgagctgaagctctttcctattgtgtaagatgcagtgaatgtttaactggttcatgatattctcaggagggtccatttttaaagccctgyaaaccataaagcattaggaacatatcagaggatagtctcgaacctggcagggtgctcctcatgaagataagttctactaattattgcactttatcatcttttgggtgcagtcatgctatcttcaagaatgttaccacaatgttctctccaacctgaggagtagtcctaggggcctgcaaagggcctcagaggccagcctatggtggtcaccagaattcaggagcacagaggccgggtgcggtggctcatacctgtaaccccagcactttgggaggtcgaggcaggtggatcacaaggtcaggagttcaagaccagcctggccaatacggaaaaccccaccgctactaaaaatacaaaagttagccgggcatgatggcaggcgcctgtagtcccagctaatcaggaggctgaggcaggacaatcgcttgaacccaggaggcggaggttgcagtgagctgagatcgtgtcactgcattccagcctgggcaacagagcaagactccatatcaaaaaaaaaaaaaaaaaaaaaatcaggagcacagaaggggcaccttaagagctggagagctccagacacagaaatctggatgtgggcacagaaatacctgacctcgactctgtgtaaatcaacggaggaactctcaaaagatttatctggcaaagtgcaaagtgtcagcagctaaatgtgccattttcattgtcttctctgcagactaagaaggaattttctccctaattgccctttcttgctttcaacagtcatatgctataattatgacaacgggatggtggcaaatatccttcaattttcttcacagactgcaacaagaaatgtggtcgtgagcccttaccaacaaaattgggagcggcttaaaagccaagagacgtatccacaga

SEQ ID NO: 66221 - DNA, 628 bp, Homo sapiens
gttttaaataaagggtttatagtctcaccacaaaaggctacaaaattagaagtgtcagttctcttcaaaagctacatagttcaggtggagagagtatagaggtctctaagcagctaggttagctccatttggtctaaagcagaaaatgtaatccaacctctgacccgccgacctctgcccccaataatgaaacccttttaagcatcctgacttctgatttttttttagagaggggggcagtatttgcaggttgccttgcctggaaccataatgtatctctggttctgcctatttctcagctcctgccttaattctaaacactgtcctacccctctccccaaatattccttctacagtggcttacttctctgctccccatccaaagtgattccctgggcaagcaagaccctggccttgtgctgaggttaaagttcctactttagtgtcttcaaatggtgcctggattcttgctttactagaacctactgaaagcaatgcaattatgctttatsttctctccttcattgtttccaatttaatcttacgtaaagttcctctggagaacaacaatggttttagacaggtgttaatatgcttttgaaactacaggaaagattgtttcagcatg

SEQ ID NO: 66222 - DNA, 685 bp, Homo sapiens
tttctctttaggggttagaggcaaaatgtccacatccttcccttggctggcttctactgccctggggttctgaactctgctgttgttggtttctttatgttttcattcctgttcagaagtttcatcaacttttttctgtttcagtgttctaatttcatctttcttcaattcttttattcattttctgtgtctactatgtggattgttcaaatgagtggtaagatcaaatactgggccaggcacagtggctcacgcctgtaatcccagcactttgggaggctgaggcaggtggacaatgaggtcaggagttcgagaccagcctgaccctgtctctactaaaaatacaaaaattagctgggcctggtggcatgctcctgtaatccaagctattcaggaggctgaggcaggagaatcgcttgaacccgggaggtggaggttgcagtaagccaagatcatgccactgcattccagcctgagtgactgagcaacactctgtctcaaaaaaaagatcaaatattgctrggattgcattatctcaaagattttctattaagactagctctacagatggtagaggactcagaaatggttggcacctaattgagaatgtgtatttaattaattagatgttttatctaataggtctgctctccgacatttctccacctactttgcgcatctggat

SEQ ID NO: 66223 - DNA, 685 bp, Homo sapiens
tttctctttaggggttagaggcaaaatgtccacatccttcccttggctggcttctactgccctggggttctgaactctgctgttgttggtttctttatgttttcattcctgttcagaagtttcatcaacttttttctgtttcagtgttctaatttcatctttcttcaattcttttattcattttctgtgtctactatgtggattgttcaaatgagtggtaagatcaaatactgggccaggcacagtggctcacgcctgtaatcccagcactttgggaggctgaggcaggtggacaatgaggtcaggagttcgagaccagcctgaccctgtctctactaaaaatacaaaaattagctgggcctggtggcatgctcctgtaatccaagctattcaggaggctgaggcaggagaatcgcttgaacccgggaggtggaggttgcagtaagccaagatcatgccactgcattccagcctgagtgactgagcaacactctgtctcaaaaaaaagatcaaatattgctgggattgcattatctcaaagattttctattaagactagctctacagatggtagaggactcagaartggttggcacctaattgagaatgtgtatttaattaattagatgttttatctaataggtctgctctccgacatttctccacctactttgcgcatctggat

SEQ ID NO: 66224 - DNA, 874 bp, Homo sapiens
ctgactttgtgtgtacctgaggtcaaaacacagttggtgcaaattttagaccatatatacctcttgtgttattgatgttgaaagacactcactaattttgtgcctttctttttttatagcccacaaaagactatataacagaatttcttatcctgttatctgtgtgccactctgttattcccaagagagatggaaataatataatccaccaggcttcctcccccaggtagatgttaagtgcgcatagytctttgtgcctggctggtgatgaggcctcagaagaggtaggtgctatcactgatcaccttaattgcttctgcctttctccttccctggagttcttatagcactcatggttcaccccccaagactgccataaagaggctgtgagggtgctcagaatttggggctcagcagtgcgtttggttatcatcagtaacaaaacagaggtaaagttaaggccttgcaacattttatggagttactatgaatggctttgagaagaaacaagatcattatgaacagtaaggaagtatttcaccctcagcctggtaaattcatctcagccccactgaaagaggccctttttaaccaaatttcctcttttgtgaacacaagctggtccctagacagacagataagtgcatttggataaaaaaaaagccaagtttaaaacatggacacagtattagtgctggagactggaaatctgttttaaattcaattcagtgtgattatatttgctcaatttctactaatataaactttttactgacaatgaagcagctttagcgaaaggagcaaaaaaacttggctttgttttcactaccagaacaccatcctctgtcaccatagacactgtgagcagcacccc

SEQ ID NO: 66225 - DNA, 1562 bp, Homo sapiens
gtcttacactttagcagtttcaatcaaaagatgagctattttacaatttaaggaagaggccttacmctgttaaaatcttgaccgatatgctcaatggcagtaccatcattgaatctccacctgctgccttacgtatcaagaacatttaaaagtctttcttgttagagacaaaataaaagaaaaactaaggtgacaagcgactatgagaaataaggctttaatcaggttaaatttgcattatgcagcctgcatgaatttagaggtcctagaatcaaaacactagaaggaacctttgatatgctctagttcaacagactgatttttgcagaagaggaaactgaagcgctgatgagaccattaactgataaagcaaaccgcttactttttcaaagggattcatttcaatgccattttacccttattttgcatctcactgttgtttctcagagcgacgattgacctttttttaggtgaaaagagcgaatagagcgtattaatttcaagagggtgaaaaatgcctttgaaggaggagatgctggagtgaagaggagaaatgacgtcttatttaaaatatgtaaccccttgatggggttagacaatgaatcatattctcctagatttttctatgtctatagacatcagccacagttctttcaggcactcaaacgagaggaagaggaagtgaataaagctcatactaaatatatagcacccactgaaggcagggatgtagacagaaagaacgggggtgggggaaggaaggaaagcacgcttcgccaggatccagctgttttctaacaaacctaagcctacggaagctaggaagatatcggaagcaaggaagatatcggaagcgacggcatccctcaaattcgagagggcggatgcctctagggctagagaggctccctagccctcagttacagagcgactgggaggggacaaaatggagttgaggtttaggggcaccctaaaggtcgtttggaggtctagcaagcacttcatggtctcctccggaaagggccgtggcaaagcctagtaccccgatcaggaagatgacttctggccctcgggatgcggtgagcggcaggaagaggcaggctggggttccgaggaccccagagtccatcacaggagcagatacagtgacctcgggaatcttcccggccccagcggaggcgagcggatagatagccctggctcaaggaaaaaagcgagccgactccaggagctggaatgcccacccaacctcctcccggctcaggtgaggtacgccagtccccctctggaaatggggccctggtaccgacagggcaggggtgccggggccgcaacctccccatccagggatactcaccggaggggcggcccaccgcgtcttcgcagccggccggcgcctggcactcggaaagctcgcaaaaaggaaccgcgtgcccgctagcgctgggacgagaaggagcgcgcggcggaggccagagaaaaagccgcagcggcgcgcgcgcacccggacagccggcggaggcgggactcagcgcgagcccggaaaagacgcgcccggaggg

SEQ ID NO: 66226 - DNA, 844 bp, Homo sapiens
aaggagcttgcaatttgaccgacttgagggaaatatacatcattaaaaacatagcaaggaaaaaggaaataatcactctattagaagtttaagcaaacatagtcaagtgcagaggaaagcacagcagttatagaaggtttcacaaatgaaatattgtttgatcttgatctcaaaaattaccagactttaatagaactatatacacaaaagaaacatgactgtgggtggagggtatttggcaaatactgaagagttgataaggcyaatcaaaacatctcattgaaaatatcaactataatatgaacaaagcattttcttcagaaataaatgattatgtcagaaacatattttttaaaataacattttcaaagctatgcttcatgcttttataatggtccaaaaagaaaacatctgcagacctataagaaaaaatctaatataaatttccctttaactgttcatctcaattccttccacataaaattcaataatcagttgcttctctgtgagtgtctccaggacttgtatgcacatgattgttgactggggtttatgggaagatttgcaagtatcctatcatgtggcttttctgggttgatcatattcgagagacagtaaatacttagagtttgctgggaaccgtgtctttaaaaaatataagttttactatgtgtttccctacacttttgtcttagcagatagaaaatagcctcaagtattcatcttgttctattcaaacaaagctgagttgcatgctaccttagtagtaaacagatggattttacttaaggcagaatcggcataagcattagccttctgttccattatatatctagggttacat

SEQ ID NO: 66227 - DNA, 1040 bp, Homo sapiens
aaacatacatgtattcatatacacacatatatatagaggagagaattctgcttcttctttggtacatgttttgaatgacttttgtttgtcaacataatcaacatcattattctttcctaaatatttcattctcaagatacaacttttttacattaaataaarttaacttttaatggccttgtggtgtagaggagctacaacatgtgtccttattaccagaaatgactattttcaagaggggaccaaacactgcagagagaaaagtttccctgtgacacctgcaaaatatctaaattatgtatgaaacaatgttgcagagctgttaaatattatttatgtcattgtactccagatagaaaattattttaccaagccacttattttattttcctaaaaaagtgcaaaattaacattgccttttgcaatattaaaataactgagtgtttttttctgggctagactgtgctgaataattgcctcagatatccacttaattttgaatagctttcacggccttactttcgtgagttgtcttaaatctcaaagaagtgaataccaatgacaactggcaaaacatatttacagcacttgacacaaagttaataccttcaatttacaaagagcccatacaaatttaaaatgaaagaatgatcgaatcaataaaaaaatcatccaagggtaggaacttgcagttcacaaaaaaaagataaacagctcataaatttatgaaaaactacttatatttatatggtatgtgtatgtacaatttataaatatttgtattctattcattacactgttattaggaatagcaaagcaaaacaatggaaatacctacagtgtctacggagagatacttagatgattatctaaataatttatggcactgtatataatggaatagtctgtaaacattggaaacactgaagaccaaaatatgaaaaaaacctccacaagtgttaggtaaaaaatgcaaagatctatgcagtatctatattgtgctcacttttgtgttcataaagaacttagatgacaacata

SEQ ID NO: 66228 - DNA, 670 bp, Homo sapiens
cttccttctttatatctttttcttggtgtggaaaaaattctaccttcaggcttcctgatgatggctgctctggaggaggtaggtaactctttgtattcacagcatcaaaaagtttttccacaaatatctgtgtctctaaaaataaaaccaaacaccatagattaaaacacatttgttaagattaattccccgcttccacatctcttatctctaatatgatgaaacataccttgacttttataaactagaaaatatactagcactggccaggcgtggtggcttacgtctgtaatcccagcactttgggaggccaaggcrggtggatcacctgaggtcaggagttcaaaaccagcctcgccagccctgtctccacaaaaattagccaggcatgatggcaggtgcctgtaattccagatactagggaggctgaggcaggagaatcacttgaacccaggaggcagagactgcagtgagccgagatcgcgccactgcactcaagatcacgccattgcactcccgcctgggtgacagagcaagactccgtctcaaaaaaaaaaaagtaaaaagaaagaaaatatcctaatatcaacagcttcccaaccagtgtgccatggcacaagtcctgaggcaatactgattcatgctattttcaagacggtagggactggaa

SEQ ID NO: 66229 - DNA, 1551 bp, Homo sapiens
aactgaacataccaaatataaaaagccttttgaaagtctgtcatatatagctagcaaaatcatggctacatatggtgcctgacaaacttgctgtaggatatttgcacagaatatatgcttcacaaaatgaaagcactgaatagaaaaatcatttttgtaaaacacagttttagttaattatcagcaaacttaagagtttcatacattgtcactttcaccagtcaattttgcatcaacaggatataattgctaaaaatctatgtaaaaaagtttccatggtgtccccacataactctagagctgtcagagcatttgataytgagttgggtgctaactgtaacgcaagccaaacacacagtcttggcatggttgctctggtttccatagagaacaaaaaaatactgctctgggaaaatatcttccctgctttccttcaaatagtattgccaagcaaggaatgtcaccaatcaccattgttttggcatttaataatagtgactaatacaatgaacgctttctgaaactaagatgttattggaaaagaaatatatttagtacagcaatatgaatagcctgtggatactctttcatcctgttttcagcatttgaacacagccttgtaccagcaatgtggacagatattcgagtgtttattgaggcttgtgcttaatgactcaacaatctagaaacacaaattcagtgttagtgtacctctggtcaaatggcagaaaacatttcaataataactaatgaaaaaaaactctttaagctttcacatgacttgtatcagaggcaacttagaagaattgttgaaagtaactgccataaagaaataattccattagagatataagcatgaacaaaaacagcactacactgatgtgttacaatcaaacatggaaacttactggcactcttccacaaggcctataaataatactttccaaatgttgtccaatgcatacagaacataattctgcagcatgtgtttagatagtatctggaaaaataatttttttcttctaataagataagcaaagactacattaaaataaaaaaacacatttcactttattgtattaattcacaattactgtcacatgtatttaatgtaccaatgttcactgtaaatcttctagaaaaacatatagtaagtagcacttcccaagtatattaacaatcagtttaggagactagtgttctacaagcatatttaaatatatgatgttttaataaaacatctatttctaaaagtgatgaaagttttatttattttacagaagaataaaccaacgcacaaagacaattattctatatataaatggaaaagctatgaaaatttattataaacttaaaatttaaagttctatcatcttataaggagtgaaaaattctcatttgggcatagatatacacatcttgaatattactaaattttaattttccctttccataaccaaaagagaaagaactatgtgtaagcaagcaaataagagcactcaagatgtagacataaaatcataaaatccgcaaataaaaatgagaaaaatc

SEQ ID NO: 66230 - DNA, 640 bp, Homo sapiens
atcttggtacatattttcttgcatatttatgagatagattactaaaagtatacttgagttaaaatgtatatacagtcctcccaaatggtttatataatatataattctgtcatcactgtttgagattcttttactctatatcctcacaaacacaagcttttataaatctataaaaatgttatgccagtaggtaagcaatatgtaacatcttatttagttactgttcttggactactgctgtgtcgttctgttgataagatctttgtatttcttattctgtgtattctctgttcatatttcttgacctcgctgctgagattttgtttgtttattttttagaracagagtcttgctatgttgcccaggctggtcttgaacttctggcctcaagtgatcctcctgcctcggccttctaaagtgctgggattacaggcatgagccactatgcccagccttttgagatttttgaatgtggattttttaatttgtaaatctcatttttatatttgagacagcagccttttgagtaaccatgacaatagtcttttcctctagtacaattttgtttgaacaaagtaatttacaaagatcatagaccatatagtttacaaataacatgtatggtgtgttttcccaataa

SEQ ID NO: 66231 - DNA, 617 bp, Homo sapiens
atcccagactgacgtgcctatcacacagcacacatctgggaagtctcccttcaccaggcagtgggcgaagtgagaatgcaaactcattttaatgtcagtttgagccaaatataattagaaaggaaaatctctgactttgaaaamaaaaaaaaatctaatgcatttcaaagccaagttgaaatgacttctggattatctgcaccgctgccactctccatttatgcagaaaatcgagaggggagcctgtaaagtctgtgcctgagggatttagtttgcacacattgcctttggtttcatgccagggtcatgttttaagactggcctttttcaacacaacccggttcctggaattgggaagcacctagagtgacctcctcaccagggggcctgtggcagagtcagcctctttctcagaggggctgcttctgtgtgatcatgaccaagtcacttacttggagcctcagttttctcatctataaaatgcaaatgattacgtctatcttctagggttgttgtgagattgaatgagaggacctatattaaggaacagtatctgaaatacaataagtactcaataaattatagttgttattaatattgcacagtccttgcttttt

SEQ ID NO: 66232 - DNA, 617 bp, Homo sapiens
atcccagactgacgtgcctatcacacagcacacatctgggaagtctcccttcaccaggcagtgggcgaagtgagaatgcaaactcattttaatgtcagtttgagccaaatataattagaaaggaaaatctctgactttgaaaaaaaaaaaaaatctaatgcatttcaaagccaagttgaaatgacttctggattatctgcaccgctgccactctccatttatgcagaaaatcgagaggggagcctgtaaagtctgtgcctgagggatttagtttgcacacattgcctttggtttcatgccagggtcatgttttaagactggcctttttcaacacaacccggttcctggaattgggaagcacctagagtgacctcctcaccagggggcctgtggcagagtcagcctctttctcagaggggctgcttctgtgtgatcakgaccaagtcacttacttggagcctcagttttctcatctataaaatgcaaatgattacgtctatcttctagggttgttgtgagattgaatgagaggacctatattaaggaacagtatctgaaatacaataagtactcaataaattatagttgttattaatattgcacagtccttgcttttt

SEQ ID NO: 66233 - DNA, 570 bp, Homo sapiens
aacacgtctccagtcttctctgtgtctggataaataacattttccacaacaggtttattttctcatacttcaaggcaaagctccttgtaatagagaagcaagcccagagaggtcataggcgagactgcctcctgggccccgcgtgagcccaagaagtttatcttgttaggggtcagatttgctttccagcaaaccaccaaggctgtcctcctacagtatccccagccaggaccaggagaatgatgttcacaagaacctggctgagtcactgtgcccttacctgtctagtgtccccttctcagccgctcagagcagctgggggctggargactctggtgtccttcccatcatttctagccgatggcctgagggaccctcctcctctctccacgggagccaggctgagagcagtgctgacatctgctgctgaagccagcatgtaggaaagtgggcatgggggtgatggcagaggtgggcctgcctcacagccagggccagttttagcttaggagcaggaatgttttcctcttggaatcactcagaagtgtccttgtcccgccttgccagggt

SEQ ID NO: 66234 - DNA, 741 bp, Homo sapiens
aggattttaaaattacattaaaaatgtaaataacaaaacaaaaaaaaaagacaaagaggggcattacataatagtaaataattcaattcaaggagaagacctaaataccctaaatatatatgcaccyaacacaggagcaatcagattcacaaggcaagttcttagagacctacaaagaggtgtagattcccacataataatagtgggagacttcaccactccactgagagtattagatagatcattgaggcagaaaattaacaaagatatgcaggacctgaactcagcaatggaccaaatggacctgatagacctctacagaactttctaccccaaaacaacagaatatacgttcttttcatcaccaaatggttcatactctaaaactgaccacataattggacataaagcaatcttccacaaatgaaaaagaaccaaaaccatcccaaacacactcttggatgacagtgcaataaaaatagaagttaagactaagaaaattgctcaaaaccatgcaattacatggaaattaaacaacatgatcccgaatcacttctgggtaaataattaaattaaagcagaggtcaagaagtccttctaaacaaacgagaacaaagatacaacataccagtatccctgggacacagctaagacagtgttaaaagggaatttcatagcaccaggtgtccacatcaaaaaggcagaaaaatcttaaattaataatctaacatcataactgaa

SEQ ID NO: 66235 - DNA, 692 bp, Homo sapiens
gaggggcttgggaatctctcagatttatgtctattctaaaagagggggtgagaaaatatgagcttgggagggttatggctcggagactctgcctctctattccttrtgaagttccatgctcaaatcccagaaagaggtgggggaggccttctttatacttaccttaaaacatggctaggtgctggagggaagaggagtcggggaatacaggcggggctggccagacctctgcaaactccgcttccaacccctcccatccagagccatggttgttagagcagtcagccactagggggcagcacaggcttgagacgggattctggacatgcatgggggaggggtggtcagtaataatgaagtcatctggtcagtaatagcaattaaagagcttgactgggaaccagctactagagtgctcagagggggtggcatgaatactcatcttagtcgttgcggtcagagaaggggagaaatactgctagaatctacacctctctattccctcccctcaccctacctgatcccccagctactccctagaaagctctggggccacgctagccccctaggcttaatccaggggcagagacctcaggcctgtcggcctctgggtcagaggaggtgggtggggcaacgggcccatgaggtggagcatgtggggccccggtgattatcaaatgggctgtggccga

SEQ ID NO: 66236 - DNA, 692 bp, Homo sapiens
gaggggcttgggaatctctcagatttatgtctattctaaaagagggggtgagaaaatatgagcttgggagggttatggctcggagactctgcctctctattccttgtgaagttccatgctcaaatcccagaaagaggtgggggaggccttctttatacttaccttaaaacatggctaggtgctggagggaagrggagtcggggaatacaggcggggctggccagacctctgcaaactccgcttccaacccctcccatccagagccatggttgttagagcagtcagccactagggggcagcacaggcttgagacgggattctggacatgcatgggggaggggtggtcagtaataatgaagtcatctggtcagtaatagcaattaaagagcttgactgggaaccagctactagagtgctcagagggggtggcatgaatactcatcttagtcgttgcggtcagagaaggggagaaatactgctagaatctacacctctctattccctcccctcaccctacctgatcccccagctactccctagaaagctctggggccacgctagccccctaggcttaatccaggggcagagacctcaggcctgtcggcctctgggtcagaggaggtgggtggggcaacgggcccatgaggtggagcatgtggggccccggtgattatcaaatgggctgtggccga

SEQ ID NO: 66237 - DNA, 1056 bp, Homo sapiens
gaactccttgatctctcattgtaatccttagaatctctgttatccatcactctataatacatttgtttagcaaggaartaggcctctaaaatcttaccatcaaagtaagcctcaacaataacgtttttaaatctgacacacaagtctcaacaaccatcagaacactatttagctgtcaaatttagtgaggtgatgtcaatttacagaaggatggcaagagatggcaaagtgttcccctttcttttatggaacaatacaaaagttttagaggtatccttttgcactccgcttaccaatcaggcatttgagtagcaggttttggtattaagctttccctttccctgacagatcaaaatgcagacttcctaaagtttatgagattttcctattgctaagtcttaagtggtgcaaagtagagtaaggatcacattatagaaggtacagctttattttcatgaataaatattgttaaaaaacaaacaatattgacagatggtttttatttagaataaaatatttaataattaatttatttatttatcttagctgtcttgtacttggtttcattgtgaaaatgagttgtcacttcaataattcttcccggggaacgtatattccgcaaaggccaaaactcaagagtaaaaccagtcatggctccacttagcatttctaggctgttaccctttatgaagacgacatttggtcttcccctggtatattttgaatttatatgaacattctaatgaatgatcttattgtgtgtggttcaatctcctgaggaaagaattttcttctatttaatctcaggaaataggatcagctctgccaaagtattaggggcctaaggaaacacttcctgtatttaaattaagcagctttaaaactgcttaaaggggtctcactgattagaattccagtggagaaagctcgggaagatttcagattgtatctgaatccacttcgcttctactcctggtgggaattttgaaaggatttttatagtttccttaggcagtcaattacagatcttctttttccagtaatttttgaattcat

SEQ ID NO: 66238 - DNA, 699 bp, Homo sapiens
tggatcctttggtcaggttctctgtctcaaaaaaaaaaaaaaaaaaaaaaaaaggcacttgtggtggtatgtgcgcctgtagtcccagctactcctaaggctgaggcaggagactgaggccaggagttcaaggcttcagtgagctatgacctggccactgcactccatcctgggcaacaaagcgagatcctgtctcaaaaaaaaaaaaaaaccagagcgaaagaaatgggttaagacttactttgtagactattacagacagtagggaaaaaaatttacatgcaaatacataataatgttaaatgtaaaaacacacacacaaaaacaaaccctgactgcctaaratgactgaaaggaagcgcgcgcacacccacaaatatcaatataaatgtgtactcatggtagatttaaaggtgaatttagttgggcgcagtggctcacgcctgtaattccagcaccttgggaggccgaggcgggcggatcacctgaggccgcgagttcaagaccagcctgaccaacatggcgaaaccctctctctactaaaaaaatacaaaattagccgggcgtgggggcgcatgcctgtaatcccagctactcgggagtctcagggaggagaatcgcttgaatccgggaggcagaggctgcagtgagccgagatcgcgccactctgcactccagcctgggcaacaagagcgaaac

SEQ ID NO: 66239 - DNA, 676 bp, Homo sapiens
gtggctgttcctggacacagagctgcagacaaggagtggtgaggattcaggcaagagaagatgggcagcttccccttcatgcttccctctcaggaagaagccagggtgcctgggatcaaagaggctaggaggctggtgaggcctcctgtccctgaaagcggtcagtgaacccaaaagttgaaaagcctctgctttgagagtggttctgctgccctactggtgctgacagttttagaaactgacatggcagagctgaccaggcagactatatttttaggactctgctggggcctattgaaacgtccacattactcagatcaccaatctggctggagctaccaacacagcattctttgctgttttagaatacaaagctacctcccctcggggcttcactttgcagccactgagaatccaaggcttcgctaaattacacgtttccatggtcccactggcttgctttgcagggcttccacaagaatgggctgggagcgtaactgagtaactgagtcatgattaggggttaattaagaggagaaatgggctagctgtttcctaagataagggaggggaagtttttttaaaaactgtaactgctcagaacagtatgtgctaaggcagactttctgtgctgggagacagamcacttctgcagtgatgtagcagaatccttaaa

SEQ ID NO: 66240 - DNA, 1256 bp, Homo sapiens
atgaaacggaaaacagcaatagcgtgggcttgcctctctacacatgaaggcctcctttgatttcagtataaaaacacccatgaagcaatggatatgcagatccaggcaaagaaaaggtaaaggtagggaaggggggaggggacagcaacattacctcgcttgtgacatagggagcaacaaaatgcaggcagccgccagtggcacgcaggctcagttctagcagggggtactctgggatttttagtttctcagcctttgcagccaaggaagactgacacctacatccttgcacccctatcatgcatacagcaagactgtatgcagggccyggtggaggaggctggggaatcatcatttaacaatatctataatagacatttacagggctggtgggatctcaaaaaggcctgtaaatgcctgaggaattcaggaagttttcaccagaaaatgatgtgataaactggatctgaatggattaggcattcgccagggagacagtgggaaggtagcagcaagtgggtgggatcattccaggcgaagaaactgctccaacgagcttggagcgtgaaagcaattgtggatggctgagaacacgagtttgagtgggggcagtaagcaatgggatctgaggatttagaaatgggtgaatgatcttgaatgccaaacccaagaatttttaccttttcttgaagcattgacacacagccagggcagaatgaatggctcccttctttgtgtttcattcatctttctgtaacagaagatcactggctacaacattttgattgtttcttcatcccaagaacccaagggccatggaagtgttgctgttttcataagttattagggtacaggtggtatttggttacatgagtaagttctttagtggtgatttgtgagattttgatgcacccatcacccaagcagtatacaccgtaccctatttgtagtcttttatccctcgcccccctcccgccctttcctccaggtccccaaaatccactgtatcatccttaagccttcgcgtcctcatagcttagctcgcacatatcagtgagaacatacgatgtttgattttccattcctgagttacttcacttagaatattagtctccaatctcatccaggtcactgcaaatgccattaattcattcctttttatggctgagtagtattccatcgtatatatatatacaccacagattcttttttttttttctttgagacgggagtcttgctctgttgcccaggctgga

SEQ ID NO: 66241 - DNA, 1256 bp, Homo sapiens
atgaaacggaaaacagcaatagcgtgggcttgcctctctacacatgaaggcctcctttgatttcagtataaaaacacccatgaagcaatggatatgcagatccaggcaaagaaaaggtaaaggtagggaaggggggaggggacagcaacattacctcgcttgtgacatagggagcaacaaaatgcaggcagccgccagtggcacgcaggctcagttctagcagggggtactctgggatttttagtttctcagcctttgcagccaaggaagactgacacctacatccttgcacccctatcatgcatacagcaagactgtatgcagggcctrgtggaggaggctggggaatcatcatttaacaatatctataatagacatttacagggctggtgggatctcaaaaaggcctgtaaatgcctgaggaattcaggaagttttcaccagaaaatgatgtgataaactggatctgaatggattaggcattcgccagggagacagtgggaaggtagcagcaagtgggtgggatcattccaggcgaagaaactgctccaacgagcttggagcgtgaaagcaattgtggatggctgagaacacgagtttgagtgggggcagtaagcaatgggatctgaggatttagaaatgggtgaatgatcttgaatgccaaacccaagaatttttaccttttcttgaagcattgacacacagccagggcagaatgaatggctcccttctttgtgtttcattcatctttctgtaacagaagatcactggctacaacattttgattgtttcttcatcccaagaacccaagggccatggaagtgttgctgttttcataagttattagggtacaggtggtatttggttacatgagtaagttctttagtggtgatttgtgagattttgatgcacccatcacccaagcagtatacaccgtaccctatttgtagtcttttatccctcgcccccctcccgccctttcctccaggtccccaaaatccactgtatcatccttaagccttcgcgtcctcatagcttagctcgcacatatcagtgagaacatacgatgtttgattttccattcctgagttacttcacttagaatattagtctccaatctcatccaggtcactgcaaatgccattaattcattcctttttatggctgagtagtattccatcgtatatatatatacaccacagattcttttttttttttctttgagacgggagtcttgctctgttgcccaggctgga

SEQ ID NO: 66242 - DNA, 1256 bp, Homo sapiens
atgaaacggaaaacagcaatagcgtgggcttgcctctctacacatgaaggcctcctttgatttcagtataaaaacacccatgaagcaatggatatgcagatccaggcaaagaaaaggtaaaggtagggaaggggggaggggacagcaacattacctcgcttgtgacatagggagcaacaaaatgcaggcagccgccagtggcacgcaggctcagttctagcagggggtactctgggatttttagtttctcagcctttgcagccaaggaagactgacacctacatccttgcacccctatcatgcatacagcaagactgtatgcagggcctggtggaggaggctggggaatcatcatttaacaatatctataatagacatttacagggctggtgggatctcaaaaaggcctgtaaatgcctgaggaattcaggaagttttcaccagaaaatgatgtgataaactggatctgaatggattaggcattcgccagggagacagtgggaaggtagcagcaagtgggtgggatcrttccaggcgaagaaactgctccaacgagcttggagcgtgaaagcaattgtggatggctgagaacacgagtttgagtgggggcagtaagcaatgggatctgaggatttagaaatgggtgaatgatcttgaatgccaaacccaagaatttttaccttttcttgaagcattgacacacagccagggcagaatgaatggctcccttctttgtgtttcattcatctttctgtaacagaagatcactggctacaacattttgattgtttcttcatcccaagaacccaagggccatggaagtgttgctgttttcataagttattagggtacaggtggtatttggttacatgagtaagttctttagtggtgatttgtgagattttgatgcacccatcacccaagcagtatacaccgtaccctatttgtagtcttttatccctcgcccccctcccgccctttcctccaggtccccaaaatccactgtatcatccttaagccttcgcgtcctcatagcttagctcgcacatatcagtgagaacatacgatgtttgattttccattcctgagttacttcacttagaatattagtctccaatctcatccaggtcactgcaaatgccattaattcattcctttttatggctgagtagtattccatcgtatatatatatacaccacagattcttttttttttttctttgagacgggagtcttgctctgttgcccaggctgga

SEQ ID NO: 66243 - DNA, 1256 bp, Homo sapiens
atgaaacggaaaacagcaatagcgtgggcttgcctctctacacatgaaggcctcctttgatttcagtataaaaacacccatgaagcaatggatatgcagatccaggcaaagaaaaggtaaaggtagggaaggggggaggggacagcaacattacctcgcttgtgacatagggagcaacaaaatgcaggcagccgccagtggcacgcaggctcagttctagcagggggtactctgggatttttagtttctcagcctttgcagccaaggaagactgacacctacatccttgcacccctatcatgcatacagcaagactgtatgcagggcctggtggaggaggctggggaatcatcatttaacaatatctataatagacatttacagggctggtgggatctcaaaaaggcctgtaaatgcctgaggaattcaggaagttttcaccagaaaatgatgtgataaactggatctgaatggattaggcattcgccagggagacagtgggaaggtagcagcaagtgggtgggatcattccaggcgaagaaactgctccwacgagcttggagcgtgaaagcaattgtggatggctgagaacacgagtttgagtgggggcagtaagcaatgggatctgaggatttagaaatgggtgaatgatcttgaatgccaaacccaagaatttttaccttttcttgaagcattgacacacagccagggcagaatgaatggctcccttctttgtgtttcattcatctttctgtaacagaagatcactggctacaacattttgattgtttcttcatcccaagaacccaagggccatggaagtgttgctgttttcataagttattagggtacaggtggtatttggttacatgagtaagttctttagtggtgatttgtgagattttgatgcacccatcacccaagcagtatacaccgtaccctatttgtagtcttttatccctcgcccccctcccgccctttcctccaggtccccaaaatccactgtatcatccttaagccttcgcgtcctcatagcttagctcgcacatatcagtgagaacatacgatgtttgattttccattcctgagttacttcacttagaatattagtctccaatctcatccaggtcactgcaaatgccattaattcattcctttttatggctgagtagtattccatcgtatatatatatacaccacagattcttttttttttttctttgagacgggagtcttgctctgttgcccaggctgga

SEQ ID NO: 66244 - DNA, 1256 bp, Homo sapiens
atgaaacggaaaacagcaatagcgtgggcttgcctctctacacatgaaggcctcctttgatttcagtataaaaacacccatgaagcaatggatatgcagatccaggcaaagaaaaggtaaaggtagggaaggggggaggggacagcaacattacctcgcttgtgacatagggagcaacaaaatgcaggcagccgccagtggcacgcaggctcagttctagcagggggtactctgggatttttagtttctcagcctttgcagccaaggaagactgacacctacatccttgcacccctatcatgcatacagcaagactgtatgcagggcctggtggaggaggctggggaatcatcatttaacaatatctataatagacatttacagggctggtgggatctcaaaaaggcctgtaaatgcctgaggaattcaggaagttttcaccagaaaatgatgtgataaactggatctgaatggattaggcattcgccagggagacagtgggaaggtagcagcaagtgggtgggatcattccaggcgaagaaactgctccaacgagcttggagcgtgaaagcaattgtggatggctgagaacacgagtttgagtgggggcagtaagcaatgggatctgaggatttagaaatgggtgaatgatcttgaatgccaaacccaagaatttttaccttttcttgaagcattgacacacagccagggcagaatgaatggctcccttctttgtgtttcattcatctttctgtaacagaagatcactggctacaacattttgattgtttcttcatcccaagaacccaagggccatggaagtgttgctgttttcwtaagttattagggtacaggtggtatttggttacatgagtaagttctttagtggtgatttgtgagattttgatgcacccatcacccaagcagtatacaccgtaccctatttgtagtcttttatccctcgcccccctcccgccctttcctccaggtccccaaaatccactgtatcatccttaagccttcgcgtcctcatagcttagctcgcacatatcagtgagaacatacgatgtttgattttccattcctgagttacttcacttagaatattagtctccaatctcatccaggtcactgcaaatgccattaattcattcctttttatggctgagtagtattccatcgtatatatatatacaccacagattcttttttttttttctttgagacgggagtcttgctctgttgcccaggctgga

SEQ ID NO: 66245 - DNA, 573 bp, Homo sapiens
tccacaatccaaaacttctgtctcaagcattttggatgagggatgctcaatctgtatggtactttttgtggaaagstcctgtaaaactaagccttttattgcttaaatctttattgagtgctaggtgaattccagacatggaagaagggggttgctgaccgcaggaaatatttgtaaacgtaatgtgcaaagcaattaactgattatgacttgagagtctgagaataacttctgaattaaggtagcattttagctgagtctttttttgttgttttttgagacagagtcactctgttgcccaggctggagtgtagtggcacgatcttggctcactgcaaccgccgtctcccatgttcaagcgattctcctgcctcagcctccccagtggctgggattacaggcatgtgtcactacgctcggctaatttttttttttttttttttttttttttttttttttgagatgacgtttcgctcttgttgcccaggctggagtgcagtagcatgatctcggctcactgcaacttccacctcccagactcaagcgattctcctgccttagcctcccagaacg

SEQ ID NO: 66246 - DNA, 395 bp, Homo sapiens
  misc_feature (1)...(395): n = A,T,C or G
ctatacctagcccagaatcagttgcaaaagccaggccatagcgaattgtcctgccagccagatagcagagaatctgacggcagcaggcagaaggagccgctccattgcagtaagccaagatcgcgccacttgcctcattacatcaagcatcccaaaacccagtctgggtcagttttgcccagagtgaggtttgtagaacacgggttctcctgggatctatacctagcccagaatcagttccaaaagccacgcttttggactttctctctctctctctmtctatatatatatgtgtgtgtgtgtgtgtgtgtgtgtgtgtgtgtnctcacacaccatacatacaatgttgtatatattggatatgtgtgggtgtctatatatatatatatatatat

SEQ ID NO: 66247 - DNA, 395 bp, Homo sapiens
  misc_feature (1)...(395): n = A,T,C or G
ctatacctagcccagaatcagttgcaaaagccaggccatagcgaattgtcctgccagccagatagcagagaatctgacggcagcaggcagaaggagccgctccattgcagtaagccaagatcgcgccacttgcctcattacatcaagcatcccaaaacccagtctgggtcagttttgcccagagtgaggtttgtagaacacgggttctcctgggatctatacctagcccagaatcagttccaaaagccacgcttttggactttctctctctctctctctmtatatatatatgtgtgtgtgtgtgtgtgtgtgtgtgtgtgtgtnctcacacaccatacatacaatgttgtatatattggatatgtgtgggtgtctatatatatatatatatatat

SEQ ID NO: 66248 - DNA, 571 bp, Homo sapiens
ggggaccctgttcctctgctctgcagtatttgtgagctccccattggccaaacccagtgaaaagtcagaggacagagtgagcagaaaataagcagggcatggtgaccagtagccaaggatgcaggcagtcctgtaacaccctccattgtaaaccaggaaccctgtctcccatgaggttagctagcttcaggaagaaagaggaactatgcaccagcctggcgtctgccctgatgtgactcttatcttgcctacctaactccatcaggtacacaatgttcccctttggagctgtctacttctttctccccatgccacactacctgtggccaccaccctctcttgcctgaatttctctaacaactttgccgtctcatccagtcctcttttttttttttgagatggagtctcactctgtcacccagactagagtgcagtggtgcaatctcggctcaccacaagctccrcctcctgggttcacgcctttctcctgcctcagcctcctgagtagctgggattacaggggcccaccaccacgcctggctaatttttgtatttttaatagatatggggt

SEQ ID NO: 66249 - DNA, 935 bp, Homo sapiens
ggccaccacagcatctagtctattagtggttttcaaatcactatcacctggaggggctgttaaaacacagattgcactgggcacagtgactcacaactgcaatcccagagactcaggaggctgaggcaggaggatcactttagcccaggagtttgagaccagcctaggcaacagagtgagaccccatctctaaacacacacacacacacacacacacacacacacacacattgctagatatgatagtttggggacaggatcctttaactgacatgtctaacaagtccacaggtgatgccaatattgctagtccaatgaccaccctttcagaaccactgcactatagagattgtgcagtgttgggccaagataccttctgacttgctatgatttggtcaggttttacccagatatagaatataatcttcaatcactatcttcagaatgtttgattctgttgctggaaagggtcccaatccagaccccaagagagggatcttggatcttgtgcaagaaagaattcagccaagtccatagagtaaagtgaaagtgagtttattaagaaagtaaaggaacagtctgggcgtggtggctcacgcctgtaattccagcaytttgggagaccaaggcaggtggatcacctggggtcaggagttcgaaaccagcctggccaacatggtgaaaccctgtctctactaaaaatgcaaaaattagctgggcgtggtggtgggcacctgtaatcccagctactcaggaggctgaggcaggaaaatcacttgaacctgggaggcagaggttgcagtgagccgagatcacaccattgtactctagcctgggcaacaagagtgaaactcagtcaagaaagaaaggaaagtaagaaagaaggaagagagagagacagaagaaagagaaaagaaataaagaattgttgctcc

SEQ ID NO: 66250 - DNA, 825 bp, Homo sapiens
tatttaagtgacatggtatagtcaagttgtttttcttcattctgccatggtattcgcctgaggtttatttattattttttcatgatctaggttcacgcaaagaatctgctccacaagttttgcttccagaaagaagagaaaattatagtggaagaaactaaaargtatggtcagacagtgatagaagaaaagtaagatgtcttccggtattctaaaagcagatgtttgacctctgcggtggggtagtagagtccagacaactccctgagggcgggggtatggcttcagaagcttcacttttttttttttgagacggagtgtcactcttgtcacccaggctggagtgcaatggtgcgatctcagctcactgcaacctccaccttccgggttcaagcggttctcctgcctcagcctcccgagtagctgggattacaggcctgtgccaccacgcctggctaatttttgtatttttagtagaaacgagttttcaccctgttggccaggctggtctcaaactcctgacctcaggtgatctgcccgcctcggcctcccaaaatgctgggattacaggtgtgagccactgtgcctggccagagcttcacttttaaaatgtcttcataggctgaagttgcccttgactaggcttgaacctgccatgcacagaggttggcagtttttagttgtgaatgtagacagtacatgggtaaggcagagcagctccgtgtcctcctctcagcatcgtagtgtctcctggtaagttttcgtgtgtcctctccatgcctcaccttgttcatgtgtgtgtgttctgtttcctgtttcaggagt

SEQ ID NO: 66251 - DNA, 825 bp, Homo sapiens
tatttaagtgacatggtatagtcaagttgtttttcttcattctgccatggtattcgcctgaggtttatttattattttttcatgatctaggttcacgcaaagaatctgctccacaagttttgcttccagaaagaagagaaaattatagtggaagaaactaaaaaktatggtcagacagtgatagaagaaaagtaagatgtcttccggtattctaaaagcagatgtttgacctctgcggtggggtagtagagtccagacaactccctgagggcgggggtatggcttcagaagcttcacttttttttttttgagacggagtgtcactcttgtcacccaggctggagtgcaatggtgcgatctcagctcactgcaacctccaccttccgggttcaagcggttctcctgcctcagcctcccgagtagctgggattacaggcctgtgccaccacgcctggctaatttttgtatttttagtagaaacgagttttcaccctgttggccaggctggtctcaaactcctgacctcaggtgatctgcccgcctcggcctcccaaaatgctgggattacaggtgtgagccactgtgcctggccagagcttcacttttaaaatgtcttcataggctgaagttgcccttgactaggcttgaacctgccatgcacagaggttggcagtttttagttgtgaatgtagacagtacatgggtaaggcagagcagctccgtgtcctcctctcagcatcgtagtgtctcctggtaagttttcgtgtgtcctctccatgcctcaccttgttcatgtgtgtgtgttctgtttcctgtttcaggagt

SEQ ID NO: 66252 - DNA, 825 bp, Homo sapiens
tatttaagtgacatggtatagtcaagttgtttttcttcattctgccatggtattcgcctgaggtttatttattattttttcatgatctaggttcacgcaaagaatctgctccacaagttttgcttccagaaagaagagaaaattatagtggaagaaactaaaaagwatggtcagacagtgatagaagaaaagtaagatgtcttccggtattctaaaagcagatgtttgacctctgcggtggggtagtagagtccagacaactccctgagggcgggggtatggcttcagaagcttcacttttttttttttgagacggagtgtcactcttgtcacccaggctggagtgcaatggtgcgatctcagctcactgcaacctccaccttccgggttcaagcggttctcctgcctcagcctcccgagtagctgggattacaggcctgtgccaccacgcctggctaatttttgtatttttagtagaaacgagttttcaccctgttggccaggctggtctcaaactcctgacctcaggtgatctgcccgcctcggcctcccaaaatgctgggattacaggtgtgagccactgtgcctggccagagcttcacttttaaaatgtcttcataggctgaagttgcccttgactaggcttgaacctgccatgcacagaggttggcagtttttagttgtgaatgtagacagtacatgggtaaggcagagcagctccgtgtcctcctctcagcatcgtagtgtctcctggtaagttttcgtgtgtcctctccatgcctcaccttgttcatgtgtgtgtgttctgtttcctgtttcaggagt

SEQ ID NO: 66253 - DNA, 741 bp, Homo sapiens
ccacgacctcagagcccataggcagctcacgtgggatttcatgaatcgaggccttagctcctcaaggatacacatttggggaaaggaagccctacgcgatgccaaagatagtgaacaccctgtggtctgcttaatttacaggacaacaaaaagatgaagaaatctctagaggaagaacagagagcccgcaaagacctggagaagctggtgaggaaagtcctgaagaacatgaatgatcctgcctgggatgagaccaatctataagggaygtcctcagttctttctgttgaagaccagttctgaggtgaagctgggcacccctgacccaagtcggggtgcactcaggaccacagggcagggctgggtggggcgccaccttgctctctgtatatagaaaagctggagcttattctgcgaatggagacgatcaaaccatgactgatgaatccagacaggagggattgactctgaggacctgagctacatcaatccactctgtgaacatctcagttacctcattctgcaataagttcagtgactgactaaaagtcttgtttttccagactttgaattgaatatataaatattatatatacatgtttcttgtaaatatcccattttgaatgcatacctgtggtggttctgtccgggctaatccccatgctagaatgtcctttccagctacgtgaataagaagtcccatgcccgcatccaccggaagcagaagcctggtggatgcct

SEQ ID NO: 66254 - DNA, 635 bp, Homo sapiens
  misc_feature (1)...(635): n = A,T,C or G
gtggccctgcacgccccagatccccatccgtggttcacacgcgctccaggcaggaaggccacacacacgagcctctgcacacaccatgccagctccctgaacctgctgtgatccctgcccagcttccttctccttctncttctcacctctccttccgtggtctgatgctcaaactccgggagaactggtgtcttctgtccaaagaaacttgacatgcagcttcaagctcagtgtcaagaaaagggtctccaggttcagagatttttatgttgtttatgacatctgctgtgaagacacattcagccggattccaggtggtgtcacagctcacagacagaaaggggtgtgcagtctgggcccgctgaaggtcctgggggtgctggtggcaatcgtgaccgcaggcacgtctctggagttcccacacatttcctgtcaccactgtactcagaatcttgtcttctcttcccgcctggaccatctttggaaacctgtctgtggtygggtcttgctgtccgtggccacgctgccaggaaccctcagctgggacattctagtgggccgccgggcagtgtggcttggaggtgtcccctggaggccagcctgatgcctgcctttctaggggagcagctcccagc

SEQ ID NO: 66255 - DNA, 629 bp, Homo sapiens
ggagcagggagctgcatcagccctgccgatcccccaccatgtgggaagcccacctcggcccccttggcagctgtgacctggtgcctgcccagaaagcctcagcttactccaacctcaaagcctgttaggggttgtggaggagggtggagggccgggctaggaatggaaatgcgtgagagacttttcagggtctactggatttttaaaatgcatggcgacattgtggaggtgcgtgcaggaaaataacggtgggtgtggagggaaaatgggacaccggaggaggcgcgggaggactgccgggattcgacggctgggcggtcagatgcgatggggactgaacttttaaaatgagaaagaatgtatgaacgtttgtgtagtgatattgaagagaacaaatcactttatgaataaaaataatgcttcgttcagtggcatatttcctgcccagtctgtttgctgaaattaaacatccrctgtcacctggagcaagtcttcagaaacctttgttctcctggctctgtgagcagatgcctctgtgctgctggggcttctcctcccgtgtctggggacggtggggagggcgcctggcactgtggagacagcaggaccctgaagccagaggtctctgt

SEQ ID NO: 66256 - DNA, 859 bp, Homo sapiens
gcatcatgccagctgctcccaccaggcctcctggcagaaccaaagccataatctaacaggtgtgatgttgcattgtgtccatgaatgatctgatgacagctagagtcacacataccatctacatcttcacagtaacagcaacagcacaaggtgaaagggggtacccaagggttttttttccttacccagaagattactgggtctcagaaaaaacacttgagaaatcaaatgctaagcagtttcccccgtaacatgtttactcctagtgatactgctaactagacagaggaatggttctcagttcatcaacaagtgatttcagatggaaactgagatgcccatgaagacagagcaatgtgctgggggaacctccatacacatctccagccgcaaggaacccagcagcctgtcgtgatcaacagatggccttcagagatgagacttcacaagtagcctcctgctcccactcagggtggagatagacacacacacacacatgcacacacacacacagggacacggggcccctgtaaccacatgacctctggcaggtctctcttgttgactaccaaagcttctaagttctccaatttactggcatacagttgttcacagtagcctctagtgagtctgaatttctgcagtatcagttttaaaatcagaaacraaaaagaaaaattatttatttgggtcttctcttttttcttagtctgactaaaggtttgtcaattttattttttcaaaaaagccacttttggtttcatcgatcttttgtaatatttcaaattcatttacttccactgtaatctttattattttccttctacaattttgggtttggtttgctcctgcttttctt

SEQ ID NO: 66257 - DNA, 373 bp, Homo sapiens
gatcctgaaggacctgacgtaagtgaagaaagtggaatccctgcctccattctttttcacccgagtctgttacagagctagtgctttttaaatcaggaaatcacattacacgtattttctgcgcatctagtacatgcatcaagatgtgctatttgtctcccagagctaacaatacattctcacttattcatacaaaagaaattgtacagaagtaataaagatattaaacatgctcagtctgtccccatcatttttgataatccaaatgtaaatttaaacatttaagaaaaaagtcatcaagttaaatttaaatttcagccttagtaaagacacccgggtcggtamtctgtttgcctactggtgactgtaaact

SEQ ID NO: 66258 - DNA, 2415 bp, Homo sapiens
  misc_feature (1)...(2415): n = A,T,C or G
ggagttgaccaaatacaaggaaaaataagtcaaagattgccactaatgtaagagaagtggcatgatgcatgaggagacctgctcacaagaaggtgcacagatgtcaaattatgaaaaagaagcagtaaaaatggaggcaacaaaagaccattgtgttcccgtacccaagtgcgagctcagcgaggggagaggcacccggccatctgttcactgtgcatcctggtgcctttaacagagctgcacagagcaggcgcccaataaacagttattaatgagtgggtccccaggccagtctgtcctgcagtacgatgctggggcagatggaaggtgggcactcaggaggaagctgagagtgcaagccccgcagcacaagacggtggcacagctccacgtggtggagctgctcagactccattgcaccacaccttttcaccgtttcccaacacaggtgcagaaaatgaaatgctcacaagaaaatgactgctgcacaaaaacaccaatcaactgctgtttcacaccaacaattcaaaggtctcgtgggttcatagttatatctactcaagaagaaaatgaagattgggagtaggggaagaaataacaaaacaaatgcgcattttccccagaattcaaaacatacacatgtttagagggtttactttgttgttatcatgttgagtggtttaaaattttaataaattctttaaaataaattattttccatttctatagaacatgcaattgctacataagcttaggtacaaagaaggtttagacgacacagatttagtaccatgagactatacatttgatttaatagcattagactacacagatttagtatcacatactgacatattaagcagcaaattttaggatccagaaacacctgtctttaacacgtatagcgtttagacatgctcccctaattctacgccatgtgatatgtacacatcaatcctgggaaacactatataagagaaaaaataaattagaagccttatgtctaaagtacttacagtctannnnnnnnnnnnnnnnnnnnnnnnnnnnnnnnnnnnnnnnnnnnnnnnnnnnnnnnnnnnnnnnnnnnnnnnnnnnnnnnnnnnnnnnnnnnnnnnnnnnccgttcttaacacgtatagggtttagccagcttccctaattctacgccctttgaaatgtacccctccattcttgggaaccccttatttaagagaaaaaataaattaggaagcctatgtcataaagtactacaagtctactctgatacaaacagaatggcactcaatgcatataaaattttcaaatcacattatacattttttcaaatatcatttttgaagactggctatggcatggggaaacacgcacattactatgttacgggacaagagcaagggacatttccatatacatgatattaaaacaaaaacatacaattacaaaaatacagagattagaaggaaacagaccaaaaccttaatggtggttacatttgtgtggcagatgaatgaactttatttccttcttcctattctaggtactttacactacattctacattgctgagttttacaggcagtcaaaaaccagttagtttaaaaatgttctgcaattactcaccacattgtaatagcttttgtttatggcagtcgtatcaaatcctttgggagggctcttcagtgttcctgatttgggagacacaggcttctctgaaatgaaaatgtaacatagttttactgatcagtactaaagatgacaaaagttccagcccctcacacaggccaaggatactcatccagcagcctcactgaattaacaagccaaatggcaagccaaggaaaaggccatccacagtgaccctcagtgccccagaaacccagtccctcaggctcggctcaccaaggccaatcacagcaccccatccccaccctgttctcccagtttcaagttgaaggcgtctaagagactgctccacgaatgccagccaaaaccaaagcagtttagctacaaggacaattccatagtgtggtaaatataaagcgtcacccaaataaaaggcattttggcagatacataacaatattaaaacatcagggctaaaagttagggactcagatccctcagaatggaaaagtctctctaaacaagcaagatctggctcagggcttgaaataaccatcactcacaggagacaaggaggagaaagaaaagtcatctcaagcaggggcaaaaacaagaaaaacccacaccgccttcacttccacaccaggcaaaaccattaaagcagtcctgactccagcaaggattcygatgttttaaaacagcaccgctttcactccacatccattcaacacacacttactctgcataacaggtgctgaagaaacacctgccgaagaaacacctgccaaac

SEQ ID NO: 66259 - DNA, 729 bp, Homo sapiens
acaatgataggagaaaataattggcaggatctctggtgtgacctccctcttcacaggtgttgttcagcactcccgacaaccttgaactgggtgtcgctattcttattctggcggttacttttttactgagttcttatgcaactttggcagtggaaaagaataagcatgttgatgggtccagcagagcagtgtgtgagatccattggctaaaagtggaatgttctcaattaactctttattcacagagacagccaatgctggtgtggccatcagagcactctaggactacgccctcattctatagctatgtaaagaaactgagttccagaaaggcaagcagttcgccctcgaaatgtggcccttctcctgagttccttaggtcatatagtgagactattatctacttcattctctggccagaaaccrggaagcgcactcatttccacacctctttttccctaggtgtgccttcaagtcctcttttcttctacctttttaatctccaacttatccgttttttagctagagccctcaatttctgaattattccaatatcacgtatcaccctgcatgccgtcctgtgttctgttgactgggatttccctggctcttagatgagcaccctcagcaaagcaccaacttctatcttcttgttagtcctgctcaactagttaagcagctgaacgatttctggaggcaaagctcactggcataaggtcatccgctttc

SEQ ID NO: 66260 - DNA, 729 bp, Homo sapiens
acaatgataggagaaaataattggcaggatctctggtgtgacctccctcttcacaggtgttgttcagcactcccgacaaccttgaactgggtgtcgctattcttattctggcggttacttttttactgagttcttatgcaactttggcagtggaaaagaataagcatgttgatgggtccagcagagcagtgtgtgagatccattggctaaaagtggaatgttctcaattaactctttattcacagagacagccaatgctggtgtggccatcagagcactctaggactacgccctcattctatagctatgtaaagaaactgagttccagaaaggcaagcagttcgccctcgaaatgtggcccttctcctgagttccttaggtcatatagtgagactattatctacttcattctctggccagaaaccaggaagcgcactcatttccacacctctttttccctaggtgtgccttcaagtcctcttttcttctacctttttaatctccaacttatccgttttttagctagagccctcartttctgaattattccaatatcacgtatcaccctgcatgccgtcctgtgttctgttgactgggatttccctggctcttagatgagcaccctcagcaaagcaccaacttctatcttcttgttagtcctgctcaactagttaagcagctgaacgatttctggaggcaaagctcactggcataaggtcatccgctttc

SEQ ID NO: 66261 - DNA, 842 bp, Homo sapiens
tacagcatggtgaatatagttaatgatgctgcatggtacacttgaaatttgctgaaagagtatctatcttaagtgttctcacacaaaagatcactccatgaggtgatatattagcttgatggtggtcatcactttacaatgtgtacatatattaaaacgggtttgtactcctcaatttatacaacttttgtcaattgtatgtcaataaagctgggggaaaatgtgttctgattaaaaagacacacaaaaaaaaataacaatgagaagagaaagctcatgggcatctttctgaaggcataaaggttggccagttggtccctgactggaagcagtcacttgcttacgtggtctgatttaaggggtctgtaaaagcttcttctcaacagtttactgcttcactacttgtaatgaatatttgagcacacactggatgtgagatattgtcttccaatgagtgagtagaatttttttttaagacatgaaactgtttttgaggatattaaatggtaaagaaattaataacaattttcaaaatttaacttaatttcgctaagattttttctttctttttggtatgaagrtatagtttaaagaaaatatctgcctaaaactttaggatagaagctgagactttgtagcaaatattaataaataagccatgcaataattagaaataggtgagaatttgaatgtgggtgatgagaggaccaaaacagcagagtatcacaggctcaaggactttcatcaaatcgaaaatttaattgaacttgcctacatttcttgaataaaaaactcaccatctcattaaattttgaagtctgctatgtgttcttatttttttg

SEQ ID NO: 66262 - DNA, 539 bp, Homo sapiens
tagtcttaatgtcaattctcattaaaggtcttgcttggatgtgtttattggacagagactgtcatttaaagctttccagatttgaagaatgtgtggaaggccagaaagaatgacaaataatagtgaccattggtggatatgtgcagaagagtttattgtcatatattgctgatagaaatgggatttttatagctctttatggaaaaaatgtggaataacgtacctatcaattccactcctgggaatctctaacatagaaataaaaactccaatatataataaatacatttgaaagagcattgtttatagttgcaggaaaaaatcctgccaataaagtgaaaatccacctatcaggaagaaatgaataaaatgcaatataaccatatctaaaatgttcatgcacccamgtaaaaactaatgaaatttatacagctaatttggagggatttcaacaatgaatacaggaagctggacaaaggtatatgtaatatcattatgtgtactgctgtgtacgtttgggaatgtttctatttgataga

SEQ ID NO: 66263 - DNA, 753 bp, Homo sapiens
atccttttttttatatctagcaattatactttttggcacattctaaggcattaattatgaatatggtcagatttatacataaacatacttaacatagccgtatttgtaataggaaatgaccagaggaaacctaaaagttcaagaataggggaaatgttcatcaatttattgggttgttaagcagccattaaggaagcatgtgtgtgtacttgtgtatttcacatagcaagcaagggataaaccatacatagctgctgcaacctcctttccgtgtctgattgtgcggtcctagaatatgtttatcatcttcttttgctactttcctttgtccttacccaaagaccccagctaattgggatattgggattctttatctagttgagtgacccagacttcatttctgaagagtctgaatcgtcagggagtatgcctttttttttttcactgggagttgttgtggggactgttgtggggatttgttgaaatttttcattagacataggaaaaatagaagtactatttttcaagtactaagtccttgatatagaagtactaaggggtaccccagagatgaccttcacttctgtacctagcactccactmcccagtgtatagcagcaacccagtttccctggtgtcagggtaaatcactcccttcagcagcataaaccacttgctttctgtctgtaggtttgattgtatgtatagcccaaatgagcaggtagcagccccgactttgaatctgatgaaatt

SEQ ID NO: 66264 - DNA, 1872 bp, Homo sapiens
cttgcatcattattttaaggctgaattgggcaaagcaactcatatgttcaagcctaaaatcaaaggacaataaaatatattttactaaccagcagattgtggcaagaatcttaatttaaaatacaactataagaagtcaagaattggtcaagattaatattaacttgtcaggtaatggatatttatagtgatgattttttttccttaaaaaatggtcttaaatattaatctaatgacatayatcaacaattaattctacaatgtttatattaaagatattcaataataatgaagtttttaccatagacccaaatctgtgtcaaatactgagaatgtagtgataaagcttatagtctactgagggaaatagacattaagcaaaatttaggataaccaccaatgataagagataatcaatagttaaatacagttggatgcttgccataaatccatatatccaaattgtctttgggctcagccccaggtttcaggagtaaaggtgatattacatgtaaattagtgggtatctaagaggtaaagcaatctttgtatcctggatgaaggccaagaaagatggaatcttcaaggaagatttaccttcgctctgtggcaatatgatagaaatgactgcatggtgttatttgacagataggctaagataccgccttacaaacacacgtacgcaaacacgacccaataatattggcaatatttacaatttcttacatttttaagaggcatatcttgtcaagaagctgagagacattcccagatgttgagccatagagaccaagagagagttcagaatattctgcatgaaattatggttaacagtggcaggtacaagggactagtaattgctgaagaagcagccagtaaaatgaattattccatcaagaaggtgaagcagacgtcctctacgatcaacacctgatttaggataagcatcacacaggaaaacagaatgaagggtagtagaactgggaatttatttaaagatatggataaatgactttaggttatctggatattactaaacgaagtttggagatgacttaatctatctagatggtactagactaaattttctgagtgaaccaaagtggatcctcagagctatgtccaatgcaattatcaaaatattacaaaaattcacatttgattttaaacttttaaaaaatattatggaaaagatgctcagtgggtgaaaacagtatgcatgaggtaagggaaggcttctctgaagcagggactgataagcaaattccaatagtgaggagagttggactgcgccaagagggaaggagggtgggttggcacagtccaggcgtgggggaaagtgtgtgcaaacgtgttgatgctggaagtagctttcctcaggggcattcccaaagggggccaagaggctcaagatgtgtgattgagggacaaggtacattaagaaattcttttgtttttgtttttcttggaaaatagtcactgattatgcacaggtggatcacagataaaattggattttaatgttaaggaaacaatgctggctgttctatgaataataagctgtgagttggaagtagatagcgaactggcttcttcaaggggagtggattggagagaagataaattgtgggggagaccaactagtaggttatttttgtcgtctaggcagcagttgatggtgtctgaatatttccaggttaaagattagagaagcccaaggccacaatttttttttaatgaagagcaattaactttgcacttgttggagagaacttcaatgtttaggttttttaaacagctaggactgatggagctccagttttcttgcattcacccttagaaccctcacacaaaattgtgacaaagtcattt

SEQ ID NO: 66265 - DNA, 595 bp, Homo sapiens
tggcttgcatctaccactattgtttgctaaactgttcagtttcagtgcacgtgtgttattggttcattactattgcccagttgggaaatgttatcaactaaaktaggcagttccttttgcttttagtctcagagacgccttaaacatgatctaagaaagatttgccgcatcttcttcggtgaggttgttgcaaacatttgtaatacagtttcagtgtcacattctacatcccatcttgggatttccgaacctcctaaattattatcatcttaaatttgcatacattaaggttcattctttgtactgcatatttttatgggttttgacaaatacacagtatcttgtatccatcattacagtatcatacagaactatttcactgccctaagaacttccctgtgcttcacttattaacatcccatccttgctacctagaagctctggcagtcactcatctgtttcttgtctttacagttttaccttttcaagaatgtcctataaatgaggctatataatatgtagctcttccagactggctttttcatgtagcatttaagattcatctttgtctttgaataggtttatagcttaatcc

SEQ ID NO: 66266 - DNA, 595 bp, Homo sapiens
tggcttgcatctaccactattgtttgctaaactgttcagtttcagtgcacgtgtgttattggttcattactattgcccagttgggaaatgttatcaactaaattagrcagttccttttgcttttagtctcagagacgccttaaacatgatctaagaaagatttgccgcatcttcttcggtgaggttgttgcaaacatttgtaatacagtttcagtgtcacattctacatcccatcttgggatttccgaacctcctaaattattatcatcttaaatttgcatacattaaggttcattctttgtactgcatatttttatgggttttgacaaatacacagtatcttgtatccatcattacagtatcatacagaactatttcactgccctaagaacttccctgtgcttcacttattaacatcccatccttgctacctagaagctctggcagtcactcatctgtttcttgtctttacagttttaccttttcaagaatgtcctataaatgaggctatataatatgtagctcttccagactggctttttcatgtagcatttaagattcatctttgtctttgaataggtttatagcttaatcc

SEQ ID NO: 66267 - DNA, 595 bp, Homo sapiens
tggcttgcatctaccactattgtttgctaaactgttcagtttcagtgcacgtgtgttattggttcattactattgcccagttgggaaatgttatcaactaaattaggcagttccttttgcttttagtctcagagacgccttaaacatgatctaagaaagatttgccrcatcttcttcggtgaggttgttgcaaacatttgtaatacagtttcagtgtcacattctacatcccatcttgggatttccgaacctcctaaattattatcatcttaaatttgcatacattaaggttcattctttgtactgcatatttttatgggttttgacaaatacacagtatcttgtatccatcattacagtatcatacagaactatttcactgccctaagaacttccctgtgcttcacttattaacatcccatccttgctacctagaagctctggcagtcactcatctgtttcttgtctttacagttttaccttttcaagaatgtcctataaatgaggctatataatatgtagctcttccagactggctttttcatgtagcatttaagattcatctttgtctttgaataggtttatagcttaatcc

SEQ ID NO: 66268 - DNA, 595 bp, Homo sapiens
tggcttgcatctaccactattgtttgctaaactgttcagtttcagtgcacgtgtgttattggttcattactattgcccagttgggaaatgttatcaactaaattaggcagttccttttgcttttagtctcagagacgccttaaacatgatctaagaaagatttgccgcatcttcttcggtgaggttgttgcaaacatttgtaatacagtttcartgtcacattctacatcccatcttgggatttccgaacctcctaaattattatcatcttaaatttgcatacattaaggttcattctttgtactgcatatttttatgggttttgacaaatacacagtatcttgtatccatcattacagtatcatacagaactatttcactgccctaagaacttccctgtgcttcacttattaacatcccatccttgctacctagaagctctggcagtcactcatctgtttcttgtctttacagttttaccttttcaagaatgtcctataaatgaggctatataatatgtagctcttccagactggctttttcatgtagcatttaagattcatctttgtctttgaataggtttatagcttaatcc

SEQ ID NO: 66269 - DNA, 595 bp, Homo sapiens
tggcttgcatctaccactattgtttgctaaactgttcagtttcagtgcacgtgtgttattggttcattactattgcccagttgggaaatgttatcaactaaattaggcagttccttttgcttttagtctcagagacgccttaaacatgatctaagaaagatttgccgcatcttcttcggtgaggttgttgcaaacatttgtaatacagtttcagtgtcacattctacatcccatcttgggatttccgaacctcstaaattattatcatcttaaatttgcatacattaaggttcattctttgtactgcatatttttatgggttttgacaaatacacagtatcttgtatccatcattacagtatcatacagaactatttcactgccctaagaacttccctgtgcttcacttattaacatcccatccttgctacctagaagctctggcagtcactcatctgtttcttgtctttacagttttaccttttcaagaatgtcctataaatgaggctatataatatgtagctcttccagactggctttttcatgtagcatttaagattcatctttgtctttgaataggtttatagcttaatcc

SEQ ID NO: 66270 - DNA, 595 bp, Homo sapiens
tggcttgcatctaccactattgtttgctaaactgttcagtttcagtgcacgtgtgttattggttcattactattgcccagttgggaaatgttatcaactaaattaggcagttccttttgcttttagtctcagagacgccttaaacatgatctaagaaagatttgccgcatcttcttcggtgaggttgttgcaaacatttgtaatacagtttcagtgtcacattctacatcccatcttgggatttccgaacctcctaaattattatcatcttaaatttgcatacattaaggttcattctttgtactgcatatttttatgggttttgacaaatacacagtatcttgtatccatcattacagtatcatacagaacyatttcactgccctaagaacttccctgtgcttcacttattaacatcccatccttgctacctagaagctctggcagtcactcatctgtttcttgtctttacagttttaccttttcaagaatgtcctataaatgaggctatataatatgtagctcttccagactggctttttcatgtagcatttaagattcatctttgtctttgaataggtttatagcttaatcc

SEQ ID NO: 66271 - DNA, 542 bp, Homo sapiens
caggcctagtggtgcatgcctgaggacccagctacttgggaggctgaggtgggaggattgcttgagcccaggaggtcaagactgcagtgagccgagattacgccattgcactccagcctgggtgacagagcaagaccctgtctcaaaacaaaaaggcaagtcttggggaagtttggttgtttatccttagtttgtcacctctgctaatacaatacagttgtttcagatagctcatttataacttattactatgttctgtttattaggagagattgtcaattcataaaatttatattcttctgawaacaaactttgaaaatgagtcatagtattgaggactgtatttgtatatttttgctgtatttcataccctgcagatgcattaaaatatactcctattatgtgcacagcttgcttctctcttaacacttacctataacaagatactaaatacacagtgaacctaaataatctgtcaaaatgtagtctcaaggatcttaaaataattgaatgtcaatgaatttaccttctttcttgaacct

SEQ ID NO: 66272 - DNA, 542 bp, Homo sapiens
caggcctagtggtgcatgcctgaggacccagctacttgggaggctgaggtgggaggattgcttgagcccaggaggtcaagactgcagtgagccgagattacgccattgcactccagcctgggtgacagagcaagaccctgtctcaaaacaaaaaggcaagtcttggggaagtttggttgtttatccttagtttgtcacctctgctaatacaatacagttgtttcagatagctcatttataacttattactatgttctgtttattaggagagattgtcaattcataaaatttatattcttctgataacaaactttgaaaatgagtcatagtattgaggactgtatttgtatatttttgctgtatttcataccctgcagatgcattaaaatatactcctattatgtgcacagcttgcttctctcttaacacttacctataacaagatactaaatacacagtgaacctaaataatctgtcaaaatgtagtctcaaggatcttaaaataatwgaatgtcaatgaatttaccttctttcttgaacct

SEQ ID NO: 66273 - DNA, 708 bp, Homo sapiens
ggcaccggggctgcaggtggagctgctttccagtctcgggccgtacgcccgcactcctcagcccttgggtggtggatgggactgggcgctgtagagcagggggcggcgctcatccaggaggctgggccgcacaggagctcatggaggggttgcgaggctcaggcatggcgggctgyaggtcccgaatcctgccctgcgggaaggcagctaaggcacggtgagaaatcgagcacagcgccggtgggctggcactgctgggggacccagtacaccctctgcagccgctggcccgggtgctaaacccctcattgcccgggctggcagggccggctggctgctccgagtgcgggacccgccaagcccacgcctacccggaactccagctggcccgcaagcgccacgcccagccccggttcccgctggcgcctctccctctacacctccctgcaagctgagggagccagctctggccgtggccagcccagaaaggggctctcacagtgcagcggtgggctgaagggctcctcaagtgccaccaaagtgggagcccaggcagaggaggtgccgagagcgagcgagggctgtgaggattgccagcacgctgtcacctctcaccactttctaacacttaagtccagatctgtctgtttcagatgtagaagttcctgctccaaacaacattacgtgctgtctgtgtttttgatgaat

SEQ ID NO: 66274 - DNA, 1521 bp, Homo sapiens
tgaaggttgagttgattcctgtccacctggagagtgagatcactgttgcaaacacccatctgttccaccttgctgtggacaagttagaggaagccctgcttaaagctaggcctgagaggaaaaaggtccgaggccttgtgctaatcaaccctcagaatcttctgggtgacatctactcctcagactcgcgatggaatacctggaatttgccaagaggtataacctacatgtgatcatagatgagatttacatgctatctgtgtttttgatgaatccatcacattccacagtgtcctaagcatgaaaagtctgcctgatcacaacaggacccatgtgatctgggacaccagtaaggattttggcatctctggcttcctctttggtactctgtttacacccaccacaaggagatggcttctgctgtgagcacctttggctacctccacagtatctctggcatcacctagcacaagctgtgtcaactgctccagaacacagaatggattgacaaagtgtacctgcccaccaataactaccggctgtgggaagctcacaagtacatcactgccaagctaaaggcattggagatcccctttcacagctgcagctctggcctctatatctggatcaacttgaaaaagtacctggatccctgtacatttgaagagcaacagctcctctctccgcttcctggacaacaagctgttgttatcctgtggcaaagcctgtatgtataaggagccaggccggttccacctcatctttgcagacgagctccccccggctaaaattggccatrcatcagttctgtggtgtgctgcaggaacagaagcaggctttgctagtgaagcagttggaagatgcattgagggagtagactgtctgcctcccaacgagtagctctagcccatcacttgctcagggaccccctaatgtcagcccctggtccagaagcctggggtgtatttttgtcagtgctgcaactaagaaaattgtgggctcctccaggaagatctcatctgacccagtcatcaccctccttaagctgagtgcctgctgtctttggaagctttgcatctttttagtgtttgctagatattatatatgcaaaatgtttttattggggttggggtgggaaggcctggaggcacctacagaaataaaggaagctccctgggcccctatttagatggtttatttttatattcaatatctaataaattctatgttctcttaaaaaactgataaataggtggaacttaattaaaagtttctgcgcagcaaaagcaataatcagcaaagtaaacagacaacccacagagtgggagaaaatcttcacactccgtacatctgacaaagggctaatatacagaatctacaaggaactcaaacaaattaacaagaaaaaaacaatcccatcaaaaagtgggctaaggacatgaatacacaattcttaaaagaagatatggaaatggccaacaaacgtatgaaaaaatgctcagcatcactaatgatcaggga

SEQ ID NO: 66275 - DNA, 1521 bp, Homo sapiens
tgaaggttgagttgattcctgtccacctggagagtgagatcactgttgcaaacacccatctgttccaccttgctgtggacaagttagaggaagccctgcttaaagctaggcctgagaggaaaaaggtccgaggccttgtgctaatcaaccctcagaatcttctgggtgacatctactcctcagactcgcgatggaatacctggaatttgccaagaggtataacctacatgtgatcatagatgagatttacatgctatctgtgtttttgatgaatccatcacattccacagtgtcctaagcatgaaaagtctgcctgatcacaacaggacccatgtgatctgggacaccagtaaggattttggcatctctggcttcctctttggtactctgtttacacccaccacaaggagatggcttctgctgtgagcacctttggctacctccacagtatctctggcatcacctagcacaagctgtgtcaactgctccagaacacagaatggattgacaaagtgtacctgcccaccaataactaccggctgtgggaagctcacaagtacatcactgccaagctaaaggcattggagatcccctttcacagctgcagctctggcctctatatctggatcaacttgaaaaagtacctggatccctgtacatttgaagagcaacagctcctctctccgcttcctggacaacaagctgttgttatcctgtggcaaagcctgtatgtataaggagccaggccggttccacctcatctttgcagacgagctccccccggctaaaattggccatacatcagttctgtggtgtgctgcaggaacagaagcaggctttgctagtgaagcagttggaagatgcattgagggagtagactgtctgcctcccaacgagtagctctagcccatcacttgctcagggaccccctaatgtcagcccctggtccagaagcctggggtgtatttttgtcagtgctgcractaagaaaattgtgggctcctccaggaagatctcatctgacccagtcatcaccctccttaagctgagtgcctgctgtctttggaagctttgcatctttttagtgtttgctagatattatatatgcaaaatgtttttattggggttggggtgggaaggcctggaggcacctacagaaataaaggaagctccctgggcccctatttagatggtttatttttatattcaatatctaataaattctatgttctcttaaaaaactgataaataggtggaacttaattaaaagtttctgcgcagcaaaagcaataatcagcaaagtaaacagacaacccacagagtgggagaaaatcttcacactccgtacatctgacaaagggctaatatacagaatctacaaggaactcaaacaaattaacaagaaaaaaacaatcccatcaaaaagtgggctaaggacatgaatacacaattcttaaaagaagatatggaaatggccaacaaacgtatgaaaaaatgctcagcatcactaatgatcaggga

SEQ ID NO: 66276 - DNA, 1251 bp, Homo sapiens
tgactacattaagaaaacgtctgtatggccaaagtataataaagtaaaaagcatggagtgaagatacatgcaatatgtataattgacaaagatttggtatctaaaataaagaactacaagtcacttagaaaaaggcacataatggctgggcacggtggctcacgcctgtaatcccagcactttggaaggccaagatgggcggatcacgagatcaggagattgaggcaatcctggctaacacggtgaaaccccgtctctaccaaaaatacaaaaattagctgggtgtgatggtgggcgcctgtagtcccagctacttgggaggctgagaaaggagaatggcgtgaacccaggaggcagagcttgcagcgagccgagatcgcgccactgcactccagcctggggacagagtgagactctgtctcaaaaaaaaaaagaaaaaggcacataattcaggccgggcacagtggctcacacttgtaatcccagcactttgggaggctgaggtgggcagatcacatgaggtcaggatttcaagaccagcctggccaacatggtggaatcccatctctactaaaaatacaaaaattaggcgggcatggtggtgcacgcttgtattcccagctacttgggaggctgaggcatgagaattgcttgaacccaggaggtggaggttgcaatgagccgagatcgtgccacagcactcctgcctgggtgacagagactctgtctcaaaaaaaaaaaaaaggcacgtaatagaaaaacaggcaaagtatatgtattagtagtttactggggctgccataacaaaacaccacaaactgggtagtgtaaacaacagaaattgattttctcattcttagaggctggcagtccaagatcaaggtgccagcacggttgctttctactgaagcctccctccctggcttgcagatggccagcttcttgcagtgtctcacatggccttttgtctttgtgtatgccttgctgctgtctcttcctcctcttataaggacaccagtcatactggattagggcctacccttgtgacctcttttaagctcaattacttttttaaaggccctgtctgcaaataagagtcatgttttaaggtactaggrgttagagcttcagcatatgaattttgggggcacacaattgagcccataacagtatacaacaagaagatcacagaaaaagaaacctgtaagaccattaaatacatgaaaggatgtacattaagaaggtcacagt

SEQ ID NO: 66277 - DNA, 985 bp, Homo sapiens
caatgcaaccaggcagtctggtttgtggtttccatttttcattgaattgaatttattggtgtctaaatttgatttttcatccagaagaacctgtttcccctaaggtctttttagttgtttctatgtaattttgaactgaatatcatttaattaggtgaaaatgaccacwtgaaataaaccaaccctaaaaccaaaggcatttaaaaattatcatctttagattgactgcatcagtatctaccagtagaacttgaagccttatcaggcagactaccagatagtacatgtgccctgcccctgtttgggaattctctgactgttacaagtagtgtggcacctcccagaaagctcacttcccttctagacctccccgcccccaccactcattatgccaatccccagcctgggaccaggccttatcctctgactggaaatctttgggctcaccaaaaatttggagacgtctgcttcaattatattttatacataattttgcctttacagtcccttcagaatatgtcgtgtggaacatatgaagagcactgagctggaagtctgggtttatatttgagccctggcacttattagctgtataagtacaggaaattgcacatctctctgagcttcaattccttgtttatctgaataagaagggagtgataaaagaaaaaaaatctgtgaagtatctagcataatatagtaatacctgcaataaacaatagcaattcttataatactgttactgtttccctgaactagcttttgtactcctggtaataaagcacctcaaggcagagaatggtaagtggagaagaaattaaaatgacttttcaccaaattttgcttgtaaaatgtctgaaatttaagcaaacagacagcaaacttacttatactcaggacaagtaactaggtcatggagaagaaatgccagatcttacaaatgtaaaaagtaaacacaggatttaacagtatgtttctaggtcat

SEQ ID NO: 66278 - DNA, 691 bp, Homo sapiens
atcccagctactcaggaggctgaggcaggacaattgcttgaacctgggaggcagaggttgcagtgagccaagatcacgccactgcactccagcctaggcaacaagagtgaaactccaagtaaaaaaagaaaaaagaaaaaaattacagctctttgtatcaagcaggtagctaggcagaaagtgaataggaattgctgagggcagatgaattagaggtctctgacttgagctcttatttttccttaaaaaattctcagaaattatgaaagacaaaatttcatattattctgaacaataactgccatcatattcatgactttttcttcatgagccaaacatatatcaggttattatatagccacatgctgtttatggagtgcagtgacatatctgagatatgtgcaagtattgtcagtattatttgtaataatgtcaaatgggaggaaaaacttgagaagcccaataataaataaataagtttactacagaataatcaccctgtggcatattatgcagccattaaaaatgaggtaggtccatatattttttgtttttaaaaatttttttattaatttattttttaaatttatagaaacagtatctcactatgttgcccaggctggtctygaactcctgagctcaagcaatcctctcacctcagcttcccaaagtgctgggattacaaatggga

SEQ ID NO: 66279 - DNA, 766 bp, Homo sapiens
cccgatggccaaaataaacacctccaccatgggccctggttttactgggaaaaatgggacaaggcagattcatctgctaaaccacaattccttgtttttcctgttcctataagacttggacatttattctccagatcattcctgaatctctggatgtaagaacatgtcagtccaggcctcacctcaacccctctcaagactgaccagcagtaaacagagggctctggcctcagtgtcagtccaggcctcaaagctgtctttgaatctgggctgagcacactgctatttccctgggtgaccccagggggccacttgcttagccacctgggagctgcagtttgtgggaggctgcagtctggcaagtagccccttgacactcactctgcagagagagtgtcaaggagctctgctgttccgagacggctctgagcttggcaggtaaattatccttcatctctgaggtgcgcttgcagctctagcaccccagtgttggaytgggaggggctcagggtcaggctcttctggacccagctcagtctggctggagggttgctattgacggcacagaccaggtgcagagactgtccttccaggacctgaagtgaagtggtaaaccatctttcagggttatggattctggagagaaggagacagagggtcagagtgacaaagacattgagaaagaaggagagctctgaagaagagcaaatagagggacagattcagacacacagacatggactgagagaaacagagactatgggat

SEQ ID NO: 66280 - DNA, 1007 bp, Homo sapiens
cttgagcctgggaggcagaggttgcagtgagctgagatcacccaactgcaccccaacctggtcgactgagcaagactgtctcaaaaataacacaccatgcattcctatgcctatcccttagtcatagtaagttcaatttttcccagaagtccccaaaatattatataaaagggaagcaaatcatcctcggcccgggtgctttactacccactcccctccagtaggactgaatatcattaattgtccctctgcccacctctcaccagaatatataacagggaccaatagggcctatggaagaggaggtttcttgccaatgttatcggctattattgctttttcccaattcggtcctcasccacaggggcctcacagcaatttttgcatttcaggcttcctttgttggagcaccccagcaaagaagattggacatctgaatcagctatgtaaggcaaaacctacctcatgctcagagactcagcatcctcactgaatgcgtcatcacgcctggtgaatgagttatttttgttgaatgcaaaaattcgttccttacaaaaatatggcctctttagggaccaggaaataggagagttaatattctcaccaacagtattaatgtgtttatccttccttgtaattctaagaatctgagacatataaagacaaaaggaggccaggtgtggtggctcacgcctgtaatcccagcactttgggagatcgaggcgagcagatcacctgaggtcaggagttcgagaccagcctcaacatggagaaaccccgtctctactaaaaatactaattagccgggtgtggtggtgcatgcctgtaatcctagctactcgggaggctgaggcaggagaactgcttgaacctgggaggcggaggttgcggtgagccgagatggcaccattgcactccagcgtgggcaacaagagagaaactccatctcaaaaattaattaattaattaattaatttaattaaataaaagacaaaagggatctgaag

SEQ ID NO: 66281 - DNA, 933 bp, Homo sapiens
aaggcctggtgggagcttttctcctccagcctacagcatcctcatctgcttgggggctggagaagggggatactcagatgtgttcttggctcctactctaaagggaagccttttgtttacttactttctttcgctcaatcctggttttgccttttttccttaggctttgttatttggttctctactgcacagaaatagatagaattctgacagccatcattgttaaacatcaggattttctaagaggacagacttaacagtaacatcatggcctcagcaggactccagctccttgctttcatcctggccttatcyggggtctctggagtgctcacagccactctgctgcccaactggaaggtgaatgtggatgtggactccaacatcataacagccattgtacagctgcacgggctctggatggactgtacgtggtacagcactgggatgttcagctgtgccctgaaacactccattctgtccctccccatccacgtgcaggctgcgagagccaccatggtcctggcgtgtgttctgtctgctttggggatctgcacttccacagtaggaatgaaatgtactcgcttaggaggggacagagaaaccaagagccatgcttcctttgctggaggagtctgtttcatgtctgcaggaatctctagtttaatctcgacagtgtggtacacaaaggagatcatagcaaactttctggatctgacagttccagaaagcaacaaacatgaacctggaggagctatctatatcggattcatttctgcaatgctgttgtttatctctggcatgattttctgcacctcctgtataaaaaggaatccagaagctagactcgacccacccacacagcagcctatctctaacacacagctcgagaacaattccacacacaatctgaaggattatgtgtaaataact

SEQ ID NO: 66282 - DNA, 933 bp, Homo sapiens
aaggcctggtgggagcttttctcctccagcctacagcatcctcatctgcttgggggctggagaagggggatactcagatgtgttcttggctcctactctaaagggaagccttttgtttacttactttctttcgctcaatcctggttttgccttttttccttaggctttgttatttggttctctactgcacagaaatagatagaattctgacagccatcattgttaaacatcaggattttctaagaggacagacttaacagtaacatcatggcctcagcaggactccagctccttgctttcatcctggccttatctggggtctctggagtgctcacagccactctgctgcccaactggaaggtgaatgtggatgtggactccaacatcataacagccattgtacagctgcacgggctctggatggactgtacgtggtacagcactgggatgttcagctgtgccctgaaacactccattctgtccctccccatccacgtgcaggctgcgagagccaccatggtcctggcgtgtgttctgtctgctttggggatctgcacttcyacagtaggaatgaaatgtactcgcttaggaggggacagagaaaccaagagccatgcttcctttgctggaggagtctgtttcatgtctgcaggaatctctagtttaatctcgacagtgtggtacacaaaggagatcatagcaaactttctggatctgacagttccagaaagcaacaaacatgaacctggaggagctatctatatcggattcatttctgcaatgctgttgtttatctctggcatgattttctgcacctcctgtataaaaaggaatccagaagctagactcgacccacccacacagcagcctatctctaacacacagctcgagaacaattccacacacaatctgaaggattatgtgtaaataact

SEQ ID NO: 66283 - DNA, 1103 bp, Homo sapiens
atgtatcttaattactgtttcaaaatataggtaaaacaattcctcctctgtgcagtaatggatgatcrtttattacgcttccatacacagcaatttagttatgcttttacttactacaataagtatcatattatattttaactgtttacttatctctgtctagtaaaaactaattccctacggatggagactttggcatactcatctttttaccccaaggcctttgaatataggacatcctacgggctttatatgtgagatctctgaacatactggttatataaccaataaacgttttatttattgaacataaataataatatttattgaacagaaataaatgttttattttcctcatctcagaaatgccacttatgtattgctttgaatccaaattatatttcatttttattgatcctgctgtgttaaactctaagtgccttcacaaaacgaaacatttcatcaatctttaaattatataataaatatccaatgaatatttattgaataaataaatagagtaagtgagtgaattactccatgataaaaactttcagacttttttggttgactttccaatatcattcattcatttggcaaatgttgaacatacatatgtgtctattcttttataattacatattttgttttccatattttatcttcatgttttttgtgttattcttaatgttttaagatctatctcaatatcatatttaatgtttgaaatattatgccacatacctttactatgaatttccattttttcctaattatattttataagtattttaaataaatattttacactataggttttgtttttcaggaatgtgtaaattattcatataattttgttttataagtatattttctctttggtttctgtgtatttttttctaggtagaaaacaacagttttcagaataatttttaaattatttatcttattaattagttgcttctttattgtttatttgtttatttttggtgacagttttctcagtacaaattttgttttgtaactcatattactactttaaatccaaaaaatgtttctatttcctctattgggctatataattgttaacctctgaaagtagc

SEQ ID NO: 66284 - DNA, 1052 bp, Homo sapiens
gtatattggttaaatgaaagaatgaaggactacccagtggagattggtagattaccttgtattttggggaagatgagtgctcacctcgtatgttatgtccaggtagaggacatggaggcctccaatactgagcagcaggcagtcttgcctagcataacttacaggtacgttgtgcttattttctgttcaaactgatgacagtgaggtgaagaaartgagaagctctttgaacagtgcctggcacacagtcagttcttaataaagaatctgaattaggaagagcctggattttgagttttcttatttatatcttgcctcattccacaaaggatatgagacatttgactttgaaatcagtcagatctgggttttaatcttggcacagatacctaaaggtatcaagtcactaaggtcacacttacttgaactaaacacttacccttgaactaaacacttcaactctctgatcattcatttcctgcttcccaaatgtttagatttcaaatcagaagaggaactgtgagaaaagaaaatcattttttcagtacagaagaaacaaagagaaatcaaggtaaatagaaaatacaaaacaagacagatttgagtcaaaacatatcagtaataagaatatatgtgaagaaattcatctattaaatcacaggtgttctcgcttgagtatagaagacaaataacagctaaacaaaatgacacaggaaggttaaaaatataaggggatagaaaatgatatgccagacaaatattaacaaaaagaaagcattattagtagtagatgaaataacattaaagggacaaagagggaaatttcaaaatgaataaaggaacaatttaccaggaagatataatagaggcagaaaatcatatgaacctaaggaagtagtttcaaaatatataaaacaataattacaaggagaaatttatgattctacaatcaaagtgggagactttagcataactctcagaaatggaaagatcactagataaagaataattaagaatagagaggtattggctaataatattaatagacttga

SEQ ID NO: 66285 - DNA, 1052 bp, Homo sapiens
gtatattggttaaatgaaagaatgaaggactacccagtggagattggtagattaccttgtattttggggaagatgagtgctcacctcgtatgttatgtccaggtagaggacatggaggcctccaatactgagcagcaggcagtcttgcctagcataacttacaggtacgttgtgcttattttctgttcaaactgatgacagtgaggtgaagaaaatgagaagctctttgaacagtgcctggcacacagtcagttcttaataaagaatctgaattaggaagagcctggattttgagttttcttatttatatcttgcctcattccacaaaggatatgagacatttgactttgaaatcagtcagatctgggttttaatcttggcacagatacctaaaggtatcaagtcactaaggtcacacttacttgaactaaacacttacccttgaactaaacacttcaactctctgatcattcatttcctgcttcccaaatgtttagatttcaaatcagaagaggaactgtgagaaaagaaaatcattttttcagtacagaagaaacaaagagaaatcaaggtaaatagaaaatacaaaacaagacagatttgagtcaaaacatatcagtaataagaatatatgtgaagaaattcatctattaaatcacaggtgttctcgcttgagtatagaagacaaataacagctaaacaaaatgacacaggaaggttaaaaatataaggggatagaaaatgatatgccagacaaatattaacaaaaagaaagcattattagtagtagatgaaataacattaaagggacaaagagggaaatttcaaaatgaataaaggaacaatttaccaggaagatataatagaggcagaaaatcatatgaacctaaggaagtagtttcaaaatatataaaacaataattacaaggagaaatttatgattctacaatcaaagtgggagactttagcataactctcagaaatggraagatcactagataaagaataattaagaatagagaggtattggctaataatattaatagacttga

SEQ ID NO: 66286 - DNA, 621 bp, Homo sapiens
gtcccaccgccctccgccatctccgcctctgcccgccccgcagctcctccccgctcgggcccgacgggaacttttgggtgcgagtctgggacccctgctccgacggcgaaggccggtgcccaccacgcccagaggtcttaagccggactgggacccccaatagccccgcgacccccgtcccctcccccaatgccgcgtccacgaacctacaagcccgctgcagccgcaaaagacccagttgtccccgccctctcctagcttctattggttgccagagcagccccttaacccgaccgcgctgtcgccatggcaacaagacccgccttcacctgggcggggagactcttgcgcaagggagaggcgggcatttctcaaacccgaccaaaccagaaaagggaacgtcagccttccaaactcctggggaagggtcttgcctttgtgtggcctgagaactcccactgcrgtgcttctcccttccttgtattataaaactcagcttgtttcatcttgctgttttagaaagaaagcgctttatacactgtaagctagtaacgtcaacaaaaacgatacgagattgaagggctttgtcctcattcaaaatctggaaatgttatttaggga

SEQ ID NO: 66287 - DNA, 844 bp, Homo sapiens
ctcccgcctcagtctctcaaagtgctaggattacaggcatgagccactgcgcctacccaggcctgtttttaaagaatggagacccttatggagttgaatggagaaaggtgaatcaaaacattggtatagaggtggtttgttagttttttaacacactgttgctgtaacaagttaccacaaactcagtggtcttaaacagcacacacttatcttacagatctgtaggttagaagtctggtgcagagctcactgggccaaaataacgttgttgaccaggctgcatttctttctggaggctccaggggaaagtaatttccttgccttttccggcttctagaggtcactcacattccttgagtcatggccccttcttccatgcttaaagtcagcaacgttgcatctatctgaccattcctccaaataacatcttctgactttcttttcttcttcttccacttttacagactctttagaatatgtgaggcccacctggataattcrggattatctgtctgctgattggcaaccttaattccatctgcttccttaattcctctttgccatttaacataacatgtttacagattctgaaattaagacatggatatcttggggggcattattctgcctacctcacctgacgtgtggcaatttactgtaatcaaatttcttgactaagcaggttttcctggaagaatagagcccagttccaaggagtgtatatatgaacacctttaaatgatctctatctgcctcttacttgcagatttacctgtaatagccttctggggttcctctatcataacgtgtacatgggggtattatcagcacatgggggacagac

SEQ ID NO: 66288 - DNA, 615 bp, Homo sapiens
ctaatgggtacaatatgtttcagctcctcattggtgctgagattggatttaagaaactcacccttctgtgagctccccaaaatgtcagccagtggggaacttttctgcctttgattccactttacctagccagcmggaagtaagtttgcacctctgtggggtcagggcaggggctcagagtgctcctgtcccctccctgacagcttcccttggaggtacaaatagtgaattttggagtgccaggggacgttccacctactgcctctctgggcctcttttccagcccagaccctctcccacctctttggaaactcatctttgctctctagttctgtggtagtgaaggttgcaggatttcttcttgtgcagacattcctggtccctgccagcatctgctccttctcctgtgtgctccctcttgatccgaagttgccatctgtccctttctctaagctcaaatcctcagaatcacgttccaattacttctcccttttcatcttcacctcaaaaaagacaatacccaaagcctgctgattctgcctcctaatgacccctctgccttcatggagccttgttccaataagtttcccatgtaatagggataaaactctaacg

SEQ ID NO: 66289 - DNA, 615 bp, Homo sapiens
ctaatgggtacaatatgtttcagctcctcattggtgctgagattggatttaagaaactcacccttctgtgagctccccaaaatgtcagccagtggggaacttttctgcctttgattccactttacctagccagcasgaagtaagtttgcacctctgtggggtcagggcaggggctcagagtgctcctgtcccctccctgacagcttcccttggaggtacaaatagtgaattttggagtgccaggggacgttccacctactgcctctctgggcctcttttccagcccagaccctctcccacctctttggaaactcatctttgctctctagttctgtggtagtgaaggttgcaggatttcttcttgtgcagacattcctggtccctgccagcatctgctccttctcctgtgtgctccctcttgatccgaagttgccatctgtccctttctctaagctcaaatcctcagaatcacgttccaattacttctcccttttcatcttcacctcaaaaaagacaatacccaaagcctgctgattctgcctcctaatgacccctctgccttcatggagccttgttccaataagtttcccatgtaatagggataaaactctaacg

SEQ ID NO: 66290 - DNA, 615 bp, Homo sapiens
ctaatgggtacaatatgtttcagctcctcattggtgctgagattggatttaagaaactcacccttctgtgagctccccaaaatgtcagccagtggggaacttttctgcctttgattccactttacctagccagcaggaagtaagtttgcacctctgtggggtcagggcaggggctcagagtgctcctgtcccctccctgacagcttcccttggaggtacaaatagtgaattttggagtgccaggggacgttccacctactgcctctctgggcctcttttccagcccagaccctctcccacctctttggaaactcatctttgctctctagttctgtggtagtgaaggttgcaggatttcttcttgtgcagacattcctggtccctgccagcatctgctccttctcctgtgtgctccctcttgatccgaagttgccatctgtccctttctctaagctcaaatcctcagaatcacgttccaattacttctcccttttcatmttcacctcaaaaaagacaatacccaaagcctgctgattctgcctcctaatgacccctctgccttcatggagccttgttccaataagtttcccatgtaatagggataaaactctaacg

SEQ ID NO: 66291 - DNA, 590 bp, Homo sapiens
gtgtccaatcttttggtttccctgggccacgctggaagaagaattgtcttgggccgcacgtaaaatacactaacactaatgatagctggtgagctaaaaaaaaaaaaaaaaaaatcacagaaagatctcatactgttttaagaaagttcacgagttaggccgcattcaaagctgtcctgggccatgcccgtgggttgggcaagcttggtgtagaggttggttttcattcttcaagtttctagactgtgtgctaaaggttagggttgctgattctagatacacagatgcattttccattcatagataacctagttctggtrttttttagtatcagtcactcttgtgtagtttatttcattggatctgctcctagggccatctaggaccaagtaagagggcttaatattttttattcagtaatattcagagacctataatctttgatgatacaggatagagagcctgactgaaaagctacacacatacacaaacacacacgtaaacatacacacatacataaatacacacacacacacacacactacctgtgtgtttgtttatatatcagacatagcaaaaattcattaatc

SEQ ID NO: 66292 - DNA, 1149 bp, Homo sapiens
gcatctgcctgggatcatcaagccctagaagctgggtttctttaaattagggctgccgttttctgtttctccctgggctgcggaaagccagaagattttatctagcttatacaaggctgctggtgttccctctttttttccacgagggtgtttttggctgcaattgcatgaaatcccaatggtgtagaccagtggcgatggatctaggagtttaccaactgagacatttttcaatttctttcttgtcatccttgctggggactgaaaacgcttctgtgagacttgataataggtaaatgtcggctaagatagtttctttaaatttattcgtgggatacttataataatacaggtgaaagatagccaggcgaattcctttgtccattgctgagagattatggtgacatggatgttgtttttcgaaatgttaaaaaaccttatttttgcaagtctggccagagaacaggctttccccacattatgtaatttagtcctttgtggcttactaaaatagggagatgcctggatattcgttagtaagagaggggctggcattttctggagggtgatacattacatagtgttaaataacattcaaaatatgatgctagcaatatcacaaaattgggagatcctttttatcttggamgcttaagataaattccatttatcgatgacctttttccctctctttttcagctcctctggtgcaagtgtggtagctattgacaacaaaatcgagcaagctatggtatgtactgatgaaaaatcatttatactaaatgtgggcacagcacaaaaataagatgttttgtggaaccagtgcatccctaagttcagatgatgatgattgctcttgatgcgcgtagaaatgccggcgctgtctccattcggccagcgtggagccacctaccacggcagccgtggagggagaaaggggccctgcgggtattaaatggtcttcttccccgcactggtttcacacgacgggattttctcacggtgaccctttttgctggggatttattagggaagcgctggccaactatctccttcggctggtcgtgagcacacctttagcgatgtggctttactaggaatcctaatattttactagggagccgggaggtggggagggccccagaagtc

SEQ ID NO: 66293 - DNA, 724 bp, Homo sapiens
gctgaaggtgtgagaagaccctattggagtgaggctcacaggaattacaagcccaggagaagcccccagtgagcagacaggaagaagcaagctccctttcctctcccagccacacaacctcctttcaaggccccgcgtgggcaaatttgtggtgttcaggatcccagttctaccatcacaaagccaatctagaaggccgagttgggtgctgaacgaccatagcttaaatctattgcattttagctttggtgcttatacttctgtaacaatacctttttaattatgtttattattttaagagatcgcataaactcacatagtctaaaaccagtgacatcttacctgaatttttttcttatgtgactactgatattgaatgagtccataattgtcctctctgatacttgactcttggtttttctagtatatacctaggtattagctctctaggttcataattgatttaccattgtcttttacaactttaatgtataatatatacttattctttcaacaaatattaatattaacaaacattaattcaaagtctatcatggactagccgctgtgctatttgacacatagaaaatgatcaagattaatatagttctgtccttgtgggttttatctgaaaaaaatatatcaatcatttttcaatgattatrttcaatgaggactgaaaagctaaagcatagtgccggttgagaaatggtagacacacaca

SEQ ID NO: 66294 - DNA, 611 bp, Homo sapiens
taaatttgaaacctattattggcaatagacaatagtgctatcaggggaaaagaaggaagacagagcatatagaagaaaaggaaacaaagacttaaagaaaggaagaaaatggatgtaaaatatgagtgtacccagaacatcagtcaatccaagtctgttgtccaaagccttccacaagttaatgtcacgctcaagtgaaagatacctcctctctggagaagtttaataagtccccagatattcacatcccaaaaaaatgtatcactatttatggccatttttgaaaatgtrcatttaatccacatttatgagaaaggtaaacttggagtaattttcatctattgcgattactgatgtattgatttattttcacattttccttgtgatttattctgtttttccccttttaccccatttcttctttcaaattaattgagggtgggttgtttatttgtttagttttcacatttcatttttcacctattagtatgaaggttatactctccttgttattttttaactagttaccataggtggtataacatgcctatttaattaaaattatgaaaattaacctccgtagaaataacagacaacattaactcctttca

SEQ ID NO: 66295 - DNA, 851 bp, Homo sapiens
ggatccaatttcaacaggagatttgaagaagtcaaaccaaccatgtccacagtatagccacacccatttgtatatagaaatggctgtgtttacatttataggtgtgtttatgtgtgccaaaacttatgtatctctacaaacacagtgaaaaggttgggcttgctcaagtaatgatagggtcaacaaaaaggcacgtggccctagctgggggcctggacatgctcctctagcagtaagacccaggttgccgactgcccgttatgttgttctgtgttttcttataacaagccagactctgctcacatttatttgattcaaagtacagtgtagatctggaaaaacagaaatacgaaggtagtaatgtaaagactgcaagtataatttttaaaaatctttctgggtataaagttctatgagtatttaattgatttaatccaaatagcaaagacctctttccttataatagttaacctttcaaaaccctgcacatttctaagaataagaagtgtttggtgagtgctataagaagtagctcaaaaatagatagaaacacagaaacmagctcacctggcagaatattacatttttccccaaaaaactttatagaaataccacgtcttctttgccttgtgtttttctgttgaaaccaaagattgcaagatgtcatgtttgcacccaattttagagcactgtaatgtcaagtagactccattttacatgagattccaaaaccgtgtgctgttttttatattcatctttcttctttgtaacacaattaaaagcatcctgctttcttcacagtaatcagaacatgaaatattaccttgtgctccaaatgcaacccctggggg

SEQ ID NO: 66296 - DNA, 1028 bp, Homo sapiens
agaaaacagatggttctttggcttgaatttatgccggcagttttatgtgttcaggacaagtttgattaaacaataatttcartaggattttagctaacaaataactgtccaaccattgtctgtttcagaaaaagtagttctggcttttttcccccttttcccctagcctggtgaaaatatttgacattttcaatcctaaaatagcaaaacttgaggagtttgcttttctctgtcataatgtcataaattctaatcatctgtgacataggaaagcagcatagcactgtggttagaagtgtgtgctttgggatacgcagggtgagttcaaatccttggacaattaacccttctgttgcctcagttgccttattgtttaccatgaggcataataacagtatctactccaaaaaccttttgtgagaagacaatgtttgaaaaatagtgcccaatacctaggaagcaatcaaccaaacatcaatgtctttacaaatatgtatgtgtttggagatacaggcacagagcaatggtatattttccctaggctttctggttctctaataatgtagtttagagtaaagagatgtaaagagatgacgagtttaacctcatctactggaatattcctctgaatggttctccattctgagacccagtgtcttgtctataactaaaagcaaatgtgtccagtgaaaacatgagatgatagtgcactgaactttctcaccagaaatgagcttttaaagatctcttggtgctttcttggcccatcttttgtctcaccagagtatcacaatttgagaaggagaaatataatagagttaataatttgctaattatgagtagggagatgtttttgtgcagctgtatgtttgtctatacccatgtagtgttatcaatgaccagctttgtgaatgcatgttagagtttacagtttcagtggcttgccttatgaaaacatgctaataaaatatgagtagcaacaaaaagggctattttcccctcctttccatacaacaaatagtggatcc

SEQ ID NO: 66297 - DNA, 1919 bp, Homo sapiens
agctggccgacacttacggaaaatagaaaaaaacctatgttgaaattccgggggtgggttcccccaataccctggctcacacttgacttcacacaggtgttgtgccttcctctggattctggatgtgacttcgattctgtccctgtccaagcagcacagttcccatccctaactacagtcatcttactgcagtcagtaaagtgtaacccctgtacattccacataggaactaggggcaatatggaaagacataccccaaatctccctctccttgtccatgttacagtgcctcgtgtactttgcagagattgttccccaggttggtatatgattgccattgaagaaaccactaacccaaggtctaaaatgtaaacctcaattgtacaacgtatttccctctctctgtgcatcaggaaattgaacttcctccatctcctcccttccttattcactttcatggcctctcagtttttaaaaaaattccatccatgttatacccgctacttctatgctgtctctctacaatgtgagagaattctaagggcatatatcattcagcatggttgttgattcacaaagttgatgaataggcaaagaaaaatggcagtctttatccacacaatacatgagcttgcacagctaattgttttgctgcaaattccattttgcacagaagaaactttttatttgtattccttctataacattactaatcttctctgcaggcaaatgaaccgcctggggcaactaagcttaaagtgatgcattagtaaagacatttcacaaagacacattaatacttctcaattttttttctttgttgaattacatgtgttgcaaatctgttgtggatcagtttttggtaagaaagtttatactcaacaacagaaaataagaatggaataaaaaatgtagaataagataaacactaaaatgcagcagaaattcctgtgtaacttaggcattgttatgctctcagaccaaaaaatggaagcaagagctctaaaacttttgtaaaaacgtctgcccagcaactgtctatcaaaccttgaactgacatctcccttattattgatccttgtggccaaggataattgtttcacttgaaaaccttcctcttgctttacctccctgaatacattcrcatatttcattgtaacgttcaatactgaataaacattattttctttttaagagcctttatgttaattatttaggtttaacacatatatgcagtgtctcactgaacagaaaacaagatttaacagttctctattactctgtatttcacaaacaattctctttactacagcacctttttaaaatcagctgaacttttttcaattttctagtgctactctgtccaatacagtagcaattgaacactattatgtggccagtaaaactgagaagtgctgaagatgtgaaatatatactggtttttaaaggcttagtatcaaaaagtcatgtggaatatttcaataatatttatggtgtctatttgttggcgtaataatgttttagatatttggggctaaataaagtatggtactaaaattacttttatgtttttcttttactatcttaaatatatctatcaaaaaatttcaaattacacatgtggcactcctttacaatttgcattattattctactagatagttctgttctaatatattaattcttctaaccatgttacctaaataaaatcatgcctttgctgggatgtgttggataatcctttatgcaaacaagaaaaagcataactgacacttaaataaagcaattaagcaaaatgctgaaagaataatcttagttgggtgttttaaaatagaaatggaattaaacttttgattagattttttccccaagatggcagattagaggcttttagcatgctttatctacttggaaatagc

SEQ ID NO: 66298 - DNA, 2773 bp, Homo sapiens
aattgtcctcaagtttcccaagagaattcagactgaggacacatccatcacagtcaggtacctgactcagtgttgcaggaatgttgacatcaacaaccggtagccggtctggtctgtaggccctgagaagatgcacagacttaaaaaatattccttgaaatcagcctttactcctgagagtaaattcaagattatactagatattcccaacatccagggagtaggcctgtgtagatccaagacatttttattaatatgtggcatctcttttagaaaaaattcctcaattctccctgttggtgattacagcccttgagtgacacagccccaggcgtagggactgcctaacaagagacacctgaagtcactctcatacacatttttgatggaggaacaccagatctttaaggaaaaagtagctacaggaatgagagccttaattcatgccagtttacctggaatatgggtgctgaacaccctgaatatcgttaggaatattgcttcaattttcaccattaaatctatgtgaaacaattttctgaaatgactgtgataaatatgttactggaaaaagttgaacattccagctccatttgttattacactgttgaatataggttcccaaattcgaaacaaaatcacaaacttgtatttttaaagttgcatattataaagtgtcagaaatttttaacgtaaaaatttcctccatcagaacttagaaaagtaaggaactatctttcttctttgataccataagcttttagtcttttgtgttacaataacctttattttatgaaatggtggtgattgtgacagattttatttaataactttcttgacaaggtaaatgatggccagtttgtgctgtattacatttgtaattttatggatgcctgaaacagagaatctgggagaagtctctgcttttatcatagcacgtatcacaactgatcctattaatttcaatatttgtctcccccttgagttatggtacctcttgaggatgcaaattgtgattattcctacaagatcttagcggatgctggcacaccaraaatgcaaagtcaggcactttccacagaactgacatcacatgcatgttcccggtgggcccactggaggaattctggcacatctagtagagaatgctgggcagttaggaaaagggcacattataagtaactgtgataaagagagccctttattatatctcttggataatcacaacattgatgggggcagagacaatcaatcaacagtgcttaagacaatcttttgccaaactgtgaaaaacgttcttccagtcccctctgaaagcctgactcccggaaatgtagagggcgtgcctcctgggaccgtcttcacatccttcccatgggaaaggcaggcactctcggttagcgtctggggttgcatgaaccgaccacactatggaggtagtgagccgccatctttgcagctgttgctcttatcacagagagacttctttgtataaccttccttgtagtgggctcctgtgctcctgggagtcctataggcaaaaattcttgaaaatggggatgaaatatccttgacacacttcttcttgtaggcagtagccggccagcaactccttctttagctgtctattgataccctacttttcctaaacccagaggcggacgctgtgggagacatttaccatgcaaagtgacattgatgtttcattttctgtggtgaagagaccttctttccactggggtcaataagaaacatacatttacataaaagctatgaaaatatacctgctttgcttatgtatatttcacagatcacacgaagtgagatcttctttctataaacttctgcctcttttctctgagcaaagaaaagcagctttcttttaatgacatcagttctggtacattttcgcctacgctttgctcacagtcttcaagactgcagctcctgacgggggctcccagatggcttcatccactcccacgctgcttgtgggatgggatggccctgagccagatgggtctacagtgtgtctgggagtcatgttctttaccttctgtccagattggtggcattctctctttttttttaacatcttaaatttattttgctctccgagtaggtaatttaatttccattggtagcatctcaaacacctacgagagtatacagtgtagtgaagtttctcttctgtttcatctcccatttactaattcccaaaagtcctctcccataggtcagcatgggagctgcatatataggtacagatatatacgccacgcctctttagacaaatagccggcacagtaacaatattatgcatcttgctttttcatgtaatgataagtaaatgagatggtagcagaggcagctaggtgttcagcaaacgtattctctcctttcctaggaaacagtcacagttcaaaagcagctgctcagccagaatcgcatttcccagccttccttgaatctgaatatgtacatatgagcagttctttcatgtagaatgggagtagaaggcatgcgcgctttcacgtcaaagactttcagaaacaactctgcctctaccatgcctctgttccattccatcagctcgatgcagacaacgaggccttagaggacaatgggatcagaagagaaaacgggtgcagtccccatgggagagctgcccaccaaccagaagaactagagatcagcctccattgcatggatgcactgtgggccagctgtttacagcagtcttgtcaccagatcagaaattgcactgcagaag

SEQ ID NO: 66299 - DNA, 589 bp, Homo sapiens
ttcatacacctatgtgtattacattatatacatttataaatatatccatatatacacattaatattgttaacaaatccaagaagcatataagaagcaaagtaattatttagcattcactatgcccaattcattataatagactaaaaacaaccgattaaaagggaaggaagaggaccacttaaatttgttattttgatctctgaggagacatctctcaagaatataaatgtgactttaaaattttggaattatttggttttctttataaacaaatatctagtgtaataccaagaaaagttatagactatcatcaccagagttttmagaatacagtaaatcatactataaaatttggagggtaacagccaatccagttgtacttttaaaaaccagacaaccatatttgccttctgaatgctatcagaatgtcaaaacattcaaaatattaagaaataggcaaccctaataattgtgtgaattctctgctttgtggcataacagctcttaaaaagtaaatttcctttcaaagtatgattcagggattacaagtgactgttatctttgagactgtttctggactagtctcgg

SEQ ID NO: 66300 - DNA, 628 bp, Homo sapiens
ggaagccagaaccccaagtgtgaagtggggggcatgggatcagaggcggcccagaccccatgagctggggctgcaccaggcacagaaagagcagtggcagcgactcatggcttcaggctgctcaggtcctgcctgggccgactgcaggaaaaaacaaggacttccgcctccctgcggtccctcccctacacccgcccacgtggccaggacgtgaatgtcaccatggggacttccgcagggcctagtgctttcctttttgttttttgtgttttgtttttttttttttgagtctggctctgtcacccaggccggagtgcaacagcgcgatcttggctcactgcaagctccgcctcctgggttcacgccattctcctgcctcagcctccggagtagctgggactacaggcgcccgtcgccatgcaaggctgattttttgtatttttagtagagatggggtttcaccgtgttagccaggatggtctcgatctcctgacctcgtgatcttcccgcctcggcctcccacactgctgggatgacaggcgtgatccaycgcacccggccagggcctggtgctttcccagacaggtgactgcccgtctggtctcggcttcccctaagcaacatccca

SEQ ID NO: 66301 - DNA, 1440 bp, Homo sapiens
tgctggcctggaccccaggccctgccccaaattgcacctcaagtcctatttccagacagcgtgtgctgggtggccgagccacagcccctatggcagggccagggccagggctgtgtcctgggagccgacatccctagcacaggcgggggtcccactgccgagctgtccctccttctctacaagtcacctgctcaccctcacaaccactgtcacccccttttcacagatgaggaaactgagacccagagacacaggtatgtccccaaaacccacagtccagcaactggtgggcggacaggtggggatttgagcccaggctggggtcccacgtgcttggccttgaacgcgcctggtccaagggtctggaacctgggatgcaacagtcagcaggcggggagcggggggtaggcggggagcggggggcaggcggggagcgggggggcaggcggggagaggggggtaggcggggagcaggggggcagacagggagcggggggcagggggggagttggagttggagggcaggccgagtggggggcaggtggggagtgagggggaaggtggggagttagggggcaggtggggaattggggggcaagcggggagtggggccaggcagggagttgggggcaggctgtatagggcgcaggctgaatagggaggcaggccgagttgggggcacttggtaacgagctccttttctgtgttctgaatgccgcgggaaacatcccagacggcccagcccatcttcacttcatgtagagcagaggctctgaaaagtggggcacgtcctggtgagctaacgaggcacccagaggaccggccgcctgtgctggaggcccacggggagggagggaatggctgggtgtttgaaccagctctcgaaggatcacattttgcagacaaaaaccaaactccctcctgggaggaggtgcccgatatctgcccccccgtcgaggcccagccaagaaggggacagcaacggatgaagccacctctgcccagggygcctgttcctggacaagcctcaggggacgggcccagctgggaggggccggggctccttgaggtggctcaggagaccccaggggagccagggagacactgtatgcagagaaacagcttcattcacccacttccccagggctgagcttggcggcggcagcccagtccgaggccagcctcccacttatgcatcaaagacaactgcagctacagctgcaactcagttctgagggctgttggttccccagagaatgactgagttccagggagcgtcacggagcaggggcaggacggggcgaggctggggcagccactgtccctgagaggtggctaggcagagcttacaggcagccacacagccctgcccataacatactactgctggctcatctcagcagtgagtccattgcccaaggccacacagttgcagatttg

SEQ ID NO: 66302 - DNA, 1440 bp, Homo sapiens
tgctggcctggaccccaggccctgccccaaattgcacctcaagtcctatttccagacagcgtgtgctgggtggccgagccacagcccctatggcagggccagggccagggctgtgtcctgggagccgacatccctagcacaggcgggggtcccactgccgagctgtccctccttctctacaagtcacctgctcaccctcacaaccactgtcacccccttttcacagatgaggaaactgagacccagagacacaggtatgtccccaaaacccacagtccagcaactggtgggcggacaggtggggatttgagcccaggctggggtcccacgtgcttggccttgaacgcgcctggtccaagggtctggaacctgggatgcaacagtcagcaggcggggagcggggggtaggcggggagcggggggcaggcggggagcgggggggcaggcggggagaggggggtaggcggggagcaggggggcagacagggagcggggggcagggggggagttggagttggagggcaggccgagtggggggcaggtggggagtgagggggaaggtggggagttagggggcaggtggggaattggggggcaagcggggagtggggccaggcagggagttgggggcaggctgtatagggcgcaggctgaatagggaggcaggccgagttgggggcacttggtaacgagctccttttctgtgttctgaatgccgcgggaaacatcccagacggcccagcccatcttcacttcatgtagagcagaggctctgaaaagtggggcacgtcctggtgagctaacgaggcacccagaggaccggccgcctgtgctggaggcccacggggagggagggaatggctgggtgtttgaaccagctctcgaaggatcacattttgcagacaaaaaccaaactccctcctgggaggaggtgcccgatatctgcccccccgtcgaggcccagccaagaaggggacagcaacggatgaagccacctctgcccagggtgcctgttcctggacaagcctcaggggacrggcccagctgggaggggccggggctccttgaggtggctcaggagaccccaggggagccagggagacactgtatgcagagaaacagcttcattcacccacttccccagggctgagcttggcggcggcagcccagtccgaggccagcctcccacttatgcatcaaagacaactgcagctacagctgcaactcagttctgagggctgttggttccccagagaatgactgagttccagggagcgtcacggagcaggggcaggacggggcgaggctggggcagccactgtccctgagaggtggctaggcagagcttacaggcagccacacagccctgcccataacatactactgctggctcatctcagcagtgagtccattgcccaaggccacacagttgcagatttg

SEQ ID NO: 66303 - DNA, 1239 bp, Homo sapiens
tccagccccccttcttcagcaaggagcagccacaggccttgaactttggaggcattgggatggtgatcgggcacgagatcacgcacggctttgacgacaatggtgagcggccgcccctccaatcacacacgccctcccctctccgcggagaagcagccaggaaggggcctgggggcgctccattcaaccccttcacggtttcagtggggacaccgaggccaggtcctcagggagctgtgggggcagagcaggctttgaatgccaggctggggccctgtctgggggcactgactcccagcatggaggaggggacccagggactccagcccatgaccctgactccacctggcactgggcacttccctcccacggcctgtgacatggggacgacaacactgcccaatacagcagcgaagcccagatcccagcctgggagactctccagacggccagcatcctccaccggggggtgtgctacccccgccatggccatgctgacctccgcccctcggtggggactgccctgcctgggacaggggccccagctggttttcccctgtggctcggccatccggaccttccgtgggcagtccttgtccccagggaccacgtactcctctcgcctggaacttagagtttgggcatcccaggaggagcccttaaaccatgatgcctccaagaccacaggacccaggtgctaggccctagcctcagggggtggcatgggagaccactgaagccctccttctctgggggctgtgtagccccagacagctgctgccccttggagcccgcgatgctcttccaggctcagcctactcagactgtgggctctccgtactggggctggctgcaggaggggcaggagcrgccaggcacagtggctgccgtggggccaggcacagtgcagccaggggcatgtgggcagccctcctctgcccctgcccaggccggaacttcgacaagaatggcaacatgatggattggtggagtaacttctccacccagcacttccgggagcagtcagagtgcatgatctaccagtacggcaactactcctgggacctggcagacgaacagaacgtgagcgctgccaccagcacccaggctgcgggggtaccggagccccagccctggccctgagggagagggaagtcagggccggggctgccccaatcctgtctcctgtgcgcaggtgaacggattcaacacccttggggaaaacattgctgacaacgg

SEQ ID NO: 66304 - DNA, 1239 bp, Homo sapiens
tccagccccccttcttcagcaaggagcagccacaggccttgaactttggaggcattgggatggtgatcgggcacgagatcacgcacggctttgacgacaatggtgagcggccgcccctccaatcacacacgccctcccctctccgcggagaagcagccaggaaggggcctgggggcgctccattcaaccccttcacggtttcagtggggacaccgaggccaggtcctcagggagctgtgggggcagagcaggctttgaatgccaggctggggccctgtctgggggcactgactcccagcatggaggaggggacccagggactccagcccatgaccctgactccacctggcactgggcacttccctcccacggcctgtgacatggggacgacaacactgcccaatacagcagcgaagcccagatcccagcctgggagactctccagacggccagcatcctccaccggggggtgtgctacccccgccatggccatgctgacctccgcccctcggtggggactgccctgcctgggacaggggccccagctggttttcccctgtggctcggccatccggaccttccgtgggcagtccttgtccccagggaccacgtactcctctcgcctggaacttagagtttgggcatcccaggaggagcccttaaaccatgatgcctccaagaccacaggacccaggtgctaggccctagcctcagggggtggcatgggagaccactgaagccctccttctctgggggctgtgtagccccagacagctgctgccccttggagcccgcgatgctcttccaggctcagcctactcagactgtgggctctccgtactggggctggctgcaggaggggcaggagcggccaggcacagtggctgccgtggggccrggcacagtgcagccaggggcatgtgggcagccctcctctgcccctgcccaggccggaacttcgacaagaatggcaacatgatggattggtggagtaacttctccacccagcacttccgggagcagtcagagtgcatgatctaccagtacggcaactactcctgggacctggcagacgaacagaacgtgagcgctgccaccagcacccaggctgcgggggtaccggagccccagccctggccctgagggagagggaagtcagggccggggctgccccaatcctgtctcctgtgcgcaggtgaacggattcaacacccttggggaaaacattgctgacaacgg

SEQ ID NO: 66305 - DNA, 1239 bp, Homo sapiens
tccagccccccttcttcagcaaggagcagccacaggccttgaactttggaggcattgggatggtgatcgggcacgagatcacgcacggctttgacgacaatggtgagcggccgcccctccaatcacacacgccctcccctctccgcggagaagcagccaggaaggggcctgggggcgctccattcaaccccttcacggtttcagtggggacaccgaggccaggtcctcagggagctgtgggggcagagcaggctttgaatgccaggctggggccctgtctgggggcactgactcccagcatggaggaggggacccagggactccagcccatgaccctgactccacctggcactgggcacttccctcccacggcctgtgacatggggacgacaacactgcccaatacagcagcgaagcccagatcccagcctgggagactctccagacggccagcatcctccaccggggggtgtgctacccccgccatggccatgctgacctccgcccctcggtggggactgccctgcctgggacaggggccccagctggttttcccctgtggctcggccatccggaccttccgtgggcagtccttgtccccagggaccacgtactcctctcgcctggaacttagagtttgggcatcccaggaggagcccttaaaccatgatgcctccaagaccacaggacccaggtgctaggccctagcctcagggggtggcatgggagaccactgaagccctccttctctgggggctgtgtagccccagacagctgctgccccttggagcccgcgatgctcttccaggctcagcctactcagactgtgggctctccgtactggggctggctgcaggaggggcaggagcggccaggcacagtggctgccgtggggccaggcacagtgcagccaggggcatgtgggcagccctcctctgcccctgcccaggccggaacttcgacaagaatggcaacatgatggattggtggagtaacttctccacccagcacttccgggagcagtcagagtgcatgatctaccagtacggcaactactcctgggacctggcagacgaacagaacgtgagcgctgccaccagcacccaggctgcgggggtaccggagccccagccctggccctgagggagarggaagtcagggccggggctgccccaatcctgtctcctgtgcgcaggtgaacggattcaacacccttggggaaaacattgctgacaacgg

SEQ ID NO: 66306 - DNA, 573 bp, Homo sapiens
ccacagggtcagccccacaccccaacctcccsgcagggccgtctccaggggactgtccagaaacccccaaagatgcttcccttttctgttgatgggagcccctgggcacagaggatgggacagcggctgtgggtacccgagggctggagccacaccctaagggatggagggcagggtccggggcccagttaagggctccccctccactcctgcgccttcaaggtcggcctgcacctcccctgctctgtgccagtgcaggccaggcagggggctgaggccgaggcctggccattgccctcctggtcacgatctggtgaaggatttgagtccagaagccaaacgtctacagtcgtgtggtgcggacactcaggatggactgcccaggccatggggggctctgaatgaagaggaacctgcgggggcgaggtgggctgcgcgtctgcaagaaagtgcatgagttgagtgctgctgcagagggaagctggggtccaccgctggtgagcggggaggggacgggacacagaaccggccgtggcccaccccgagacggaggcgcagacaccaggcccgttc

SEQ ID NO: 66307 - DNA, 573 bp, Homo sapiens
ccacagggtcagccccacaccccaacctcccggcagggccgtctccaggggactgtccagaaacccccaaagatgcttcccttttctgttgatgggagcccctgggcacagaggatgggacagcggctgtgggtacccgagggctggagccacaccctaagggatggagggcagggtccggggcccagttaagggctccccctccactcctgcgccttcaaggtcggcctgcacctcccctgctctgtgccagtgcaggccaggcagggggctgaggccgaggcctggccattgccctcctggtcacgatctggtgaaggatttgagtccagaagccaaacgtctacagtcgtgtggtgcggacactcaggatggactgcccaggccatggggggctctgaatgaagaggaacctgcgggggcraggtgggctgcgcgtctgcaagaaagtgcatgagttgagtgctgctgcagagggaagctggggtccaccgctggtgagcggggaggggacgggacacagaaccggccgtggcccaccccgagacggaggcgcagacaccaggcccgttc

SEQ ID NO: 66308 - DNA, 594 bp, Homo sapiens
gggtggatcacgaggtcaggagatcgagaccatcctggctaacacgatgaaaccccgactctactaaaaatacaaaaaattagccgggtgtggtggcgggcgcctgtggtcccggctgctcgggaggctgaggcaggagaatggcgtgaagcccggaggcggagcttgcagtgagccgagatctcgccactgcactccagcctgggcgacggagcgagactcccatctcaaaaaaaaaaaggaaacccaaatttgaaaacattttactcttagacatcttatgttcaaagactgagactctcaaataacttatttgaaccagttgagacgttttactcttgggtttcttaattcttatttcagtgtacctgagctaagcaaatttaaaggtaaatgtgggtcctccatgcttgcctgctatttccccttgtgtccttaaggacatgtacattttcccataytgtggctggatttcacttgtgattcttccagggcacctcaacacctttgcttcgaatagcctgggctcgaatcatattggatgaagctcacaatgttaagaatccccgagtgcagacttccatagctgtgtgt

SEQ ID NO: 66309 - DNA, 1342 bp, Homo sapiens
tcagatgcccccttgtcagtggaagaccccttcgtggatacaatggggatcttcatgaagagcaggtttcaatcagatcacattggaggtggagtggagtggagtaaaggaaggcacccaaactagctgaagacccgagtcctattcctgagtcattaagtagtctgtgaccatgaacacaccactttacgtctctaagtctcagctccttcatctgtaaaatgatggcacacaactagatggtctttaagttccttcttgctatcttagagtctatttattttttgttctaatttttatgtattagatatttcttaaagcagagaacatgtgtattaatgaagccctctgcctttgtgtgtgtgtgtgtgtgtgtgtgtgtgtgtgtgtgtgtgtgtgtgatatgaataggttaagagtaaaaagctacactttgtcctccttcctgaggaatgaacacccgtgttatcctaccttgagaccctgccggcatttttcagttgccttctgttagtctcctactatgttgacctggtgtgggaaatagtacttagtcataattctgactcacagtaagaaatgaagaggtaattgatagtgggcagactccatcctctgcattttgctgtgatgtggtgagacgccggtccaaatggttctgaatgtctgcatgcacggaactgaggaagccactcagctcacctttactttatgaaggttgggtgaccttaaacatgtttgaataatcagtgccttttgtgaagaaaaacagacatatctrcaactaatataaggattcactaggctgggtttaaattcaaagtccagaaagattaattgcccaaaaaaaattttttttaatgttttaaatttttaaaaactgagctaaaaataaaggtgtccttgttgcactggctcattggagacatctccaaagatagataaattttcctttcatgttctccaatatgccatttactaggaatgaagatgcaccgatttggccttgagtggcaggccaggaagtgtgttggtgttcgttttcacactaaacatttggtctgactttctagaattaaggaaaaacaatataggtgagttcacatatttatgcagagataagtttctgctttatgcatctcagccttctctggaacatatctgcaggcttttgtaaacctggtatgtgggaatttcacctgaaggggaacttcagggtacacagctgataatcctatcaatagggtcatcttctaaaactaaaaatagttctttgtataggctggagtctacactgggcttactatgtagacacagaaaaagttattagcaaatttattaa

SEQ ID NO: 66310 - DNA, 862 bp, Homo sapiens
ccataacatgtacatttatcacatcgcccagatttcctagacattacagattttctgttctacggcccccataagaacagtgcaggtgccacaccatatgtctgggacatatggtcctcaatagctgcaatatgaaactatttctattgcaataaatctaatatctattcctctctgtttactaatagttttgattacaacttcaaattttaaaaatcgaggatgaagttaaatagaagggaactgtccccttccttctatttaacctcgtcttcgatttttaaaattacaaaagcataatagtaaaaaaaagtttgacaatacaaaatgataaagtaaaattcgccttcaccaaaagtcatctatttccccttctgtggtttccacgttgcggctggtaactcggggcttccacgctgggcgagcctagagaayatccagtacacacaggaagcagcagcgccggccaaatggcgctgagacctgcgcacctgtccacggaccgcccactcgccaactctgaccttgggtgagtctctcaaacttgagtctcggaatcttccacaaaatgctacccatctcaccaggtcgagtgaggagggtcgtgttatgtgtaagcactttgtgaaatctaaagcacgaggcaaacgtaaagcattgtagggggtcctagagaagtctttgtgcctgcctgagagccgtttcagttccccgcagcagcttccaaggacctcccaccatgcccgccgcttcggctcctgcactgcaaatctcgcggctcggcctgcagcggcggcttcccctggcctcccaccccagcgactgagcgcggagcccagcgcgcacgagcgccagcctggct

SEQ ID NO: 66311 - DNA, 862 bp, Homo sapiens
ccataacatgtacatttatcacatcgcccagatttcctagacattacagattttctgttctacggcccccataagaacagtgcaggtgccacaccatatgtctgggacatatggtcctcaatagctgcaatatgaaactatttctattgcaataaatctaatatctattcctctctgtttactaatagttttgattacaacttcaaattttaaaaatcgaggatgaagttaaatagaagggaactgtccccttccttctatttaacctcgtcttcgatttttaaaattacaaaagcataatagtaaaaaaaagtttgacaatacaaaatgataaagtaaaattcgccttcaccaaaagtcatctatttccccttctgtggtttccacgttgcggctggtaactcggggcttccacgctgggcgagcctagagaacatccagtacacacaggaagcagcagcgcsggccaaatggcgctgagacctgcgcacctgtccacggaccgcccactcgccaactctgaccttgggtgagtctctcaaacttgagtctcggaatcttccacaaaatgctacccatctcaccaggtcgagtgaggagggtcgtgttatgtgtaagcactttgtgaaatctaaagcacgaggcaaacgtaaagcattgtagggggtcctagagaagtctttgtgcctgcctgagagccgtttcagttccccgcagcagcttccaaggacctcccaccatgcccgccgcttcggctcctgcactgcaaatctcgcggctcggcctgcagcggcggcttcccctggcctcccaccccagcgactgagcgcggagcccagcgcgcacgagcgccagcctggct

SEQ ID NO: 66312 - DNA, 1612 bp, Homo sapiens
  misc_feature (1)...(1612): n = A,T,C or G
agtcttgctttgtcactcagactggagtacagtggcaacatcatggctcacttcagccttgatctcctgggytaaagtgatcctccaacctcagcctccatatacgatcacagacacacaccaacatccctggctaatttttaaatttttgtctccatatgttgctcagactggtctcaaactcctgggatcctcttaatgggcttgccagagtgctgggattataggtgtgagccaccatgcctggccagtgcttccgatcttttaaatggcgctaccatctcccttagttgttccagtcagtaacctggagccttaatatgttcattctatcgcctaaaaggttttttttttttttttttttttttctcctgagacagagtctcgctctgtcactcaggctggagtgcaggggcataatcttagctccagtactgcagcctctgccttctgggttccagtgattctcctccctcaggctcccaagtagccgggattacaggcacgcaccaccatgcccagctaatttttgtatttttagtagagatggggtttcaccatgatggccaggctggtctcaaactcctgacctcaggtgatccgcccacctcggtctcccaaagcgctaggattattacaggcatgagccactgtgcctgacaaaagttcttgaattcattgacttctctatgtttgcaatattactctactatagaccttttttgttgttgttgagacagtctcactctgttactcaggctgcagtgcagtggcacgatctcaattcactacaacctctgcttccttggctcaagcgatcctcctgcctccacctcccgagcagctgggattacaggcatgtgctaccatgctcggctagacctttcttatttcttgcctagactagcaagtttcttaacagggccccataaccattctccactcatcagcaagtttaaaaatcagacattgaataatttcattttccacaccccccctcctcccattcaagttgtcttcagtgggatgttaggactgccatgtgttaagggactctcctcatattctattcctttcaaccaccctgtgaattggaaaccaaaactctatgataaactttgcttttttaaggtcagccaggtgcagtggctcacacctgtaatcgtagcactttgggatgccgagatgggaggattgcttgaggccagattgcttgaggccagaagttctccatcctgggcaacatagtaataccttgtctctacaaaaaataaaaaaataagctgggtgcagtggcccatgcctacagtcccagctactctggaggctgagtgagagatgtcttgagcctggatgggtagaaggtaccagctgatgtatcatannnnnnnnnnnnnnnnnnnnnnnnnnnnnnnnnnnnnnnnnnnnnnnnnnnnnnnnnnnnnnnnnnnnnnnnnnnnnnnnnnnnnnnnnnnnnnnnnnnntcatctaaggatccccagtctgggagaaagtgcatcttcggctctctactccgcctcctgggttcaagcaatcttcctgcctcagcctcctaagtagctgggattacaggcgcccgccaccacactca

SEQ ID NO: 66313 - DNA, 1612 bp, Homo sapiens
  misc_feature (1)...(1612): n = A,T,C or G
agtcttgctttgtcactcagactggagtacagtggcaacatcatggctcacttcagccttgatctcctgggctaaagtgatcctccaacctcagcctccatatacgatcacagacacacaccaacatccctggctaatttttaaatttttgtctccatatgttgctcagactggtctcaaactcctgggatcctcttaatgggcttgccagagtgctgggattataggtgtgagccaccatgcctggccagtgcttccgatcttttaaatggcgctaccatctcccttagttgttccagtcagtaacctggagccttaatatgttcattctatcgcctaaaaggttttktttttttttttttttttttctcctgagacagagtctcgctctgtcactcaggctggagtgcaggggcataatcttagctccagtactgcagcctctgccttctgggttccagtgattctcctccctcaggctcccaagtagccgggattacaggcacgcaccaccatgcccagctaatttttgtatttttagtagagatggggtttcaccatgatggccaggctggtctcaaactcctgacctcaggtgatccgcccacctcggtctcccaaagcgctaggattattacaggcatgagccactgtgcctgacaaaagttcttgaattcattgacttctctatgtttgcaatattactctactatagaccttttttgttgttgttgagacagtctcactctgttactcaggctgcagtgcagtggcacgatctcaattcactacaacctctgcttccttggctcaagcgatcctcctgcctccacctcccgagcagctgggattacaggcatgtgctaccatgctcggctagacctttcttatttcttgcctagactagcaagtttcttaacagggccccataaccattctccactcatcagcaagtttaaaaatcagacattgaataatttcattttccacaccccccctcctcccattcaagttgtcttcagtgggatgttaggactgccatgtgttaagggactctcctcatattctattcctttcaaccaccctgtgaattggaaaccaaaactctatgataaactttgcttttttaaggtcagccaggtgcagtggctcacacctgtaatcgtagcactttgggatgccgagatgggaggattgcttgaggccagattgcttgaggccagaagttctccatcctgggcaacatagtaataccttgtctctacaaaaaataaaaaaataagctgggtgcagtggcccatgcctacagtcccagctactctggaggctgagtgagagatgtcttgagcctggatgggtagaaggtaccagctgatgtatcatannnnnnnnnnnnnnnnnnnnnnnnnnnnnnnnnnnnnnnnnnnnnnnnnnnnnnnnnnnnnnnnnnnnnnnnnnnnnnnnnnnnnnnnnnnnnnnnnnnntcatctaaggatccccagtctgggagaaagtgcatcttcggctctctactccgcctcctgggttcaagcaatcttcctgcctcagcctcctaagtagctgggattacaggcgcccgccaccacactca

SEQ ID NO: 66314 - DNA, 631 bp, Homo sapiens
tgacctgtataagtctttctttccacatatatgtgctataaagttgaggacctcaactttaaaatatttaatgctttctctagtgatgycttcaggatgccttctttgctctcacctgtttctcccagtccccctatccttgaacctagctgaggtgtcacctcctccaggaagccttctctgaccgccctaccttccaaagtaggtttctctaaacactaatccttcaaaaatcccatttaacaaaaaggattctatggtcaaacaagcttgggaaatgcaacatactatatcctcctttcggaggactcattgcactgagcccataaagaatcctgagaagttctatccagagaaaccagttcattttgtccagtgtttcccaaacttatttcctcatggagccctcctccctttttccatggaatatctattaacctcctgcagggtgagattccaaggtgtcacttgggcaaacactatccgtaacttccatagattcactctcagtccccttcagggggggtttcagagcaattaaatgcctactgtgtgtgaggcccacagcaagtggctaggaatacatcaataaatcagacacaccccagcttgggaggaacctgcaggctga

SEQ ID NO: 66315 - DNA, 724 bp, Homo sapiens
tcccatctcttaaaaaattatgtatatatgtaacagtctatataaatatatatatataacagtccaacrgagtgttaagtattggggcattaaacttccaaattgtcaaataagatatctgttctagtactcctcatatgacaacttcatgtgagtaaaaatcaggcctgtatttaataactgcatgctaaagcccaaatacgtttaattattttctatattcagatttatttttatcctattatattctggcatctttccataccctgtagtttgctttccatcttggtcaaagagtcattctttgaaaccaattaacatttatttatgatccttttttctcacctgctacctaccttttaggcctctttcactcgtgtagtttcaaggaaaatatactcaattatggaatactttctacacataatacatttatcccaaaaaaacttgaagtaatttatgtaaatgaaattgcttgattaacttcataggaagtgtgctgtttggaatatgatgacacagcatgacagttaccaagcatgacttgagttgtgctaggatataggtgtgcaaagttggggttgtgttctatagcaaaagaatgcactcccagcgtaagcaacactgatggaaggggctcacagggtacaggatataatactcttaacaactaatttttggagaatgaaagggcttttctttccctcttgttggctgattggga

SEQ ID NO: 66316 - DNA, 1498 bp, Homo sapiens
attatgctagacatctggttatttttttcaatatggaaacacaaatcctttagctgataattttgaaccatcaactgagaattaaaatgaagcctctaccctcttaggaaaagactattttataaaatcaattttaaatctgtctgatcaatcaatgacaacttgcctccatctaatccatcaggaataacttgctccatccaacacacttctaaaaaccaaccaatcaatgatagcctttgagggttagtcagtcagcagccaacttactctagtgaagtcttgtctaagtgagcacagttctgaggctaacttcagcctactcccatctctgaaaccatcaaataatcccaaaataatctctgatttcaaaattttatataaattcaacagtctgctttgagaaattgttcctgaccatttttcttcattacataagcaaaatagagaagcaagtccctctgtataactcccaattgtgtacttcctcatcttcagatgcaactgacacttttttagtttgaattcctttaaattattttttcaaattttatttttctaccccttatgcatatatctctaaactgagaagtgggcacaaacctagctatataagcaaaatacaacacagcctccrttagatgaaggcgcccaggagttgagtggagtctcttggtcatggcattttatttcagatacagagtggcaccattttcctttacataactaccagtttgaaacacaatgaccaaatgctctcttacacttatgatcactctcacaccagaaactgacatgggtatcatgtgctacggtttataatgtgtgttttacatgtaaagtctcattgtgactctggtcttcagagtccctggattgcttgccctagtcttggttcccctcagcataagtctcccctctcaaccacatgctgaatctaatacctcctacttgaagccttctaactcttcacaggacaagaacaatcaattatccaaagagaaagagcaatgaatgggtaataaggacagttgggttgaagccccagttcagcaaataatcaagtggcctgaagcacatgtcttcatgttcttcactgtgtttcagctttcctgtctgcaaataaagcttgggccaaatctatatagttctcaatcctgactgcatatgagaattacctagcaattatttaaaaatactgactcttgggctctacttcagaccaattaaatcagaatctctaggggtagggtctgggcatcagtatttaagtctatgattctaatgtacaaccagaactattgagccaaatgagctctgaggttccattcagtgctcacacttggaattctaggaagtaccatcatatttcattgaataaggtgggcattgtgttgctaggactctgttctttggttttataagggaataagaagtgtgaaaagggacaatacagaacatttgtgatgtaaattatttatactgatgagcagtatgc

SEQ ID NO: 66317 - DNA, 567 bp, Homo sapiens
gttayatatatatatgtgacattttcaagagcacttcatttttccaaaggcctgataaacactttatatctttctggtacttggaagaaatgtgtacttctcatgctatgttgggcacatgtccatgctgctgctggttgatggagctttaagggttggtttggttcctactacttcagggtaggttctcaaatttatggatccaagcagtcaccattatcaattctgatggtgtcaaattaatcaaaggtgtaaaacagtgtctctcagtcttggctacactttattttttattttattttattttattttattttattttattttattttattttattttattttattttttaccaacaggagatgcagtttatttacaaaagcagccatgggggcagagggaatacatagcatttacagagttagctacctgtacagaatgaattacatatgcaaaaataaaagtctcaagatgacaggacagcgtaagctccactcccctccctcaatcaccccagcatgtggtaatgccaggccggtggcccctgagtatgtgggggtgggg

SEQ ID NO: 66318 - DNA, 758 bp, Homo sapiens
atcctctcttggatctgggtacctgcacatttcaccaagcaggaaggagtcacctcgggagacctgtgccagctacccctgtatttcagttctatttcagggtaacttagtgccccaggggattggcttcctgggcggttgccagactgacccactctgaatccaattttatatgtgttcattgaagacattcagagatacccaactgatgaaaatgtaccaactcattctgagctctttttagcccctgaagttttcgaaatgcaatattgaaagaatacgtaactaaataaaagcgttggcgttgtggaatgttagctcatccaacwtgacttccagctatggcctttctaatcactggtgtctctagtcagtctgatgacatttgctgtgagcctactgtgtgccaagcattgtattgctgagaaccacaggtgatagaaacaggtcacagttaccgacgagctctctataaccccttgaaaaaggatggtggttttagcggtaactacttcatggctgtaattgctgctgtcagaagcagcctaatgaattgccctgggatctgaagttctccagcaacaataaaatttggccagccaccagtaggtaacaggagctgtgtaccttatcagacacccctcctgggaatctattcgaaggaaatagttcaaaagaagaacaaagagatatatgcaaagatgctttaagcactagtctcttacaaaatggaaactggctgtaacccaaatcagtta

SEQ ID NO: 66319 - DNA, 758 bp, Homo sapiens
atcctctcttggatctgggtacctgcacatttcaccaagcaggaaggagtcacctcgggagacctgtgccagctacccctgtatttcagttctatttcagggtaacttagtgccccaggggattggcttcctgggcggttgccagactgacccactctgaatccaattttatatgtgttcattgaagacattcagagatacccaactgatgaaaatgtaccaactcattctgagctctttttagcccctgaagttttcgaaatgcaatattgaaagaatacgtaactaaataaaagcgttggcgttgtggaatgttagctcatccaacttgacttccagctatggcctttctaatcactggtgtctctagtcagtctgatgacatttgytgtgagcctactgtgtgccaagcattgtattgctgagaaccacaggtgatagaaacaggtcacagttaccgacgagctctctataaccccttgaaaaaggatggtggttttagcggtaactacttcatggctgtaattgctgctgtcagaagcagcctaatgaattgccctgggatctgaagttctccagcaacaataaaatttggccagccaccagtaggtaacaggagctgtgtaccttatcagacacccctcctgggaatctattcgaaggaaatagttcaaaagaagaacaaagagatatatgcaaagatgctttaagcactagtctcttacaaaatggaaactggctgtaacccaaatcagtta

SEQ ID NO: 66320 - DNA, 564 bp, Homo sapiens
caatatcagtctgcaaccaggcagcaaggtttgggatgaratcattgtcacagggtagagaggctgctggaatccaactcatggctcaactggactaacaacacacaccagaaacattcttaccttctgcctcatgcttcagagagctttaagcaccaggtgtaggtgtgataaggaatgcgattagtggtatttattaaatgaaatattgtctatggatgcttaaaaacatattagactgaaataagacagtccatcaaattaataagggacattttaatagttattagcctaaacttttttctactaaatttttatgatcttgcaaattcaaagtaattacctgcctatttatttcaaagattaacactgtattttcaaagcatatgggttgccttcccttttcatttctaacatttttcaatcccaatctgacctacggacagagcttcagttacagagagagcctcttatttttgtcatcacttctctaatccagttggtcatcctaaccaatttctataccattcggaattcactgtatttggaaggaaaaattgagag

SEQ ID NO: 66321 - DNA, 1195 bp, Homo sapiens
ggggtggaggtggaaacagcggcatcaccgcggcatcagcctggtagggatatgttccaaagctgatatgccacaccagcatactgtttgtgcgacaatgatgacataggcagtcgcatcaggcttggcacaccaagaggaaggactagccctgctcttgtccgcactgctcacattcaatcttcctggaaataagaactcggcagagatggaaaaggagcttggaaatgaagccctgaattggactgggacccaacataaatcatgaattgactgagaaatcattggattggactctgatcttgactggctaaggtgaggtttttcatctactaaacaaaaatgagtgcatctaatctaggatcagttacagtaaaatgaaattaccatgttagcccatgtaagtctgtgactacacaattaatctccatatcacaccacgatgaagtactctgtacaaatgcactcgctacggtgctgtatatgccacattgaattaatatctggagcttcagcctaagtagagagacataatctacaatgtcccaattagttggttaaatgagaaaacatagaaagtgtgtagtaataaatacttctgctttcctaaatatttagatatcaacataaagtctgcagagaccaaaacgattaatatgattgtcaacatcttggttaatagaaaatcaattagaagtaaaactttaaactccatctctactaaaaatacaaaaaaaaattaggtaggtgtggtggtgggcgcctgtaatcccagctactaaggaggctgtggctggagaatcgcttgaacccagaagatggaggttgcagtgagccgagattgcaccactgcactccagcctgggcaacaagagcaaaaactccctctcaaaaaaaaaaaaaaaaaaaaaaaaaaaaggaaaactgatacgttcttgtaaatcatcactgaagaatagggtaaatcccgtagggtcagagacaaggtaaatcttaaggatgaaagtgaaccctacagaaataaataagrgaaagtcattttattcagctctagagataatccaaaacctatttgcagggaaaggaaatcaagtgtatatttaaattttcttttgtctcacatgtatctacgttctgttcttaaataactatgtgagacagggcaggtgttaatatgcacattttacacagcaca

SEQ ID NO: 66322 - DNA, 777 bp, Homo sapiens
cctggtaatcttctgacatcatcatagtacatttgtcaaaactgtctctgtctttcatgacctttacagttttggggaggactggtyaggttccttgtagaatgtccctcagtctgggattgtttgatgtttctcctcacaattaaactgggattatgggctattaggaaaaatctcatagagatgcagttcctttctagattcatgtgctcttccccatctctctccccaacactgagacacacacgcgcaaacgtacactcacacactcacacttacttatttatatttctcttgctaaaccatttgagagttgcagacatcatgacactttactgctaaatatttcggcatgtttcctaagaccaaagatgttttcctacaaaactgcaagacagttttcctctcaggaaattgagcacccttgtctaatacacagttgatattcaaatttcccaccatataccaacaatgtcttttatagctcttgtttttttttctgggatctagaatttaataaagggtcacacattggttttagttgtggacagtccttcttttgaataatttccctcaattttcacttatgtgattttttcttcatgagacactgattgaatgttttcagcaggaaaactttactggtgatgttgtgtcctttccagagcatcacatcaggaagacaggatgtcacttgtcccactgttggtgatgctaacttagcctacttggttaaagtagtggcattttcttttttgtaattaataaactttgggg

SEQ ID NO: 66323 - DNA, 697 bp, Homo sapiens
gggagtttcttcttttgttccatgcaagaagatttttaaaatagagacctcccttgacaaagaaaatcagagatatccttataaactagcaagggagaagagtttaataaccgactagctcacagttcttttctgcccaatgcctcaactacttctggctagattctgacagcaactgctcctctaaaagtcatcagagaagagaggatcagtttctacccttaggtacccgaagggaatgtattccgcattctttcatatttcagctgcctctttcacttctgtgccccaggaagactagaaaactggctctctacttcttgttaatttcttattaaattaaatagtcaatgaaggcattttgtgcctgagccttctggtccccatgaagaataaactcgtgggagagagaggaagggactggattattctgctgggtgacagtacacttagggaaaaaggtcaaggaagaaaagtccatcaggcatttttgttttaatttttaaaattcctgtttaacratacagggtctcttgcaacgtgtgagctgcctcttgccaagagtgagtggcaaaagaaactaaccccggagcagttctacgtcacaagagaaaagggaacggaaccggtaagctaagctggtttacagttttctgattgcatgtgttggcagtgaggggccagttggaataggtcc

SEQ ID NO: 66324 - DNA, 697 bp, Homo sapiens
gggagtttcttcttttgttccatgcaagaagatttttaaaatagagacctcccttgacaaagaaaatcagagatatccttataaactagcaagggagaagagtttaataaccgactagctcacagttcttttctgcccaatgcctcaactacttctggctagattctgacagcaactgctcctctaaaagtcatcagagaagagaggatcagtttctacccttaggtacccgaagggaatgtattccgcattctttcatatttcagctgcctctttcacttctgtgccccaggaagactagaaaactggctctctacttcttgttaatttcttattaaattaaatagtcaatgaaggcattttgtgcctgagccttctggtccccatgaagaataaactcgtgggagagagaggaagggactggattattctgctgggtgacagtacacttagggaaaaaggtcaaggaagaaaagtccatcaggcatttttgttttaatttttaaaattcctgtttaacaatacagggtctcttgcaacgtgtgagctgcctcttgccaagagtgagtggcaaaagaaactaaccccggagcagttctacgtcacaagagaaaagggaacggaaccggtaagctaagctggtttacagttttctgattgcatgtgttggcagtgaggggscagttggaataggtcc

SEQ ID NO: 66325 - DNA, 591 bp, Homo sapiens
tgagcacatattaatatagtacattttattctttgaatacacacatacacacgcacacacatatatatacacacccccacccacayacacacacacacacacacatatatacacatatatttcatagttccctaaaacttttacaaaacaaatcatgtgcttagctgaaaggaaaaccaaattcaaagaagtagaaagcttacaggttacatcctctcaccacagttcagtaaaataaattggaaataaagaagcacataataagacaaaccttgtatgacagaggaaattaaataatatagaaatgtccagaaacattgacaaatcaaacactctaaaaataatgggacacagcaaaaactgaactcagaggaaaatgtgttgcctttaattatggaagcagaaaggtgagtacaaaggcattaagtaagtaatgagtccatgtaagaacaacaacaatagcaaaaagaaaacaaaagaaactctgaagaggtatcaacagtgaaattattaaaatagataaaatggtagaaaagaatgataaattcaaagattgcttctttaaaaagacaaataaaataaacatcatgt

SEQ ID NO: 66326 - DNA, 737 bp, Homo sapiens
atgtttgtccccatctctcaagccctctggccaacttccacttccacttcaatgctcaagtgtagcaatcctttttctgagcagtttttcccaaagtcagagttaaataccctccttctcagtgatttcacaaaaaccattgtatacttataacactgtgcattagaaacacacactgcattagatagagtttgcttatctgcctcttctcttagactgaactggcagatcacacaagctcaggaaatgtagctaaatgaatgaatgaggycaactctatcacatgatgcttctagtaacattatcttaaaaatatagaaagcaaatattgggaaaattacaaagaaaaatcaacaaatccatcatcctgtagtgggagattttattaccctccatcagtatttgctagattaagtatccaaaaatcagtaagcttatacaacacttgaacatgattaacaaatttaacttaatagacatatatgaaacacaacgaaataactgcagaacacacattcttttcattcatgctgacttgtgacaggtataagatttgaccatttaacttggtcatagagcatgtctaaacacattgcaagaatgagatcactcagcaaatgtactctgacaacagcgcatcaatggtacatattaataacacaatctaactaaaaaatctcttacagctgtaggttttcattaggaatatgatacattttgagttaacttatgtattt

SEQ ID NO: 66327 - DNA, 1560 bp, Homo sapiens
catgggatggttagcttttaggctagtcaccaactccacccaaacccacctaggattactataactaccgatcccactacttcctttaatccaccatacaatgaccctaagagagtagaaataattaaggtaactgacttgaggctgactttacaaatttagactggatatggggatgtaaatacctaggttgaatggtccaaattttcggtactagctcttaatgagagcaactgttatgcatgatctcctgggcggcctgaggcacaggtggttccatttcycctaggatagtatatcaatcgcaaccaaatgcactgcatgttggctctatactaggacagggatgcatggggaaatgagacttgcaaaagtctatcattgctctttcccaccttgcagaaatcagaccctacagcaattccctccttctccataggaaatatgaaccactcctcttgcttctctagggagggggcagagttcaataagctcatgagagaactctcaacttatacccacatcctaaacattactggtgagtcaaacaaaggcaactacttgactcttcatgtaccccaggctgatgtctggtggtattgtggaaagaggaacctccatgagctactaccattcaattggactgggatttgtgccttagttcaattggccattccattcaccctggcattccataagattcctgagaatccacatggccaccaaataattttaagtctaagagaaagttgaccttggtagtacttggaaaagggatgtcaagaatattggaaagttttaaagtctttaattcaatattcactttcttacttttcaaagttgacaatgagcctaatactaaaggcaatttttaggtagttgttctgtactggcaaaggcattaagtaagtgagggtagcctctatacctatagaaaagctttcgtagaaacatagatatcttcctataaatcattcaagcccatatgtgtgcatgcatatgacacatcaaatgccatatatggttgattttctaggtcatgcaattctggtactttgtacagttctttgcaatgttctaaagctttttttaatgcattcacagtgggaagaaaaatgtttttcaaactttttatttattggtttcaatactttactgtataattcagaccattgttatttacaagtggtattgaatctttaataacactatcagtgagaaggcatgtacctgtctgcattttgtaacaaaaaagaaaatatataaatagcttgccattgtttggtaaattctactgttcagttattgggaagctaaataatccatactccatttgaacaagttagaaaagaatatttaatgagctacagagggaagtacttttagagtactaaacattttcacaaatgttgctggagaggcaattgctcaaatataattctcccattaggaggttaagagagataataacagcttaacacagagaaaataacagaagaaataagatgtcaaatatgatcagattcgtctttgccatgtaaattcaaaccataaaattgc

SEQ ID NO: 66328 - DNA, 2795 bp, Homo sapiens
ccaggaagccgtaatgcccccattaataaagctattaattttgaaaagctttgacagctataacatcttttttaagaaagcaaaaatacttttcctttatcttaaaaatgccttcttctttgtatggagcagctgcctcaagcccccttccactgcctgttttaatttgtctttaatatcagatgtgccttatcgatttcttctgtgtatattttcattctgaataattcagaggcaagatttttttttcccattatggtcaatagcaggggcaaattttgaggataatcaattgagccctgactgacgattcctgctgttggtaaccccagaagtgaagaagggggaacagcaggggataatacgatccaacagtcaatcacagctatcagcaaaggagccaatgcgggtttgtgtgaggaatagagatccatactgcaggcccaaaaggcttgctaatagtgtgctctttttacttttcaatcaacggcactccagctgtgctggggagagttatggtccattctcatatacattttcctttctactaatgtttaaaagccatgttttaaaggggtcatcttttgtgtgaatatgtacatcttctatgcatcaattcttaatgatttgttcacattttagccaagctcttttcaaaatagggtagwaaatttggaaagcttccaggaaatcagtacagggaataaataattgtcacttttaaattcagataatatggttgaaaattaattatcatagggctgacagaaataatacaagtttgcctagtctcccctcacctgcagtaggaacacattttctgtgcctgttttgacactggcccttgtccaagtctttgacacactcaatttactacaaaattggcaaccctctgtctcctaaaggtatccaagtgtaacaataaatattggtctccatacacactatgattaacataagtcagagtagacttaatcagtgtcaaattatttggcttccataattttagtattttatattttcatctctttcttaagatatttttataaaatcctgatttaacaagatgtgctagaggcagccgggtttttgcattctcttagggatgtggagatcggacccaagtgaggaaaagggacgctcaggttaacacaagcagttcaatttcaattatgtggagtaaatggtctttttcaggtctgatgatttttgaaaactatttgaaggtctgctgtgatttacatgcagtttgccttgatctgctaaaagaagggctttcatattacttgactcaagtatttgaatgtaattatgaaatatctccttgccataaacagatattcctaaggaaatatttaacaaccaaccaaacaatccctaaagaattgtcggatataaaataaaggctatagaattaatatcttctacaaaagttacctggttttcttatctccagaggagattcataaaattgcaaaaacatctctagttaattcctaaatagcttatagttaaataatagcacaatgtatgcaaagtaaaagaggaaattagaagtcctggtttagtttaccatagataacttatttataaatctctgtaatttattattaatatccttatacaataatcgctcatgcatataaacacagttaaccttaaaaaattttttctgattcctctttctttacaaaaaagatattttggctgtagaactcattagttttaaaggtttttgaagacattttaaaagtacgctaccatttagtttatgggggaaaatagtgattctttgttcatgaccttattttattcatcaataaatttcatggaggaaaaaattactcttattaaaaagtatggttttcttggtattaattttggagttaaggcttatatctcagaaaaagtaaataatacattatttgtaaagttagggtttattttgtaaatatcaacagtgctttcatactacaaattataatatcagtactcatatgctccaattgtggtctttgacacaggtcatctgactttttcttgttcttgaagggtaaaatacaatttggaggtgacaaactcttagagaattaagtggtggattgagctgacatgttgccttaaaatgaagaataaaacgaacaaactgatgtttttttttttttggtaaatggttggtaacatacatagcagcaagcatttgctagcattgattattgattaaatgctgatctttagctaaaatatgtcatcaatagaaaactggcaaacagcctcttctaaagccacaactagagatatttaacactgccaaaattagtaatacaatgctttcagctggtttttcctggtcagctataaatgttaacaggctgatattaaaagttgatatcaatgttgatatcaaaagtatagatctgccttatgttaaaataaaaaggaaaaagaattagtctcagtaagaagatctgggttctagtgccatgttaggagtgctacaaacttgctgtataattttaattggactaatacataacaacattagtaggagttttgtttgaaccagagatcacctcacctatgaagtaggtatcactattatttccattttgcagatgaggaattcagggcatatggaggtaaataatttgcctgaagtcatacatttagtaagtggtagagtcaagggcaccaaaactcagatctcgccaactcttaactaccatgaacaggtgttgtctctacaaatgttgaggggaaatcaagtggtcacgctatacttttaaaatctctca

SEQ ID NO: 66329 - DNA, 1577 bp, Homo sapiens
cctttgccacctggaaaactacttttgtgccaagttcccgagttactagaatgatttaaatcaagctggtctctccaatcaatattttttctaaaggaagtgtggratatagtggaaggagctcagaagttcacctggatctgacacagagaagaggaacactagctagctggcagactttagcaggatcagagccaatgttcaaaaaagaaggaaatagaacagggaaacaaagcccactgaattctattgagcagaatgacaataatggatgtcatgttatagacagaacccggctaagacctctaattccattgcctcatttagtcgttacaagaataattattggtaggtactattttttatctccatcttaacaatagtaaaagaagtctcaatcatgttgagcctcatcttttttctttcattctcaagaatataaaataaaaaataaattttaaaaaaaagaaagctccgaaaggttaagcaacttattcaagcttatacagtaggtggcaaagctgtaatccaaacccagaccattatgattccaatctctaatcttggttactaatgtataaacccaaataactaacaagtcaatcaaccttattttttcctgatctccatttatattggaaagataaaagcaaacaataagataacagagatctaactttaaaacaaattaaaacacgtccacactgctctcagagcagtacaaagtcagctgtattattacctctatttcccatttattcagtcagtcaattgttccacagaaatttattacaaatttatgtttaggctgaacaaagatctgaataggcaagcttattatgtctgttatatctgttatattatatgcaatatatgtactgtatatgcctattgtacatttattataaatgggaaatttatacaaaatattttaaacacaatggtaaacagccagaaatacattttgaggagaggaggagttctgcttttctcacaggttaaatcaattaaccactctcttaacattacagctttttgaggttttactgtagtgttttttgtgtacttatatcatttgctaataacaactaaggaaatgtccagctagttaccagggaagctcaactacctctaagcctatcattattagaattcaataatacgcaaatcaatatcaagattgaaaaaagaaaggaaggcccaaagtgttccttgaaaagacagcttctcatagaatgacggacaaccaggttttatttacttcgtagctaatttgaaaaatgcttttgagggttggaagatgtttgaggaaatacaactgtctactagccaactacaatactgcttcccaaaagggtccacccatcagactagaataacggagctccttctgaggagtccagggaggaattactggaaatggcaaagtatattagacctaatattatcccacaacataacatgatgtattaacactctgcctgaattcaagatgtttattgatttcttaaatcttaactaggttacatttgcattatatagtacaaaagaaccattttaagttatttctgttcaca

SEQ ID NO: 66330 - DNA, 1577 bp, Homo sapiens
cctttgccacctggaaaactacttttgtgccaagttcccgagttactagaatgatttaaatcaagctggtctctccaatcaatattttttctaaaggaagtgtgggatatagtggaaggagctcagaagttcacctggatctgacacagagaagaggaacactagctagctggcagactttagcaggatcagagccaatgttcaaaaaagaaggaaatagaacagggaaacaaagcccactgaattctattgagcagaatgacaataatggatgtcatgttatagacagaacccggctaagacctctaattccattgcctcatttagtcgttacaagaataattattggtaggtactattttttatctccatcttaacaatagtaaaagaagtctcaatcatgttgagcctcatcttttttctttcattctcaagaatataaaataaaaaataaattttaaaaaaaagaaagctccgaaaggttaagcaacttattcaagcttatacagtaggtggcaaagctgtaatccaaacccagaccattatgattccaatctctaatcttggttactaatrtataaacccaaataactaacaagtcaatcaaccttattttttcctgatctccatttatattggaaagataaaagcaaacaataagataacagagatctaactttaaaacaaattaaaacacgtccacactgctctcagagcagtacaaagtcagctgtattattacctctatttcccatttattcagtcagtcaattgttccacagaaatttattacaaatttatgtttaggctgaacaaagatctgaataggcaagcttattatgtctgttatatctgttatattatatgcaatatatgtactgtatatgcctattgtacatttattataaatgggaaatttatacaaaatattttaaacacaatggtaaacagccagaaatacattttgaggagaggaggagttctgcttttctcacaggttaaatcaattaaccactctcttaacattacagctttttgaggttttactgtagtgttttttgtgtacttatatcatttgctaataacaactaaggaaatgtccagctagttaccagggaagctcaactacctctaagcctatcattattagaattcaataatacgcaaatcaatatcaagattgaaaaaagaaaggaaggcccaaagtgttccttgaaaagacagcttctcatagaatgacggacaaccaggttttatttacttcgtagctaatttgaaaaatgcttttgagggttggaagatgtttgaggaaatacaactgtctactagccaactacaatactgcttcccaaaagggtccacccatcagactagaataacggagctccttctgaggagtccagggaggaattactggaaatggcaaagtatattagacctaatattatcccacaacataacatgatgtattaacactctgcctgaattcaagatgtttattgatttcttaaatcttaactaggttacatttgcattatatagtacaaaagaaccattttaagttatttctgttcaca

SEQ ID NO: 66331 - DNA, 678 bp, Homo sapiens
tacctgcttttttaaatgcctgcatttccattgctaactcatacaacacattttacgattgtgcaaagtgcaggacagttgagccccaatgtcagcctcagagctccttgtcacattcagcttctttttctytctctttctttcaacacaacgctatggtgaagtcacataagtgatcaaaattaacataaatcactattagttattaggatttgctctaaattacactgtgaatatcgtaccagccccatctgccgcccctgctctcgcagcaatagattgcagataaaataaatgtccttaccccattagaaggttcctgtctctgtagccaaaagccaaacaaaagcaataaataccgggctttttctctccactattcagctgtgactcttttcatcagctcttcttctagaaaagctcaatagctgcctgaaaatattgcattttatatcaccaaagggcgattaatattgcattaactgtatttaacattttttaagcgcgagtaatctgcaatgagttagttttctgttagtaaggacagggggtatcagaactactgcagaccacttaagatatccgtacgattgtattatttgtctcacacgtagttatatatatatatttagagtgtaccgcgatgtttgaagtggaagaggccgtgctaatggcctg

SEQ ID NO: 66332 - DNA, 838 bp, Homo sapiens
gccttccagttctttttaaaacgtgtacggcagttgtgaaagttttgtggtgcttgagactgttgacttatgcaactggggagagggtttttttaaccgctttgagatattggtccatcccttttctctcagaacgtcctcaagggcacgtaagagttggaggtgacctccgggagcgcctaattttgagccgcggaacttcggcccacttctccgaggggaccaggcgcgcgccaatacgcatgtgcgggctctgagcgctcagagcgcgcctcttccttcccggctccccgcggtgcgcacccgctggccactctgcgcacgcgcgccgggtgccccggcctaaggccgttgacctcgggttctccccggcacagtcgaatccacgccagggccctcaggccggtagctgtcctgcagtccgagcggagctgcgacctcgggcagctggaagcctgtgggctgctgcttctccaggcaggcggcggagggatgcaggcaggatgagcggcggtcccttcgccgccacccggagaaccgcggctggtgcccttgaaggccctgggatgcctgggttgggtgggtgrgtgaacgagaaccctgagtgagtgaggggagggcgggtcccctcctggcttcaaattcaacccaatcagctctgccgatggtttgaaactgcacacgccgacccacccgccccgaagtctgaaagttatgccctggagacctgcgagctgcggagtgcagctggagagggagctgccccacgaggaggcctccagaataactcccggagtcggaacagcgctgggctgctgaagtttgcagcctccggatc

SEQ ID NO: 66333 - DNA, 947 bp, Homo sapiens
attttgatacttacattatttgtgagtagaaaaatgcccctgttggggatagcgtggagcagtgagaaagtctggcgtcttcacagacgtgttactcgtactgggtcttgaagggtgaataagagttctgcgcagaagaggacacctctcctgtgtgtcgggctgtgctgaaggatacgcctatttagcctgtgtctcagaagaggtgctgaagaaaccattccttaacatcagggctcctatttgaaaaaagttttcccggattgctccagcctgggtttacacgtttggctttgctccgcctcctctcggagtccccagaggctcttgggcttgccccaacctcctgagccggcggcctgatggcgagacagtggctccctgggcgctggaacgtttaggcggtggcgagctggcccatcatctgtccattaagacgagacttgaccttttgagggcaggaaggggcgacctcgcctaacccaccgggtcatctttgtgttcgggttggggagatggggtccggcccgccagcctcggctctgagccctcttctgtccctgggattacagcgaactcggccttctcggattcccgccgccggtgcccgctcttcccttcccctctagcccccaccggacccccactccccagtctcgggaagacagacgcgccctagyccttccagcccgattttcccactttctcgggggcgctccgggctggtcccgcccaagctccacccgaacggcccgccctgcggtttcctttcattttattattactcgtgaaacctggcgattaagacgcgaaaccaacaaagagttttctttccaccttaaccttgcacacaatcctttaacaaattaattaatcctaatgaattaacacttcatttatttaaacgcgctacagttcatgaattaaattttcatgcagtgattaaa

SEQ ID NO: 66334 - DNA, 947 bp, Homo sapiens
attttgatacttacattatttgtgagtagaaaaatgcccctgttggggatagcgtggagcagtgagaaagtctggcgtcttcacagacgtgttactcgtactgggtcttgaagggtgaataagagttctgcgcagaagaggacacctctcctgtgtgtcgggctgtgctgaaggatacgcctatttagcctgtgtctcagaagaggtgctgaagaaaccattccttaacatcagggctcctatttgaaaaaagttttcccggattgctccagcctgggtttacacgtttggctttgctccgcctcctctcggagtccccagaggctcttgggcttgccccaacctcctgagccggcggcctgatggcgagacagtggctccctgggcgctggaacgtttaggcggtggcgagctggcccatcatctgtccattaagacgagacttgaccttttgagggcaggaaggggcgacctcgcctaacccaccgggtcatctttgtgttcgggttggggagatggggtccggcccgccagcctcggctctgagccctcttctgtccctgggattacagcgaactcggccttctcggattcccgccgccggtgcccgctcttcccttcccctctagcccccaccggacccccactccccagtctcgggaagacagacgcgccctagcccttccagcccgattttcccactttctcgggggcgctccgggctggtcccgcccaagctccacccgaacggcccgccctgcggtttcctttcattttattattactcgtgaaacctggcgattaagacgcgaaaccaacaaagagttttctttccaccttaaccttgcacacartcctttaacaaattaattaatcctaatgaattaacacttcatttatttaaacgcgctacagttcatgaattaaattttcatgcagtgattaaa

SEQ ID NO: 66335 - DNA, 1319 bp, Homo sapiens
tttccccacaaaatgttcttggtgcttttatcaaaaatcagttggctgaaaatgcatgcatttatttctgagctctctattctgttccattggtttacatgtctgtttggcaaatctgaccaaataactcctctgtttaagataccacttcattggttctctacttttcctaaattagcacgacatgtaacatccctcgtgagagagtctttgtagtataaagatctctcccaaaatgtatgtcttttatgtctcctacaaacttccctatatgtgctgttctctctttatcaaaacaccttattggtcccttcaagaccaccagccaagcttttaaaacccgtctatcaccttcatctagaaaccatccctgagcatcacaggaaaagctagatgcttcctgctctgtggacttaaagaacctagacacaacactaagatacactgctataatgtggaaggacaatgtcaacctttcattcaagttcacttcctcggtataaacaaagagcctaacatacaacagtacttcaaaagggcagatgaacaaatttcatagcaatgtcctagttatgtcaatagacttactctgactttgggggcagcagctcgaaatttcacataaaataatgtgaaggcattgtctgcattaggtacagatgaaggatcctaaagaaacatgggggaggataaggaaggaagataattagcaaacaaataattcagaaaacccaacagcaaccatttcctatggctactgcttggcctgcataccaatcaaagcttagggagagtctccctctccctctccctctccctctcccgtctcccgtctcccgtctcccgtctcccgtctcccgtctcccgtctcccgatggtctccctctcatgccgagcckaagctggactgtactgctgccatctcggctcactgcaacctccctgcctgattctcctgcctcagtctgccgaatgcctgcgattgcaggcacgcaccgccacgcctgattggttttggtggagacggggtttcgctgtgttggccgggccggtctccagcccctaaccgcgagtgatccgccaacctcggcctcccgaggtgccgggattgcagacggagtctcgttcactcagtgctcaatggtgcccaggctggagtgcagtggcgtgatctcggctcactacaacctacacctcccagccgcctgccttggcctcccaaagtgccgagattgcagcctctgcccggccgccaccccgtctgggaagtgaggagtgtctctgcctggccgcccatcatctgggatgtgaggagcccc

SEQ ID NO: 66336 - DNA, 1319 bp, Homo sapiens
tttccccacaaaatgttcttggtgcttttatcaaaaatcagttggctgaaaatgcatgcatttatttctgagctctctattctgttccattggtttacatgtctgtttggcaaatctgaccaaataactcctctgtttaagataccacttcattggttctctacttttcctaaattagcacgacatgtaacatccctcgtgagagagtctttgtagtataaagatctctcccaaaatgtatgtcttttatgtctcctacaaacttccctatatgtgctgttctctctttatcaaaacaccttattggtcccttcaagaccaccagccaagcttttaaaacccgtctatcaccttcatctagaaaccatccctgagcatcacaggaaaagctagatgcttcctgctctgtggacttaaagaacctagacacaacactaagatacactgctataatgtggaaggacaatgtcaacctttcattcaagttcacttcctcggtataaacaaagagcctaacatacaacagtacttcaaaagggcagatgaacaaatttcatagcaatgtcctagttatgtcaatagacttactctgactttgggggcagcagctcgaaatttcacataaaataatgtgaaggcattgtctgcattaggtacagatgaaggatcctaaagaaacatgggggaggataaggaaggaagataattagcaaacaaataattcagaaaacccaacagcaaccatttcctatggctactgcttggcctgcataccaatcaaagcttagggagagtctccctctccctctccctctccctctcccgtctcccgtctcccgtctcccgtctcccgtctcccgtctcccgtctcccgatggtctccctctcatgccgagccgaagctggactgtactgctgccatctcggctcactgcaacctccctgcctgattctcctgcctcagtctgccgaatgcctgcgattgcaggcacgcaccgccacgcctgattggttttggtggagacrgggtttcgctgtgttggccgggccggtctccagcccctaaccgcgagtgatccgccaacctcggcctcccgaggtgccgggattgcagacggagtctcgttcactcagtgctcaatggtgcccaggctggagtgcagtggcgtgatctcggctcactacaacctacacctcccagccgcctgccttggcctcccaaagtgccgagattgcagcctctgcccggccgccaccccgtctgggaagtgaggagtgtctctgcctggccgcccatcatctgggatgtgaggagcccc

SEQ ID NO: 66337 - DNA, 1399 bp, Homo sapiens
aatttactcttacattgtcattgtcattaaactataaaggggtgcttattttaaaagtcccaagaatacagaatatttaagtgaaaagcaagtctcccttcttccctctcccctgctcgtccaattcttcttctttaagccaataccaatgtttataatttgagagtttttctaaagaatttgagggtaaaatgaagaactgtaaaagtagaaggaactaaagaaataattttgaatttttgatcaatcttttatgaaaattattcaaaatatatgaatataattgtttttaatccaaatcatcagaagagttaaaatgaaaagtaacattctcccccaccctcagttttcaccagtttaaccattttcagttttcttttatggtaactctacaactcttaaaaaaaaatatttactgctttgtgtttgaattcatcaattttaggtcctatatatacactcttacttacttcaccatgtaagataaagaaattagtaactctatatctgttccctgtttactgtcaaattctgtcacctgtactatctcttttttagattatcaaattttataatatttgcacctggttctgtgattaagtctttagaatgatttttaaaaggatactacatgcttcctgccttcyataaatatgcccaactttcaggttcattgataccatctttggttttggtgtgccacacatttattactgtcatttcaaagggatccagggatgtcatacacgtgtgctcagtctgttatcttgaaccaaaaaaagtttatcttctaattaactttagaaaataaaataatttgaaaactctacttgagaaactactatagatattccagatatgttctgtaacctagatgtgagtaaatatattctaaatttataagagtattctatttgattacttcaagtacaaatactacttttcaatcataagaactttaaaaactagaggcaaaaggaggctccctgtttccttgttctaatacaaaaccatcttctctcaaaccaagcaagagagaagccataatgcaattacttcaaacaaatcattttttaaagtagcaaaacaagttgctttttaataacatacgagaaaatgcccccattaagtagactaggcagctgccttcctttctcaaaacacctggtatagaatgacaagtcaaaaaggggtgtggtggtatcacacactttcctgttctgacctctcattcacttctcaggaggaggtgactgaatgcctgctgcttaccagcactgtcctggcttccagatggagcagacagacaccactagagagagaacacagttctagattgctaatgggccagtgctgcagagctactgtatagtttatgcaaatggagacactaacatta

SEQ ID NO: 66338 - DNA, 1040 bp, Homo sapiens
aaaagctttcactgttacatattttcttcaatgcattttattacatagtcataccatattatctgatttgcatcttaaatacctgttgtcttaatatgtttaagttaaattttattgtttcatttttaaaaatttaatgactgtgtaatattgttatataaaacatgccacaatttatgtaaccatttccttaacattagacatgtgttttctaatttcacctattatcaaaaatgtgcgggcacagacttggaaatacttgttaaaacttaaatctgcctgtctataactttatttctagtccccatgtgaaaatttcatttcacctctccatttcatgaatgagaaaaatatagtggtcacaaagataaagctttcctagcaacaagatcccaaattattctgtggagagatacatatatataaaatgtatatatcacttttatatatataatttatatgtatatattatatatataatttatatgtatatattatatatataatttatatgtatatattatatatataatttatatgtatatattatatatataatttatatgtatatattatatatataatttatatgtatatattatatrtataatttatatgtatatattatatgtataatttatatgtatatattatatataatttatatgtatatattatatgtataatttatatgtatatattatatgtataatttatatgtatatattatatataatttatatgtatatattatatgtataatttatatgtatatattatatatatataatttatatgtatatattatatatatatatataaaagccttaaaagtcacgtttataaatccatatatcaaaaaaagttcacaggatctgaacactccaagtgggaagaaaattttggctagaaacagctcccacagctccttccctataggtgacaggtattttaagaggagagttaagcaaagcaacacttttgaacatgctctacttcctgggaaaaaaaaaaaatctcagggtctgtgggagaagcac

SEQ ID NO: 66339 - DNA, 612 bp, Homo sapiens
acccacctcagcctcccaaagtgctgggattacaggcatgagccaccacacccaggctttttttttttttctttttttctgagacagagtctggctctgttgcccaggctggagtacagtggcacaatctcagctcactgcaacctccgcctattggggtcaagcaattcttgtgcctcagcctcccgagtagctgggattacaggcatgtgccaccacacccagctaatttttgtatttttagtagagatggggttttgccatgttagtcaggctggtctcaaactcctgaccgtgggtgatctgcccacctcggcctcccaaagtgctggaattacaggtgtgagccaccgtgcctggccagtactttcactttacaattctgtaagctttttttccaaaaacaagtactacttgtaaaatttttttttctctctctctcaccactcctatttaacttgtataatttttaaatttcttccataagagctcactttaaactaacatttaatttgtattaagtttcttaaagaaaaagaataaacaaattacatcaaagaatatttaggagaygaaatatttatagttttccttaggaatatggtatgtgca

SEQ ID NO: 66340 - DNA, 634 bp, Homo sapiens
ggatccctcatgttaaaagcggtggttttagctatgatgtgggtggttttagctatgatgtggatgagattgtccagaggattcatatcatgaaagcaggtcttaggacagagtcctggtgcatgtcrctttataaggcttgggtgataaaggaaaaaagagaagccccagatcttcactctggtggaaatataagcaacctagacatttgagcctctaaagatggagctgctcagagttgggatttggcctaacgccctaatgaaattctagccctattacataacattgtacacattttgactgttcaaattactgcatgtaccccaagataataaattttattttaaaaattctgtaacttttaaccttctttccaattgatgaagttttttggtatttgagaactatattgataaagctggtaatgcatgcaaatactaatcgtcttttttttgaggaagtctggcttttattataatctaacgcttttattataattgatctaacgcttttattatattgatgacaaaaaattagtctaagagtgaagccactatagcacaaaataaactagttgtttagagtataattttatgactgaagagttccatacaaggatttactattcact

SEQ ID NO: 66341 - DNA, 634 bp, Homo sapiens
ggatccctcatgttaaaagcggtggttttagctatgatgtgggtggttttagctatgatgtggatgagattgtccagaggattcatatcatgaaagcaggtcttaggacagagtcctggtgcatgtcactttataaggcttgggtgataaaggaaaaaagagaagccccagatcttcactctggtggaaatataagcaacctagacatttgagcctctaaagatggagctgctcagagttgggatttggcctaacgccctaatgaaattctagccctattacataacattgtacacattttgactgttcaaattactgcatgtaccccaagataataaattttattttaaaaattctgtaacttttawccttctttccaattgatgaagttttttggtatttgagaactatattgataaagctggtaatgcatgcaaatactaatcgtcttttttttgaggaagtctggcttttattataatctaacgcttttattataattgatctaacgcttttattatattgatgacaaaaaattagtctaagagtgaagccactatagcacaaaataaactagttgtttagagtataattttatgactgaagagttccatacaaggatttactattcact

SEQ ID NO: 66342 - DNA, 634 bp, Homo sapiens
ggatccctcatgttaaaagcggtggttttagctatgatgtgggtggttttagctatgatgtggatgagattgtccagaggattcatatcatgaaagcaggtcttaggacagagtcctggtgcatgtcactttataaggcttgggtgataaaggaaaaaagagaagccccagatcttcactctggtggaaatataagcaacctagacatttgagcctctaaagatggagctgctcagagttgggatttggcctaacgccctaatgaaattctagccctattacataacattgtacacattttgactgttcaaattactgcatgtaccccaagataataaattttattttaaaaattctgtaacttttaaccttctttccaattgatgaagttttttggtatttgagaactatattgataaagctggtaatgcatgcaaatactaatcgtcttttttytgaggaagtctggcttttattataatctaacgcttttattataattgatctaacgcttttattatattgatgacaaaaaattagtctaagagtgaagccactatagcacaaaataaactagttgtttagagtataattttatgactgaagagttccatacaaggatttactattcact

SEQ ID NO: 66343 - DNA, 634 bp, Homo sapiens
ggatccctcatgttaaaagcggtggttttagctatgatgtgggtggttttagctatgatgtggatgagattgtccagaggattcatatcatgaaagcaggtcttaggacagagtcctggtgcatgtcactttataaggcttgggtgataaaggaaaaaagagaagccccagatcttcactctggtggaaatataagcaacctagacatttgagcctctaaagatggagctgctcagagttgggatttggcctaacgccctaatgaaattctagccctattacataacattgtacacattttgactgttcaaattactgcatgtaccccaagataataaattttattttaaaaattctgtaacttttaaccttctttccaattgatgaagttttttggtatttgagaactatattgataaagctggtaatgcatgcaaatactaatcgtcttttttttgaggaagtctggcttttattataatctaaygcttttattataattgatctaacgcttttattatattgatgacaaaaaattagtctaagagtgaagccactatagcacaaaataaactagttgtttagagtataattttatgactgaagagttccatacaaggatttactattcact

SEQ ID NO: 66344 - DNA, 454 bp, Homo sapiens
aaaacctcatacctttctttttttgagacaaagttttgctcgtcgcccaggctggaatgcaatggcacaatctccgctaactgcaacctctgcctcctgggttcagtgattcttctgcctcagcctcccaagtagctgggattacaggtgcctgccaccacacctggctaatttttgtatttttagtagagacgggggtttcaccatgttggccaggctggtcttgaactcctggcctcaagtgatcagcctgcctaggcctctcaaagtgctggtattacaagcataagccaccatgcccagcccctcatacgtttctttaatatggcgataagggtaaggtaggtgggaatcaaagattttttttttttagatgggatctcaytccattgctgaggctagtgtgcagtggtatggtctgggctcactgcaacctctggtttctgagctcaag

SEQ ID NO: 66345 - DNA, 729 bp, Homo sapiens
acacccacacagcccaccttgggcagggctctctaggacagacacatctgcagggggactcccagccctgacccctcccctgcctactgctgcgcacccacagtgggtggcgcaggatagggcttaccagactgtgcccttgggcactgcttgatcctcagggcaggagaaggccggtgtcaccctcaaactctggatctagggtctcccactggcctcccaagtgtgtgcagaaagcacatggaacccaggtgtggtgtctcagacctggaattccagcactttgggaggctgaggcaggaagatcgctaaggccgggagtttgagattagcctgggcaacacagggagaccccgtctccatgaaagatttttaaaagtcagctgggtgtggtggtgcacacctatagccgtagtgactcgggaggcaggggtgggaggatcacttgagcccaggagttcaagggtgtggtaagctgggatcatgtcactgcgctccagcctgggtgacacagtaaaaccctgttcagaaagtaagaaccccatggctttgctttcctccctaattccttccacctgctcttcatcctggacacagccagatgagggctcagcccaggagaagctccaggcatcacttcctctgttgcccatggacctgtggtcaggaaggcccccaagacaagagcamggtcaagttaagccagacttttgatttgcaacacaagtg

SEQ ID NO: 66346 - DNA, 524 bp, Homo sapiens
tctgktgtcaaaatcttcctaaaacacatttttaggaagctctgcccccacccaggagtaggagcagaagctaatttaggtttaatgactgagcatgctcactgtagctcttcagggctagccacccacaagaaaccaagctacactcaactatgatccgaacaaaagccagatccaactgcagatgaagactggaatatgacctccaacgagggaataagagctgcatgggtactggactcaaccctgtgtgctgggaaatttctggacacgggcagagaagaatggctccagctgctgtatgcccccttttgtgatatgtccatccccgcactgtctcgctgacctcgccaggaaagcaaatgctggtggaagaactacagcgggaacaaggggagcttcagagaatgatgtccccgcttacaggagaatggcggtgagggatgtttctgggatcaacatttaatgacaatgcaatcagatgatgagggtgatttgtcatttacaatatcacaaaacatttc

SEQ ID NO: 66347 - DNA, 1317 bp, Homo sapiens
cttaagaggcgatattatgtcttctgaaccaggggccttcaaacctctatgtaacatacttacagcaactcagcttttctcttgggttccaccattaccttaaagcatgaacacggaagtagaagtggggatttttgataccagtgcctgaaaaggcattttgtgtttcgtaatgtgatactttcctctgtcttctctatttctctcctttcttctctcttggtgcctctgttcacttttgccccctgagtcttccttcctgcttccattgcctttatcttgctaagtctcaggcccttctggtcacatggatgttggtcttcttcatttatacccagcttcctccttatctacgtgtactgcccttcctttcctctgctgaggtcctagagtttcctcatctagcctctcttctcaccttctttgtctctgccatgctagggtagttttgtccccctttctaacaygtccattttataatcctttatagttccattatcttatagtcttgatttattttcccatttgtcctcgaaggcttcaaggacctctcttgatgaaacttcctgagattgtccctctaatatttttcagattttccataatacttgaagtaagtgtacaagggtacatttaggagacgggatgtgtcaaaagttgagatgagggaaaatagaaggatgggcctgagaataggagaagaggaggagaaaaagccagttgggagtcctgagagcaatacaatgattggtgtctttaggaactgcctgagcgtcactcattagcatcagcaccctagattccttacccatggtttgtaattcttaaggaaagaatttattcttgtaatagaaagagaagaaccactacttccaccatcttgtattactttacctttcccggtttctgctgcttttttgttttctcatttctcacccccattcctcctaattttatcttcatttctacttatcattccctttcctccttatgattcagaagttttcttgagttaaaattacacttcagtgaatgtttatggtataattaacatgtaagtaggagttcttatatttaatctgaatatgaatactgatacagaataacaaagaattgaggaaagtgatttttatttctttatactaaaataaaatcctttttgctttcagtttaagattatttcagaagtttgacaatttccggattcttgtttgtggaggcgatggaagtgtaggttgggttttgtcagaaatcgataagctcaacttgaataaacaggcaagtgctaattcttttacttgctagttaacatgaatg

SEQ ID NO: 66348 - DNA, 690 bp, Homo sapiens
ctaaagattcaaacagacatttcaccagtgaagatgtgcacatgaaaaataagcagaggaaaatgctcaaagtcagtagtctttagggaaacgcacattaaaaccacaatgagatactatgtacctattagaatgcctaaaattaaagtgactgactgaatgttggtgaggatgtgaagcaactgttggcagcagaccagtggttgcctggggacaggtagtgattataaagggatgcaaggaaagttttgagtgtggcgaatatgttcagtatcttgactatggtagtggtttcatggccatatttgtatgtcaaaacatatcaaattgtatactttatgtgcagtttctaatatgatcatgatatctcaataaagttgtaaattttttttcctgtaatgttgcttcctttggtttgtatttctgacttaattggtgataacatagattttatttcaggggtaaattctcaagatatatgacatttaaaatatacaaaataattagatgattaatatggatttttagtctttctggtataaatgtcacataataaatctgaatatttttgrtaactgacatgtagctaatactgatacgcacttactataacactctcagcctcaatagatttaaataatttgacttatttagaaatttatatcatttatgtttttcccctttttaaaa

SEQ ID NO: 66349 - DNA, 723 bp, Homo sapiens
tatagcgtggtcacactaaaataaacatatgcttgccttttccacccctggctgtctgtaccacctaaggtggatgtgttagcactagatcagtaaaaggaaggaaacagagaaaaagaattggctcgctcaggatttcttcagtcggaagctataaacctactaccaggttaacgtgttcaataatcttctgttcctttttgccatgtcattgaagagcaagacagaaaacaaaacaaaaaagagccaaaaggagagaaaaggaaaagtctagataatttcattttagttttagatagtttcctttagttttctgagcggtgtttccaaggtgaccaagcatgggagcatctatcttgctgatttgacctattcctcgcctttwtttattttttttttttttagagacagagtctcgctgtcgcccaggctggagtgcagtggcgcgatctcggctcactgcagcctcgaactccctggttcaagcgattctcctgcctcagcctccgaagtagctgaaactacaggcgtgcgccacctctcctggctaatttttatatttcttgtaaagaagggatttcaccatgttggccaggctggtcttgaactcctgacctcaagtgatccaccctccacggcttcgcaaaatgctgagattacaggcgtgagccaccgtgcccggccgtctcgtcttttctttcccgtcttttgccggggaaaatt

SEQ ID NO: 66350 - DNA, 723 bp, Homo sapiens
tatagcgtggtcacactaaaataaacatatgcttgccttttccacccctggctgtctgtaccacctaaggtggatgtgttagcactagatcagtaaaaggaaggaaacagagaaaaagaattggctcgctcaggatttcttcagtcggaagctataaacctactaccaggttaacgtgttcaataatcttctgttcctttttgccatgtcattgaagagcaagacagaaaacaaaacaaaaaagagccaaaaggagagaaaaggaaaagtctagataatttcattttagttttagatagtttcctttagttttctgagcggtgtttccaaggtgaccaagcatgggagcatctatcttgctgatttgacctattcctcgcctttatttwttttttttttttttagagacagagtctcgctgtcgcccaggctggagtgcagtggcgcgatctcggctcactgcagcctcgaactccctggttcaagcgattctcctgcctcagcctccgaagtagctgaaactacaggcgtgcgccacctctcctggctaatttttatatttcttgtaaagaagggatttcaccatgttggccaggctggtcttgaactcctgacctcaagtgatccaccctccacggcttcgcaaaatgctgagattacaggcgtgagccaccgtgcccggccgtctcgtcttttctttcccgtcttttgccggggaaaatt

SEQ ID NO: 66351 - DNA, 1012 bp, Homo sapiens
cttgtaaataaaaagrtcagagtacctagcaacatcttctgtctatagaataaaataacgctgcctagcattggctattgagtatcattgatacttcacctggtagaattttatatcaatacaagtatcattctatttttttaaataacactttaatttaggtagaattgcttaatgaactgcaaatttgtggaataccttaactataattagtttatatattaatcataattatatatttgtgcttataatacgttgtttaaataaaataatataaataacaagaacgtctttattacataagggtatcagcttgtccttcagaatatattctatatgacaattctatatgacaacaggatatttttgagaagggcatgttcagctttctttttcaaaataagatgaaaagttgataatagaaaaagagactttctagttgcttgcactaattaattaagtaatacctgcctggcatgaattttacttgtctggggctatttgtgcagctaacttgagtacatgatctacctttttggtgcacattgagttaaacgtttattataggaaaaaattttttaacacattcaagaaaatggacaagaaacatatttggggaagagaagatgattttctatccggatttattgttcatttatatgagttttcttagtcattttttgttatgcttctttttccataggttttagtattacttgactttctggctccttaaaaggcaacttagtaaaagcattctggttgatttttctatttaaaatgttcaaccgggggctcactctgtgattcaagtttggtgtttgagaaggaactaacttgaaatcaggccaactgtagtgaagggcttctgaccaaaaaagcagtgctcgttgcacaggggaaggttgaaagctcacatggtgtgcttagtgcccaccactcttctccactgctcttgttacaccctgcttcttccagtatagacattcaaaattttacatgagaatatctt

SEQ ID NO: 66352 - DNA, 706 bp, Homo sapiens
cagagctggagctgtggtcttagctcaaggttgagctagggaagggtccatttccaagctcacattgttgtcagtggattgagttccttgttgttgtagtattggggcctccatttagtgctggctgccagccggaggtgccctcagctcctagaggctacccttagctccttgccctgtgggctttccaatcatggatctttctttatcaaagccagcaatgacgagaggctctttgcaagacagaggtcacagtcttatataatataatcacagaagtggcatcccaccattcttgctgtattctgttgttttaaaacaagttgcaagccccacccaccctcaaggacgagggtcacagaaggacatgaacatcagaagttcggaattgtgagggctaccacartttgtccaccaaatatacttttttagcttatttatttttgctactatatctgattttataaactttaaaatgagaaacagaatgcatcattataagagagggagctgaaatttcttctgttctctccattcctttgtctttgtctggatttctgtactattcttctaactggtctcttacctttaatctgacttccttctaatccattccgcacactgcagcctataagatcttttaacatggtatatctgaatgtggagcagctctgtttacacctttcaatggcttcactcagtcttg

SEQ ID NO: 66353 - DNA, 675 bp, Homo sapiens
aaataaatattttataaataaaataagctatataattcaataatttgttatattatcaagttttatatgatttttttaatagttcatttagagcttccttgctgtagcccyagcacctagctcattgtagatgttccatagttgttgttaaaataatacaaactaatgccttcactttattttaaaataatagcataacattccacagttcagtatagatcgtgtaaggaaattgttgtagaattatactttcattgaaaaagcaggaggctgaatcatatgttaataaaaatagatatgactgttataagctcttagtacatgcctgacaatattagtgcttaacactatgattagtgatattagtactctctgaaataattactaatatcattagcatttatgaacgagaaaaatgaagccttgagaggtcattgggtcaaaactattcactgggaagtggcagggttaggtttggagcccaggtctgtctgactctagaggcactgtgctacactaacagtggtggaaagaactaaccagtttctgtcaggctgccacagaaaagtaaacctctgctgacaaatagcaccattttaattgaagcaaaacatcgaaagaactaataaaagaaaaaaatctactttttattaataagtaagcaccatttattaa

SEQ ID NO: 66354 - DNA, 357 bp, Homo sapiens
tgcattcacttctttcttctttattacttatttgattctttagttgatgtgggagagaggatgtagacgatattgaaaaaatacctgcagcattagttaaaacaatgctcttacaaatatcttgatgataaagattactgtttcactctatcaacttgtagttgtcatcacttcaatcaawttgcatcagtataacatcccatttggcagtcctaaaaacaagtacagggtaaatgtcttttggaagtatgaggaggagatggattaaggaaatggctttagggctttgcttacatgagaaaagaatatctttccagctgttgggttctgatctacataaaataaaagctagtgatg

SEQ ID NO: 66355 - DNA, 984 bp, Homo sapiens
atgcccaatatgactatatttggagatagggtctttaggaggtaattaagttaaatgaggtcagaggggtgaggtcctgatctgataggattagcggctttataataagaggaagagagaaagatcgttctcgctccatatgcacacaccaaggacaggccatgtgaggccacagcaagaaggagccacctgaaagccaggaagagggccctcaatggaacctgacagtgctggcaccttgatctcagacttccagcctccaggactctgagaaaatgcatttccattgttaagccatccagtctgtagtattttgttatggcagaacaagccgactaagacaccatcccagagggcccaggaaaagagtcctaatatggagaaattccccccaagatcagtttcctcgctgatcagctttggtgtcctgagtagagatcccagccctgctctttcctagctcagtgtttctgggcagcactcttcacatccattaatctcagctgtctcgtgtataaaatgggaataataagagcctggcacagtggtgtgcgcctgcagtcccagttactcaggaggctgaagcaggaggatcgcttgagcccgggagtttgaatctagcctgggtaacatacagagactctgtctctacaataaataaataatggccgggtgtggtggctcacgcctataatcccagcactttgggaggccgagacgggcagacctcctgaggtcaggtgttcgagaccagcctggccaacatggcaaaactctgtctctactaacaatacaaaaattagctggactttggtggcaggcgcctgtagtcccagctactcaggaggctggggcaggagaatcacttgaacccgggaggcagaggttgcagtgagctgagatcacgccattgcactccagcctgggtgacaagagggaaactccgtctcaaaatawtaataataataataataataataaata

SEQ ID NO: 66356 - DNA, 762 bp, Homo sapiens
tctgggctgtcatccttcggagagactggaactgagacacaaggagagacctagtgatgtgggagagttaggagaagaagcagtgatttcaaacgcatgcccctcacacggaagaagggcagggggaaagccatgcaggtgtgggcgtggcacttgagcagcctctcccatgggcacccagtggttaatgcacaatgtttagcacgtcgcccagggaggccatccccttccgctacccctttcatggcaaatgctgaaacatcgttgaagactcctctcaagggtctcctcttccaggaagccttcggtcaggaataggtgccccttctggctcctcctagcctgaaagccaacatgaaatctccctgggctgagctgagtcgtcatattttgttgttgttgttgctgttgttttactatgcctgtgagacaagttcagagtcatgcttttgatcaagaccagaaaatatrctaccttggctccatcagcatcttttcctcaccacacccagaatttgcctgtcccccgaaggaagctccaacggctgtcaagcctgagcatccagaccgtaaagcaaagagaaatgggccgggaggaatggagtgacagggcggggcccatttgcctagaggtgctttgggctgcccggtcacagagggtgactcactcccccagacaggaggggagtggcaccaggggaccattgggctgggcaggggagcctttgtggtgagagcctgtccctgccttaagtgcctact

SEQ ID NO: 66357 - DNA, 990 bp, Homo sapiens
ttcctcttgacatgcagctgctcgtgtgtgtgcccgccagggtctcagggtttttacaggcacaggattgggggcatgctgggccagagtggccttggaaaatgcaacacatgggcgcaaaaacaggagtgcctgtcctcacctgggtccgtgggcacaggccccagtgtggagcccttgcsagggactctgcccttctctacccaggacttccctgcacccgcttccatatcaacatcatccaggcctggagtgttttggtaggagagattttacaatcatccttaattactttgatggaaactggcctgtctgtaagttctgtctttaatgggatttgtttcacttatggtatacacagtatgcgtcaatagttatatcttttttgtcacttattattttatacattcttcatttcacctcttaaaaaattaggtcaggtactgttttatgtgtttggttgatttattccccataatttatttatttatttactgattatttttgtttactgacattaaattcctttatatgtattaatcgcttctttctgctggcttgtgttatagtttgctattctacatctagctttttgaattatatgtttagctttcttatttttaaaattgtatttaatgctaggaattttcacctgaagaatttttttaaagctgtatctcacagattctaatgtgttttgctttcattattgttttctagatttctagaaaattttgttttgtattcttcattgtcccaagggtcgtttaatatatactagtgtgtgtctgtctagctgtttttatgtattttcaattataaaaagctttttagtttttaaacatttctgaattattttatttgatgtatgtttctgtatatagcactgagttggatttctttaacttgtctaacaacattatttctgcatagatgattgaaatccatttatatgtatgaatatgatttatttgtttctggtttgtcata

SEQ ID NO: 66358 - DNA, 990 bp, Homo sapiens
ttcctcttgacatgcagctgctcgtgtgtgtgcccgccagggtctcagggtttttacaggcacaggattgggggcatgctgggccagagtggccttggaaaatgcaacacatgggcgcaaaaacaggagtgcctgtcctcacctgggtccgtgggcacaggccccagtgtggagcccttgccagggactctgcccttctctacccaggacttccctgcacccscttccatatcaacatcatccaggcctggagtgttttggtaggagagattttacaatcatccttaattactttgatggaaactggcctgtctgtaagttctgtctttaatgggatttgtttcacttatggtatacacagtatgcgtcaatagttatatcttttttgtcacttattattttatacattcttcatttcacctcttaaaaaattaggtcaggtactgttttatgtgtttggttgatttattccccataatttatttatttatttactgattatttttgtttactgacattaaattcctttatatgtattaatcgcttctttctgctggcttgtgttatagtttgctattctacatctagctttttgaattatatgtttagctttcttatttttaaaattgtatttaatgctaggaattttcacctgaagaatttttttaaagctgtatctcacagattctaatgtgttttgctttcattattgttttctagatttctagaaaattttgttttgtattcttcattgtcccaagggtcgtttaatatatactagtgtgtgtctgtctagctgtttttatgtattttcaattataaaaagctttttagtttttaaacatttctgaattattttatttgatgtatgtttctgtatatagcactgagttggatttctttaacttgtctaacaacattatttctgcatagatgattgaaatccatttatatgtatgaatatgatttatttgtttctggtttgtcata

SEQ ID NO: 66359 - DNA, 648 bp, Homo sapiens
atcaaaaggcactgggtgactcacaggtgcaagaaagagactaccattaactaaaaattcaagaggaaagtactcagaaagaatgctttacaatgttcttaaaagaccatgtgaatgtgtcagaatgaaggtagggagacctcatggcttacagttgaaagctggtggtcaaggaaaaggtcctagatagcaattcaatagaataaatgggaaggagaaggagggagaaggcaggaggagagaggagacgggaaagggaataagcaagtgtccctatgtagtgtatgtgtgtgtgtgtgtgtacgtgtatgtgttatgggggtggtaacagtgattgcattatgcacatgatttcatttactctttatagcaaccctatgaggytatgatgtttatttccatttagagaagagaagagtaggctgaaaagttaagcaatttatgtcacgtcgtgagattatatccaccttggtctgaatctaaagtatgacattaaaagggtcacagtgatggtttagggacacagatcacctgtctctataggtacacacacaatacacagcacagtgtcaacccacaggctcaccacattgatgcactcccagacttgagcatgtgtgtgctcaaatacacacacacacacacaca

SEQ ID NO: 66360 - DNA, 648 bp, Homo sapiens
atcaaaaggcactgggtgactcacaggtgcaagaaagagactaccattaactaaaaattcaagaggaaagtactcagaaagaatgctttacaatgttcttaaaagaccatgtgaatgtgtcagaatgaaggtagggagacctcatggcttacagttgaaagctggtggtcaaggaaaaggtcctagatagcaattcaatagaataaatgggaaggagaaggagggagaaggcaggaggagagaggagacgggaaagggaataagcaagtgtccctatgtagtgtatgtgtgtgtgtgtgtgtacgtgtatgtgttatgggggtggtaacagtgattgcattatgcacatgatttcatttactctttatagcaaccctatgaggtyatgatgtttatttccatttagagaagagaagagtaggctgaaaagttaagcaatttatgtcacgtcgtgagattatatccaccttggtctgaatctaaagtatgacattaaaagggtcacagtgatggtttagggacacagatcacctgtctctataggtacacacacaatacacagcacagtgtcaacccacaggctcaccacattgatgcactcccagacttgagcatgtgtgtgctcaaatacacacacacacacacaca

SEQ ID NO: 66361 - DNA, 516 bp, Homo sapiens
gtgcctgccaccgtgcccagctaatttttgtatttttagtagagacggggtttcaccaccttggccagcctggtcttgaactcctgaccttgtgatccaccctcctcggcctcccaaagtgctgggattacaggcatgagccaccatgcctggccacccagtgcactctttattaaatccaactgatgttattctgattatccgtattttgcacaaacacaaaaatactgctaacaattgctaagtgcttcagggccagatacggtgctaaacactcagggacactgcattgtttcattctcttscaatcctgttttattatttattcttcttttgcagatgaaaaacctatgattgagagaagtaagtttcccaagctctcacagcttacacatggtaaggctgcattcagatatgaaccctgtatgcatttggttactccaatatttctcaaagtgtgatctgtgattgcctccaccataatgacttgggagtgtgtaaaaatgcagattaccg

SEQ ID NO: 66362 - DNA, 1004 bp, Homo sapiens
  misc_feature (1)...(1004): n = A,T,C or G
ttaaataacaagctctggcagcaggtatagtaactactataaatacaaagccatcagggacataaataatatttcaaggtatctgtcgcagctaaaatgtaacatgaaaatatctgtgatttctagtggtgacaatgtcacagggactgcaaatacactgtggattgttgcctacattcgtaatacaagaaaatcctaaataaagatgctttttttcccctatccaagtttacagactcctctgaattctatacgggaaccccttggggctcttgaccctaagttaagaatctctgttagatcctttatggctcagtaagtatttctactgggcacatttctgagttccagctcacccttctctccttcttgaagaatctccacccacaccctttctgcctcaaaagttcttcacataggactctcttctgcccacccctctcatccaactggcccaaggaggacccctgccacagtggcatcccatgccctggctgcctggcacctgccaagacagagactggagagaaagcctcacttgcagagaaccagctcagacatcaggatgctctctggaacttgaagtcagcaacaaaagagagcttcgtgcaatcgtagggcaaggggtgggttggcaggtgctgtgttaatccatgcacttagaatgaggccagtgaccagctgtactgaaagnatgaccttgaactcaaactcctttcacggtatcaactgcataaggatgcttggcctccttccaacntggcttagacatcaatccagtggttccccccccaaacccctgttatctgcagtttygctttctgaagtttcagttacctatggttaatgaaggtccaaaaatattaagacattttagggagagagagaaagaccatattcacatagtttttgttacagtattattgttataattgttgtcttttgttattgttgttaatctcttactgtgctaatttataaattaaactttatcacaggtatgt

SEQ ID NO: 66363 - DNA, 1004 bp, Homo sapiens
  misc_feature (1)...(1004): n = A,T,C or G
ttaaataacaagctctggcagcaggtatagtaactactataaatacaaagccatcagggacataaataatatttcaaggtatctgtcgcagctaaaatgtaacatgaaaatatctgtgatttctagtggtgacaatgtcacagggactgcaaatacactgtggattgttgcctacattcgtaatacaagaaaatcctaaataaagatgctttttttcccctatccaagtttacagactcctctgaattctatacgggaaccccttggggctcttgaccctaagttaagaatctctgttagatcctttatggctcagtaagtatttctactgggcacatttctgagttccagctcacccttctctccttcttgaagaatctccacccacaccctttctgcctcaaaagttcttcacataggactctcttctgcccacccctctcatccaactggcccaaggaggacccctgccacagtggcatcccatgccctggctgcctggcacctgccaagacagagactggagagaaagcctcacttgcagagaaccagctcagacatcaggatgctctctggaacttgaagtcagcaacaaaagagagcttcgtgcaatcgtagggcaaggggtgggttggcaggtgctgtgttaatccatgcacttagaatgaggccagtgaccagctgtactgaaagnatgaccttgaactcaaactcctttcacggtatcaactgcataaggatgcttggcctccttccaacntggcttagacatcaatccagtggttccccccccaaacccctgttatctgcagtttcgctttctgaagtttcagttacctatggttaatgaargtccaaaaatattaagacattttagggagagagagaaagaccatattcacatagtttttgttacagtattattgttataattgttgtcttttgttattgttgttaatctcttactgtgctaatttataaattaaactttatcacaggtatgt

SEQ ID NO: 66364 - DNA, 1004 bp, Homo sapiens
  misc_feature (1)...(1004): n = A,T,C or G
ttaaataacaagctctggcagcaggtatagtaactactataaatacaaagccatcagggacataaataatatttcaaggtatctgtcgcagctaaaatgtaacatgaaaatatctgtgatttctagtggtgacaatgtcacagggactgcaaatacactgtggattgttgcctacattcgtaatacaagaaaatcctaaataaagatgctttttttcccctatccaagtttacagactcctctgaattctatacgggaaccccttggggctcttgaccctaagttaagaatctctgttagatcctttatggctcagtaagtatttctactgggcacatttctgagttccagctcacccttctctccttcttgaagaatctccacccacaccctttctgcctcaaaagttcttcacataggactctcttctgcccacccctctcatccaactggcccaaggaggacccctgccacagtggcatcccatgccctggctgcctggcacctgccaagacagagactggagagaaagcctcacttgcagagaaccagctcagacatcaggatgctctctggaacttgaagtcagcaacaaaagagagcttcgtgcaatcgtagggcaaggggtgggttggcaggtgctgtgttaatccatgcacttagaatgaggccagtgaccagctgtactgaaagnatgaccttgaactcaaactcctttcacggtatcaactgcataaggatgcttggcctccttccaacntggcttagacatcaatccagtggttccccccccaaacccctgttatctgcagtttcgctttctgaagtttcagttacctatggttaatgaaggtccaaaaatattaagacattttagggagagagagaaagaccatrttcacatagtttttgttacagtattattgttataattgttgtcttttgttattgttgttaatctcttactgtgctaatttataaattaaactttatcacaggtatgt

SEQ ID NO: 66365 - DNA, 935 bp, Homo sapiens
tgcgtattttcttgttttcagtctcttgacccagaggtacacttcaagaaaaacagtaatgactacagaattaaacgtcagggtttgagaggaatggaaacatgccatccaccaccttcattttattgatgaagaaacagaggccctgagcatcgaactgacttgcctaatatctcacagatgagggtcctgggaatagaaccttcagttcccattctacatgcttttcacactctgtccacagtcctctcaaaccacagggccatcgtgagcctaagccacagagtttgatgacagacactcatggtgcattgcctaatgacacatgggaagcgcctctgagcccccggcctgctttcttgtgcatatccatgggctccacttcctcagtgtgacccatcacttcaggcagcagtgcttgggtaaaggagagaacacccagaggaaatgggccctggcctgcacactcacaccactgcctcacactgtgcaytgcacactcacgccactcacaccactgcacacacaccactgcttcacactgtgcactgtacactcacaccactgcctcacactgtgcaccgtacgctcacaccaatgcacacccacaccactgcctcacactgcatgctcacaccactgaacattcacaccactgcctcacacacacaccactcacaccactgcacactcacaccactgcctcacactgcacactcacaccattcacatcactgcacacccacactactgcctcacactgtaaactgcacactcacaccactgcacactcacaccactgcctgcctcacaccactgaatgggaccaaagtcaccctggcagagctaacgtcttaaacagaagggaaatctttacatgacaatgaaaaattagagtaccaagagctggtctgtggtggtcccagtttctggca

SEQ ID NO: 66366 - DNA, 935 bp, Homo sapiens
tgcgtattttcttgttttcagtctcttgacccagaggtacacttcaagaaaaacagtaatgactacagaattaaacgtcagggtttgagaggaatggaaacatgccatccaccaccttcattttattgatgaagaaacagaggccctgagcatcgaactgacttgcctaatatctcacagatgagggtcctgggaatagaaccttcagttcccattctacatgcttttcacactctgtccacagtcctctcaaaccacagggccatcgtgagcctaagccacagagtttgatgacagacactcatggtgcattgcctaatgacacatgggaagcgcctctgagcccccggcctgctttcttgtgcatatccatgggctccacttcctcagtgtgacccatcacttcaggcagcagtgcttgggtaaaggagagaacacccagaggaaatgggccctggcctgcacactcacaccactgcctcacactgtgcactgcacactcacgccactcacaccactgcacacacaccactgcttcacactgtgcactgtacactcacaccactgcctcacactgtgcaccgtacgctcacaccaatgcacacccacaccactgcctcacactgcatgctcacaccactgaacattcacaccactgcctcacacwcacaccactcacaccactgcacactcacaccactgcctcacactgcacactcacaccattcacatcactgcacacccacactactgcctcacactgtaaactgcacactcacaccactgcacactcacaccactgcctgcctcacaccactgaatgggaccaaagtcaccctggcagagctaacgtcttaaacagaagggaaatctttacatgacaatgaaaaattagagtaccaagagctggtctgtggtggtcccagtttctggca

SEQ ID NO: 66367 - DNA, 602 bp, Homo sapiens
tttttgctcccgggaataggtgagtggggtcagaaacgaattcactgctcaataaactaagactggatcttgcagaaagaggaagaacgctcaaatccttaactagaaagttagttcccagagctgccatcgcttccgaggaacacatctagagacatccaaacaacacacaatcttccttcttgactcctccgaatctggcagctcatctgagcagctataattaattatgagcttcttcctccctgcagctgatgtggctcattaatgaatttgttcctaatgaggacgtagcctccttagagttgaaacccttcagtagtgcatcactttcttcctggctccgctttagaaacatccttccctaccccctcctggggccccaggaccacatgaagcctctgatcattaaacaaacggaaatctgtcggggcagagccgagacaggaacaatgaccagtaaattcctggggctggactgrcagctccttattcctgctgctctaccaatctgctgccctagagcaccaaaacacacccagttctggcaggaatgaaaaagcaaggaagtacctgctgtgacgaccaaattactgttcagt

SEQ ID NO: 66368 - DNA, 585 bp, Homo sapiens
aggccatttgaaacaatatggttattggtgctctgtttttgttttattcttcgtagtcaaccaaaaagaacagagttgattacatgtttcatttgggatatttattaatgacaattgstttcatctttagatcttccataatcagaataggaaatttaaataccttgggtatgtcatggttatttcactttttaaaaatagggatacaatgagatgtttgtaattatataaaatactaaattgttattaaattttagttagtgtcaacatgtattcatcattttctaaatgtcatctaatcagactctaatttactttcccccaaatatcaagagatcattctgaatttgtcttgctcatgatatggatgggttactctgtgtgattgccttttttttttcttcttctttttttttgagatggagtcttgctttgtcgccaggctggagtgcagtggcacaatctcggctcactgcaacctccacctcccaggttcaagcaattctcctgcctcatcctcccgagtagctgggattacaggtacacgccaccatgcctggctaattttttgtatttttagtagac

SEQ ID NO: 66369 - DNA, 1045 bp, Homo sapiens
acctaggtaataaacagagtactcggcaggtagtttttggtcctcaccctcctcccaccctcaagtagccctggtgtctattgttctcttctttgtgttcatgtgtgctcaatgtttagctgccattcctaagtgagaacatgcagtgtttggttttctgttcgtgtgtttgtttctgtgcagcattgtgtaaccatcttgtcgaggagcttaatgtggcatcctaatcagcccatcttctattctatggttcctcctcaggcccaacttttatcaaagtgagagtggtaaaggacaaccacaattttatgattcatttaaatgaccctaaggaaattgtgaaaaaggaagagaaaggggattattatttagaagaggaagaagaaggagatgaggaacaaagtcttgaaacgggtaagctgctgtttagtggtttctttcttctgactaatactcctgtctctgtccactccactccattaaatgaatggcttattgcatgttctttttctcaagtttctaccagtacactctcttattaatagtgcatgaagttgcctattttcctgaactgaaccctaatggatattaagcgttatcttttttctttaccagactttattttttatagcagttttaggttcatgatgaaattgaacagaagttacagagatttctcaatgccctcttcccgtacacatgtccagcctcytccactattaacatgcctcacccagagcggtacatttgttacagttgatgaacctacattaacatatcattatcacccagagtctaaagtttacattacccttggtgttgtgcattctaagggtttgaacaaatgtataatggcatgtgtctaccattatactatcatacagagtagtttcactgccctgaaaatctgtgctctgtctattcatctctccctccttcctaatccctggtaatcactgatctttttactgtgtccatacttttgctttctccataatagcatgtagttggaattatacactatgtagccttttcagattgactt

SEQ ID NO: 66370 - DNA, 1045 bp, Homo sapiens
acctaggtaataaacagagtactcggcaggtagtttttggtcctcaccctcctcccaccctcaagtagccctggtgtctattgttctcttctttgtgttcatgtgtgctcaatgtttagctgccattcctaagtgagaacatgcagtgtttggttttctgttcgtgtgtttgtttctgtgcagcattgtgtaaccatcttgtcgaggagcttaatgtggcatcctaatcagcccatcttctattctatggttcctcctcaggcccaacttttatcaaagtgagagtggtaaaggacaaccacaattttatgattcatttaaatgaccctaaggaaattgtgaaaaaggaagagaaaggggattattatttagaagaggaagaagaaggagatgaggaacaaagtcttgaaacgggtaagctgctgtttagtggtttctttcttctgactaatactcctgtctctgtccactccactccattaaatgaatggcttattgcatgttctttttctcaagtttctaccagtacactctcttattaatagtgcatgaagttgcctattttcctgaactgaaccctaatggatattaagcgttatcttttttctttaccagactttattttttatagcagttttaggttcatgatgaaattgaacagaagttacagagatttctcaatgccctcttcccgtacacatgtccagcctcttccactattaacatgcctcacccagagcggtacatttgttacagttgatgaacctacattaacatatcattatcacccagagtctaaagtttacattacccttggtgttgtgcattctaagggtttgaacaaatgtataatggcatgtgtctaccattatactatcatacagagtagtttcactgccctgaaaatctgtgctctgtctattcatctctccctccttcctaatccctgrtaatcactgatctttttactgtgtccatacttttgctttctccataatagcatgtagttggaattatacactatgtagccttttcagattgactt

SEQ ID NO: 66371 - DNA, 811 bp, Homo sapiens
taggtgaaagaagccaatctgaaagtctacatactgtgtaattccaactatatgacattctggaaaaggtaaaaactatggagacagtaaaaagatcagtggttgctagtggttggaggtgggaggagagatgaataggtagagcacagggtatttttagggcagtgaaaatactctatattatatatatggatacatgttattatacatttgtcctaattcacagtatgtacacatcacaagtsaaccctaatgtaaatatgaactttgggtaattatgatgtgtcagtagactttcattggtttcagcaaatgtaccactctggtgggaaggctgatgatgagacaggctattacatgtaagggggcaggcaggaatctatcggaaaactttgtacttccctctcaattttgctgtgaatctaaaattcctctaaaaaatagtcttaaaaataaataaaaacttaacattttgcctttcagttgaggtcaacgaaaacaagataaatcataacatactaaattttttggttagatttcctatatttagagaacttccaaatatatactaagaaattagttttgaaaactgttgttacttttaaaaccttcactagattatgctgtgtccaatgtgccaatttattttcaatatttcaaatgatgctgctatttaacaaaacaaagcaagcattttctatcaatgttacacatatctcagttacacaaatcatgaattatacatattcctatcacacaaatgatgatatacacttctagaattaatataatatatacataagtatgtgtg

SEQ ID NO: 66372 - DNA, 2377 bp, Homo sapiens
agaggaggaagcatgctttatttcctgtctaaaaagttccttctccatctacttcatcaaagagatgattattttaatccagctgatcaacagcacaggaagaaactgcccctgcttcttcacagagcataagtgtcactttgaggaggtcactagacctttgtaggcctcaggcttgacactggccatgtggagatcgtaatcatcgaagaacgtcaaggaggaaggctgtccagagctagtcctgacattccttaaaggtcatcttcccagccccgcctcgcctcagaatgagcgtgatctcaaaataaaaggcactcatttaatttgaatacatttttatcaagmcagtcttataatattgttcaaaacatttcacattgtgttcttttaaattaactttttgttttaggttaattttaggtttatagaattattataaagataatacaaacaattcccataaaccacacaccctcttatctctatccacatcttacattagtatggcatgttagtcaataaacctaccagtaaactaaagttgatgaattattattaattcatgtatagactgtattcaaatttccttcatgtttccctaatgtttactttctgttccaggatcccacccaggattccacgctacatttggttgtgtctgcagctcctccaggcagcgaaagtttctcgtactctccttgtttttgatgaccttgacagttttgagatgtattggccagatatttgatggagtgcccctcaagggggatttgtcttatgtttttgtcatggttgggctaaggttgtcagttctggggaggaagaggacagagcggaagtgccattcttgtcaccttccgtccagggtatgtggtaccagtgtgacttaagctgctgacgttgaccttggtcaccaggctcaaggtggtgtcagggctctcccctgcactttcgcgttctctccatttccacactgcactctgtgtccatgcttcgaggtgggagttagcgccacctcccagagagtcggctatctaacaaaattatccagaattcttctgcaaaggagatttgtgtcttctcccccatttatttgtgtatccaacatttatttatatcactaatggactacagatatttattttatattttgggttgtaatccaataccactttatttattttgttgttccaattatttcagcttcagctgttggggcatcttcagtggctcctgtgtctttttgccataacgccgtcattgaaactggaggttttgttgttgttttggaacattcttacttccaagacctacaggatgctccaggctcatcttgtccatttcttgccccagtcccagaatcagccatttttctaagaaccccaggaggagagtagtagaaatatttggagaatattagaattccagttgtgctttatttctggagaaaacttccagcctctggaccacatagtattttggttgattctcactaaaagtttaggtggtaggcattctcattaaccccaggttacagatgaaatgtgtagaagggtctggttaggatgtggtggaggcagaaatgagacccagatggatacagctcctcactgccccctgacgattccagtgtcctctctgttgcattccccttcgttccttctggtgcagcggctgcggaagcagacatagcatggtactagaaaggatgggagaacaactgcagtgctggtgtggccgtgggtgctgagctccctggggttgcagattgtgatacaggtcggtgaccgttccctggccctggttgaccaggttactgtgaccttaacatcctctgacacatcttctaacctttcacgtcagatgtgctcttggaggacaggccgccaccctaagagctttcaccatcacagactgcccgcctgtctgcccatcgccctgcaggcctggccagctgctggcacaatggctgccgcggaagccctcacttggatctgaacgtttctcccccatgttcagttaaattaactcaactagtaacaaggggttggcactttgtattccagggagggtggattagagtcatttccattagccctaattgaggccctaaagggaaatttaatttataccccaaaacactgctacattctgaagtcagcggcgtgatttgagagaaacgtgagatgtggcggtttaaaaataggtccatttttcctgagggaagaagctggttttagcctttcaatttgaaaatattctaacaccattgtatgggggaaattgtttcaacttaaaaaaatactagttccaaaagaacccctgaagccccagcatttatacttaggctccaatttgcctaggcccttcactt

SEQ ID NO: 66373 - DNA, 735 bp, Homo sapiens
tttctgttaacagtgaagaaaaaacattagtaaatatctatgtttctgcgatctgtgtacaaagttccaaaatcttcaaaattcacatatagagcatcgtattagagaaacatgagcatgggaggtcatggaacagcacctgttctatcagaaggaaggcacagaagaggagggcttaggcaacccaggtgtgaggggggttctccaagaaggtagcgattctgcaagcccctgcccgctgctttctctggggttgagctaaaaggaagttcaaaccgaggaagaacccatgactgcaaatttccaccttttgcttccttggggctatttccataaagcaaaatcctctctgatgaagtttattctccaggatctgccactcctggtaggaaataatcaaagattgcaaagtctctgcaaataattattattcaaagatattagtggcaaaccaggtgagccctgcattcagaaacgtgctgttgatttccatcctcagcactggcaggtagggaatgtgagcrcattacgtaacctgtaccaaccggggtttcctgctcagtaaattcaggatcagattcctgtgtagtgatgggatctctacggggtttgattaagaaataggtgtaaatcacgtggccgggttctcggggtgtagtaagtcagtgagtgttagctgtcaaagaaatgcccctcaccacttttccacgtacaggagcccattcagatttgaga

SEQ ID NO: 66374 - DNA, 1501 bp, Homo sapiens
atttgaaagtgggaaatgtgctcagttacccatgagctgacaggacactcagctggtgagaaagccaaatgccagcacatttcacctctgcttctacttattatcacatgcccatgtagcagtgtggtcgatgtaatttggggatgggaaattcagtaacttgatgtatgacaaatatctaaatacagttttctcaagaatgtaaaaactgtattttacttacaattatttcagtacctccaacaaccaaatcagactagtcagaaaacatacagattgctttataattggccaggatttgctgaagagccacattggacacttagargtatagaatggtttccaatgtagatggaccatatctgaaaagttaaagagaattgttgatattatctcaatattcttttaatttttatcaaagctacatatttacataatttaaaaatttgaatcatgatctaagccaccatcagctctcatctggattagtacaaaatggcctcttaacagatctccttgtttccaccatttttctctgtcaatgcagccatcagggtgaccatgttaaaaatgtaaacacttcatgtccctctttgctctaagctctccatctcacacagagtaaagtccatagtgctttctaataaactgaattatcctgcactgtgttgcctctagttccctctctgatttcacctctgactcctccctccttagtcaggcttctagagccacactggccacttagcatcctccccttagtgctttgtcccacttaagccttttcaaagtctggtccctgggtcagtactgtcagaatcatctgggaacttattagaaatgcaaattctcgagcccacctgagatctactgaattagttattttggggatggagcctggaaatctctgtttatcaagctctccagataactgagatgcaggctaaagtttcagaactgccttaattgtttcctctgcttaaaatattttccgtcagtactttaggtggggttctttagaaaacagagcttgagacaggggttcttactaactgatttgctgagggagtgctcacggtaaaatctgtaaggaaacaagggagaaggataaagaaggggaagaagctaagtcttagtggaatcccacagggagctctgaagtatgagtgttacacctggagaaaagtccagtttttgtagtccaaaatcagtcagtcaactattgtgagctgccctgtgagaagataataaactgtcagacattacagaggtgacgtgctttctatcagccaagggtgagctcaggaggagcatacagctgtgatttcttagcagtcaacactcgaagctgctgaaagctggctgcaccagcctgttaaactgggtctgagcagggcaccaataggtagtactatatccagatgcatccccgactctctcttactcggattcttcttaattactcataagataatggttgcctttaaacagtgataattct

SEQ ID NO: 66375 - DNA, 1501 bp, Homo sapiens
atttgaaagtgggaaatgtgctcagttacccatgagctgacaggacactcagctggtgagaaagccaaatgccagcacatttcacctctgcttctacttattatcacatgcccatgtagcagtgtggtcgatgtaatttggggatgggaaattcagtaacttgatgtatgacaaatatctaaatacagttttctcaagaatgtaaaaactgtattttacttacaattatttcagtacctccaacaaccaaatcagactagtcagaaaacatacagattgctttataattggccaggatttgctgaagagccacattggacacttagaggtatagaatggtttccaatgtagatggacmatatctgaaaagttaaagagaattgttgatattatctcaatattcttttaatttttatcaaagctacatatttacataatttaaaaatttgaatcatgatctaagccaccatcagctctcatctggattagtacaaaatggcctcttaacagatctccttgtttccaccatttttctctgtcaatgcagccatcagggtgaccatgttaaaaatgtaaacacttcatgtccctctttgctctaagctctccatctcacacagagtaaagtccatagtgctttctaataaactgaattatcctgcactgtgttgcctctagttccctctctgatttcacctctgactcctccctccttagtcaggcttctagagccacactggccacttagcatcctccccttagtgctttgtcccacttaagccttttcaaagtctggtccctgggtcagtactgtcagaatcatctgggaacttattagaaatgcaaattctcgagcccacctgagatctactgaattagttattttggggatggagcctggaaatctctgtttatcaagctctccagataactgagatgcaggctaaagtttcagaactgccttaattgtttcctctgcttaaaatattttccgtcagtactttaggtggggttctttagaaaacagagcttgagacaggggttcttactaactgatttgctgagggagtgctcacggtaaaatctgtaaggaaacaagggagaaggataaagaaggggaagaagctaagtcttagtggaatcccacagggagctctgaagtatgagtgttacacctggagaaaagtccagtttttgtagtccaaaatcagtcagtcaactattgtgagctgccctgtgagaagataataaactgtcagacattacagaggtgacgtgctttctatcagccaagggtgagctcaggaggagcatacagctgtgatttcttagcagtcaacactcgaagctgctgaaagctggctgcaccagcctgttaaactgggtctgagcagggcaccaataggtagtactatatccagatgcatccccgactctctcttactcggattcttcttaattactcataagataatggttgcctttaaacagtgataattct

SEQ ID NO: 66376 - DNA, 1501 bp, Homo sapiens
atttgaaagtgggaaatgtgctcagttacccatgagctgacaggacactcagctggtgagaaagccaaatgccagcacatttcacctctgcttctacttattatcacatgcccatgtagcagtgtggtcgatgtaatttggggatgggaaattcagtaacttgatgtatgacaaatatctaaatacagttttctcaagaatgtaaaaactgtattttacttacaattatttcagtacctccaacaaccaaatcagactagtcagaaaacatacagattgctttataattggccaggatttgctgaagagccacattggacacttagaggtatagaatggtttccaatgtagatggaccatatctgaaaagttaaagagaattgttgatattatctcaatattcttttaatttttatcaaagctacatatttacataatttaaaaatttgaatcatgatctaagccaccatcagctctcatctggattagtacaaaatggcctcttaacagatctccttgtttccaccatttttctctgtcaatgcagccatcagggtgaccatgttaaaaatgtaaacacttcatgtccctctttgctctaagctctccatctcacacagagtaaagtccatagtgctttctaataaactgaattatcctgcactgtgttgcctctagttccctctctgatttcacctctgactcctccctccttagtcaggcttctagagccacactggccacttagcatcctccccttagtgctttgtcccacttaagccttttcaaagtctggtccctgggtcagtactgtcagaatcatctgggaacttattagaaatgcaaattctcgagcccacctgagatctactgaattagttattttggggatggagcctggaaatctctgtttatcaagctctccagataactgagatgcaggctaaagtttcagaactgccttaattgtttcctctgcttaaaatattttccgtcagtactttaggtggggttctttagaaaacagagcttgagacaggggttcttactaactgatttgctgagggagtgctcacggtaaaatctgtaaggaaacaagggagaaggataaagaaggggaagaagctaagtcttagtggaatcccacagggagctctgaagtatgagtgttacacctggagaaaagtccagtttttgtagtccaaaatcagtcagtcaactattgtgagctgccctgtgagaagataataaactgtcagacattacagaggtracgtgctttctatcagccaagggtgagctcaggaggagcatacagctgtgatttcttagcagtcaacactcgaagctgctgaaagctggctgcaccagcctgttaaactgggtctgagcagggcaccaataggtagtactatatccagatgcatccccgactctctcttactcggattcttcttaattactcataagataatggttgcctttaaacagtgataattct

SEQ ID NO: 66377 - DNA, 682 bp, Homo sapiens
tgttggcagctttgccattcgcaactatgacccaaattcctccttcaaacattttaattgaagccaaattacttcactttccgcttttacataataacgtagcacactcactgctgtgactgtaatcacggaaaatttggcttctggcacttttgctctattagccgtcaactttttttttcacatttaatttttcattttgcttgctcatattttagtattatgtgtattttctctaatttatatattgttctttacatttacctctttgaagtttttaaggtaatttccgatctttttttttttttttttttttgagacggagttctgctcttgttgcctaggctggagtgcaatggcgcaatgtcagctcaccacaacctyggcctcccaggttcaagcaattctcctgcctcagactcccaagtagctgggattacaggcatgcaccaccatgtccagctaattttgtatttttagtagagacggagtttctccatgttggtcaggctgatctcgaactcccaacctcaggtgatctgcctgccttggcctcccaaagtgctgggattacaggtgtaagccaccatgcccagcctctgatcattttttaacagattcattgaggtgtatttgatatacaataacctgcacatatcgaaagtatataatttaatgtttt

SEQ ID NO: 66378 - DNA, 564 bp, Homo sapiens
catccagtgtgaatgtcatctgctcaaagtcagcatttcctcaattgccagactagtttatgaatcagcattacactatttcataatactacacacttctctttagtggcagataacactgtgcaaagaaagccatgcttaaataaatacagatttttgaagttatggctraagtcagaatttttattttgcttcatattttttgtcaaacttttgtcttgttgactaaaataccatgaatatagaaattcagagagggactgcaaggaggaaaattaaagccaattgcttctgagaaggaagaaaaataagaagaaaggactatgtggctactattagaggtagtagaaagtttatagaaaaagcgatatacctaaaagaggagttttaaaactttgggattgctatgcaatgtaaacactcttctcagtctccttacaaattttagttcattttctgccttcatattactgctttcagagttggaaggttgtttgtttcataagaagattgcagaaggcaggtgcagtggctcatgcctgtaatcccggcgcatttggaggc

SEQ ID NO: 66379 - DNA, 1447 bp, Homo sapiens
atgttgatgaagacatacagcaactggaactttcatacattgctagtgatggtatcaaatggaacagtaactttgaaggactgttcaatatttccaaaattaaacatacacctaccctgtgacccagcaattcccttcctaaagtttattccagataaataaaaatttatgtcctaaaaagacttgtacaaaaatgcatataatgatcttactcatcatagccaaaaactagaaatgacctaaacgttcgttaacaggaggataaataaatttcaatatattcatatagtggtgaaatatttaacaattttaaaaggtaaactactgttacatacaacaacatgaatgattttcacaaacattatatcaaatgaaacaaagcagaacaaaaaagaatacactgtatgattccatttatatgatgtctaacatcaagcaaaactaactgatagtagtaaaaatcagaaaaaagttgctccagggtgagaaatgtgtactgaacagaaggagggataagagaatttcttggtgtgatgtatgttctatattggagggtagatagataaatgggtagatacggttggtcaaaatatagatataggcayagatagatgtggatgtatatatgaaatagtggattgattccacaaataattattgatcagctactatgtacaaggtactgctgtggacactggggatccattagtgattaacacagacaaaaactcttctttctcaatggggttcacattccagtcagcatgtaattaaattaattagctgcattattatttgaaataggtaacaattggaaacaatctttatgtccatcaagaggaaagtttaaataacttatgttacatccttgtgatgggatattattcagctataaaagtgaataaattttttatatactggtgagaataatctttaagacttcttgtttactgaagatagcaagatacagtaaaatgtgtatagtgtgcagccatttgtacaaaaatgagaagcaaacatatatgtacttagctatctgtttatgtataaaatttctctgaagtattacttaagcaattgataagataggttgcttccaaaagataaaaactacaggataggagtgcatgatcttttatacattttaagtttggagccatgtaaatatataacctataagcaaataaataaaacaaaaattgtttaaaatattttacaattggagaaagcaaacacgtatttctttttttattaaactttaagttctagggtacatgtgcacaacgtgcaggtttattacatatgtatacatgtgtcacgttggtatgctgcactcattaactcatcatttacattaggtatatctcctaatgctatccctcccccctcccccaccccatgacaggccccggtgtgtgatgttccccaccctgtgtccaagggttct

SEQ ID NO: 66380 - DNA, 768 bp, Homo sapiens
tttcctattaccgttctctacaataaactcaatcacatgtttgcaagaaggactccacatatagaaacaatcccattagtcagcagtggaccctctcttattaagtgaaagaagaaactgagtctgaaagtagtctaggagtagaatggtgtttgctggggctggaggagggggcaatgaggagttattgtttaatgggcacagagtttcagtttgggaagatgaaaaagttcagaagatgatggctgggcatggtggctcatgcctgtaatctcagcactttgggagactaaggcgggcggaccacttgaggccaggagttcgagagaccagcctggccaacatggtgaaacctcgtctctactaaaaatacaaaaaaaaaaaaaaattagccaggcatggtggcaggcgcctgtagtcccagccacttcggaggctgaagcaggagaatcacttgaacccgggaggcagaggttgcagtgagccaaggccacgccactgcactctagctcaggtgacagagtgagactccatcaaaaacaaaaacaaaaacaggagatggatgatggatggtgatcatggttgcacaaaaaggtgaatgtgcttaatgccmctgaactgtatacttaaatggttaagatggtaaattttgttttactacaatgaaaaatttgttgaaagtaaaaaaaaaaaaaaatcctccatagctgataggatggtgtaaattcatttctgaaaagttggctctgcctctcataataagttcaa

SEQ ID NO: 66381 - DNA, 1198 bp, Homo sapiens
tacaataagtacaaatgtctatgtctatgtttaatatattatttatgtggtttcaagttgaattttttactttgttctattttgcttattttcattgttaaattagatttcctgtttgtttktttgtttgtttgtttcttgagatggagtcttgttctgttttgtttgtttgtttgttgagatggggtcttgttcttttcctcaggctggactgcaatggcatgtagctcactgtaactttgaactcctggactcaagcaatcctcctgcctcagtcttccaagtaactgggacctaagccctttctatttttctcttcattgccaaacttttaagagtgtgcacgcagtaactgctttccagatactcaactgcttaccttaagagccctgaagcctgacttctgtctctctcactctattcccttagagatcaccaaacctagtgctttattcttagtcttcacccttttcaacttgtctatggcaatgggcaccgtataaccctcacctgcactcatctttgtgacgttactctctcttagtaggaactagggctttctggtggctcttgtttctttttctggcttctcttgtttctttttctggcttctcttgtttctaccattttctacacatgtttattttctggagctactgtgcttggctgtcttctctctctgtattctctggctctcaaattctttattttttaaataagcaaattttaaatgtttcttttggaaaacctaatctaaaatatgatttccccccctgcctgcagtcttatctctctattcttacatatttcattatcatttcaataccattaattatgggcttttcttttgtgtaaaaaccttcactgtctttccattaccagttcaataaagtgcaaatttcttagcctggccttaaagccttctaagagtacaacgtacttttataactttttatcccatttactttactacttttgcctatgtttcaaccaattataatagccaattctctctgcgtatctccctctccacctatctgtctttcctcaaactgttctttctgtcttcagttgttctgcctcaatcccatctccacctgccatattactgcccattgcaaataactatgttccattaatctcccctacattatcatctgactagctattaacaaatcaatttatccctcctgagagt

SEQ ID NO: 66382 - DNA, 1198 bp, Homo sapiens
tacaataagtacaaatgtctatgtctatgtttaatatattatttatgtggtttcaagttgaattttttactttgttctattttgcttattttcattgttaaattagatttcctgtttgtttgtttgtttgtttgtttcttgagatggagtcttgttctgttttgtttgtttgtttgttgagatggggtcttgttcttttcctcaggctggactgcaatggcatgtagctcactgtaactttgaactcctggactcaagcaatcctcctgyctcagtcttccaagtaactgggacctaagccctttctatttttctcttcattgccaaacttttaagagtgtgcacgcagtaactgctttccagatactcaactgcttaccttaagagccctgaagcctgacttctgtctctctcactctattcccttagagatcaccaaacctagtgctttattcttagtcttcacccttttcaacttgtctatggcaatgggcaccgtataaccctcacctgcactcatctttgtgacgttactctctcttagtaggaactagggctttctggtggctcttgtttctttttctggcttctcttgtttctttttctggcttctcttgtttctaccattttctacacatgtttattttctggagctactgtgcttggctgtcttctctctctgtattctctggctctcaaattctttattttttaaataagcaaattttaaatgtttcttttggaaaacctaatctaaaatatgatttccccccctgcctgcagtcttatctctctattcttacatatttcattatcatttcaataccattaattatgggcttttcttttgtgtaaaaaccttcactgtctttccattaccagttcaataaagtgcaaatttcttagcctggccttaaagccttctaagagtacaacgtacttttataactttttatcccatttactttactacttttgcctatgtttcaaccaattataatagccaattctctctgcgtatctccctctccacctatctgtctttcctcaaactgttctttctgtcttcagttgttctgcctcaatcccatctccacctgccatattactgcccattgcaaataactatgttccattaatctcccctacattatcatctgactagctattaacaaatcaatttatccctcctgagagt

SEQ ID NO: 66383 - DNA, 1198 bp, Homo sapiens
tacaataagtacaaatgtctatgtctatgtttaatatattatttatgtggtttcaagttgaattttttactttgttctattttgcttattttcattgttaaattagatttcctgtttgtttgtttgtttgtttgtttcttgagatggagtcttgttctgttttgtttgtttgtttgttgagatggggtcttgttcttttcctcaggctggactgcaatggcatgtagctcactgtaactttgaactcctggactcaagcaatcctcctgcctcagtcttccaagtaactgggacctaagccctttctatttttctcttcattgccaaacttttaagagtgtgcacgcagtaactgctttccagatactcaactgcttaccttaagagccctgaagcctgacttctgtctctctcactctattcccttagagatcaccaaacctagtgctttattcttagtcttcacccttttcaacttgtctatggcaatgggcaccgtataaccctcacctgcactcatctttgtgacgttactctctcttagtaggaactagggctttctggtggctcttgtttctttttctggcttctcttgtttctttttctggcttctcttgtttctaccattttctacacatgtttattttctggagctactgtgcttggctgtcttctctctctgtattctctggctctcaaattctttattttttaaataagcaaattttaaatgtttcttttggaaaacctaatctaaaatatgatttccccccctgcctgcagtcttatctctctattcttacatatttcattatcatttcaataccattaattatgggcttttcttttgtgtaaaaaccttcactgtctttccattaccagttcaataaagtgcaaatttcttagcctggccttaaagccttctaagagtacaacgtacttttataactttttatcccatttactttactacttttgcctatgtttcaaccaaktataatagccaattctctctgcgtatctccctctccacctatctgtctttcctcaaactgttctttctgtcttcagttgttctgcctcaatcccatctccacctgccatattactgcccattgcaaataactatgttccattaatctcccctacattatcatctgactagctattaacaaatcaatttatccctcctgagagt

SEQ ID NO: 66384 - DNA, 1220 bp, Homo sapiens
tagtattaacattcaagacaagttaaaagaaatatcttttcaagccctgaggatacaaccaagcagtgaagaaagcacgatgtcacattaagttctttatgcttctttagatctcgctctataaaactaacatttctagattaagcataagagaatttagtaaatcttggtggggtgcggtggctcatgcctgtaatcctaacactttgggaggctgaggcgggcagatcacttcagatcaggagttcaagaccagcctgggcaacatggtgaaaccccgtatcttccaaaaatacaaaaattagctaggcgtggtggcgcatgcctgtaattccagctactcaggaggctgaggcacgagaatcacttgaacccgggaggtgccagttgcagtgagccaagatcacaacactgtactccagcctgggcaacagagcaagaccctatctcaaaaaaaaaaaaaaaagagagagacagagagaattcagtaaatctcatgcttatttgttttaatagtataataaaatgattctaaacttcatatgacagaataggtgggtaagactaaaagcactgaaaatgaagagtaataaaagcttagtttaataggtaatgaggctggtcacggtggctcacgcctgtaatctcagcattttgggaggctgaggccagtggatcacttgaggtcaggagttcgagaccagcctggccaacatgaaacactgcctctactaaaaatacaaaaattaggccgggtgtggtggctcacacctgtaatcccagcactttgggaggccgaggcaggtggatcacctgaggtcgggagttcgagaccagcctgaccaacattgagaaacccygtctctactaaaaatacaaaagttagccgggtgtggtggtacatgcctgcaaccccagctactcgggaggctgaggcaggagaatcacttgaacctatgaggcagaggttgcggtgagccaaggttgcaccattgcaccgcagcctgggcaacaagagtgaaactccatctcaaaaataaatttaaaaaaatacaaaaattagccaggtgtggtggcgcatatctgtaatcccagctacgcgggcgactgaggcaggagaatctcttgaacccaggaggtggaggttgcagtaagccaagatcgcaccactgcactccagcctgggcaacagagggaaactatatctcaaaaaaaaaaaa

SEQ ID NO: 66385 - DNA, 1220 bp, Homo sapiens
tagtattaacattcaagacaagttaaaagaaatatcttttcaagccctgaggatacaaccaagcagtgaagaaagcacgatgtcacattaagttctttatgcttctttagatctcgctctataaaactaacatttctagattaagcataagagaatttagtaaatcttggtggggtgcggtggctcatgcctgtaatcctaacactttgggaggctgaggcgggcagatcacttcagatcaggagttcaagaccagcctgggcaacatggtgaaaccccgtatcttccaaaaatacaaaaattagctaggcgtggtggcgcatgcctgtaattccagctactcaggaggctgaggcacgagaatcacttgaacccgggaggtgccagttgcagtgagccaagatcacaacactgtactccagcctgggcaacagagcaagaccctatctcaaaaaaaaaaaaaaaagagagagacagagagaattcagtaaatctcatgcttatttgttttaatagtataataaaatgattctaaacttcatatgacagaataggtgggtaagactaaaagcactgaaaatgaagagtaataaaagcttagtttaataggtaatgaggctggtcacggtggctcacgcctgtaatctcagcattttgggaggctgaggccagtggatcacttgaggtcaggagttcgagaccagcctggccaacatgaaacactgcctctactaaaaatacaaaaattaggccgggtgtggtggctcacacctgtaatcccagcactttgggaggccgaggcaggtggatcacctgaggtcgggagttcgagaccagcctgaccaacattgagaaaccctgtctctactaaaaatacaaaagttagccgggtgtggtggtacatgcctgcaaccccagctactcgggaggctgaggcaggagaatcacttgaacctatgaggcagaggttgcggtgagccaaggttgcaccattgcaccgcagcctgggcaacaagagtgaaactccatctcaaaaataaatttaaaaaaatacaaaaattagccaggtgtggtggcgcatatctgtaatcccagctacgcgggcgactgaggcaggagaatckcttgaacccaggaggtggaggttgcagtaagccaagatcgcaccactgcactccagcctgggcaacagagggaaactatatctcaaaaaaaaaaaa

SEQ ID NO: 66386 - DNA, 544 bp, Homo sapiens
ctgtctctctctctttctttttttctctctttttctttctttcttcttttgagacggagtcttgttctgttgcccaggctggagtgcagtgccacgattcaggctcactgcaaccttcacctcctgggttcaagtgattctcccacctcagcctctcgagtagctgggattacaggcacccaccaccacccccagctaatttttgtatttttagtagaaacagygtttcaccatgttggccaggctggtctcaaactcctgacctcaagtgatccacccacctcagcctcctaaagtgcttgggattacaggcgtgagccactgcgccccgccctgggtgtctgtttcgatcttgctgctcctctgagcctcctatacaaagattctggcgctactgcacgccctgtgtttgtgtcctctatgttaaagttctttttcctggctaatgtggtccagacatgttggaagggattctaaagtaacaatcctgtgaccacgtgactgtgagaagaattcttttctaaagaaaaggatcttcatcaca

SEQ ID NO: 66387 - DNA, 544 bp, Homo sapiens
ctgtctctctctctttctttttttctctctttttctttctttcttcttttgagacggagtcttgttctgttgcccaggctggagtgcagtgccacgattcaggctcactgcaaccttcacctcctgggttcaagtgattctcccacctcagcctctcgagtagctgggattacaggcacccaccaccacccccagctaatttttgtatttttagtagaaacagtgtttcaccatgttggccaggctggtctcaaactcctgacctcaagtgatccacccacctcagcctcctaaagtgcttgggattacaggcgtgagccactgcgcccsgccctgggtgtctgtttcgatcttgctgctcctctgagcctcctatacaaagattctggcgctactgcacgccctgtgtttgtgtcctctatgttaaagttctttttcctggctaatgtggtccagacatgttggaagggattctaaagtaacaatcctgtgaccacgtgactgtgagaagaattcttttctaaagaaaaggatcttcatcaca

SEQ ID NO: 66388 - DNA, 567 bp, Homo sapiens
tgcactgytactattttttatttattttattaaagtaaggatacaggcatttattggttccaaatcggataaattccagatttcacagacaaggccacaaaccgtcatgaaattaaatctctacaaattaacatgagttaatatcaaaagccctattgtttatacatggagactttccaaaaagtctcacagcatgccactgagaaaactggaatgttcccttaaaatcacatttaaataacaaaaaacaaaaaagtcatggcatttaaaaaataaaagtaagtgagagaaatattcatctaaccaatcctaatgacctgtcttgattcttaggtgattaagcatgctgaagcagtgagggtcaagtgacccaatgagcagtacaggttgtatagaccaaaacagttccttaatggagaagttgatggaaacacctgagatgatgttagaaacatttaataactggggggggcaatagatgctgattataaactactactgtgtactcactaaacatgatcctaatgatgctaactcccttgctgtggctgcacattgctgacatgt

SEQ ID NO: 66389 - DNA, 564 bp, Homo sapiens
ctcgctctgttgcccaggctggagtgctatggtgcgatctcagctcactgcaaccttcacctcccgggttcaagcaatcctcctgccttagcctcccaagtgctaggattacaagcatgtgccaccatgtctggctaatttttgtattttttggtagagacagggtttcatcatgttggccaggctggtcttgaactcctcacctcaagtgatctacctgcctcggcctcccaaagtgcaggaattacaggtatgagccactgctcctagcctctgaggctcttaagtgcctctgtattgcacacatgtcactggaatactgttctttaatcctgggaagcaactgctttaaaatgagggaacacacaggtacaaagcacaggaacttcctgggacgaattgttacaatttctttagctcttatgtgaggcaattgtttaaaacctgacacctgccctgtgaagttggaactactgtccccagttgataaataagggacatgaagcttggccacgtcctgtgacttgcttggggtcaccaggctcragggagggagctgggctt

SEQ ID NO: 66390 - DNA, 1917 bp, Homo sapiens
cctatgttgtttttaattctaaagtaacttttcccagcttcaggtattcaagatcttccatactttgcctcaactgatcttggcccctgttgtccttcccacacttactattctggctcactcactcacctgctgctcctttcacctgctctctcctcagctgtgccaaggactggcccaggctgcaaccctgcctggaaggcccttccagcacatccatgcatgtactgactatggcctatgtgccaggcacaatgccaagtttgacacaccttttcttgcttatactacatccttcagggagcttcctatcccctttctccacccaactatcctccccaacaaaaagtaacttaaaatagctttccattaatagaaataactttccctttctccactcccactgcatttagtgaatattttctcatgttcatctttgcatgactggtgtttatgtatgcattttatttcccctatcgtaattcgaagctcactgggagcatctgagattcatctgcattccccagttgtcaggcacaatccttgtgcacagcagctgatcaaagtttatcagatacatgcttgcttatatttataccaacatgaaaaagaagatggcatattttgtgtttgcttgttccatctttgaagttctcctttcctctcttactttagagagcagacatggttagcaagagaatgagagacagtttcatgtagtagtgaatatcctgaataccagagctaaatttctctgagcttaagtcctatctctgcctcttgtaacactgatgagtaactttatttttattattacttttttattttttttgagatgggagtctcgctttcttgcccaggctggagtgcagtggcacaatctcaactcactgcaacccccccatcctgggttcaagcaattctcgtgtctcagatgggatttcaccatgttggccaggctggtcacaaactcctgacctcaagtgatccacctgcctcggcctcccagagtgccgggacaggtatgagccactgcgcccagcctgatgagtgactttaattgckctatgcttcagtcatctcagctaacacagggattatcttaatctatggtataaaggtaaagattaaattacacaaaaactctcagaacagtgactaacacaaaataaactctcagtgaatattagctattgtgatgaggataatgactttggaatagagtttgaatgaaatttcacgtaagagagggaagggtctgttttcttactccacgtaggaatacagttgtaaagggcattaatgtgttaattatactatcagttgcaaggaaaacagatctaaatcttaatttagctacagaaggtatttgatattttttatgttatttgcaatcgagcaacataagtatcttagggtttaaaggacaatgcattcactttaataaaactcttattaagcatgcttatttttctaggacagaaacactaaaacaactcattgcattcaaactgatggaagattttattggcagacgaacccacattcactaggcccactgtaacacagacaagaaggcttgctgctcaggccgctgtggatgacctcaccactctagccacgccctctattgtctactctccccctgcacagccagtgacttgtacctcttcttatcacccttcccgggctgagaaagccaaggtaccagaaaaacatatgtttggcaaaaaggtccatgtcacttacattctgcacatgataaaaggccaggggacttcctctgccattgtttttgaggggctccgtggagaatgcttcatcatggcgatgcaaaaagcttcataaaaaaaataaaaagactcgtgaacaatgcattaaacggttttatcagaatctctttcaagagcccaatgt

SEQ ID NO: 66391 - DNA, 679 bp, Homo sapiens
aaggggaacactacgtgaaaatatttgttttacacagatgaaatgttggatcagaacgcacggaactacatccaggtgagaggcatcaaataaatcacttaacctctttgtactttagtttccttatatgtttttatgggcatcatgatagtgcctacttcactgggctggcgctggaaatgaagtgtgattacagatgaagctgttaatcagtgtctggcacacggtctgctctatccgaggattaaccgtgtttattatctgtcctttattactagttaagttctcttcaccactgaaagaaaaagtccaaatgaacccaaacatatgagtttattttctcctccacattttcgctgcccctccttcattactctatccccrtcaccaccccaagaaattagatctttgcatagcagaaaacacttttcccattcataagagaaagaatgggacttttttttttttttttttttttttttttttggctattccaagagagaacccacatttgacactggatttccacccaatttttctaagtgcacctgtggttacattgctggaggtgtcagtgtgaggatttaagcccagctgtatctgacagctggttacccaaatgagaaaccccagagtcctcttccaccctttgcagtgagctgcctggacctgcaggatc

SEQ ID NO: 66392 - DNA, 666 bp, Homo sapiens
gcccaggggcaatctacaggagtgttcatactttggcattgtcactaactgagcacagcttccagaggcctcctcggcttcaccacccaaggacaaagtttatttttcctttatggagaaaaaaaaaaagggaaatytcaaaacataaacaccagaagctctccctgtctatctccctaaaattagctaggctatcagtgtataacctgcagggatttcccttcaaccatatgattcaccacatcttatgtgaagtgttcagactctgcctccagtgaatattcggttttgacactctctgtcatcactgctgagaacagaagcaataaccagttgctgctgccagggctcagggctccagtaaacgtcctgcctcaagtccttgctgcccacagaaagacagacttgtgctgagcactggactgagaaccaaaagaacttatcctggtcccaattcttcccttaatttgattggtgtctgggcaaatcatttcccctcatctatataaggagttagccctttgttctgagatgaggcaagaaattgataggccatcgggcagagaaaacagggtccaggcctgcccattatctcataccatatgtggcagaaagggtaaaatgcacctctgtatctggtaaaatgacatgaggcccccacaggaa

SEQ ID NO: 66393 - DNA, 777 bp, Homo sapiens
aggtttattttcttcctgctgtgttgttgttgttgcttatgactgcaagatgaacattagagtatcagtagaatctgcgtctgggggctgatagtcaccccagaatgagagctgcctcccaaaatgaaagagaaatgtttcagcatatagatgccagctgacacgtctttgctactgtaattccataagtgttcagcccagattgaggctgtgcctaaggaaaaatgaaaggaatgtacccaagagattgagtattggtggggggctatggagaggaagggatcggagagcccctctgagatcataaacccatgagagagaaggaggagcctctttcagaagacaaccatacaccagacttgtttggacatttatccagaatctccaggatggtctatggagttcaggctgacctaattctccttaacagagtgacctagggagggttactactgtcccacagattcagttttagcatctgtacmatggggataatgacaccaaccatgcagccttaaagaaagggttacattaaggtatgtgtttaaagcacttaggaggaggcctgagacacagtaagtgctcagtacacatgggatttttattataatgatcatggccttgtctattcctcaaatgagccagggaggttcatctcactgtccccattatacaggagagtaaaaaagagctttataaagatcaaaaattccattagatgaaatcgcttcttcaaggttatacattcagtgagtgacagtaccaggaagtagccac

SEQ ID NO: 66394 - DNA, 1612 bp, Homo sapiens
tggccagcaggcatggatggctcaggcacatgtgaaagtgccaagtttaaactgagaattgctgtaaatgtagaacacatgagatggcaaacaggaggagaaagaaagtaaaatgtcacattagtatttttatatggattccatagtgaatgataatatttggatacattcagttaaataaaatattattaacattaatttcatctttttttaacctctttgaactaaaaattttacttcagaagtagaaatttttttcattgcatatgtagctcacgtgatagttctctttgatggccttactccggaagtgcttctaacagagtttgtggagagaagagaaaaggtggaagagagataatattgtgatggtagaaattacactgggctcagagttcacttcctgggtataggttattgagcattacataatttcagaaaacctcagtttcctcatctgtaaaatatggtgcttgctaataatgtctgtttgacggagttgttgttaagcctaaataggaaaccatgcaaagcctctaatgggataccttgcatgtagcagaaggtcctcaaagagtagttcctttcttcccttcctttcccccacccagagtaatacatcaggggctccagaggcagcaggcagagctgaaataacctcagtgagttctgaatgtgccagctttctaaatgcattggattgcaggagatggggcaagtgaaagaggagcagaaagctcagtggagaagtcagagtttagcaaggactgcagccagtctgcaatgacaaagccacccaccaatttaaagggagcgtagaatggcaacagagaacaagtcctgatggttagcaggcaggacttagaagttccctgtccagttttgctaacagctgctgtcagatacaattggattaagcagataggtttcctattaggtaaagaagtattattttctaattctttgtggtttcgtaaagccaactctgagttagccgtagcctcagcaacttgcagcaataatgaatcttcaaatagaatttagcaaccctgagaaagatgccaaaactcatgcttagtgttgagctaagagactcacaaagagaagaacttatgtacttgctactcataaataagccacccaccaagggacaccagataacagtgaatgtcccaggatcctgaagaggctcagtggtggcagcaaaagcagattatgtcagaggcccctggtcgtgatttgacacttcttaaagaaacaaaactgaggccaaggaattctgatgaatgagaaattcatccagttccaatctactggatttatacttcaagaatggccatatttcttcttccattagtctcgacaatgggaaagaaaaatagatgcayggctatcctagaatggtagacaatccctggattactccaggaagtattacaaaaaccactggtctacagagacttaaagagatctgcttctgctgtaatggcaccagtgacttgttccttccccactgagaaaattgagtctgtcttctatggacctcagtttcttgatttgaagacgattaacagaacagagcatcgtaaaaccagttcccttattttatgca

SEQ ID NO: 66395 - DNA, 584 bp, Homo sapiens
aaaaaaaaaaaaaaaaaaaaaaggtcaaatcaggaaaaaattttgaaataacaaacttccttttgcagctgctcttttgttcatcttctaccataatcccaggcactgagtttttgtttgcactcgtttgccctgggccacctggggtggtggggaaggactgaggaggggaggtcagaacatgcagttcctgtcccagctattactggctctggagctctgggcaagctacttcatctttctggtcctcagtttccccgtctgtaatagagtgatgtcagtacccaccgtgtatggcactggggaggcagtaaaggtttgggtcaacctgagtgggtctgatcccgatcctggctccaccacccactgccttcaccgccccgagcaagttccctaactcctctgggcttcgttttcccccttgatgaaagcagggctgctgggaggatgacatgagacaatatccagggctggccaacagtaagtgcttaagacacatagtagcattcctccttcacaggttgtaaattrcagagcacgcctatattatcttagtatatattatttaaatatcataccattca

SEQ ID NO: 66396 - DNA, 584 bp, Homo sapiens
aaaaaaaaaaaaaaaaaaaaaaggtcaaatcaggaaaaaattttgaaataacaaacttccttttgcagctgctcttttgttcatcttctaccataatcccaggcactgagtttttgtttgcactcgtttgccctgggccacctggggtggtggggaaggactgaggaggggaggtcagaacatgcagttcctgtcccagctattactggctctggagctctgggcaagctacttcatctttctggtcctcagtttccccgtctgtaatagagtgatgtcagtacccaccgtgtatggcactggggaggcagtaaaggtttgggtcaacctgagtgggtctgatcccgatcctggctccaccacccactgccttcaccgccccgagcaagttccctaactcctctgggcttcgttttcccccttgatgaaagcagggctgctgggaggatgacatgagacaatatccagggctggccaacagtaagtgcttaagacacatagtagcattcctccttcacaggttgtaaattacagagcacgcctatattatcttagtawatattatttaaatatcataccattca

SEQ ID NO: 66397 - DNA, 562 bp, Homo sapiens
aggcctaggggacaaggtggctcttgttcctgtgcaagcctgtgccrgacccacgcctggtcccctggaatgcctgggtgctctcaaggggagggctgtatggtaaagcagaaagagccttcccacgtgggctcacgtgactttgctataagccctccatcctaaggaaagaagaagcaggagtgctttctcaactggcagagtggtgaccgagtggagtgtcacatcaactggtgtcaatggcatcacggggataagatctggaggaggcaggtggcaacggggcctgtggagtggagtcttggtggaggggctgggcagtgagtgaccggtgcaatatcaggcgctgccccaggacattgacttgatgaaaggcccagagacctcaggactttggagggcctgctcatcagtaaggggcagagagctcctcattaagtggaccacaaagcttaacgtcccattctgatcccctgaggattctgtgatcaaagcagtcccttcctgctgtgactttggtatgagcataaagcctcaaagtgtgcagggctggggatcgggg

SEQ ID NO: 66398 - DNA, 1372 bp, Homo sapiens
tggggaggcttcttcatgccctcgcccaccccttcattccttccactctctaccttgcatctggaagtgaaagagtaagatgacaaagcttcagaatagcaggatcttagatccctgaatcaccacttgggggagagcttcccaggaaacctgccgaaccccatcaaattttgcatgagaaagaaatacgtttttattggattaagccactaacatttcaggtttgattcatttcttaccatagcccattcttttttttttttttttttttttttttttttttttttgagacggagtcttgctctgtcacccaggctggagtgcaatactgcaatctcggctcactgcaacctccacctcccaggttcaagcgattctcctgcctcagcctcctgagtagctgggattacaggtgtgtgccaccatgcctggctaattttttttgtatttttagtagagacagggtttcaccatgttaatcaggatggatatcatagcccattctatattgatcaatgtagctaccaattgctgttgaattgtatattttaccatttcagtcaccagagaggtattcaaaaacaaacatccctataaatgaattgattggagcagcttaaatttggtgccaacctcttagccaaccagctggccttgggaacagaatcataggtgagtgtggcagcccctacaaggactgcatgggtgaagtttggggaagggggatggtttgcagtttccagaaggaagcctggagggatggtggggggctgtggaggggagagagagcaaagggagactacagacaataatgctgccctactgatcacaaacacttcagtgtcacgctctcagcatagtattttaaatggaatcctgagtcaggattcctgacaaatccattagaacagactggaaacagagggagtagggcaatgaggaaaaggccttaagaagccttaaagaaccttgacctaagaggtagaattggaggaagtggggctatttaatcttgaaaatagaagacttggcaggaacacagtgattctcttcatggctgtgaaagaccatcccatgaggggaatactgtgacactccaaagggccaaactaggcgtggaaggtgtcacgacagaaaagtcagattgtagcccaactcaggaggagcttctrtacatgatagccaaccaggaagggcccagacccttttaggaaaggagaagctggcatcatgaggacacaccagccaattctgctcagactgctgaagatgggattcctgcatttttggactgcttgttctatctgcacattcctctccaatactaagagtctgaaaattaacttaaattggtcattcagtctggccaaga

SEQ ID NO: 66399 - DNA, 1372 bp, Homo sapiens
tggggaggcttcttcatgccctcgcccaccccttcattccttccactctctaccttgcatctggaagtgaaagagtaagatgacaaagcttcagaatagcaggatcttagatccctgaatcaccacttgggggagagcttcccaggaaacctgccgaaccccatcaaattttgcatgagaaagaaatacgtttttattggattaagccactaacatttcaggtttgattcatttcttaccatagcccattcttttttttttttttttttttttttttttttttttttgagacggagtcttgctctgtcacccaggctggagtgcaatactgcaatctcggctcactgcaacctccacctcccaggttcaagcgattctcctgcctcagcctcctgagtagctgggattacaggtgtgtgccaccatgcctggctaattttttttgtatttttagtagagacagggtttcaccatgttaatcaggatggatatcatagcccattctatattgatcaatgtagctaccaattgctgttgaattgtatattttaccatttcagtcaccagagaggtattcaaaaacaaacatccctataaatgaattgattggagcagcttaaatttggtgccaacctcttagccaaccagctggccttgggaacagaatcataggtgagtgtggcagcccctacaaggactgcatgggtgaagtttggggaagggggatggtttgcagtttccagaaggaagcctggagggatggtggggggctgtggaggggagagagagcaaagggagactacagacaataatgctgccctactgatcacaaacacttcagtgtcacgctctcagcatagtattttaaatggaatcctgagtcaggattcctgacaaatccattagaacagactggaaacagagggagtagggcaatgaggaaaaggccttaagaagccttaaagaaccttgacctaagaggtagaattggaggaagtggggctatttaatcttgaaaatagaagacttggcaggaacacagtgattctcttcatggctgtgaaagaccatcccatgaggggaatactgtgacactccaaagggccaaactaggcgtggaaggtgtcacgacagaaaagtcagattgtagcccaactcaggaggagcttctatmcatgatagccaaccaggaagggcccagacccttttaggaaaggagaagctggcatcatgaggacacaccagccaattctgctcagactgctgaagatgggattcctgcatttttggactgcttgttctatctgcacattcctctccaatactaagagtctgaaaattaacttaaattggtcattcagtctggccaaga

SEQ ID NO: 66400 - DNA, 1372 bp, Homo sapiens
tggggaggcttcttcatgccctcgcccaccccttcattccttccactctctaccttgcatctggaagtgaaagagtaagatgacaaagcttcagaatagcaggatcttagatccctgaatcaccacttgggggagagcttcccaggaaacctgccgaaccccatcaaattttgcatgagaaagaaatacgtttttattggattaagccactaacatttcaggtttgattcatttcttaccatagcccattcttttttttttttttttttttttttttttttttttttgagacggagtcttgctctgtcacccaggctggagtgcaatactgcaatctcggctcactgcaacctccacctcccaggttcaagcgattctcctgcctcagcctcctgagtagctgggattacaggtgtgtgccaccatgcctggctaattttttttgtatttttagtagagacagggtttcaccatgttaatcaggatggatatcatagcccattctatattgatcaatgtagctaccaattgctgttgaattgtatattttaccatttcagtcaccagagaggtattcaaaaacaaacatccctataaatgaattgattggagcagcttaaatttggtgccaacctcttagccaaccagctggccttgggaacagaatcataggtgagtgtggcagcccctacaaggactgcatgggtgaagtttggggaagggggatggtttgcagtttccagaaggaagcctggagggatggtggggggctgtggaggggagagagagcaaagggagactacagacaataatgctgccctactgatcacaaacacttcagtgtcacgctctcagcatagtattttaaatggaatcctgagtcaggattcctgacaaatccattagaacagactggaaacagagggagtagggcaatgaggaaaaggccttaagaagccttaaagaaccttgacctaagaggtagaattggaggaagtggggctatttaatcttgaaaatagaagacttggcaggaacacagtgattctcttcatggctgtgaaagaccatcccatgaggggaatactgtgacactccaaagggccaaactaggcgtggaaggtgtcacgacagaaaagtcagattgtagcccaactcaggaggagcttctatacatgatagccaaccaggaagggcccagacccttttaggaarggagaagctggcatcatgaggacacaccagccaattctgctcagactgctgaagatgggattcctgcatttttggactgcttgttctatctgcacattcctctccaatactaagagtctgaaaattaacttaaattggtcattcagtctggccaaga

SEQ ID NO: 66401 - DNA, 858 bp, Homo sapiens
aggatccctgtggcctgacaytcccctgcttcagcagccaggagcgggaattgaaggtggagctggccaatccgttgtgacagggagtgctgcagcccttgaaacctgaggagagctgagccttttcctcgctcacccgtcccaggctgaactttcagcttcggatctttgctgtactgaatgggggacccattagagtgcgtacagggtgacagggaaaggctgagactgccctatggaagatggatttgtggggtggagctggagtgtggggtgaggagcctcctcctcagatttgatgaattgatgtgcggtacagtgtcctttatggactcataataacccctgccaactctctggttcgttcaacaaatgtttattgagctcctactacctgccagacccgcagcgtgccgggtgctcgggataccacagtgaaggagatgtggtccccagcatccctagtgggtaacagttatccccatttgggtaacatattgttctttctaagcatttgtcaggatctcgactgatactagtcaaaagcctgtgaatcccataaagtattactgttgttcccatttgaagggcgggagaggggagacagagagaggccttgcttaagggaagctaggtagaaccaggtcctgtttagtcttttcactgaccccctgccaaggggagtcagggaactgatactttatatgctatttttttccttacttattttttggtttggtttgaggcagggtctcactctgtcacccaggctagagtgcagtggcctgatcttggctcactgcagcctcgatctcctgggctcaagcctcccacctcagcctcctatgtagctgggac

SEQ ID NO: 66402 - DNA, 1315 bp, Homo sapiens
cttggcactatgggtgtttgtaagctggagaattctgtgtgtgtggtgagtggcggtggcggggcggggggcttgtaagctggaaaattctgtgtgtgtggtgagtggcggtggcggggcggggggcttgtaagctggaaaattctgtgtgtgtggtgagtggtggtggcggggcggggggctgtgttatttaacagcatccctggcctccacccactagatgccaggatcacccccacctgttgtgacaactcaaaatatctccagatgtgacaaacatcccctggaggcagaatgatcctggattagaaacactagtatattccatgaaagtgggctagaccagggggacttgggatggactttggacaagaggaccacttggggaggggagtggggaagtgattctgttaccagaagtggggtccccatccagtgcccaagggttcttggatcttgcacaagaaagaatttggggcgagtctataaggtgagagcaagtttattaagacagtaaaggaataaaagaacggctactccatagacaaagcagcagcatgggctgcttgactgagtatgcttctggttatttcttgattatatgctaaacaaggggtggactattcatgagttttctgggaaagaggtggagatttcccagaactgaggatccctcccccttttagaccatatagagcaatttctggacattgccatggcatttgtaaactgtcatggtgtgggtgggagtgtcttttagcatgctaatgcattataatgaacatataatgagcagtgaggatgactagaggtcacttttatcaccatgttagttttggcaggttttggctggcttctttactgcattctgttttatcaccagggtctttgtgacctatattttgtgatactaatcctgccaacctcttatctcctcctgtggcttagaatgcctaacctcctgggaatgcagaccagcaagtgtcagccttgttttacccagcccctattcaagatgagttgccctgctttgaatgcctctaacaattctctaaaggggaggaccactcgggttcactgaagcccaggaggagagctgtgtggtcaaccagagtaggrggaaggcaccactcacgtccagggcagtgcagggagagctctccagggagggagttgggttggggaagagggagtccctgaaggacccactctatgaggagatgactcggcatctggaatctgcctcccccagcaggtaccaaggccaaaataaaagtgtaataatcctgtgagatgtctccacccttcttcaagt

SEQ ID NO: 66403 - DNA, 1307 bp, Homo sapiens
ttcaagatggtgccacgtcctctgtggggaccccatggctcttgggaaatagacattgttgccacccaaggcagtaggagtgcagctccctctgctgccctagctccttgccctgatatccaggcagacacagctctcatcttgggccctacccgtttcaggacccacaaactccagagaactttggacagcaatctgactagttcccttattgtttctcttggaggcttctctggggcagtgttagaaaatgcacccgaaccccagaaccattttctaaaggtatagctgtttctcttgggcttttcatgcctgaagtaggaattgggcaaagggctttgtttattcattgtacagagctgctatatttgatacgtggtgtctgtcactggtcttttagggccgccaccaaaactgagagtgaaagtctcattctgacatcttcgtatgtcactctctgagtatttggacatcacaatattttttcctctgtccttggggaggggtgtgtgtcccagtaaattgacagggatcaagacacagtggaagaagtagggagcattttgttctctttaggacaaaacaaaatgtcaaggaccccaagttgctactaccagagaagcacctgagttgataggctggagtttctgkgcctgacctccatgttggcaagacacaggcaggaggcccatcaggccaggagacatgaagacaggaaggcacatcctggggagttcatggccctacaggagagtaaggacagcaggccgcagagggtttgcaaagtgaacggctgttgaagaagagagaagagaaaggagagaaaagtggtaaggttgagcaagatattaagccagggtcactaggtctcagaccaagattgtaagagcagaccaaagcagcgattccctgactgtggtctgtagataccaacagtctgtggaaaaaaaaaaaaataccgtaggcttgcatgttttgatattgatgaaagttattagatatttttacaatttatgacgtatttttgaaaaatatcaaaagagaaggtgcaagatttataaactttgtcagatacatacaagtataattctactttttaataactgaacaactcttgccaagagcttccatttctaatggcacatcaaactgaaccatgtctttgaaggtcactcgggataaacaatatcttttagagtgattgtctagtcaccttaaagtcccagcccatttattagggctgttgctgtcctctaaatggtctcccttctgcctttcttctcaagatggcttccaaggaagttcct

SEQ ID NO: 66404 - DNA, 1307 bp, Homo sapiens
ttcaagatggtgccacgtcctctgtggggaccccatggctcttgggaaatagacattgttgccacccaaggcagtaggagtgcagctccctctgctgccctagctccttgccctgatatccaggcagacacagctctcatcttgggccctacccgtttcaggacccacaaactccagagaactttggacagcaatctgactagttcccttattgtttctcttggaggcttctctggggcagtgttagaaaatgcacccgaaccccagaaccattttctaaaggtatagctgtttctcttgggcttttcatgcctgaagtaggaattgggcaaagggctttgtttattcattgtacagagctgctatatttgatacgtggtgtctgtcactggtcttttagggccgccaccaaaactgagagtgaaagtctcattctgacatcttcgtatgtcactctctgagtatttggacatcacaatattttttcctctgtccttggggaggggtgtgtgtcccagtaaattgacagggatcaagacacagtggaagaagtagggagcattttgttctctttaggacaaaacaaaatgtcaaggaccccaagttgctactaccagagaagcacctgagttgataggctggagtttctgtgcctgacctccatgttggcaagacacaggcaggaggcccatcaggccaggagacatgaagacaggaaggcacatcctggggagttcatggccctacaggagagtaaggacagcaggccgcagagggtttgcaaagtgaacggctgttgaagaagagagaagagaaaggagagaaaagtggtaaggttgagcaagatattaagccagggtcactaggtctcagaccaagattgtaagagcagaccaaagcagcgattccctgactgtggtctgtagatrccaacagtctgtggaaaaaaaaaaaaataccgtaggcttgcatgttttgatattgatgaaagttattagatatttttacaatttatgacgtatttttgaaaaatatcaaaagagaaggtgcaagatttataaactttgtcagatacatacaagtataattctactttttaataactgaacaactcttgccaagagcttccatttctaatggcacatcaaactgaaccatgtctttgaaggtcactcgggataaacaatatcttttagagtgattgtctagtcaccttaaagtcccagcccatttattagggctgttgctgtcctctaaatggtctcccttctgcctttcttctcaagatggcttccaaggaagttcct

SEQ ID NO: 66405 - DNA, 1307 bp, Homo sapiens
ttcaagatggtgccacgtcctctgtggggaccccatggctcttgggaaatagacattgttgccacccaaggcagtaggagtgcagctccctctgctgccctagctccttgccctgatatccaggcagacacagctctcatcttgggccctacccgtttcaggacccacaaactccagagaactttggacagcaatctgactagttcccttattgtttctcttggaggcttctctggggcagtgttagaaaatgcacccgaaccccagaaccattttctaaaggtatagctgtttctcttgggcttttcatgcctgaagtaggaattgggcaaagggctttgtttattcattgtacagagctgctatatttgatacgtggtgtctgtcactggtcttttagggccgccaccaaaactgagagtgaaagtctcattctgacatcttcgtatgtcactctctgagtatttggacatcacaatattttttcctctgtccttggggaggggtgtgtgtcccagtaaattgacagggatcaagacacagtggaagaagtagggagcattttgttctctttaggacaaaacaaaatgtcaaggaccccaagttgctactaccagagaagcacctgagttgataggctggagtttctgtgcctgacctccatgttggcaagacacaggcaggaggcccatcaggccaggagacatgaagacaggaaggcacatcctggggagttcatggccctacaggagagtaaggacagcaggccgcagagggtttgcaaagtgaacggctgttgaagaagagagaagagaaaggagagaaaagtggtaaggttgagcaagatattaagccagggtcactaggtctcagaccaagattgtaagagcagaccaaagcagcgattccctgactgtggtctgtagataccaacagtctgtggaaaaaaaaaaaaataccgtaggcttgcatgttttgatattgatgaaagttattagatatttttacaatttatgacgtatttttgaaaaatatcaaaagagaaggtgcaagatttataaactttgtcagatacrtacaagtataattctactttttaataactgaacaactcttgccaagagcttccatttctaatggcacatcaaactgaaccatgtctttgaaggtcactcgggataaacaatatcttttagagtgattgtctagtcaccttaaagtcccagcccatttattagggctgttgctgtcctctaaatggtctcccttctgcctttcttctcaagatggcttccaaggaagttcct

SEQ ID NO: 66406 - DNA, 1307 bp, Homo sapiens
ttcaagatggtgccacgtcctctgtggggaccccatggctcttgggaaatagacattgttgccacccaaggcagtaggagtgcagctccctctgctgccctagctccttgccctgatatccaggcagacacagctctcatcttgggccctacccgtttcaggacccacaaactccagagaactttggacagcaatctgactagttcccttattgtttctcttggaggcttctctggggcagtgttagaaaatgcacccgaaccccagaaccattttctaaaggtatagctgtttctcttgggcttttcatgcctgaagtaggaattgggcaaagggctttgtttattcattgtacagagctgctatatttgatacgtggtgtctgtcactggtcttttagggccgccaccaaaactgagagtgaaagtctcattctgacatcttcgtatgtcactctctgagtatttggacatcacaatattttttcctctgtccttggggaggggtgtgtgtcccagtaaattgacagggatcaagacacagtggaagaagtagggagcattttgttctctttaggacaaaacaaaatgtcaaggaccccaagttgctactaccagagaagcacctgagttgataggctggagtttctgtgcctgacctccatgttggcaagacacaggcaggaggcccatcaggccaggagacatgaagacaggaaggcacatcctggggagttcatggccctacaggagagtaaggacagcaggccgcagagggtttgcaaagtgaacggctgttgaagaagagagaagagaaaggagagaaaagtggtaaggttgagcaagatattaagccagggtcactaggtctcagaccaagattgtaagagcagaccaaagcagcgattccctgactgtggtctgtagataccaacagtctgtggaaaaaaaaaaaaataccgtaggcttgcatgttttgatattgatgaaagttattagatatttttacaatttatgacgtatttttgaaaaatatcaaaagagaaggtgcaagatttataaactttgtcagatacatacaagtataattctactttttaataactgaacaactcttgccaagagcttccatttcyaatggcacatcaaactgaaccatgtctttgaaggtcactcgggataaacaatatcttttagagtgattgtctagtcaccttaaagtcccagcccatttattagggctgttgctgtcctctaaatggtctcccttctgcctttcttctcaagatggcttccaaggaagttcct

SEQ ID NO: 66407 - DNA, 575 bp, Homo sapiens
ttatttcttctttttttcagctttctaatkttctgttatatagctataccatgatttactggaccattcctctgttgattgaccccatagattgtttataatgtgctattattagaaacagcactgcattgaattagaaacaacactgaataaacgtgggtattcctttctttacacatgtgccagtgtatatgtaaacatttacgtatagaaatatgtttctaggagcggtgtttccgacggagtttactctgagccaaaaggtaaatgcattggtaagttttatagcagttgccaaatgtgtcacagaaaagttgtaccaatttgcacctgatgagcaagaaatggtacctatgacccctctccaccccgcagcctcatcgggacagggagttgccagggttttgacttgggctgcggtgttcagtgaggaatggtacctcatgtgctgtcttcccttctctcccagctcagcgctcacttttgtagtgaagacatgctttaaaatcatcgagtgtgcctgcctttgagatttgcaagaggaagcaaagagcacgttaatgaaacttgggagg

SEQ ID NO: 66408 - DNA, 575 bp, Homo sapiens
ttatttcttctttttttcagctttctaattytctgttatatagctataccatgatttactggaccattcctctgttgattgaccccatagattgtttataatgtgctattattagaaacagcactgcattgaattagaaacaacactgaataaacgtgggtattcctttctttacacatgtgccagtgtatatgtaaacatttacgtatagaaatatgtttctaggagcggtgtttccgacggagtttactctgagccaaaaggtaaatgcattggtaagttttatagcagttgccaaatgtgtcacagaaaagttgtaccaatttgcacctgatgagcaagaaatggtacctatgacccctctccaccccgcagcctcatcgggacagggagttgccagggttttgacttgggctgcggtgttcagtgaggaatggtacctcatgtgctgtcttcccttctctcccagctcagcgctcacttttgtagtgaagacatgctttaaaatcatcgagtgtgcctgcctttgagatttgcaagaggaagcaaagagcacgttaatgaaacttgggagg

SEQ ID NO: 66409 - DNA, 507 bp, Homo sapiens
gctgggtttttcccttagggagatgcagagccagcttgattgggaagtgcttaagatttagtacccattccaaagaattccatctgtgcccttgaaatgaatattaacataaaatgaaaaatttggtaagttacatcaagctgatttttctgccctggccacagtctctactgttagtaatagctaactttctttatgccaggtagtattcytagcactttatactcatttaatcctaacagtaactctgtaaggcaatttgttgttgttacagccaattaatagaagaggaaactgaggcatggagctagtaaggaaatagtaaaggtatctactaaatagaagtgttgaagattaaatcaggtagtagtgtaaagtatttataaaagtatctggcatatgttaaataataacttgcttcaatttatataacaaacagagagactggaatttgaatctgggtgatccggcttcagagtctgtgcattctttggcctctcaaagttt

SEQ ID NO: 66410 - DNA, 1077 bp, Homo sapiens
aatatatacatttatatttacaatacaggatgcaagttccaatgactatgactataaaatttatattaaacatttccataagtgatttatttggctgtttttgttcgaagtcgtcgtttgataatctggtgatcactctccttcattttctggtccattaaaatctgaaattaaaaatttcatagtttttcaaagcttgtaagtgaaaataaaaataaaagcttgtttataatgagtaagacatgttcatgtgcttagtaactgaaatgatacattggagaattttttttacttagactacagatatgccatcttctataaaaatttatttaaaaaacagactttgtaaaagattcaacactatcaaattctagaagtaaaataacctagactccatattgaattcaaggcagatataacttaaaataattactaaaatatttggagacaagtgcctcaaataatttttaagaaatgatctttcgtggcaacaaatgtataacttagaaagtagaaagcacattatatagtaactaagaaaacaattttcagccaagggaagaaatcaggtactaatcaaacagatgctcaaaaatgactgacagaatggtacttacaacaccatgccctaatttaccctaactctttacatcttgcattcaagtgtcaatctcatatctgaaagctcttgtggcaaaaaaggtttctcctgatttttcttggccacttctttttaatttttttaatttcttttaattatttttttaccttcactttcatccactaagcaaatgcaagcatgacagaaaatttgagctttccctgtgacagcacatactgttctgaatcaggagaatgaatcatagastcagggtgataactacagtctcttcctaatagatcctcaaaggcttaggggaaaggtgggaggaaatggctgaatgtcagttttatatttttaccaggaacacttgggcccagatttgtacaactcccgtgatttaaaaaagagaaagaaaaagaaaaaaagattgtggaggcaaataagttactaaatagtgacaattctattattgg

SEQ ID NO: 66411 - DNA, 715 bp, Homo sapiens
ggatcccagcattagagactctgcccctttctgtgggaaagaatctatcttttttggatttgtttgatgtgctaactaacactycccccagtcacaccactagccatcaatcaaacagataaaccccttaggaatatctagtcaattgctaatcatttgaagacatcagccagtagaagggcattagccaacatcattacataatgtcaaaacaactgatcaagtttgtgaatccaatgaaacagtcaaaccagtttaggaatttcatatacacaaaacaatagatgagtgacttttagctttttagcttgatataaaatttttaaaccctaccatttataaatgtgtaagcatttggcacaccctatgccaagtgttttatctacttaaaccttggaagtatgtgttctcacttccattttaaagataagaagactgaggcttagtgagatatactaatctgcacaagactacatgtttaggttctatgagtggcagggtgaggtttaaacacttgtctctccaacgtccactccatgctgtttgcctctgtgtatgtaacttcaaacagccaaaatggccaagtaaggcaagaaaataaaaaaataaaaaacaaacaagtgaaaggcctgggtcctgaatcatgcagttaagatagccaagactcagctgatccacaattgtctaattctgcccatatccgtccagctacaaa

SEQ ID NO: 66412 - DNA, 715 bp, Homo sapiens
ggatcccagcattagagactctgcccctttctgtgggaaagaatctatcttttttggatttgtttgatgtgctaactaacacttcccccagtcacaccactagccatcaatcaaacagataaaccccttaggaatatctagtcaattgctaatcatttgaagacatcagccagtagaagggcattagccaacatcattacataatgtcaaaacaactgatcaagtttgtgaatccaatgaaacagtcaaaccagtttaggaatttcatatacacaaaacaatagatgagtgacttttagctttttagcttgatataaaatttttaaaccctaccatttataaatgtgtaagcatttggcacaccctatgccaagtgttttatctacttaaaccttggaagtatgtgttctcacttccattttaaagataagaagactgaggcttagtgagatatactaatctgcacaagactacatgtttaggttctatgagtggcagggtgaggtttaaacacttgtctctccaacgtccactccakgctgtttgcctctgtgtatgtaacttcaaacagccaaaatggccaagtaaggcaagaaaataaaaaaataaaaaacaaacaagtgaaaggcctgggtcctgaatcatgcagttaagatagccaagactcagctgatccacaattgtctaattctgcccatatccgtccagctacaaa

SEQ ID NO: 66413 - DNA, 751 bp, Homo sapiens
taacagaggcagtctcgcgtttcagggccctttctccttcattcatttgttcatgtatttattccagtttcaattattaatgcccgctctgtgacaaatttgatagcctgctgtgagtgaaggacaggtagtctactgtgtcaactttgggggatagccctgggcttcctctaattcctttaaactccatagtcatgatagagaactgcttttttcattttgttaattaattttttaaaaattttaattttgttttaaatttctattttagattcagtgggtatatgtgcaggtttgttatgtggatgtactgtgtgtgatgctgaggtttcgggtatgaatcatcccatcacccaggtactgagcatagtacccactagttagtttttcagcccttgcccctcttcttccctcygctccctagtggtcctcagtgcctattgttgccatctgtatttccatgagttcctgatgtttagctcctatttataagtgataatatgcagtatttggttttctgagaactgcttttttttttctgagacggggtttttttttttttgagcagagacagggtttcaccgcgttagccaggatggtctcaatctcctgacctcgtgatccacccgcctcagcatcccaaagtgctgggattacaggcgtgagccaccgcgcccggctgctttttttttttttttttttttttttttttaaatcaagaacggctaaaccccacattttaaactgaact

SEQ ID NO: 66414 - DNA, 797 bp, Homo sapiens
tttattttttatttccattatctacaataaacttgtttcttttgtaataaaaatactattcttcacttttaaaactatgtacatgtgtgggttgcaaaactacttgtataaattccacaaatccctatgattaaataaaaaacaagggcattgaagggtcataaaggaatttaaaatttcctaaatatatgtgacacaaaatattaataggatattaataggacattaayagggattccttcgtcacataatcaaatcttctcacttaaagtgaaaaacttttttgtatcattgctcaatgttgtagcaatgaagtgaaatcgtcttttctgaaagcttcttttcatgagatgaagagtgagttcattaaaaaaacctgccatcctccccttccaaaacccttacaggcaaacagcatcacttcatgaaattcaagtgcagccaaaaagaacagcctgtgggtacaacacagccacaggaaggaggattgaaatcctagtgggtacttcgtggaaatatttgaaattctctactaacctacatggaagatgtttggaaattcaagttaacaacaatgacaacagttatttcttcttttggtacttttggtaagtattttgaatgtattttagccatttccctccaatgcttcaggtggttccctccctcacctaacctggatttgtattcgcatggaagaggttttacaaacatccttaagattcaagaaccctcactggatgcctcctgcgtcaagaaacctgctggggaactggtagaagtcaccaacagataga

SEQ ID NO: 66415 - DNA, 702 bp, Homo sapiens
ctttaaactatgtgttcatatgatttttatgaaaatggaataatgataacttgtctaacacactcattttcattatgaaggtcagaagatgaccttttcctgggtccttcaacaagctgcctttgagaatcaagaccagagtgtttcattgtttcaatatttaaactggaatgattctgttactaaacaaaattacagtccaagtttagatatttgttcacttatttatttaactgaaatctattgaatgccaactaggttctccatgggtatagtggtaagcaaaccagacccggtccctgcccttacagcgtttataagtggctaagagatagtatagggcatttacagctaactgtgagaagaccacaggatttggaaattaagtcccctaattgtatactcatctgtttctttccttcattccccatgaaagtttttctccccacatacaasataattcttgacttcacttccagacacagtaaacaccagagcaatttatttttcccttcttcctctgagctaagagtccagccatcagccagtgaagtatggcctttgaacgacttcatatttccatgttaatgttgctttgtcaccaacatttcagcccatagactggctgacagccctctctgggccacagaaaccaccagctggttgtggaactaacaatttacatctcatggtccaatgagg

SEQ ID NO: 66416 - DNA, 620 bp, Homo sapiens
aattaatggtatcacatatcctgttcaccaacaaaataccaaaaagaaattgcctcaagcatgctgaacttggaaaccacaactctaagattacagccatatcatgctggcccagtgtagtggattccacaaggacattccttgtatattttatttgttccgtaaaaggaaagaatgtgtgcattccaattatttccctcaagtcctctgctggccagaagactattctaatattctatagatctattacattatctttatttggaaatagggaggagtaatttctgtaaacttgtcttgcaaatttctaggagtgtagggagaaaatcttgccaaaactgcctgagacacaccttttggctcatatttgaggagacagtactggtgttactcagggtgacacctattccccaaggtgaattaccttcatcaggcttgcagtgcagttatttctcatttcccatcacgtaatatgttcttagggactcttcactgtgctgcaagaaaataagctgttgagatttaatgcacaaacttttgaaaacaaaaaccaaacaccacgtgcaaygtgaacacaaattttccatttgagattctagaatcagaatttcaagccaaag

SEQ ID NO: 66417 - DNA, 616 bp, Homo sapiens
aaatttcctatctcttcaacttcagtatgcaataaagtgatatctatttccaggcaatcattcatgaaaatggcattatttaaaatcagtttgaaattttataggtaacaatatataccacttttaatataattacaaaaacttatacttcaaaatatactttttttatgtcctgaaattaggtccaggagatagttgtgtaacygtaaattatactagaaaccattgaattgaacactttaaatgggcaaactttatggtaggtaaattacatctgataatataatttttaaaacacacatttttaaaaacacagctttaaaaacacacttcttttcatatcctttatgacaggcaaacagaccaaattttgtcttagaattaattggaaagaagtctacacaaatatctttcacactatgagtttacagtagtcacgttagaaataaagacacaccagaaaaagtcactgagaaaaatcattttattagactaaatgtttccactgcatttcagtgtgattagaaatgcccctccctcaaaagacaagccaaccacatttccatgctttgttagttatcggattaatagtgaagtaatgccatccgtgcactgg

SEQ ID NO: 66418 - DNA, 761 bp, Homo sapiens
cagcgtaattttggctgtaggagttctggctgcatggcttccgttcattctccccatttctcaaatctggctctccagacttcattggcaattgtgttacgtaatacgttcagtttctgtttaattagccagtcattgttggttgtttctatctaagaaccaggtctgattcatttactcatttccctaataattttttgagtacctactatataccagacactcttttggatgggaaagaaagagcaatgattaagacagacaacgtattttctcttataaagactgtatttttgtagggcaaatgaataaataaataaataaacaagaatataaacaaggaaaaatcagcttgatgtaagagcaatggagaaaataaaatagagtgatgtgatagaaagggacaggaggatgagaaacagtgttcagggaagcgttctctaaggaaataacttttacattgagacctaaatggcaagaaggagccaaccacacagataatggagagatggagtcttctgccagggtaatggtaagttcaaaggccctgaaacaggaagtcaatacaagttcaaactccagggkattttagagctcctctgattcaaacatccagacgtagaaagaaactgaagtgtaaaaatttttcaagccttctgtgaggactcttaagggattcagtaaacaaattgtaactatagtgaaaaataaaaagcagagtgcaacgtggaagtgagtgcgtttctgtttaaattgaaact

SEQ ID NO: 66419 - DNA, 1059 bp, Homo sapiens
ttatattctaaacctagaattcagccccttgcacagaaatctcatcctacttatccacagttttatctgtgactctccaagacagaacttctcttatggctagaaaggcttcatgggcatccccacacatttgcttcttcttccctcaaacttatatcaaaaaatgcctccactttatactttgcctgcaaattttactcatagatgaagacaaggttaagttctgccttttccatgaaagttgaattattattgaatcttattaaaacccaaactgagcagttctagttgaacctcctatgggtgcaagactttgtgaccaatagcattgcttattatagatatgtaggtgttggcctctaccagtggggcagtaaccaccctgaaaacaagagcctcatcacagacaggttttatattcaccctaatatatacatacagacatggaataaatgacttttataaatttggaagtcttcaaacttgaaagtgttcagctaggtcaaagcagggcagctgagcttttgagaatattcacatctgcaaggatgtttccctatcagtaagaactttcattgatcctataaaatatatcagtcaaaacatctagattaagtcatttatttatttaatatattaaaaatagtaaaataactttgacttgtgggytgaatcatgcaaaattcaacaagttttatagttcaagtgtggttgaacgtcagcaaatttatatgtttcaacctaatatttgccaaaatttttggatacagtagtaaataagaggctgtccttatggaacatatagtatagccaattagaagaattacatttgattttataggacactgaaagttctcattcttgtctagatgatctcatgactgaatttgtttggacacaagtccttacagcaattagattttaatagtagttcccagttatacttgacgagtaatggtcttttaaaaaaatcaatctcaaaaggttgagatgtgccccatcttctcttaccaatctattattatgttacctgtaatctgccaatttctataggtcccc

SEQ ID NO: 66420 - DNA, 1059 bp, Homo sapiens
ttatattctaaacctagaattcagccccttgcacagaaatctcatcctacttatccacagttttatctgtgactctccaagacagaacttctcttatggctagaaaggcttcatgggcatccccacacatttgcttcttcttccctcaaacttatatcaaaaaatgcctccactttatactttgcctgcaaattttactcatagatgaagacaaggttaagttctgccttttccatgaaagttgaattattattgaatcttattaaaacccaaactgagcagttctagttgaacctcctatgggtgcaagactttgtgaccaatagcattgcttattatagatatgtaggtgttggcctctaccagtggggcagtaaccaccctgaaaacaagagcctcatcacagacaggttttatattcaccctaatatatacatacagacatggaataaatgacttttataaatttggaagtcttcaaacttgaaagtgttcagctaggtcaaagcagggcagctgagcttttgagaatattcacatctgcaaggatgtttccctatcagtaagaactttcattgatcctataaaatatatcagtcaaaacatctagattaagtcatttatttatttaatatattaaaaatagtaaaataactttgacttgtgggttgaatcatgcaaaattcwacaagttttatagttcaagtgtggttgaacgtcagcaaatttatatgtttcaacctaatatttgccaaaatttttggatacagtagtaaataagaggctgtccttatggaacatatagtatagccaattagaagaattacatttgattttataggacactgaaagttctcattcttgtctagatgatctcatgactgaatttgtttggacacaagtccttacagcaattagattttaatagtagttcccagttatacttgacgagtaatggtcttttaaaaaaatcaatctcaaaaggttgagatgtgccccatcttctcttaccaatctattattatgttacctgtaatctgccaatttctataggtcccc

SEQ ID NO: 66421 - DNA, 1373 bp, Homo sapiens
ttgtaagtcctctgcatttcaccacccctctgtcaccagttctgccttttcccctcttccctgaaaagttctctaagcagggaaaagttgttaagcattttaaaactgttttttaagtttgtttgtttgtttttacagttcccttttttggtgacttacttttcatcttatccttcatttaaagaaggcatcctgaaaagcataatgaacccctcagaatcaatcccacaccctcttttgtcaaatatctccttccctccccataattaagagtttataaaaggaaccaggaagtgtttatccatgatgcttaaaacacaaaaataggaactctaggttttctttctatatggtgataaatttttctcctttctgagtcactagctgattttcagtttagggtaatattatttctacacacctacttaattttaatgtgacaaaaatgagttttgtgcagtgtttcctcctgcaaaaaatgctgcctctctatttatccaatagaccacactgattccaccatgccttttttgttttgcacatgtgattttaagaggtccactctttttctaaactatgaaaagctatataaatattggaaattatagcataagaacaatacaaatatactagtactgatatattcattaacatttrtgcttaacatttatccttcctgatatttgaaagaaaacaagtaattgttaaatgaatgtgtacagggatccatgtgttccttatcttcattcacttattatgctataagtcatagattattaatcagccaaccaccttcttgatattggaagggaggcaaaatctattttctccatgatgaaaatcccaattacttggtgcaaaattaagacccaccaattatataaaggtcacacattcaattcctcacatgtctgtgggaaacatgaaaaagggtcattgcatttaccctctgccatagaagcaccacacttttgtgttgcatagtcagacaccacttaagatactggacttccttcagctacctaaggaagaatcagctaggacccacagtgtttctcaaaggttttcatgtcaagactcatgcacaaaatattttatatgctgactgtattaatgatcagagatgatgctgtataccaggcctctcctggtggtgataagggctgtcagatcaatacctgagctcctgtaacctattcacagtgtcccactggctggaaactctggcctagaaagtgtaggtgattttttactattagaagaaaaactaaagtaaatgcctgattagtggtaggaactactcttttgggagatggctcagaatattgcttcactgatggcaaattgcaaggacaactccattttaggagtgc

SEQ ID NO: 66422 - DNA, 1373 bp, Homo sapiens
ttgtaagtcctctgcatttcaccacccctctgtcaccagttctgccttttcccctcttccctgaaaagttctctaagcagggaaaagttgttaagcattttaaaactgttttttaagtttgtttgtttgtttttacagttcccttttttggtgacttacttttcatcttatccttcatttaaagaaggcatcctgaaaagcataatgaacccctcagaatcaatcccacaccctcttttgtcaaatatctccttccctccccataattaagagtttataaaaggaaccaggaagtgtttatccatgatgcttaaaacacaaaaataggaactctaggttttctttctatatggtgataaatttttctcctttctgagtcactagctgattttcagtttagggtaatattatttctacacacctacttaattttaatgtgacaaaaatgagttttgtgcagtgtttcctcctgcaaaaaatgctgcctctctatttatccaatagaccacactgattccaccatgccttttttgttttgcacatgtgattttaagaggtccactctttttctaaactatgaaaagctatataaatattggaaattatagcataagaacaatacaaatatactagtactgatatattcattaacatttatgcttaacatttatccttcctgatatttgaaagaaaacaagtaattgttaaatgaatgtgtacagggatccatgtgttccttatcttcattcacttattatgctataagtcatagattattaatcagccaaccaccttcttgatattggaagggaggcaaaatctattttctccatgatgaaaatcccaattacttggtgcaaaattaagacccaccaattatataaaggtcacacattcaattcctcacatgtctgtgggaaacatgaaaaagggtcattgcatttaccctctgccatagaagcaccacacttttgtgttgcatagtcagacaccacttaagatactggacttccttcagctacctaaggaagaatcagctaggacccacagtgtttctcaaaggttttcatgtcaagactcatgcacaaaatattttatatgctgactgtattaatgatcagagatgatgctgtataccaggcctctcctggtggtgataagggctgtcagatcaatacctgagctcctgtaacctattcacagtgtcccastggctggaaactctggcctagaaagtgtaggtgattttttactattagaagaaaaactaaagtaaatgcctgattagtggtaggaactactcttttgggagatggctcagaatattgcttcactgatggcaaattgcaaggacaactccattttaggagtgc

SEQ ID NO: 66423 - DNA, 580 bp, Homo sapiens
agtcttatatatgttttgggaaattataatattctataaatttgccttcattaagtggagggcagttggataatgtttatttttgtgccactcatccatcattctaaatagtggtggcacatttctgacaatttactgtacagatgctccttgacttatgatgggattacatcctgataaaccaatcataaaataaagtcaagtcaagccatcctaaactggggactggctgtactttagatcctagagaaggtgacagtggaattacatgaggccttttcttcctttaacccttagaggagttacttctgtttgaaagaagtcttcacatctgcattttcaaacaatgccagacaaataccactagtcaaataaaagagatagccactgctaaaattcatcaatagaaggatctccacaccgtgaatgtagtttcttcttttatacrtacaggcgatttcaaataagtaaaccatgtactcttcagaactggattaaaaccatatcggaaatttgacccttagacatttacgtctggcacatatatgcaggaaatgaagcctttggcaaacttttacta

SEQ ID NO: 66424 - DNA, 607 bp, Homo sapiens
taataatctgagatgataaagaatttctaagcagtcactatcctgcttttaataatgttagaaaaactcaataaatctatttaaataaaaacaaaatacaccaaaaaagatccaatttcctccatctcctgtatttatacgtgaagtttataaaaagsctttattccacaaaagcctaatataattaatgaggccctaagtcattggaaaatataactctagaataaatcaaaagtaactagaatattctattattcaaatgctcaattccatgaggtattcagaatttttttactatgtaccattctccttgttactttttctgaggaagaaatgtgcatagaaaatgtaattttaaagaaatgttttaatgtttttttaaaaaagtaaaaaggaaacaacttgataaatgcaacttaatcaaaacagacataactagaaaatctgaataacccaatttctatgaagcaaactgaatccattttcaaacaaaataatgccacaaaaaaaaaaattcaggccctagtagtttaacagtaaattctatcaaacatttaagaaaatgatcaggccaggagcggtggctcatgcctgtaatcccaacact

SEQ ID NO: 66425 - DNA, 541 bp, Homo sapiens
gaaataaattagatataatgcgagttgttctttttagaatttcatgtctgctcatcatctctcatagtctacttcctctctctttcccctttctatacactgtatagattaaaacagtggaatcacatcttctaaagtcagttcataaagcaaaaatggaatcattgaaatgcgccctaggttagagaccgacataccatctcttggtacacccagcatggtcagtttttcctctaggattgaagcagatccgtttctttggtaaagattctgacaaaaatagttagcaattgggatccaggatgtatgcaaaaatatatatatctatctttaaatattagtataacactcagcttggtgagatacttgagccctaggaagcacacaggaattgagactgccttagggaactgcagaatcctatttctcatctcactcaattctgagtggagtgcagtggtgtgtgagcagagccttgggcactcttttgattgtaaaattttctctgtctgtgccrccttttaggcacatatagttgaat

SEQ ID NO: 66426 - DNA, 667 bp, Homo sapiens
gcagccagggaggatgctgttgaaccagttaggaggctgttgcaagagatcccaggaaaagataatgataatgtggacttggaagatggcagaggagttgcagaaaagtatccagattttaaaggtactttttccgacgtttttcatttcagcaccagctgctgggttttycccttagggagatgcagagccagcttgattgggaagtgcttaagatttagtacccattccaaagaattccatctgtgcccttgaaatgaatattaacataaaatgaaaaatttggtaagttacatcaagctgatttttctgccctggccacagtctctactgttagtaatagctaactttctttatgccaggtagtattcttagcactttatactcatttaatcctaacagtaactctgtaaggcaatttgttgttgttacagccaattaatagaagaggaaactgaggcatggagctagtaaggaaatagtaaaggtatctactaaatagaagtgttgaagattaaatcaggtagtagtgtaaagtatttataaaagtatctggcatatgttaaataataacttgcttcaatttatataacaaacagagagactggaatttgaatctgggtgatccggcttcagagtctgtgcattctttggcctctcaaagttt

SEQ ID NO: 66427 - DNA, 667 bp, Homo sapiens
gcagccagggaggatgctgttgaaccagttaggaggctgttgcaagagatcccaggaaaagataatgataatgtggacttggaagatggcagaggagttgcagaaaagtatccagattttaaaggtactttttccgacgtttttcatttcagcaccagctgctgggtttttcccttagggagatgcagagccagcttgattgggaagtgcttaagatttagtacccattccaaagaattccatctgtgcccttgaaatgaatattaacataaaatgaaaaatttggtaagttacatcaagctgatttttctgccctggccacagtctctactgttagtaatagctaactttctttatgccaggtagtattcytagcactttatactcatttaatcctaacagtaactctgtaaggcaatttgttgttgttacagccaattaatagaagaggaaactgaggcatggagctagtaaggaaatagtaaaggtatctactaaatagaagtgttgaagattaaatcaggtagtagtgtaaagtatttataaaagtatctggcatatgttaaataataacttgcttcaatttatataacaaacagagagactggaatttgaatctgggtgatccggcttcagagtctgtgcattctttggcctctcaaagttt

SEQ ID NO: 66428 - DNA, 667 bp, Homo sapiens
gcagccagggaggatgctgttgaaccagttaggaggctgttgcaagagatcccaggaaaagataatgataatgtggacttggaagatggcagaggagttgcagaaaagtatccagattttaaaggtactttttccgacgtttttcatttcagcaccagctgctgggtttttcccttagggagatgcagagccagcttgattgggaagtgcttaagatttagtacccattccaaagaattccatctgtgcccttgaaatgaatattaacataaaatgaaaaatttggtaagttacatcaagctgatttttctgccctggccacagtctctactgttagtaatagctaactttctttatgccaggtagtattcttagcactttatactcatttaatcctaacagtaactctgtaaggcaatttgttgttgttacagccaattaatagaagaggaaactgaggcatggagctagtaaggaaatagtaaaggtatctactaaatagaagtgttgaagattaaatcaggtagtagtgtaaagtatttataaaagtatctggcatatgttaaataataacttgcttcaatttatataacaaacagagagrctggaatttgaatctgggtgatccggcttcagagtctgtgcattctttggcctctcaaagttt

SEQ ID NO: 66429 - DNA, 717 bp, Homo sapiens
ccttgagttttttcgggtactgatatagaagaagacaccttacagtgtcaaaggaagttgatggattcaccttggctggtaaacagctccagaacctggctgtgctgttattgtctttgtgcattatatgccttcattcaggggaaatgggcccttacactaagataatgttttccatatttaaatattggcatatatgaaccttagagattctgaagtttaaatcatttgttttggcaattacaaaactgagacttgctaacttgattagaaagtcaagcaatttgtagaacaccactcagctaattaatagcagtaaaaagactagatcctagatctttgatttttagttctaccattcactatatcactactagtgaatttttctgatgctttcttgagartatggtctttatagtatgtcaacaattgtaaacttgcagctaaaatagctgatcatatccgtctacagggaggcactacacatttgcgtgaatacttcctcttctatttgaaaagtgtagatttacttacattcttttaaatatatcagcacagactatcaggccgaggatcactgtcttccaacacagtaaacatggacctggttcttgtgctccagagaaacaaatgaaagagcaggcctcaaggaattttgttcattgggatcagtgggatcacaagtatagatctaaagaatggagttccttcagagct

SEQ ID NO: 66430 - DNA, 717 bp, Homo sapiens
ccttgagttttttcgggtactgatatagaagaagacaccttacagtgtcaaaggaagttgatggattcaccttggctggtaaacagctccagaacctggctgtgctgttattgtctttgtgcattatatgccttcattcaggggaaatgggcccttacactaagataatgttttccatatttaaatattggcatatatgaaccttagagattctgaagtttaaatcatttgttttggcaattacaaaactgagacttgctaacttgattagaaagtcaagcaatttgtagaacaccactcagctaattaatagcagtaaaaagactagatcctagatctttgatttttagttctaccattcactatatcactactagtgaatttttctgatgctttcttgagagtatggtctytatagtatgtcaacaattgtaaacttgcagctaaaatagctgatcatatccgtctacagggaggcactacacatttgcgtgaatacttcctcttctatttgaaaagtgtagatttacttacattcttttaaatatatcagcacagactatcaggccgaggatcactgtcttccaacacagtaaacatggacctggttcttgtgctccagagaaacaaatgaaagagcaggcctcaaggaattttgttcattgggatcagtgggatcacaagtatagatctaaagaatggagttccttcagagct

SEQ ID NO: 66431 - DNA, 1815 bp, Homo sapiens
ggggaggaaagtggttgcctcaggggtggggacttgagggtggggaggactcaaytggggagcactgattaaccttggagaactgtttgactttaaaattatgtacatatatgacttgattaaaatcaattctggagggacccatgggtctgggaaaaacttaggagacaggagaggagtggggtgggactaggtttggagtggcagggctggggctgggaactgggctggagctagaggatatacaagaagtgcaggaggagggagtggggagtggggagcttcagatcacactagccaacctaaaaatcactcacataaatgtatcaggaggggtctagaactgtgcttgccacataataggtgcttagtaaatatttgttgggtaaatgaacaaatgattgcatccttacagatgctgcagaagtcctctccagttagactgggatacccttgtcttctctgtctgaataaagatttgcttagagaggagatctattcattaagtagtattttatttaaaacttactatgttccaggaaccattccagagattgaggatagagcaatgacaaaacaggtagaaattcctgcccatgtggtgttatgttttcagggaagaagctgacaattaactaggcacatacacacatttgacattgttccaaaacacattatgatattaactcgcttaatctgcacaacatgatgggaagatactattacttttcctgatttacagatgatgaaacagagtcacagagagggtaagtaactttctcaagatcacacagctaataaacacgtggctggagctgaactgggacacctgggctccagggcgaaggctctcttgaccaccatgctatgctgcttttgcaagctcactctccttcccaaaaaggagaatgggggggagtttctaaagacaaatcaggcacagactctgccctgccatggcttgcatcagggagagggcctgtccaccaactggtggaagcaaagtgagaatggctgggcagggagggggaattgctgggccagtcagctggtcactctagagtctctgggggcctggatccatagcagggagacacagatgtgcacacacctcttgctacaaatcaaacactgacctttggtcctgcttctccacagcgctgggggaaatgagcatatgcatttaaaacaaaaaaaagccaatcttaggcaagatttgtattgataaaagtttgtctttttggatgagggcaagaagtcaatggcagatgttgatgtcagcagtatttccagggtggagtttggtgtggagacaagcataacttattatttttattgtttttgcccccagctgctttaaggtttgagctgaatgcctggagttcatgctgatgagtgggctggagactagggaggaggaaggggctcagacttgagccagggactccatgtcccctctgctgagaaccatctgggaagtcgagttcacctgaaggctgagctctagcctcagggacatttgggagtcagggtgcctccttcccactgtgcagttgacattcatcttttaatctggtggctgtcacaccctgtgaagctgaaactgcagtgccaccacccacttctataaactgaggtgtgcctggtgagagatttgggcttctaagtcacaggatttaactcagtgtctcctgccagcaaacctgaatctgccaacaatcataatacaaatccccctacattgatatagcactttctacctctccccgggctttcacatctgttatctctgtgaaatagtaattcctttctcct

SEQ ID NO: 66432 - DNA, 1815 bp, Homo sapiens
ggggaggaaagtggttgcctcaggggtggggacttgagggtggggaggactcaattggggagcactgattaaccttggagaactgtttgactttaaaattatgtacatatatgacttgattaaaatcaattctggagggacccatgggtctgggaaaaacttaggagacaggagaggagtggggtgggactaggtttggagtggcagggctggggctgggaactgggctggagctagaggatatacaagaagtgcaggaggagggagtggggagtggggagcttcagatcacactagccaacctaaaaatcactcacataaatgtatcaggaggggtctagaactgtgcttgccacataataggtgcttagtaaatatttgttgggtaaatgaacaaatgattgcatccttacagatgctgcagaagtcctctccagttagactgggatacccttgtcttctctgtctgaataaagatttgcttagagaggagatctattcattaagtagtattttatttaaaacttactatgttccaggaaccattccagagattgaggatagagcaatgacaaaacaggtagaaattcctgcccatgtggtgttatgttttcagggaagaagctgacaattaactaggcacatacacacatttgacattgttccaaaacacattatgatattaactcgcttaatctgcacaacatgatgggaagatactattacttttcctgatttacagatgatgaaacagagtcacagagagggtaagtaactttctcaagatcacacagctaataaacacgtggctggagctgaactgggacacctgggctccagggcgaaggctctcttgaccaccatgctatgctgcttttgcaagctcactctccttcccaaaaaggagaatgggggggagtttctaaagacaaatcaggcacagactctgccctgccatggcttgcatcagggagagggcctgtccaccaactggtggaagcaaagtgagaatggctgggcagggagggggaattgctgggccagtcagctggtcactctagagtctctgggggcctggatccatagcagggagacacagatgtgcacacacctcttgctacaaatcaaacactgacctttggtcctgcttctccacagcgctgggggaaatgagcatatgcatttaaaacaaaaaaaagccaatcttaggcaagatttgtattgataaaagtttgtctttttggatgagggcaagaagtcaatggcagatgttgatgtcagcagtatttccagggtggagtttggtgtggagacaagcataacttattatttttattgtttttgcccccagctgctttaaggtttgagctgaatgcctggagttcatgctgatgagtgggctggagactagggaggaggaaggggctcagacttgagccagggactccatgtcccctctgctgagaaccatctgggaagtcgagttcacctgaaggctgagctctmgcctcagggacatttgggagtcagggtgcctccttcccactgtgcagttgacattcatcttttaatctggtggctgtcacaccctgtgaagctgaaactgcagtgccaccacccacttctataaactgaggtgtgcctggtgagagatttgggcttctaagtcacaggatttaactcagtgtctcctgccagcaaacctgaatctgccaacaatcataatacaaatccccctacattgatatagcactttctacctctccccgggctttcacatctgttatctctgtgaaatagtaattcctttctcct

SEQ ID NO: 66433 - DNA, 1013 bp, Homo sapiens
aagaacaaacaagaacaagaccgattttatacattctagttctccagaatgccgcaaaatgcatgtcactcctgcccatagttgaaaggaaactaagaaagaatcaatagcaggacaatccatttgttctttctccattgcactaaagactccctttgctggcctgcattctgtattggggtcagaacaggttctctcatcaggctagtatgtttcaaccttgggattggtagggaggagcacatctgaattttgaagattgagggataatagcttgaaaatgaagtgctctgtttcatcactttttttttttttttcagttcatggaaatctatttagaaaatttaactttatagaaaaacatgaaaattttatgttttatcaaagaagacatagcatgggttaaaaaaaggttgagaaaatctggtttaagtcattgattaaggactctgatggacagtgctcaataccttggcaggtgtggtaataaaatcttggctttctttttcacttcctctcatgtatatgcctatccttaagtctttggttttgacggaatggtttgtatttctgtacgttgtctgcattaacyttaaactctaacaacaaagtagctttattagcggctaaatttcaccaacatcacaatcgcaattagcacagtttaaaccttccttttctttccactgtttatggcaaattatacttttgtgaaacccaatttataccaaatatgtaaatgtaaaaatagtaggaatgaactttctctttcattcgttatttcatccaacaaaacactgagtgtctattgtgtggcaggaacacaagctgttcaccaactcttactcaacagtcacactaacctgtgtgagaatagatgtaccacaaggcccccgtcaggagtgctccgatcacaaaggctgcaaacgcaatgcccatcacggttagggtgtccagaccatggaaaattgctataaaggagagaaaccgatacacacaactttttggttagt

SEQ ID NO: 66434 - DNA, 661 bp, Homo sapiens
  misc_feature (1)...(661): n = A,T,C or G
tttgttttgctgaagcccaaagtggtgtgtgtttttacctgtatttatgtgagggttgaagttggaaaagtaaattggtgggcaaacaaaggagggtttaccaatgtgctaagggattttaggtttttaaaaatatagtcaatagagagtttttgaagattgttttaagcaaatgaatggaaaaatggctttcagttaaacatgacaaaatatttacagaatatatactatgtacgaggaactatgctagrtgctggggctataaagataaatgagacctgagtttttttttcactgagcatgtagtgtaataacagaggcagacatataaataacaactgcagtagtagaagtgtgtacaaacttcactgattaaaaaaagctacaaactctatttggagtatgtgcatggtgggggaggagaatttcacacataaagaagtgctctttaggctaataaggtaagggagggcatatagggagaaggaggaaaatgcaaaataatttaagtaggaagcaacagattgtgccgtgagaacaaccagtggtcaatatttctgaagcccgaagtatgtatgcatgtatatgtgtgtgtgtgcatgcacgtacgtacacagatgtgatgtgtactcacantgtgcattggggaggtttagcaaag

SEQ ID NO: 66435 - DNA, 630 bp, Homo sapiens
aatcacctcccaccaggccccacctctaatactggggattacrattcaacatgagatttgggtggagacaaacatacaaacaatatcatgctccatggtgccaagtcctgggtcagagtcaggtggctgagtgctctgcaagcctgaagggaggcctgagagctgcattaagatggcctttcaaactcctcagaattttgtttgaatgtagaaccttttgaataattgtcacagtaatgcctcatctttgttttagcagtgtttaagaggccgaggcaggcagatcacaaggtcaggagttcgagaccagcctggccaatatggtgaaaccccgtctctactaaaaatacaaaaaaaattagccgggtgtggtggtgcacacctgtaatcccagctactcaggaggctgaggcaggagaattgcttgaacccgggaggtggaggttgcggtgagctgagataatgccactgcactccagcctgggtgacagagggagactccatctcaaaaaaaaaaaaaaaaaaaaaagtggtaattattatgtttaccacagttattttttaaggggggaaaaatggtaattcctgaatatgcagtgaaaggggttggttaaataaattatgaaaaca

SEQ ID NO: 66436 - DNA, 1023 bp, Homo sapiens
tgcagactaaccaaaaagttgtgtgtatcggtttctctcctttatagcaattttccatggtctggacaccctaaccgtgatgggcattgcgtttgcagcctttgtgatcggagcactcctgacgggggccttgtggtacatctattctcacacaggttagtgtgactgttgagtaagagttggtgaacagcttgtgttcctgccacacaatagacactcagtgttttgttggatgaaataacgaatgaaagaggaagtcattcctactatttttacatttacatatttggtataaattgggtttcacaaaagtataatttgccataaacagtggaaagaaaaggaaggtttaaactgtgctaattgcgattgtgatgttggtgaaatttagccgctaataaagctactttgttgttagagtttaargttaatgcagacaacgtacagaaatacaaaccattccgtcaaaaccaaagacttaaggataggcatatacatgagaggaagtgaaaaagaaagccaagattttattaccacacctgccaaggtattgagcactgtccatcagagtccttaatcaatgacttaaaccagattttctcaacctttttttaacccatgctatgtcttctttgataaaacataaaattttcatgtttttctataaagttaaattttctaaatagatttccatgaactgaaaaaaaaaaaaaaagtgatgaaacagagcacttcattttcaagctattatccctcaatcttcaaaattcagatgtgctcctccctaccaatcccaaggttgaaacatactagcctgatgagagaacctgttctgaccccaatacagaatgcaggccagcaaagggagtctttagtgcaatggagaaagaacaaatggattgtcctgctattgattctttcttagtttcctttcaactatgggcaggagtgacatgcattttgcggcattctggagaactagaatgtataaaatcggtcttgttcttgtttgttcttggatcc

SEQ ID NO: 66437 - DNA, 1023 bp, Homo sapiens
tgcagactaaccaaaaagttgtgtgtatcggtttctctcctttatagcaattttccatggtctggacaccctaaccgtgatgggcattgcgtttgcagcctttgtgatcggagcactcctgacgggggccttgtggtacatctattctcacacaggttagtgtgactgttgagtaagagttggtgaacagcttgtgttcctgccacacaatagacactcagtgttttgttggatgaaataacgaatgaaagaggaagtcattcctactatttttacatttacatatttggtataaattgggtttcacaaaagtataatttgccataaacagtggaaagaaaaggaaggtttaaactgtgctaattgcgattgtgatgttggtgaaatttagccgctaataaagctactttgttgttagagtttaaggttaatgcagacaacrtacagaaatacaaaccattccgtcaaaaccaaagacttaaggataggcatatacatgagaggaagtgaaaaagaaagccaagattttattaccacacctgccaaggtattgagcactgtccatcagagtccttaatcaatgacttaaaccagattttctcaacctttttttaacccatgctatgtcttctttgataaaacataaaattttcatgtttttctataaagttaaattttctaaatagatttccatgaactgaaaaaaaaaaaaaaagtgatgaaacagagcacttcattttcaagctattatccctcaatcttcaaaattcagatgtgctcctccctaccaatcccaaggttgaaacatactagcctgatgagagaacctgttctgaccccaatacagaatgcaggccagcaaagggagtctttagtgcaatggagaaagaacaaatggattgtcctgctattgattctttcttagtttcctttcaactatgggcaggagtgacatgcattttgcggcattctggagaactagaatgtataaaatcggtcttgttcttgtttgttcttggatcc

SEQ ID NO: 66438 - DNA, 1023 bp, Homo sapiens
tgcagactaaccaaaaagttgtgtgtatcggtttctctcctttatagcaattttccatggtctggacaccctaaccgtgatgggcattgcgtttgcagcctttgtgatcggagcactcctgacgggggccttgtggtacatctattctcacacaggttagtgtgactgttgagtaagagttggtgaacagcttgtgttcctgccacacaatagacactcagtgttttgttggatgaaataacgaatgaaagaggaagtcattcctactatttttacatttacatatttggtataaattgggtttcacaaaagtataatttgccataaacagtggaaagaaaaggaaggtttaaactgtgctaattgcgattgtgatgttggtgaaatttagccgctaataaagctactttgttgttagagtttaaggttaatgcagacaacgtacagaaatacaaaccattccgtcaaaaccaaagacttaaggataggcatatacrtgagaggaagtgaaaaagaaagccaagattttattaccacacctgccaaggtattgagcactgtccatcagagtccttaatcaatgacttaaaccagattttctcaacctttttttaacccatgctatgtcttctttgataaaacataaaattttcatgtttttctataaagttaaattttctaaatagatttccatgaactgaaaaaaaaaaaaaaagtgatgaaacagagcacttcattttcaagctattatccctcaatcttcaaaattcagatgtgctcctccctaccaatcccaaggttgaaacatactagcctgatgagagaacctgttctgaccccaatacagaatgcaggccagcaaagggagtctttagtgcaatggagaaagaacaaatggattgtcctgctattgattctttcttagtttcctttcaactatgggcaggagtgacatgcattttgcggcattctggagaactagaatgtataaaatcggtcttgttcttgtttgttcttggatcc

SEQ ID NO: 66439 - DNA, 533 bp, Homo sapiens
tcccatctcagcttcctgagtagctaagactataggcatatgccaccactcctggtcccytcatcctttcttttccttttctttgctcttttcccacatccaattcgggaagtgggagttggcaatactcaattatccaataggcagataaacatgcgcttaaggtccaggaaggcaggaatacccccaaaattgtttgaaaagtatctcatatcatatatatcatcacatacacagacacatgtattagaaaaatcatacctttgtttaccttgttaacactttgtggcttagtgtagtttttcttttgaattacatgagggtcgtgaaaaccaacaccattatcttttcatgttttctgagcttacagctgctaaagtccttgggtaacagtggtgagttttgagaagttgtgcttggagttagggagggagacaagctttcaaatgtaaacccatgtctaatacctacactaatactggagaatgttggtagatgtgagttgtttcagctactttgagaggcagtagtat

SEQ ID NO: 66440 - DNA, 817 bp, Homo sapiens
tggcaacagccaatccacatcccagttctctaccacgtgcctttattattgatacagagaatggcagccatgtggctcctttgatcttttggtaaagttgtattactcatgcaaccctcagtgcatagtggatttttctctttctctttctccctccttctccttctccctctctctctctcccttagacagacagacagacacacgcacgcacgcgcacatgcacacacacacacacacaccccaccaccaccgccatcacgaaaaacacagaatgtcatcactgtagattaaactcatttagtaactaacccatgctaaggaattttctgagtagtgttgcagtctgtggctctttctctcttagtttattttctatttaatagtgcatttctccaattctaggatgtacattcctttcttttcatttgttcctatttctgaaattctgaaacagtgatgcacctcrcagtcagtggcttctgacccttgatggagtccgacggggcttttccctgagcatgcttttatgtatataggtaaatctaaatgaatactgactgaataaagaaaaaacactaacaaaatattgtggtgcttatatatgtttaatatataattttatatgtttttatatcttacataatagtatatgtatattatatataatttaaaataaagccaacaatagtactacagtactaaatttgtagattgtaatcagaattaatatgtttgaggttcttatattttccagaaagtgtagaactaacttacatcaaattccagtaagttcaggccaggtgcggtggctcac

SEQ ID NO: 66441 - DNA, 1683 bp, Homo sapiens
ccttctaccctccacatgtcaagtttggtcctaaggctcatctcctcatggcgcacgagggttgcaccagctccagccatcacctcctcactagctatgtccagatgtagagaataaacatttccttctagagtctctttttaagactaaagaaaccgcttcccaaattccttctgtggacgtcccctctggacttatgaacttcagcctgtgtctcttcctaacgacacttggcaaaaggaattgattgctctggttggctaagaccaggggtggcaaacgatggcccggggccaattccatccgccatctgctcttgtaatagccacatccttgtgcttgcttgtagtctatggctgcattcacactacagtgtcagagattatatgcctaaagtatttactagttggtcctttacagagaaagtttgccagccctggtttggactcagatggatgaccagggcaggacagggccatccgtgagcacatagagaaaggggttggtgtcgggggtggaatcattcaggtgggaacacagaggtatctggttcaaatctggctttgcctctgacaagccatgtgtccctggggaccccctaatctctctgaggcttagttcctccgtctgtaaaaagtcaaacctttcaccgtttctgtgtggattaaacaaggtaatagacacaaagcacctggcacggaatagaccctaagcgttatgttccttttaagcctttcctaatggattctatgctgttagactcaccccaaaagagaggctgccacagggatttgcggtttgctaattggaatccaaacattgcttctgctgttacaaaagccaagttacccaaagtagaattggttttaggagcttttttgaaactagaaagagctgacaataaaaactccaaaggagacttgtgcaactggtgatcatgggtgggaaggggtggacgggatgtcttttcttgagggttttaggatccaagagtgttttgctcccagagatctttgttgttcgctgcatgtcaaggcagggggctgagcaggaaggwttgctgaagacgtcctggtgacacgcattgaaggctggggtccccaactccaagccctgagaacctcttataatatcctggccaccccctattttggaagaaaatggctaccaaacaaaatgttttcattaagtcattaattttatttgtttttttttttaaaccgatcaaaaacatatgtattagccaatctggacttctgctgagaccagaaagcaagagacacagggtaaaaagaagaggctgtgggtctagacagacctgagtttgcatcctggttttccactttggctgtgtacacctggggcaggagacctcaggtctccagactcactttcctcatcggtaaaatggggatcagaacagcacctccttgctaaggttcttgaaaagatttgataagcccagttaggaggtaatatgatgatgcaggaagggcgtcagggcctggtgtatagtagatgctcaacaaatgtcagagactatgttttctagtatatatatggctccagcactgcaaggcagatactaatgccatttttcaaaagaggataccaagactcagagaggtaaagtaatttgttctacgtcacacagccaggaagggccagagcacaagtctgggt

SEQ ID NO: 66442 - DNA, 757 bp, Homo sapiens
agggtctacagtgcagggtctatggtgcagggccctggcctgcaatgggactgctttttaatgtgttcatgaaaggttggcccccgtacttgcacacgctgttgggacacccacctgccctcctgggctgctttcctgcccaccaccaggatgcaggtgaccacgaggcctgtggagatgatgtagtctcagcgggaggcagcacgggcctgggcaccatgtttgaaccttgtccagccatgggaacatccacctggaagcccaggtgagagcgccggagcctgtgcgggtgaccccatgtgctcagccagctccgtggccctggtaccacgggtgagggtcctgacctgcttccacgtgagagcaccaggtgaggccctctgctctgctgagcagggctggcccacctaatcccctaggatacacccacacctgggcctggggcctctgtgggtaaatggagaagggaggaccatgcaaacaacaggaaaataacaagcattgctggagatgtggggaagccggggcactgctggtgggaatgcggaaaggggcggccactgtggaaacagcctggtggctcctccaagaattaacgatggaattaccataggatcgacagtccctcttcggggtgtatccccaaaagaattgaaggcagggtcttttatttttttcagaatctcgctctgttacccaggctggagtgcaatggcrcaaccatagctcactatagcctcaacctcctgagctcaag

SEQ ID NO: 66443 - DNA, 2458 bp, Homo sapiens
gcgcactagtgtctgtgatgagacgccatagcacaggcactggggtccagcacatggagtctcagatgggcttcctgcctgggttgaagggtcgttctctgctagggacagccatcggctccttctcaaagcctccaagagatgtgtctgtcggcgtctcagccacgcatccctgtctcagggacttgcctgagcacagggccgggcctggtgtctgcagctctgacagcacccaggggatgcggattgggccacactttgaggaggactggactgtgacgtgcctttcacagaggaaggaaggacaggcaggagtcgaggcaaggagtcgagacaaggcgagcctgttgccagcgagtcacagagttgtgcagggtctgccgcagagctcccagtgcactccaaccctgccaccggaccrgctaggccagacccccagggagccgagcaccccagctttacagttttcccaggtggttctgagtcactgagccacaggcaagcctggagccaggaacagctatggaggatccagatgcagatgcactgaagcccacacctgccccccagtccagcccagtgagtgtgcatgtgtgtgcatgtgtgcacctgtgtgcgtgtatgtgtacctgtgtctctatgtacatctatgagtgtgtgcatgcatgtgtatgtgtacatgtatgagtgcgtgcatgcattcctgtgtctgccagtgtgtgtacatgtatttgtgcgtgtgtgcatgtatgtgttcacatctgtgtgtgcacatgtgtgtgcctgtgtgtgcatgtctgtgcctgtgtatgcacttatgtgtgcctgtgtgtgcatctacctgggtgtgcacgtacatgtgcctgtgtgtgcatctacctgggtgtgcacgtacgtgtgcctgtgtgtgcatctgagtgagcacagatgtgtgcgcatctacctgggtgtgcatgtatgtgtgcctgtgtgcaggcacctagttgccaaacagatcacgccgactcactagtgatatgtcaacaataaaactggattgtcatctttgtagagcagtagttctcaaagtcagttcttcatcagaaatctaggggccaggcctccaggcagctgtgacacagccaacggccaagagctgcgggtattgatcagactgcagggcgtcggtcctcccaaaaaggtgggcacagcttgtccatcagggttgtgggtgcggggcagctgtgtggggccccttcctctcccaccacgacgtctgctcacacagggtctgtgtgcctctctgggtgttcacctgataatacagacctggtggcccagtcttcactcacaagcataggtcccaggctgcttaccagcatgtgaactggctgtgttgcagtcaaatgctcggccccagtatagtcagcgttcactgggaagggtcaggtcttgtgaagccttgagcaccactgggcaggggtggccctcaggactgggccatccacgggaataacatgaattagaaaacagaacactactaaatatttaaaatttttagccaggtgtaatggtgcacccctgtagtcccagttactcgggaggctgaggtgggaggatccactgagcccgggagatggaggctgcagtgagccatgatggcaccaccgcgctccagcctgggcgatggaagaagaccgtgtctcagaaaaaaaaaaaaaaaaaaaaaaccttaaaaataaaagtgttttaaaagctctctaatgtttcttttcatgcttattgttggagatagctgcaccgaaagaccacactctgagtcactgctgtgtcaaattaagtcagggctgctggataacagctgttctattgctgtcactgatttctggtgtatcaaaaacagtccaaataaaacataaatgggatgagaaggggctggaaaccagaagaaatggtgtaacatgttgcagacttcaaaaacggagccacagccatggttttcccatctagcactcaccctctatagctttgtttccttaaagtaaacgagtctgaggaaaaaatggcacacaactttgaaccatgctattaagcatttttaaacagttcttccgactttcccctggtgctcagctctgtcacaggaccaaatgctggccgagcactagggcctgggtggaccaggatctgtgatatttgtgtaaacaatttagtactttaggcctagaatgcttccttctcaaagggctccttcgaccctcactactccgtaaaatgggcaggggacagctgctcatgcacattttaaacaagttcaaaggatgcagagagtagaagattcaacccaggtgttcagaggcaacagtgaataaaagtcaggcttggaaccagctctgagagttgaaggaaaataaattcaatattaaaaaaccaaccatatttctatatgcttgcaatgaacagttaagcaatggaaaaa

SEQ ID NO: 66444 - DNA, 602 bp, Homo sapiens
tcctttcacttcaaccccctaaatggctgggactacaggtgtgtgccaccacacccagctaattatttttattttttgtagagacgaggccttgctatgttgcccaggttggtctcaaactcctgggctcaagcaatccttctgccttagcctcccacagtgctgggattacagatgtgagccattgtgcccagccagaatcgctattattaaaaagtcaaaaaacaacagatgctgggaagctgcagagaaaagggaatgcttatacaccgttggtgggaatgtgggccctgcggtcctggcctacagggagacgccatcctacaaaataaaatgtagaaatgaacactccaccccgtcccacgtggctgcaaacatcagagtcctttggggatcagctgtgcacagtaagccagcagtactccgatgtccccaggacagaagtgtggaaccacagcaattagccactctacccacaacttccagcctgtgagccagggacaaggatgaygagcctcagcctccaggggcgtgaacccggtgtgctgccccaggtctcacaagaccccaggacacagctctggcctgtagcagccaggacc

SEQ ID NO: 66445 - DNA, 2064 bp, Homo sapiens
caattttgttcagggacccctctctccagtcaccatgcaccttgggggaggtggccccactcctgagcccaggatggacctcactgacctgaaagccccttccccgtgacggcgtttggatcctaaatctagccagtaagatgtgcaatttactggcaacttgtttccttattcccaaagccacacaaaaagaaactcgtctccccacccccaccccgaggttaagatgtctggctgcaacactcccagctgccgcacactcctgctgcctgccaaggacgctgccaccacggtggcccggcccgacagcagcatggagctctgccttcctctgcaggggacagtacattgcacctgcccccgggcccaggctgcggcctctgtgcttccaggctgatggatttcagctggcatggaaagtgcggcattgcacgaagtagaaaggtgtgggcctggaagaaactacccagtagcaaagggcagacactgaagagggcactgcccccactggcctcaggaaacgggaggcgcagcagcaggagaaggtcaactgggagctgagagcacgagaggactgagaattggcaaattacaatctccaggaaggcaaagagaaaaaagaaacagagcagcagggaagagaaagggcagatgtaattggtccatacgcaacagttagaagactgaggctggcagagtggattacaaacacccaccactccgtgctgtccacagacaactcccttcagacagggcacaggcgggctaaaagtcaaaggatgaaaaacggcacgttacaccgacaggagtgaaaaagaaagagctggaatgcctttgttactgtcaaaacttcagagcaaagacaattacttgggtccagggtcctaatgacagatcagtccaacgagaagacacggtgatcctaaatgtgcatgcgtggagtatgtcccgttaggacaggggtgaggaacaggctgcggctgcccacacttgtaagcgccccacatttctgcacgcgtagctaacgttagagagagtctttctatacactcacatcctatgtagtaaacacagtgagcttcggctgggaaaagcggatgctccggccgaggaaatcctggtcgtgaatgaaaatgcatctctgtgggccctcacaggcccacgcagaggtgaatgaatttggctgtcttctgcatctgcatctcctggacgctcactgatctgccccagggcctggtggttgctgtcccagcttggtcctgcaagcccctctgggtggagctgctcaccccgtgctccggggctcacgcctgcagggaggcccagcctgtatcaggatcctcttcacaacctcctgaccccaccgggcggccctgcggccctccagctccaccagggcagggctaagcctctccggctggcctggcatatatgctccgagacatcacacacttggmtatggcctgggctgacataagttccataagcacctgaaggctggtgcacgagggtctctggctaagccactgcacgcttaggctgtgcccttccttcctggcctatggtctcacctgctgtccctcctctccgtggtggagacacccacacaccttcgtctaagcagaccagcagttgacttggatcggaaacggcttgtgcccaagcaggcccagcaacacacgtggtccttcttcagttggttcaatccaatgctttagagaaacacgggattttagcattattaaaagatgtggatatagcaaggaatggaatacaacaacttcagactttggtgggtggaggcggaatacgtaaacctctgacagccatgaggagaccgagccctggctctcttgtgggacctgctgaccccagcagagccctgcagacaatccacagatacacggtggtcacttccatccagggagttctggcagggtttgttatgtggcaacagcaagtcaatacctcatcctagttcttcccagggcagtgctgtgcacagagaagacacaaaatatacttcgagttaatacacatttaccgagtatctgctaatttgca

SEQ ID NO: 66446 - DNA, 2064 bp, Homo sapiens
caattttgttcagggacccctctctccagtcaccatgcaccttgggggaggtggccccactcctgagcccaggatggacctcactgacctgaaagccccttccccgtgacggcgtttggatcctaaatctagccagtaagatgtgcaatttactggcaacttgtttccttattcccaaagccacacaaaaagaaactcgtctccccacccccaccccgaggttaagatgtctggctgcaacactcccagctgccgcacactcctgctgcctgccaaggacgctgccaccacggtggcccggcccgacagcagcatggagctctgccttcctctgcaggggacagtacattgcacctgcccccgggcccaggctgcggcctctgtgcttccaggctgatggatttcagctggcatggaaagtgcggcattgcacgaagtagaaaggtgtgggcctggaagaaactacccagtagcaaagggcagacactgaagagggcactgcccccactggcctcaggaaacgggaggcgcagcagcaggagaaggtcaactgggagctgagagcacgagaggactgagaattggcaaattacaatctccaggaaggcaaagagaaaaaagaaacagagcagcagggaagagaaagggcagatgtaattggtccatacgcaacagttagaagactgaggctggcagagtggattacaaacacccaccactccgtgctgtccacagacaactcccttcagacagggcacaggcgggctaaaagtcaaaggatgaaaaacggcacgttacaccgacaggagtgaaaaagaaagagctggaatgcctttgttactgtcaaaacttcagagcaaagacaattacttgggtccagggtcctaatgacagatcagtccaacgagaagacacggtgatcctaaatgtgcatgcgtggagtatgtcccgttaggacaggggtgaggaacaggctgcggctgcccacacttgtaagcgccccacatttctgcacgcgtagctaacgttagagagagtctttctatacactcacatcctatgtagtaaacacagtgagcttcggctgggaaaagcggatgctccggccgaggaaatcctggtcgtgaatgaaaatgcatctctgtgggccctcacaggcccacgcagaggtgaatgaatttggctgtcttctgcatctgcatctcctggacgctcactgatctgccccagggcctggtggttgctgtcccagcttggtcctgcaagcccctctgggtggagctgctcaccccgtgctccggggctcacgcctgcagggaggcccagcctgtatcaggatcctcttcacaacctcctgaccccaccgggcggccctgcggccctccagctccaccagggcagggctaagcctctccggctggcctggcatatatgctccgagacatcacacacttggatatggcctgggctgacataagttccataagcacctgaaggctggtgcacgagggtctctggctaagccactgcacgcttaggctgtgcccttccttcctggcctatggyctcacctgctgtccctcctctccgtggtggagacacccacacaccttcgtctaagcagaccagcagttgacttggatcggaaacggcttgtgcccaagcaggcccagcaacacacgtggtccttcttcagttggttcaatccaatgctttagagaaacacgggattttagcattattaaaagatgtggatatagcaaggaatggaatacaacaacttcagactttggtgggtggaggcggaatacgtaaacctctgacagccatgaggagaccgagccctggctctcttgtgggacctgctgaccccagcagagccctgcagacaatccacagatacacggtggtcacttccatccagggagttctggcagggtttgttatgtggcaacagcaagtcaatacctcatcctagttcttcccagggcagtgctgtgcacagagaagacacaaaatatacttcgagttaatacacatttaccgagtatctgctaatttgca

SEQ ID NO: 66447 - DNA, 758 bp, Homo sapiens
acctaactggaaagtgccaatgtttctccaaagtttatacacaggaaggtgaatccctgcatcagtagattctagagaaaatatgtcagaagtgaaagcaggtcaaaggatgaaaatgaattcaggctgacacaaaccccagtccagtctgtgttgggcattccgcttgcttctctgctccacgcgacaggtgcctaattttagcttagcttttcccagttaggtgtccttggcagtaagcttgttacctactgagcagctggctgttgtatgctctctgtaacctagtattgtgaatatgatgctcaaaatgatcctgcaaagctctaagttacacatggccactatgatggcaaagcggttttaaacatctgcacgtttctgaggtgaacacagcttttcagaagataagcattattagagagacagccttccccaaaaatgtatttaaatctcaactygtagaagcaaaagaggcaggcaacaactgcccagatgtgggagttacaaaatgacatcacccacagatgggacttgacttggaaggcagtgttaaaatcctctaggatctgagcacctctgggtgaggtctgagtactgctcaggtcccatgggcgtggttaggcccgaggctcacacacttttacagaaaaagcgtctggacctttctgaggtcctgagagcacgtacataagacgatgggcgtatgctctgtaatcaatacaacactgggccacaagccgaagcttcaaagcagg

SEQ ID NO: 66448 - DNA, 742 bp, Homo sapiens
caggggatataatgggagatctctgtactttgcttacaattttgctgtgaatctaaaactgttataaaaaataaagtctacttctaaagaaaggactcaattgttaataaaactaataaagtatgtgtgggacatctaaatagacactactgcaaagaagaaaaaggaaggcaaataagctcatttaaaaaatgctcaacttcattaatcattagagaaacagatgttaaagcctcaacaagatatcactatatagttattagaaaacataaaattaacatgattgcatacsaagtgtcagaaggatatggggcaactggagctctcatccctgctggtggtggccaaccgtaaaatggtccaaccactttggaaaacaggcaggtggtttcacagttgctcacacacctaaccacacaatccagacattccacttgtggctatttacccaagagagagggaagcacatggtcacacggagacttttacacaagtgtccacagcaatttgtagtggtcaaaacccggcaataacctaaatgtctataactgctaggtgcataaaccaactgggaatacccatttgagagaatacttcccagcaaaaagaagcaatcacctactaatccagtaaacaacaatagttatgccagaccaaaagaaagtgatattgcataatcgactccatttacatcaaatttgtaaacactgcaagctaatccgtagtgacaggaagcaaatca

SEQ ID NO: 66449 - DNA, 833 bp, Homo sapiens
ttaccgggacccctggcatcggtatttatgggaaaaaaatgggaaatgtgctgtgtgggctaagatggcataattgaattagggataatcggatttctccgtcatgaatttcactataattttcctataattttccattagatatctagtttacaaatattcacaaagaaatgaagctctttcggaatggagattgctggctaacaggattacggggccgagcgtgcggctgtgccagcccctctcctgccataatgcaatccctgcgtctgccttacactcggcgcggccctcgctccgccacccactctgtggctcctttctcccctttgtttccttctcatcctgttgaccccctgccccaacacccacctgtctgtggcccacgacctcccgtgcccrtggccatgccgtggtgccttggctctgccctccctcggcccccatgcttcccgtccacttcgctggctcacagctttcccgacaccctccctccatcggccccggagcgggctcacacgcaaacacacggactccctcgcaggtgcgaacatgcttgttcgcaggcacacgcagtcctttggccaaggcttctgtgccctggcccagtcgcctcagatggaaccagtttattgggatcctggggtggggtgcaataacaaaaggagctttgttcaagtttatgtgaaagttacaaattcaaaatgagagcagataaagcatgagatacctggtgtgtaaacaggctggtgagtgagaaggccccaggctcgggagggagagagtgtaggtgggcaacttgggggtggggggggggtaacaggaaccagcga

SEQ ID NO: 66450 - DNA, 693 bp, Homo sapiens
atactgagttmtgggacaccatgcagtcatgcccagggctcaccacatgggggagttaattccttgtggagctaatatttgacaaataagaaacgagagctggtggattaattcttgcctcttccccgctccccaccgcagacggtcctacttacaacgcagctcagagcacagttctgttgcattgagctatcccctgcacttagcagcagcctgtccctcacacctcctaggatggctctccctcctcttcccattctcttattcctctgctctgagatcgaactccctttaacaatagcacattcaggctttgcgttctagggaagtcagggtaagacaggacctaatgtggaaagtgagtgtggttgggaagagcaagggattgtgtaggaacctgaagccagcaacacggaggctgtcacaacccctggcttgaagagacaagggcagggagcatttagcaaaaaccagatggggagaaagtcatcttaaaatgatctgaggccttccattgtggggcacagacaggaaggtaggaaaggaaatatccagtccacagcctgtcccctccctcaccctctcaccagggagcctcattcactggacataatttggagccagcggacagagatgggctggggtggggcaggaatgggagaagagtggctggaaggacaaatggaaattgtt

SEQ ID NO: 66451 - DNA, 693 bp, Homo sapiens
atactgagttctgggacaccatgcagtcatgcccagggctcaccacatgggggagttaattccttgtggagctaatatttgacaaataagaaacgagagctggtggattaattcttgcctcttcccsgctccccaccgcagacggtcctacttacaacgcagctcagagcacagttctgttgcattgagctatcccctgcacttagcagcagcctgtccctcacacctcctaggatggctctccctcctcttcccattctcttattcctctgctctgagatcgaactccctttaacaatagcacattcaggctttgcgttctagggaagtcagggtaagacaggacctaatgtggaaagtgagtgtggttgggaagagcaagggattgtgtaggaacctgaagccagcaacacggaggctgtcacaacccctggcttgaagagacaagggcagggagcatttagcaaaaaccagatggggagaaagtcatcttaaaatgatctgaggccttccattgtggggcacagacaggaaggtaggaaaggaaatatccagtccacagcctgtcccctccctcaccctctcaccagggagcctcattcactggacataatttggagccagcggacagagatgggctggggtggggcaggaatgggagaagagtggctggaaggacaaatggaaattgtt

SEQ ID NO: 66452 - DNA, 642 bp, Homo sapiens
ggccccagctccctgctcctcagatgggctcattctggggataatgtcccatgctgcttcccagaacatccccccaggactgtgcccactggtccacagtgaggtggcttcataaccataccttttgttggccaagttctcgcctcggtctcacttcttcacccacctcactgtgtatcccgcctccccctgcatattctctacacgcccaaataaaccatttgcacccaaatccttgtagctagagaacacaaaccaagacacacgctaacacagtcatggggacctgcgtgaagattcagttccgggtctgacacgctgggacgtgacaggcgcaggaaggcagtgtggtgcagtgrggagcaccaggcactgcaggagagccatgccatgatcccagctttcctgctcttgagtggtgtggccccgactatgtcctttacaatcccctgctgggatctgagctcattgaccatagacatataatgatgacaaaggccatgctggggctggctggacacctttgctggtgtccatcgccatgtcttactgagacaggaataggagaggaggcctaggataggcagagtctgggcaggcatgaaaaactgctgaagagtttgagcagggggaggggcgatt

SEQ ID NO: 66453 - DNA, 767 bp, Homo sapiens
tatgtaactatacaatcaatagttgtttcaaatatttatttaaataattttttgaagtacaatttactcagagtaaaatgagcacatcacatgtttaagagtctcagagtaggtatatcactttaaaaattaccagttttccaaagtggcaccattgcatgttcccactagcaacatatgaaagttctggtcactccacattctatgctatttttgatagagggtgatatcaagattactaagccctaagaaatgattttggaaggcttccatgttttttctatgctccaaaatttttcaaatatcaaaggaagcatgtgttccatcaaaggcaacgtccccatgatgtctatcagtmagaatcactaatgcttatttggttcatctagctgactagttgggtggattatcttcttccttcaatgttcactccaaatacataacttcagaacatggttatcgtttcttcccggtgaacgctatgtaagtgcctgtgttcctatagtggaacacccaacaagctctttaacatttatggggtgttatcaatgaagaggtcaaagactttgttagaacattatatgtgtaattttaagagtgaaaagccagaaagtgaaactagaagtttagacaattcttagaaatgcttgcatgtgaaaagaaacatcagccagaaaatacatggttttgaaatgctgagggaaatagcctccaaagacggagaatcagacagagaaggaaacatgaatttttctctttcctctctt

SEQ ID NO: 66454 - DNA, 602 bp, Homo sapiens
caatacataaataaataaaaataaaactgagaagatacctcaaaatggtcagactcattagcatcatccaggtgtattttctcttcaaacagtgtcagtgggtctctaataaagagatgagcaacatgctgggccaggagatgatcaatgcctgcaaaaagagatcacatgggaactcactgcaaagcgagagataccacttcctcttagtccagaaagacgacaggatagctcaggaagtttgaagaaagggtgtctagaagcttgaaatagctggtttgattagtatcctcacctcacccagtattttatcctgcggacactgcgggagtgtcagcgttttattcactacttacacaatgcctgctggggcactggtgtggacctagacacagacctccaaagtaagctccttttgctaaaaatcaagaaaatctcacaagtatttggaacctgaaactttaggaacaagyagcctcatgagagaagttaaagactttgcactaaaaatagaaaccagaccaggagtcagcaaaaaagtgtaaaagagctttgaagaactaaaggcgtacattcaaacccagaaagatggagtagaaacc

SEQ ID NO: 66455 - DNA, 983 bp, Homo sapiens
gggatcttagtatttcagcatactttgtgatccgaatagaattaaattagaaattaataacaataagctatctaggaaarccatttaattttcaatacttgaaaattaaacagtttccttttcaattatccatgagtcaaaaaagaaatcacaggagaaatttttataatatttcaaataggatgacaatgaaaatataacataaataccaattttactacttatctaccgtgtgacttttggtagattacctagcctcttacagtctccatcaacttatttcttaagagaagataataatagtgcctgcctctaggtttgtcagtgaagtctaatgaggagcctgtaacagcattttgcagagcacctgacaaaaagtgaatattcaaaaaaatttgaaccattttcatgacaagcaatagcctttgttagttgtctttgggaatagagaaaggagcctgtttaagctttagaatgaagtgaatcagagaaagccaccacatcatggacaaacagtcatgaggtgcaggaggcaatatgggacagtcacatagtgactcagaaaagaagtggcaaacagcaacaaagggaagatttctggaatgtgtaaatatttctatgagatttttaaaaaacaccagggagagaaaagaaatacatacaaatacacagcctgagaaacagattatttttattttgataggtagggctaaccccgaaagttcagaaaacttggggcatttggttataggttaggtgagcaaaacaagagtacatggaacagattgtgtgtctggatttaaggattcaaataaaaaggactattgtggtggggtggtgttagaatgggaggttttgcagataacatgaatcttgttgggtcttggtaactgaagggtcttaaatagcagcatgtataggagggagaaggttattagaagtagaggaaatgtttcaagttgaagcaaggaggtgtgactcag

SEQ ID NO: 66456 - DNA, 983 bp, Homo sapiens
gggatcttagtatttcagcatactttgtgatccgaatagaattaaattagaaattaataacaataagctatctaggaaagccatttaattttcaatacttgaaaattaaacagtttccttttcaattatccatgagtcaaaaaagaaatcacaggagaaatttttataatatttcaaataggatgacaatgaaaatataacataaataccaattttactacttatctaccgtgtgacttttggtagattacctagcctcttacagtctccatcaacttatttcttaagagaagataataatagtgcctgcctctaggtttgtcagtgaagyctaatgaggagcctgtaacagcattttgcagagcacctgacaaaaagtgaatattcaaaaaaatttgaaccattttcatgacaagcaatagcctttgttagttgtctttgggaatagagaaaggagcctgtttaagctttagaatgaagtgaatcagagaaagccaccacatcatggacaaacagtcatgaggtgcaggaggcaatatgggacagtcacatagtgactcagaaaagaagtggcaaacagcaacaaagggaagatttctggaatgtgtaaatatttctatgagatttttaaaaaacaccagggagagaaaagaaatacatacaaatacacagcctgagaaacagattatttttattttgataggtagggctaaccccgaaagttcagaaaacttggggcatttggttataggttaggtgagcaaaacaagagtacatggaacagattgtgtgtctggatttaaggattcaaataaaaaggactattgtggtggggtggtgttagaatgggaggttttgcagataacatgaatcttgttgggtcttggtaactgaagggtcttaaatagcagcatgtataggagggagaaggttattagaagtagaggaaatgtttcaagttgaagcaaggaggtgtgactcag

SEQ ID NO: 66457 - DNA, 574 bp, Homo sapiens
ttatccttttaattgagggagaagagacccaataaaaaaatrcctgaccactctgcaagacattcagattttaaatgtgcactatttttacaaatgaaaattaaaatctcttagacttctagtgctaaaaggctaaattttatcctactagaataaaaaccactattctcagctgtcaaatcaaggacaaagacacatataaaagaccagaataaaagtcattaatacactactatccctgagctgttgaaccaaggacaaagacacatacaaaaggctagtatgtactttgctttgtgtgtgaaatagtgttgctaggaaaactccagacacagtaatccaagtcatttaatgcaggtttaaacaagggtgaggtacttttatgttaatctgaaattaggccaacaaaaacaaagaattttaactgaggcgatgtaagtactcagtacaatgctgaatatacagcagacagagaaatacctgtgacaatgaagtttaagggtaaatacaagcttttaggatttaagtctttaaatggcatttaccactagcataagataaaaattttcttttc

SEQ ID NO: 66458 - DNA, 574 bp, Homo sapiens
ttatccttttaattgagggagaagagacccaataaaaaaatgcctgaccactytgcaagacattcagattttaaatgtgcactatttttacaaatgaaaattaaaatctcttagacttctagtgctaaaaggctaaattttatcctactagaataaaaaccactattctcagctgtcaaatcaaggacaaagacacatataaaagaccagaataaaagtcattaatacactactatccctgagctgttgaaccaaggacaaagacacatacaaaaggctagtatgtactttgctttgtgtgtgaaatagtgttgctaggaaaactccagacacagtaatccaagtcatttaatgcaggtttaaacaagggtgaggtacttttatgttaatctgaaattaggccaacaaaaacaaagaattttaactgaggcgatgtaagtactcagtacaatgctgaatatacagcagacagagaaatacctgtgacaatgaagtttaagggtaaatacaagcttttaggatttaagtctttaaatggcatttaccactagcataagataaaaattttcttttc

SEQ ID NO: 66459 - DNA, 614 bp, Homo sapiens
gcttcctctgccatattgtttatataaaaatgcagattcactgagccagactaaattgtgtattcggtgaaaggctggtcaaagactcaaargaatccccctctgctccccccaaccctgtgtgccttactggactgaaccaaggtacatcttacacataatgattgatatctcctgtctccctaaaacaaataaaagcaagctgtaccccaactaccctgggcacaagtcatcaggacctcctgaggctgtgtcacaggtatgtccttaaccttggcaaaataaactttctaaattgactgtgacccgtctcagatatttggggttcacaatgtattacgatgaactctattacacgaatgcttgtctttaaatatttgcaagggtttccaagatggtcaaaaagaatagttgagaagaactgaacatttacaatggttagtgtcattttatttgcaattatcacaggcacaaatatgtatatatagtcacctagtgtactcctctctaatgtgctgatggagcctgtgatgggaggggttagggctctttcttaatcctgtttctgtttctcttgtggccagttacttgtgaaaggaaaatgaatcttgggg

SEQ ID NO: 66460 - DNA, 614 bp, Homo sapiens
gcttcctctgccatattgtttatataaaaatgcagattcactgagccagactaaattgtgtattcggtgaaaggctggtcaaagactcaaaagaatccccctctgctccccccaaccctgtgtgccttactggactgaaccaaggtacatcttacacataatgattgatatctcctgtctccctaaaacaaataaaagcaagctgtaccccaactaccctgggcacaagtcatcaggacctcctgagrctgtgtcacaggtatgtccttaaccttggcaaaataaactttctaaattgactgtgacccgtctcagatatttggggttcacaatgtattacgatgaactctattacacgaatgcttgtctttaaatatttgcaagggtttccaagatggtcaaaaagaatagttgagaagaactgaacatttacaatggttagtgtcattttatttgcaattatcacaggcacaaatatgtatatatagtcacctagtgtactcctctctaatgtgctgatggagcctgtgatgggaggggttagggctctttcttaatcctgtttctgtttctcttgtggccagttacttgtgaaaggaaaatgaatcttgggg

SEQ ID NO: 66461 - DNA, 1524 bp, Homo sapiens
aaattgtcaccagaccaactcaaaattacaaagttttccagagcttatatatcttttaagctatatgtctgtgtgcaagtatgcattcatctaaagacattggtgattaacttcttttaatctatatctaaggtctgagccctgaagatcttctgctggagcctcagtaagtttatttcatctaaatgggtctaggtgctgggatgattaccctttgtctcctgctaaatcataaaggtttgggagtttctttacaccccagtaaacttgtctgtggaggcctggggagtttcttcagacccccagtaaaacttgtttaatcctaaatgggctctgttaagaattccttcattatattgtcatgcttcaaggcccaggaaaagcctagacaaaactctctgtgggctctttgttacattccagccattgtatagggcactggcttaatcagcttttaacgtttaacctagctactcagtcagtgctgggacagttgtaatggaggcttgcgttagtgagacatggcttgccacaatactatagcactaagttggtttaaattcaaggggaggagtattatactccacttctcagtaggaggaatagaaaggaatccgtggccatatttaatataccaccactatgtatgcagagcaacatagctatacttgcatagtttgttttttgttgtaggttatatgatgtaagtacagaacctgcgcattccatacaagcatagaatcaggtaaaaagcataactgaaaatgaaatacacttcagaggtgacaaatcaacacatgctgagtggggcattaatggacccggatcctagtcagggttagttacaattagctgtctgaccttaggtaaatcagttaatcttgaagactacttcctagtctaaaattcagttacttcaattacctctattgccttgatttgtctgattaagcatgcactgagaacacatataaaaggccaagtgaccatcatcattaattcaccattaaacttttgatcatgataatgyaggtactctgaaaccctaggaagaaaaacaacatatcaaggataaatgtggttaggataaatagtggtagaaaatacatttcttcttaatgaatctgttccagattattttcttctgtatggtcctgctcctctgcacgatgcagaggtttctgtttagttttgactctatcagactcccaggtagagcattctcacctttgtagaagtaggagtcatctcattgattgtcttgagtaaaaggaaatggctcatgcatcttttctacattataacaaatgtccttttgcattataattgaatggtgattgttgtgttcaatcaatgggaaaggttaaaggagctcctctgccagcatttttaatggagaagtcgattaagattcagtttaatcattctggctgcctcagaattaaagcaacaaagaccatcaatggcactataattactagtctttctgtaagtttacactgctatttatgcagctataaattt

SEQ ID NO: 66462 - DNA, 520 bp, Homo sapiens
  misc_feature (1)...(520): n = A,T,C or G
annnnnnnnnnnnnnnnnnnnnnnnnnnnnnnnnnnnnnnnnnnnnnnnnnnnnnnnnnnnnnnnnnnnnnnnnnnnnnnnnnnnnnnnnnnnnnnnnnnnttaaggatgactgaaaatgagctgccagaaaaaaaaagaaaaactgggaaagactgttgtcctggaaacagaatgaagataatattttaggaaggaaaatatggaaagcagtgtccagtgctgttgagaaaaaccaacaccaaacacacaaaactcaatttgtaccaagaagtatcaaaagactcatggatgagatatgtctgatagctctacaactgacagtgagggagtacttttagggtagaataaaggcattttcagacattcaggttcccaaaatatcaaccttctttgtagcttttatgcaagaagctgtgatatatctgtcaaaatgggagagtaaaacaaggagagaggaagatattcaggrtgcaagaacttcaacattggacagagataaagagacaagcagaggacag

SEQ ID NO: 66463 - DNA, 732 bp, Homo sapiens
ttaagtcccttgattaaaactgttttaaaaaaaggtagagaaagaattttttaaatgtctgttgagaagttagttaataggtataaaaatacagtgagttatatagttagttaacaggtatatatagttacttaataggtataaaaatatatctaggaaggaataaattctgcttttcaatagtagagtaaggaaattatagcgtaaaataacttattgtatatttcaaaatagctagacgaattggaatgttcccaacacaaagaaaagataaatatttgaggtgatgaatatyacaattactctgaattgatcattacacatcatatacatgtatcgaaatattacatgtgcctcccgcaaaacaaggataactatatcaataaaaaatacaaaataaaaagacctgtccattgaattgaaaacaagtgacttttcgatgcaatcattagattgcagttaaggcacagaagccttttaaagatgaatgtggtgggtaatttgctcacaggatgccattttaaatctctccctagagagagggaaaaccttgttcctctaagtgtggccttagagcacttatcttagaatctactcaagtgtttcttaatatttagcttcccggactcaataccatttttatgaatcagattgcaggttggttgagtattctttatcccaaatttttgggaccaccagtgttttggattgtagatttttttttttcagatt

SEQ ID NO: 66464 - DNA, 715 bp, Homo sapiens
tgtcacttcattaagaaccctaatgtccacagatgccttttaagttggatactatatttcagtaagtgttgggactatggaaagaatcattttgtagctcttacataaaaaaaaaattaagatatacatttactcccaatctggaatttgggatatattatcattctgtaaaaatcaacatcaamatctcgtcatttaaaaaactgccaattaaatgaaaaattattaaagtattctttctcattttaagtaatttaaatatgtcattgggcttctataatgaggcatgtattataatgataatgttataatattgttataataaaaatagtcatcgtggtattcatagatctcaaattatcttaccaaaaatgtaatttatagtagaaatcgtaagtaactgacattcccagataattaatatattatattatctctaagacccctgtttctaatctaaagtaatatggttcacaaaaacacccagttaacaaacatactgatgagtgattaagagatcctctattaaattaggagtgccattttagtagaagaggctgactagctggagaatactcaccctccactggggcatcaacccataaggaagacatccccaggaagcccctttcatccactgaggcttatcccagaggatcaatggtagttcaaatattgttgtgagagggagacaggacacaaatcccatcagcta

SEQ ID NO: 66465 - DNA, 1364 bp, Homo sapiens
tctcagcgattacaacattgtaggtgtttgctgaattttcactgaatgaatgagtgaatgcctgtctctgtgtatgctagtatattaactctagctgccacaagtaaataccatagactggattgcttaaagaatagaaaattatcttctcatagtcttaaggactaggaattccaagatcaaggttccaacagactttggtttttggtgatgacctcttttcctagcttgtagatgtctatcttcttgctgtatcctcacatggaagcgggtggggggagagagagagaaagagagagagagagaacagaaaactcaggtgtctcttcctcttatgggcactagttttatcaggtcagggctccaccgaaatttaccttacctaatttaaccttacctccttaaaagccctgtctccaatacagtcccatgggggtttaggaatttaacatatgaatttggggaggggcacaatttagtccatagcagctagaaagggagacattatatatcggctgacccaacctccattttcaatctcctctgctttgctgtctctataatgaagctgtaaaagttaaaaattttcacttgtaactagaggtggccatgtgactgagascagccaaggagtggacatctgttacttcagcccatttcccttcttccttatttttgccaggacacagacatggtatctaaaagttcagctgctatgtttgtatcacaagatgtgaagccacatgctaagtatgggagagctagtaggggcctggatcctcaatggtactgatgatctgaacaccaacctagtactgcctattgccgcatctctcgatgcatgatacagtacttgcagccaaatgcagtttgaactgatttaacctggcatacacagaatgactcttcctacttattagagctacagggagcagttctacagctaaccagttctgtgatactgagtatcacctttgtttctaaggtgctgagctcaatgactgttactgtttcttctagttctaaaattaaatgattttatggttcatgcagtgaataatctggcaataaaccaggacattctcaaatcatacactaataatttgcttaaataagagaattattgcaagagttgatataagatagatattattgtcgactttttgaatatttttagtaaaccttacctgtgaaaccttcttgacctgctgtctttgtcttctctcagagaattattttaaatttgtactgatttattttctcagagagattttgcttgagctagtaagaattgacaaagaatgttaaaatgtctctcgtgtcctgctggtaggtgatgctgctctctcaaacgtgtccctgtg

SEQ ID NO: 66466 - DNA, 1260 bp, Homo sapiens
taaatttggtaagcagatatccagtgatatggtttggttctgtgtcaccactcaaatctcatcctgaattgtaataatttccatgtgtcaagggccaagtggagataactgaatcatgggggcagtttctcccatactgttcttgtgatagcaagtgagttctcacaaggtctgatggttttataagtgtctggcattttccttgctggtacttcttttctcgcctgctgccatgtaagctgtgcctttcaccttctgccatgattgtaaggcctccccagccatgtggaattgtgagtctattaaacctctttttctttataaattacccagtctttggaatgtctttattagcagcatgagaacagagaaatacatccagtcttttctaagacagattctttattgcttactatatctcagtttaattcacctttattccaactacccttcaccagcagaagtcattgtgtccagcggaaggtgagccaggataatcatctgtgaaaaaaaggctggagtgagggggctgtttctgagcacacttctttgagttctgtgtagttgaacagacatttaatgacgccatagctacccattgtggtttacattgcttgaggaaagagaagatagagagaggaaagtgtagaccaaaatatgtagttttggtgaaatgactagatttgagtggatgaatcagtgggttctttttaaatgacctgtagggaggaaaattggcattctgagaaggtgtgtccaggctatgcactttttatgaattttttggtagccagttttgttcttgacaaatgaacaaatcatcagtttaagtttagatgtagttcataatgttagcatttcatatcctttcaacaatttcaagtgattttctttcagaactggcaaaatatgtctcagcttttggcaatttgactttgccttgcagctaagtgaaaaaattacaaaatgagaaaacagactcagctcccctgaacaaaaggaaaaaatattaactccatgtagtatttattataacatctggaaaatcatctcaaattttctgagtatcttttatgacatcaaaatcgtgacaataaaaaggaaaattcagatgctgagaaaygtatcttcttttgtaatttataaagtgacaaatcttctgttccacaagttagatattatgttcacatagtaaacatgctaaatgtttaaagaaaaatagatcctatgattacatttatgttttccctcttgttttta

SEQ ID NO: 66467 - DNA, 1260 bp, Homo sapiens
taaatttggtaagcagatatccagtgatatggtttggttctgtgtcaccactcaaatctcatcctgaattgtaataatttccatgtgtcaagggccaagtggagataactgaatcatgggggcagtttctcccatactgttcttgtgatagcaagtgagttctcacaaggtctgatggttttataagtgtctggcattttccttgctggtacttcttttctcgcctgctgccatgtaagctgtgcctttcaccttctgccatgattgtaaggcctccccagccatgtggaattgtgagtctattaaacctctttttctttataaattacccagtctttggaatgtctttattagcagcatgagaacagagaaatacatccagtcttttctaagacagattctttattgcttactatatctcagtttaattcacctttattccaactacccttcaccagcagaagtcattgtgtccagcggaaggtgagccaggataatcatctgtgaaaaaaaggctggagtgagggggctgtttctgagcacacttctttgagttctgtgtagttgaacagacatttaatgacgccatagctacccattgtggtttacattgcttgaggaaagagaagatagagagaggaaagtgtagaccaaaatatgtagttttggtgaaatgactagatttgagtggatgaatcagtgggttctttttaaatgacctgtagggaggaaaattggcattctgagaaggtgtgtccaggctatgcactttttatgaattttttggtagccagttttgttcttgacaaatgaacaaatcatcagtttaagtttagatgtagttcataatgttagcatttcatatcctttcaacaatttcaagtgattttctttcagaactggcaaaatatgtctcagcttttggcaatttgactttgccttgcagctaagtgaaaaaattacaaaatgagaaaacagactcagctcccctgaacaaaaggaaaaaatattaactccatgtagtatttattataacatctggaaaatcatctcaaattttctgagtatcttttatgacatcaaaatcgtgacaataaaaaggaaaattcagatgctgagaaacktatcttcttttgtaatttataaagtgacaaatcttctgttccacaagttagatattatgttcacatagtaaacatgctaaatgtttaaagaaaaatagatcctatgattacatttatgttttccctcttgttttta

SEQ ID NO: 66468 - DNA, 648 bp, Homo sapiens
atatacataatttttgccaagggaagatatttacattttttaatacttttagaactctcttatacaataattacaataacattccaacaaacttagtaagtgtttctttggcaatatctttgaagtataatattggtcttacccttgaatgaatatttgagctactattatgtagtatagtttttctgtgagtctaagttatacattctctgagggttgatactgtgtctgatccagatttgtttgtatcatgcacaatgtcttacccctaagagacactcaagatatatttgttgaatgaataaatgaaggggctgaatcaactttactccaaataaatacattgctcctttaaaaaaaaaaagttttataatactctttagtgaatttcatgaagtgttcaaaagcatgrcctcttactttttgagatttcctggctatgttcctttcccatatgtttattctgaccatttcaatttatttgcccctatgatccctgttttgatcaatttggattctactcccaaaagaatcatctgattggggaattttcctggaaggagatttggctgattattttgagagttcatagagcagaatactccaaatttcagaaagtctggtaaacactgtactcaatcaccagtt

SEQ ID NO: 66469 - DNA, 1226 bp, Homo sapiens
taaagaacgacatcacttcatttagcctccctaaaagtcctcactacctgctatcatctaagccaccacgagagtactaataattttcttttccctgtggaaaatgtcagagacttacaacatgccaagtgattgcttactgatgaaaagtgtagtaggttattttcctatctgggtcttcttggtatctaagaacataaagtaatgtctttactaaatatgacccaaaacccagacatgtaagatatttcagaagcatgaaaataaaagttattggaaggaataatatttagtatattaactaagattttttcctcccacaatactttccttccccatatcaattatcagaggaaaaattcaacaacaagcaggttttttgttttgttttaatttagaaaccaaaaacttttcagttttaaaaccaaggctttggaggaccaagaacttgagttttaacatttcaaggccaagtcctaaaggccttcattatgattttttttgacataaacaattgttttggaaaaagaaatgaaaagccctaggctgatcataggagatgctctctagaccagaaggaaggggcagaagaaggaaatgttggaaggaaagtaaactttagaaattcatggaatatgcagttaaaatgtagcaattatgaaatgtcaccctcattaagactaaaaatataatgtgtttaaaaatgagatcaaagaaracaggtgattctaaattatgcctggagtaactaattttttaaaaatgaaatctcattttgtcagctctgttactcaagttcattaatttttagttctctctcctattattttttgtttgtttgttttagagatgatatcttgctatgctgcccaggctggacacaaacctatcggtttttaaataactatttgtgaatattgctggagttgatttgtaaaaaagataaatattactttcaaatatgtaacatcaaaactcagagaaaatcagaagtttttagtataagtatttggtatttaaacgagtttttagcaaagatggaccagataagtgataaagtggttgcaagaagcacaattctgacttaactgtaacttagattgattacaacaaaggctttattctcttgatagcacagtaattatattacatatttactactttaagtccgtttcctctgccagaaaataagtgcctcaaagacagctatgtctttactaattgta

SEQ ID NO: 66470 - DNA, 1196 bp, Homo sapiens
atttgttttggtgttaatgttaccttacagtatctacgactatgtatcagcattctgaactttgccataacgtgatctgattatataatgtaggttattaaaattttttagcctatttaagtgctttgtcctagttatagctttttttttccattaagttatcacaatagtttataataattactattactgctttactgctaataataatatatgaaagaatgacattaaatgcagttataattagtttcaagtgaagagcagtgtagactatttcaagtgtcataactcatgtgttatttcaggtagatcatacatatcatgtagctatgtttaaccgtagctacctatcatttgtatctatctgtctgtctgtctgtctgtctrtctctctatctatctgtcatctatcaatcatttatcagttgaagtaaaataataagtaattttaattggaaaatagcatggtatgtgaaacaatatgggctttgaattcagacagtacttgatatcacccctggctctacctctttgcagttttatgataacttttaagcagctgaatttctctgtctcagttgctttatcaataaataacaataagataataactaagtccatttcttttcatttctgtgagtagtgttgtcttctcagtgcttgtcaaatgtgaatgtgcatatcagttccatggggatcttgttctaatgcagattctgattcagtaggtctgagaagggggctcaagattctgcatttctaataagcagctagtccacctgacacagtttaagtagcagtgttgaaatatacactgggatgcagagagttagatgatgggctcaagtgcatttctagcatctaaagtggagataatgacatatcttttggagagttattgtggcaattacagataatagatacgtaaaatgatttctctggcttctgccacatggaaggagctcaggaggcatcatgattgtgattatctttttaagtattatctatgtgttaataaattatttctggttcacactgaagcaggtcctagctgggagtacgacaggaattattttgtccagccacactttttacagaagagaaaacttagacttccagaaggcaaatttccaaaagactgaaactctttccatcccattattatactttccttgtcataaaagctgaatgaattt

SEQ ID NO: 66471 - DNA, 1053 bp, Homo sapiens
accaccattccaactcatcccccacaggccaggcttggcaccggagttcatgttcaataaatattgggtgtattgaaatgatatcctccccttgggcaattgaagagacaaacacgctggatgttaggttaaataataacccaagccagcaggtggtgagtaccaaatgtgtgtaatagctatagggactcagaagaaagaaggtggttctagggagaaagatatgggagaaagatcccaggaggttctaggccttgagctgtgtgtgtgtgtgtgtgtgtgtgtgtgtgtgtgtgtgtgtgwggaggaggaggagatgggaggggtggacgtgactcattctgcttgacatcaccacaaaacaacctccacgctaggcacttcacatgcattatctctaatatttaaggttggggggataggattgggaggcttggagggcacagtgcccaagccaggcctgccttcccaaagccaaccagagcatagaggcagccttggatctgggctccccaccctcagtccctgggcactgcctgttctctggcctgccactcctacgtactacacccaagagagctgcccagcactgcctagttctggatgcactctggtcccaccctggtgaacaactgcctgtgtgaccttggacaaggcacttcctcaccgtcatctgtacctctcttgcagcccttacaggctgtgacttccagtcagtatccaagtgatgcttgccgcctttccgggtgtcacctgggctgctggggctgtctgcaccctacattcccccaaacacccccatgcatacacactcattgctccctcccagtctggagctgctgagaggaacagggtacagagtgtgagcagggatggtaggtttcctgtggttgcaaaaggaacatcaggactttccctgcggtgccccgagctgtgggagaagtgggggaggaggaggcagggccaacctcgaaggaacctctgctctcttccctccccattttagtgctcacagctctcaaaaaggctggtacagtttgttacgctgggacc

SEQ ID NO: 66472 - DNA, 1007 bp, Homo sapiens
tctcataactggaagaaatacagtgtcttttttctactcagctgtttaacattttatgctcgtttgcttgcttcacaataactttcaaaggcgcagactaattttgaaggaatatggtcaacaaacagttatcgagatataaattattttccatttttggcatggtctatcttgaaagtaattggcagctggagaaaccttttataagcaaacaacttctcaacttctctcattttaattgaatgccaataaaattttcaatgtcagcatgggttacagaactgtgggatttcattaaagcagtctacgagtcgtagaatcaagggtttagcactatttaaacaaatctcagcaggcagcaagcagtctatgacctgaagaagcaaatctttaaatccttcagccagtttttcttagttccagaccaactgcaccasaatcatctgggaggcttgtaaaaattgtagatttgtagctcacacctgcatcagatggggtactgaaatcacagatgatttttatgcacactaaatttaaagaatctttaattaaaatgtaatcaaagcccctaatcttttgtttgggagatttagaacctctccataactatttaagaactaaagagcccaaacctgttctctggctgcttgagaggtgttactgattcaggtggtgtttgatccctcacccctgaccccatgtgtgtactgaacaaagtcgctacagcagaaatggatgactaggtctgcgtgatactttttcctcttagctctcaatttcgtggtctgcattccaggatgtttcagtccctacttcttacttgacattccacctctgctacttagtaaacacttacaatccatttgtcacccacattcagctacttgctagtcaactcccaatcataaggactctaaaaagacaaagggaaaaaaacctggcagattattacttcagcatttcccaggtatatcatctgcatcttgaaactggaagaaaccttactg

SEQ ID NO: 66473 - DNA, 1058 bp, Homo sapiens
gcacacatttcagagcataaaaggataccgatacctacatttatctagactgtaagtcccatgaaggtaagaactatgccaaattgttctttaatctattaattaacctacttttcaatgctaggccggtaaataagatagtctgataaccatatttatcctcagctggtatcttgggaggattgtattccataacattctttatgtaagagctgtatcatctgaactgattccttccaatattaaaccataccaaataaaatattaagccctttcttacaacagagtatttcaagtttcactgtatttctcatcaatttttacattatttcttttatttcaattagctcctttctacctcctgtagttttcaagtttgacctttcaacatcaatttgaaggttatgacctaggcccacattgagataactctttttcactattttgacacaattaaaacaggttctggcttcagaaaaaaaaatcaacataatatatgttagctcttcatttccttagagtttttgagattcaagtgatgacatagaactttatcgtcagctacatcagcagttagctttgccaagtgaggttgctagctcttctaaatgcaaattgaaagagaggagaaaaaaaaaaaaaagagcaaagmattagtaggcaaggaaatgatatggtacttggccaacgaggtaatagcctttattgcaagccagtcagtgctccacagatggagaattatcataccaatagtgtttgatgtaagacccaattccccttgtgttggtgtctctgggcaggggttagtctgcagtgggaggtaaataaacccctcactaaaccagtattcttaattaattcctgtggaagtactcactgaccaggctgtaagaataccaaggaggatgtgcataatatttctcctaactgtgaatacttggcaacaagaaagaatctgcagtgccctcttcattcacaaaggacaatatgcctatatattatctaacagtggatattagaacatctcatctatttttagagttttatttcatgttcat

SEQ ID NO: 66474 - DNA, 560 bp, Homo sapiens
cgcctggtattggagagcctgtctatgccaaaggggacaatcattaatttcctattccttcatagttacattccttgggttgactgacaagttcattttggggattcatctggccatttataaataaactcctttcttattccatattcctaactgcacctgccacgcagatgatyggctgcctggcactcacataaaaatttcaaattgctagcaatagctcaacatggtagttaaaggaaatcttctggttattttatgatataatcaagagaacccatttccccaccattgtagatatctcaggtccatgcacaaaacccaagtgaatttcattctttgccccctaaccacgtttaaataaatgacatccaagtacatagctgtaaaatgatcttttgacacttaagctttcgaaagtcccctgtcaaagctgtgtgactctgagtaagtcactgaatctctctgagcttgttttcttgtttgaaagatgaaaatgtattcatggcactgctgataaggtcgacaaggtaacagaagttagcatgtttaaagctccc

SEQ ID NO: 66475 - DNA, 641 bp, Homo sapiens
aagggagggaagaagggaggaaaagaggaaggaaggaaggaaaagaaagggggcaggggaggggaggggaggggatggaagggagggaagggaggaggaagtaagggagggagggagggagggaaagaaggaaggaaggaaggaaggaaggaaggaaaaaggacaggaagggaagggaaggagggtgagagggagggagggarggagaaaggagggaaagaaggaaggaaagaaggaaggaaggaaggaaggggaagggaggaaggaaggagggagggaggaggaaagggggaaggagggaaggaggagggaaggaggagggaaggaagaaaggaaggaagaaaggaaggaaggcaggcaggcaggcaggcaggcaggcaagccaagccttcagacatatttgtttctgacatctcaaaggaggacaaatcagggaatccaaggttggaagagacattcaaatctcatttttcatggcataaaggaaaaggcagcatctctacgtatgattgtgcagcttgtgccctgcataagggtgccccactgaagggagactgggtattgaggtccagtccatggtctaaatggacaagcactaatccttgcatggcttgcatctatacatgtataataagcaggaa

SEQ ID NO: 66476 - DNA, 1617 bp, Homo sapiens
tgcactccagcctgggcaccattgagcactgaatgaacgagactccgtctgcaatcccggcacctcgggaggccgaggctgtcggatcactcgcggttaggagctggagaccagcccggccaacacagcgaatcccagtctccaccaagaaaatacgaaaaccagtcaggcrtggcggcgtgcacctgcaatcgcaggcactcggcaagctgaggcaggagaatcaggcagggaggttgcagtgagccgagatggcagcagtaccgtccagcttcggctcggcatgagagggagaccgtggaaagagagggagagggagagggagaggagactgactctaattttatttttattttttgtagatatggagtcttatgctgaccaggctggtcttgaactcctgacctccagtgatcctccatctcagcctcccaaagccctggaattacaggtatgagccaccatgcccagcagtagtaaagatgaaatgagaggtgaaaataacgagactaaacacataatgaaagccagaatacactgtcagtcacaaagaatagacacaactgtgaatgaagtctgactgagccacttcctcaatgtgtgccctggctgttctgagtctcagtttccacaatttatacattggagaaaataactccttcctcactaggcttgtgagaggatcccaggaggtcatttacctgatatgtgcctgatgcctgacaggtgctcactaaatgctaactgctattgtagttaccttgttactttctccaaataggacacattcagggagaaatgtaagggaaccatatacagggaaatggttaggcatttcttccatgcctacttttccaatgaggaaactaaaactcagaggtcaggtgagctgccttgggtcatacagcaagcaagagtctgactgagcccaccactgaaggccccctgactatggggccaaatgaggttctcttttccctgaaccacatggaggtggcttgtctgtggtgttacaagtggttcagactggctagtgtaacacagagattctgagaaccttgtgggaagggccctgtaatgagttatcggaggactttggtgctttagggacagagaggttgcttgtggcatagtcttggatgtacagattaggtacagcatcttgggaagaagagatagggaaagatgcaaggaaggaaatgaaatgcatatttattatgcacctaccataagctggatgtttcccaatatgctatcttttttaatccccacaaaactcagaggacctctaagatacaatatactcattttacaggcaaggttattgaagatcacacaggctgaagaagggctgctgaattcttcaatatgaaccatccctttgataagaaactgagtgggcctggttcttctcatcccaggagagctctggtgtgcttcctggcatataagtgagtgggaaaggctctgccagtccccagtcccccacccctcttgccactcagcctcaatctgtcaaccaggccagctagcccgtctattaatgctgacattgatttggatcaatcaagatcccataattactgggagttttaatcaactcatgccaattcagct

SEQ ID NO: 66477 - DNA, 1617 bp, Homo sapiens
tgcactccagcctgggcaccattgagcactgaatgaacgagactccgtctgcaatcccggcacctcgggaggccgaggctgtcggatcactcgcggttaggagctggagaccagcccggccaacacagcgaatcccagtctccaccaagaaaatacgaaaaccagtcaggcgtggcggcgygcacctgcaatcgcaggcactcggcaagctgaggcaggagaatcaggcagggaggttgcagtgagccgagatggcagcagtaccgtccagcttcggctcggcatgagagggagaccgtggaaagagagggagagggagagggagaggagactgactctaattttatttttattttttgtagatatggagtcttatgctgaccaggctggtcttgaactcctgacctccagtgatcctccatctcagcctcccaaagccctggaattacaggtatgagccaccatgcccagcagtagtaaagatgaaatgagaggtgaaaataacgagactaaacacataatgaaagccagaatacactgtcagtcacaaagaatagacacaactgtgaatgaagtctgactgagccacttcctcaatgtgtgccctggctgttctgagtctcagtttccacaatttatacattggagaaaataactccttcctcactaggcttgtgagaggatcccaggaggtcatttacctgatatgtgcctgatgcctgacaggtgctcactaaatgctaactgctattgtagttaccttgttactttctccaaataggacacattcagggagaaatgtaagggaaccatatacagggaaatggttaggcatttcttccatgcctacttttccaatgaggaaactaaaactcagaggtcaggtgagctgccttgggtcatacagcaagcaagagtctgactgagcccaccactgaaggccccctgactatggggccaaatgaggttctcttttccctgaaccacatggaggtggcttgtctgtggtgttacaagtggttcagactggctagtgtaacacagagattctgagaaccttgtgggaagggccctgtaatgagttatcggaggactttggtgctttagggacagagaggttgcttgtggcatagtcttggatgtacagattaggtacagcatcttgggaagaagagatagggaaagatgcaaggaaggaaatgaaatgcatatttattatgcacctaccataagctggatgtttcccaatatgctatcttttttaatccccacaaaactcagaggacctctaagatacaatatactcattttacaggcaaggttattgaagatcacacaggctgaagaagggctgctgaattcttcaatatgaaccatccctttgataagaaactgagtgggcctggttcttctcatcccaggagagctctggtgtgcttcctggcatataagtgagtgggaaaggctctgccagtccccagtcccccacccctcttgccactcagcctcaatctgtcaaccaggccagctagcccgtctattaatgctgacattgatttggatcaatcaagatcccataattactgggagttttaatcaactcatgccaattcagct

SEQ ID NO: 66478 - DNA, 766 bp, Homo sapiens
gggatcctcccaccttagcttcctgaagcacttaagattacaggcacgagacaccacatccaaccttactataattttaatgctctaaactcagagtatgtgtataaagacttctcaacagttttcattctagaaattattcaagaaactatgtatttgacctggtttcttggatcaaaaatagccaaaatgagaagaaaagcttcctaatgaaatagtcctgaacataagttaataactaggtttaaagagtctcactagggacttattctatttacaaaacaaataaaaaatattgaaaaggttatttagtatatgtatcctactgctayggcattttataagataagggatcaaattttcataggccatttgaaaattgcatattttagaaatttcagaagatacatcatttatcatttctgttttactctaatgtttttgaattctaatatagagattgtaggacaacagaaaaatggacagttcaagttattaattaaattaactgtcatctttgtagttgatacatattttggaaaactcacaaaatcctatagtacccacagcatcccaccaagtgctttagagatatgcagtacattgtggtttatggcactgagaacaccaaccctagcccctaattatccaaataatcaagaatacggggaagtttttagttaagacctttggttttagtaaccgaagatacctattcacaataaagaatgctcagataattgtgattataactgctagttaagtt

SEQ ID NO: 66479 - DNA, 535 bp, Homo sapiens
tgggcagctaaagtgtctccttgacaaaaataagtttctaacgaggaagttatagagcaactgatgaagcccaggtactgtaaatcattagcaatggccggcctcctgccagggtcgctggaggaactcaaagatgaagaaacagagataaagaataaaaatagaaaatagatctcaaaaaacacaaatagttctcgaaaacactggaaagctgctgrtaagatttttcttctttataaaagctcagggatagtccgagcattagaggccactgaatggtacctttaggaatagcagagatgggagggaaacctggttaatgagagactaagccacccctgctgtggctctggggctggcaggttcaggaggaggcagatcacagagataaaaggtgaggcactcagaaccctaggaggaacgctgatttcgttttttaaggctgagaaataagaaagtagcagctaaaggctagcccctaaccagaactctttgtctggcagaagttcatgcatttagactcatcggggtaggg

SEQ ID NO: 66480 - DNA, 373 bp, Homo sapiens
gttgaacccaaccccatgtgatggtatttggagatgaggtactttagggagygattaggtttagacaagatcatgaggatagggccctcatgatgagattagtgccattataagaagagagaccagagagtttgctctttctccctctctgccatgtcaggacacagtgagagggcagccgcctgcaagccagaaagagagccctcaccagaacctgaccatgctggaatgctgatctcagatgtccagctttcagaactgtgagaaaataaatctctgttatttcagccacccagtttttgatatcttgttaaggcagcccagagtgactatgaaagtctcccttcccagggtactgagtgtaaacaaaaat

SEQ ID NO: 66481 - DNA, 648 bp, Homo sapiens
caagccctcagtaaacacatgtgcaatggatggacatgaaggcgtgactcatgttaattcctttaaggtagggtaggctatggggccatagattaaatgagtctttgtaaataaatgatccatgctctggcacactagacaatttaaaattccaaatcctttagaaatcagtctagaaccctggtggwcaagacatgagtgtggtggaggaaatggagtggaattccacgttgatacaagacagccaggcaggagggaatagtgtgcgctctcaggaaggaacaaaggttctgagtgagaaggagagtccaaattctgatataaggaaagacacagagtttaaaaataacccaataatcaggaagcagggaagatacgcaggatgccatctcccgataagtcaagcaagcactgctcaggcaggttggggtctgagcgagcaatcagtttttaagacttcctctagtggaggtagaactgaagacctatgtttgcaagtggggcttgcataacctggattttaaaagcaagagtgttagctcccccagcttagtgggtaatgcaagctgggtcaaggtcattgaacaagcgttagttagcatctcctcctctgaggtgtcgcttccttggactactttatccagtgta

SEQ ID NO: 66482 - DNA, 745 bp, Homo sapiens
actgaatgacttcaatttaagcaacgcctgcatatatgactgctcactaaaatattatctgttgaggctggcgtggtggctcactcctgtaatcccagcactttgagaggcccaggcaggcggatcacttgaggccaggagttcaagaccagcctggccaacatggtgaaactccgtctctactaaaaatacaaaaattacccaggcatggtggtgcacacttgtaatcccagctactcaggaggctgaggcaggagaattgcttgaacccgggaggcagaggttgtagtgagctgagattgcgccactgcactccagcctaggcgacagagcgagactccatctcaaaattaaaaaaaaaaaaaatcattgaaatgataaaatagaatcttaacttttccagttattttacaggttatgataatcaaacatgtgacaacattaagcaccctggtagaggcaagatttgccaggcggctctcacatacccctgcctcccacaatactacccccgcctcccatgatatgatgagatgacaaggcactttacctctgcattatactccacaaaacccgtaatcccagacaatcatgagaaaacatcagacaaacccagatcagcagacattctacaaaacaccgagtccttcccaacactgtccacggaatgaaaaacaaggaaaatctaagaaatggtcacagacsagagaagactacaagaggcatgatgactgaatgcaaggta

SEQ ID NO: 66483 - DNA, 674 bp, Homo sapiens
cttgctctatggagaacagcgaggccagaaaaatgaacagtgcaaatttatttttgaaacagtttcttaataaaatattttgtggtcactaagcccatgtactaataaactcagccatggacagcatattaaagaacaaaagtttaaaatatctaggaagccagctggtggccatcttctctaaaacccaaattgcatgtgcactgagaaaaatgttactgcttcaaaacaaccaaaaatgggaaaataactgaggtctagaaacagattttctctttctagactcccagcgggctcggccagcagttccttattcaaaatcaatgtgtctataatcaactctagtatgtccacagttcacccaaatgccagatacattaagactaccaaatacaaacctaaaatgttccccccaaaatttcccttaaaactgttccccaatacctgcaattcacagatataatttagcatttttgtttttatatactaatttaggcaaaacccccccgccactgaatcgtccaacaaaaatgattaatttgayagaaacaaatttaaataactgcacatacagtttatgtttatacaacgtgtggctgctctacagagaaaatgcttgtctgtagacacactctcttaaaaatcctacaagccatcccaacgccctcagtcaa

SEQ ID NO: 66484 - DNA, 1011 bp, Homo sapiens
tttgctcatcccttacctaagccctctgctgcaacagaattaaatgagatcctgataataaaacacttcattcaatgcctagcacaaagtaaatgctcagtaaattccagtcactatgactgttttcctattatcttcagtaatatccaaagatcctgaggactctaattttaaaacacctaaaaaatcaaaatccaacttaaaagcaattttgttacattatattagacaacttaatggtttatttccgatcaagtaaaatcaatccccgcccccgcccccccttttttttagactgagtctcgctctgtcacccaggctagacctgcagtggcacaatctgctcactgcaacctccgcctcctgggttgttcaagtgattttcctgcttcagcctcctaagtagctgggactacaggcacccgccaccacgcccagctaaatttgtgtatttttagtacagacaggggtttcaccatgttggccaagctggtctcaaatgctcgatctcaggtgatccgcccrccctgacctcccaaatggccaccgcactcagccaatccagtgtttttaattgaaacatatgctcaccttttttccccctaattagtgaatcaagtttttttgtcatttggtcgataatgtgcattcccaataaaattctcatagtttctcttttgtgccatgctgttagataagtgttgatatgacacaggcctttttcctgattgaaaaaaaaaacatatttagagttaaggtcaaacaattaggtaagatgtgtataggtttttagaagtcaattttcaaaatttctgacactgataatgtaatcaacgcctaagtcacacagtcgcatgcaagtgttttcagttacagctgaattgtttttatgacacttgttagcacagaatttggttgatgtcactaacattaaaattgtctgggctgtcactagaaagaattaaaaagccggaaaaaaatgacatcacaaaatacttgaaacgtatatgc

SEQ ID NO: 66485 - DNA, 1011 bp, Homo sapiens
tttgctcatcccttacctaagccctctgctgcaacagaattaaatgagatcctgataataaaacacttcattcaatgcctagcacaaagtaaatgctcagtaaattccagtcactatgactgttttcctattatcttcagtaatatccaaagatcctgaggactctaattttaaaacacctaaaaaatcaaaatccaacttaaaagcaattttgttacattatattagacaacttaatggtttatttccgatcaagtaaaatcaatccccgcccccgcccccccttttttttagactgagtctcgctctgtcacccaggctagacctgcagtggcacaatctgctcactgcaacctccgcctcctgggttgttcaagtgattttcctgcttcagcctcctaagtagctgggactacaggcacccgccaccacgcccagctaaatttgtgtatttttagtacagacaggggtttcaccatgttggccaagctggtctcaaatgctcgatctcaggtgatccgcccgccctgacctcccamatggccaccgcactcagccaatccagtgtttttaattgaaacatatgctcaccttttttccccctaattagtgaatcaagtttttttgtcatttggtcgataatgtgcattcccaataaaattctcatagtttctcttttgtgccatgctgttagataagtgttgatatgacacaggcctttttcctgattgaaaaaaaaaacatatttagagttaaggtcaaacaattaggtaagatgtgtataggtttttagaagtcaattttcaaaatttctgacactgataatgtaatcaacgcctaagtcacacagtcgcatgcaagtgttttcagttacagctgaattgtttttatgacacttgttagcacagaatttggttgatgtcactaacattaaaattgtctgggctgtcactagaaagaattaaaaagccggaaaaaaatgacatcacaaaatacttgaaacgtatatgc

SEQ ID NO: 66486 - DNA, 1046 bp, Homo sapiens
aagcatcctccctttcaaaattcagcaacagcagtgtgtgcccacgcctctagatgctcctttctctagcatcagtggggtcagggtgccccctctctaaaaagccctgggaacatttgagtgctgctttttataatcttcaggcctcttgggacccataagaatcttgtatttcctctcacttccccagaaaggcctgccagttctttctctgaaagccagttgactccttacctcactgtctttcacggctcccttttggtttcgcattaaagggcagccgtcaggtgcttcggaaaatggagatgccattcagtggactttgggctcaagctcaagggtaaccgctgctctgggtttggcttttaaaaatctcacccagtatcagttctggaagaaagagactgcacacggcacccagctctgccacatgggctggaggcaagctatctgtctccgaagggcctttcagtgaccaagtcccactctgaggagggtgcagccccgcactggccaccaagctagcaggaggctgggctgggtcctggccacagctgaaygcccatgcacctccaggctgatgacctggatggtgtcctttgtgccccagcccatgcccaaggccctgggctcctccgcagagcagagtgggctgagagcctgagcacagcacagagattagacttaagcctttagtctctctcaagtgcttaaataaccacctctccaggctcccgtcggcgctgttgagaacggccgccggagctgcactttatctgaattcttaaactctatctttaaaaatctctttctgggtcaattgtgtgcctgtctctgcttagttaacatcgcggcctggcctacagtcgtgccctcctgtttaatgagcttgttctcacacagcctctctcatttcagaaggaaggaagacaagaccttaaaatcccttgaagtaccttgcgacctgcagaaaccagcccccaaatgcagtccatcagcgcttcccaaggcgttttgcgccatgagccactgtgcatcccgatgtt

SEQ ID NO: 66487 - DNA, 611 bp, Homo sapiens
cacaagagtgtaagtccagtgttgtgaatgaatcaacactcaacagacaagagaccayagcgctaactggaaaggatcttgaagtaactcaaccattaaagcccccacaagattaaagacagactcattatgtatgaaatagtaacaagtggttatgataaaagatgaggtgcttatacaacaagaagacatagttacaaaaataaaaacaactagaaattgtgaaaataatatagttataaaaaactcaatagatgactaaatagttcatgaatcactgacgaaaagcaactaattaactaaaagacagaagagagaaaatgacatgaactgccgcagagaaagtctgagacacaaagggatgaaaacaggaaaggaggacgaaggtggattgagacgctgcagcgcacagcctcagtgaggctcagagagagaagacagataagatgttggtgaggtaatgttcaaactgatgataatgaagaattttctagaaccaaagcactgaatgaattagatataaaaattcaattaaatgcctatagaatcggtaaaaaggaacccgtacctagacatgtcaccatgtaactgcagaatgccaaggataaaga

SEQ ID NO: 66488 - DNA, 1203 bp, Homo sapiens
ccccctagctaaatctttccatcttttttcttctttatgatttcaccctctgatttaagcttagaagtcctactccttctcaagatcatttatttcttctgcttcatagggggctttattttctgtgttaaagctaggatacatctggacttaatttgggtatatgttatgtgcactaggattcttctaccccataggatgcccttgtacaaataagaaaaagatgactttttctcagaaaaaagagttaatatactatttctcaatgataagacgactatgtgtcacatcctttgctagaccctggggatgtgaacacaaggacaagttctccagggaagatgtgcctcttcaaaggttctccttgtgctgagagggggtctggcttgcaggcgtcggagccaagcttggctgaagccttgacattttcaactaacctaacaatgaggtgaggagcaaaaattattgtttataaaataacttattaatagaaaataaacattagtaattacatagtgattcatggcaacggaaggtatttgtagtttaaattgagaacttagcaatattatcgtgataaattatgcaaacagcaaaggatataaactacaacatgaaaggttcaaagtcttagccaggacatgactgataagagatctgtttatattttatttatttttcttttctaaaaaatatgtctatagatgaatacatcagtagagaaggctgtcattgttcagtggctctggtcatatttgatattgctagatttacaagatctttcaataattgagcttgttctttctctccaagtcttaagtaggatgatgtatatcgaccatatctgaactaagcacatgactttcatttgatgaaaaattgccataatatgctaatttatgttcaaacaagattctttactgccatctgcttgaaaactctcaaatacatacaaagactccraagacagtcaacaaattcataatacaaacgtgaaaaacgttaaaaataataaaatgcccgttacgtaaaaggcagactcttcattgcgactcttctccttgtgaaatacatacctggacacctgggtgacaccccagcaattctgccccctcctttcaaaaatgcttacttagaggtcgcatcaccatttattaaacagtttgtttttctcattgacttcgaataccacctcgaagcaca

SEQ ID NO: 66489 - DNA, 1442 bp, Homo sapiens
ttgcctcagcttcctgagtagctgggattacaggcacccgccaccatgcctggcaaatttttgtatttttagtagagatagagtttcatcatgttggccaggctggtctcgaactgctgacctcgtgatcaggccacctcggcctcccaaagtgctgggattagaggcgtgagccactgcacctgaccaagaatgttaagttctttcatataaagtccatttatatgaaattcaaaagtgtacaaaattccatgacagtgtttcagcatttgcacttggctgtaattatgctgagagtcggtgtggtagctcctgtctggaagcagtgagttgaggctggggtcaagctaggcaacttggggccttcagtgttccgtttcttgaccggggtggtaattacaagggtgttcactcttaaataatttgttaagttctacatttatattttatgcattttaatacacacattatatttcataataaaatgttctaagaaaatgagaatttttagagaagaatatatttgtcaaaatgagtgtaataagcaagttctatatgtgaacacgcataaccaaactgtaatcgtggaaacagtgtccaggagccagtgcacagagcgagtcactctacagctgtgcctgagacatgcaaagcacttaacgtgtgatagaggcatctttttaaatccatgagcaatagataggtggattatttaattaattgtgtcaggataaatagtgctagctaaatagaaaaaactattgaacctaaatacttctctcatatcatgtaggacaacaacaaacactagatgaaataataagttcattataaaaatcaagtaatcagcaaaattattttacctttgggtgtatgggtaaaggagggaattccaagtaaaaacaaaacaaaaccttagtgagagcgtcaataaatcaaaattaccatttatgattttaaaacttctgatgtctaaaacttccaatttaaaaattaaaaagcatgtatcaaactgggaaattatattttaaacctttatgacacacagggattaatacccttaatgmacaagcatgtatatatgttgattttttagaagatgccaagactcaaggagagagccagagtattttacaaaaaagtaaatattacacaaatggatattggtgatgaaaagttccatcttacaagtactgaaatagttaaaggttagaacaagatgatcccatttgtcacctatcaaattgtcagggatttttaagtactggcaaggactcagttgggtagaattctcatcctgctgacggcctgtccatcagggaaaagcgactggtcaatgggtatcaagaaccatcagtccattttttcctttttacccagtacttctcctcctggaagcctattccagggaaataataagaaatatggacaaagattaatgc

SEQ ID NO: 66490 - DNA, 1442 bp, Homo sapiens
ttgcctcagcttcctgagtagctgggattacaggcacccgccaccatgcctggcaaatttttgtatttttagtagagatagagtttcatcatgttggccaggctggtctcgaactgctgacctcgtgatcaggccacctcggcctcccaaagtgctgggattagaggcgtgagccactgcacctgaccaagaatgttaagttctttcatataaagtccatttatatgaaattcaaaagtgtacaaaattccatgacagtgtttcagcatttgcacttggctgtaattatgctgagagtcggtgtggtagctcctgtctggaagcagtgagttgaggctggggtcaagctaggcaacttggggccttcagtgttccgtttcttgaccggggtggtaattacaagggtgttcactcttaaataatttgttaagttctacatttatattttatgcattttaatacacacattatatttcataataaaatgttctaagaaaatgagaatttttagagaagaatatatttgtcaaaatgagtgtaataagcaagttctatatgtgaacacgcataaccaaactgtaatcgtggaaacagtgtccaggagccagtgcacagagcgagtcactctacagctgtgcctgagacatgcaaagcacttaacgtgtgatagaggcatctttttaaatccatgagcaatagataggtggattatttaattaattgtgtcaggataaatagtgctagctaaatagaaaaaactattgaacctaaatacttctctcatatcatgtaggacaacaacaaacactagatgaaataataagttcattataaaaatcaagtaatcagcaaaattattttacctttgggtgtatgggtaaaggagggaattccaagtaaaaacaaaacaaaaccttagtgagagcgtcaataaatcaaaattaccatttatgattttaaaacttctgatgtctaaaacttccaatttaaaaattaaaaagcatgtatcaaactgggaaattatattttaaacctttatgacacacagggattaatacccttaatgaacaagcatgtatatatgttgattttttagaagatgccaagactcaaggagagagccagagtattttacaaaaaagtaaatattacacaaatggatattggtgatgaaaagttccatcttacaagtactgaaatagttaaaggttagaacaagatgatcccatttgtcacctatcaaattgtcagggatttttaagtactggcaaggactcagttgggtagaattctcatcctgctgayggcctgtccatcagggaaaagcgactggtcaatgggtatcaagaaccatcagtccattttttcctttttacccagtacttctcctcctggaagcctattccagggaaataataagaaatatggacaaagattaatgc

SEQ ID NO: 66491 - DNA, 727 bp, Homo sapiens
ccatgatgagatcacagacaaaggggaccacagagtgagcactctggggctgtccctaggtctctggctatgggtgcccagcagaactgcaagggccccttcaattatccacagtcaagaactggaagcctggctaggcgttctgttttgcctagaattgcttattatgacctttttttcttttgcagcaaatttcccttcctaatttggttctgtttatcccattattaaagtgggattacataggaatttaactgaagtaaatgatcatcaatgtgtacaaagatctagctgcaagaatgttcttggcaaaattgtttatcacaggggaagggcacaaacaatttgagtgggtaaaagtaccacatatgttaatgatactctggtataaccatctattaatagcggaaaggggaatacctaatgtgcctaatgcacccataaggaattattaacacttcactcactcagtcattcactcatctgatcgctcattccactcacagtcactgagcaccttccagacaaaaggycctatatgagagagtgttttactcaggttcctcagagatgaggatgtgatcacagattaagggagaagttatgggattcatcatgggatagcgaggaaactgggcagcggggtttttggtcctccaggctgaggcatgtgacaagcatggtgggcttctgcaggggccacagcatctccaggctacagaaccct

SEQ ID NO: 66492 - DNA, 727 bp, Homo sapiens
ccatgatgagatcacagacaaaggggaccacagagtgagcactctggggctgtccctaggtctctggctatgggtgcccagcagaactgcaagggccccttcaattatccacagtcaagaactggaagcctggctaggcgttctgttttgcctagaattgcttattatgacctttttttcttttgcagcaaatttcccttcctaatttggttctgtttatcccattattaaagtgggattacataggaatttaactgaagtaaatgatcatcaatgtgtacaaagatctagctgcaagaatgttcttggcaaaattgtttatcacaggggaagggcacaaacaatttgagtgggtaaaagtaccacatatgttaatgatactctggtataaccatctattaatagcggaaaggggaatacctaatgtgcctaatgcacccataaggaattattaacacttcactcactcagtcattcactcatctgatcgctcattccactcacagtcactgagcaccttccagacaaaaggtcctrtatgagagagtgttttactcaggttcctcagagatgaggatgtgatcacagattaagggagaagttatgggattcatcatgggatagcgaggaaactgggcagcggggtttttggtcctccaggctgaggcatgtgacaagcatggtgggcttctgcaggggccacagcatctccaggctacagaaccct

SEQ ID NO: 66493 - DNA, 727 bp, Homo sapiens
ccatgatgagatcacagacaaaggggaccacagagtgagcactctggggctgtccctaggtctctggctatgggtgcccagcagaactgcaagggccccttcaattatccacagtcaagaactggaagcctggctaggcgttctgttttgcctagaattgcttattatgacctttttttcttttgcagcaaatttcccttcctaatttggttctgtttatcccattattaaagtgggattacataggaatttaactgaagtaaatgatcatcaatgtgtacaaagatctagctgcaagaatgttcttggcaaaattgtttatcacaggggaagggcacaaacaatttgagtgggtaaaagtaccacatatgttaatgatactctggtataaccatctattaatagcggaaaggggaatacctaatgtgcctaatgcacccataaggaattattaacacttcactcactcagtcattcactcatctgatcgctcattccactcacagtcactgagcaccttccagacaaaaggtcctatatgagagagtgttttactcaggttcctcagagatgaggatgtgatcacagattaagggagragttatgggattcatcatgggatagcgaggaaactgggcagcggggtttttggtcctccaggctgaggcatgtgacaagcatggtgggcttctgcaggggccacagcatctccaggctacagaaccct

SEQ ID NO: 66494 - DNA, 727 bp, Homo sapiens
ccatgatgagatcacagacaaaggggaccacagagtgagcactctggggctgtccctaggtctctggctatgggtgcccagcagaactgcaagggccccttcaattatccacagtcaagaactggaagcctggctaggcgttctgttttgcctagaattgcttattatgacctttttttcttttgcagcaaatttcccttcctaatttggttctgtttatcccattattaaagtgggattacataggaatttaactgaagtaaatgatcatcaatgtgtacaaagatctagctgcaagaatgttcttggcaaaattgtttatcacaggggaagggcacaaacaatttgagtgggtaaaagtaccacatatgttaatgatactctggtataaccatctattaatagcggaaaggggaatacctaatgtgcctaatgcacccataaggaattattaacacttcactcactcagtcattcactcatctgatcgctcattccactcacagtcactgagcaccttccagacaaaaggtcctatatgagagagtgttttactcaggttcctcagagatgaggatgtgatcacagattaagggagaagttatgggattcatcatgggatagcgaggaaactgggcagyggggtttttggtcctccaggctgaggcatgtgacaagcatggtgggcttctgcaggggccacagcatctccaggctacagaaccct

SEQ ID NO: 66495 - DNA, 658 bp, Homo sapiens
  misc_feature (1)...(658): n = A,T,C or G
ctgannnnnnnnnnnnnnnnnnnnnnnnnnnnnnnnnnnnnnnnnnnnnnnnnnnnnnnnnnnnnnnnnnnnnnnnnnnnnnnnnnnnnnnnnnnnnnnnnnnntacaaactaataatattgtgtaatataaatactgacattgtgctgccaccattttattttgtgaagtaagagcattagaaaacaattgccacctactgtcctcctattccataagtaagggctaatttaatactccagtaataaaacaaaggcatgcatgcttttagatcagaggaaggtcgtttccactgaatacatttagctttatgaaaatctcactacatttgtggccctggtttcctccttgtggggtggarcagttgaaatttaggtcacaaagagccagtcaggagaagagcatctgggaggcactagtacaggggacacacaggtgtctgtgacactcagggcgggcagacaggtcatcaccctgcattctgcatgcccacgcatacacaccatgctcaccccttctgatgaacaggcacaagcgttcacacacacgctcctcccccaggggctcccaggttggaacacctcccctgactgccaggcaaagccatacctctctcctgaacccagggcaaagggccaggctcacccagcctgtgcca

SEQ ID NO: 66496 - DNA, 970 bp, Homo sapiens
tgttacttgtcacgagtgtgcatgtgtttcttccccaccagattgctagctcctagagagcagaacctgggtctcagccattgcaattgccacagcacctggtacatggaaggtgcccagccaaggtgtgtggttgttgaacaaagggatcctgccatgaatccctttgtaagtgcaaygttcttttgaaacagagagtactaactccctagtgtaatttattgaggactgggatccccaggatgagggaactaaagagcactgaggccctcctcttattcactgaggttaagtgaaatttcagatcagggtacttagaaggagaaagaacaaagagagcatgtttggaggtggaggatctgataagattccccaatctctctgtctctctctctctctctctctctctctctctctctgtctgtcacacacacacacacataaacacacacacacactcccataagaaagaaacactctccttgcttgcacctccagctctacccctaaacttctgcccttgagactccccagacacattgcaaagttatcacaaaggatgattgatgctgacaggcaagctctttggcttgaacagacccttgtttaagacgcataagctgggcacgggagctcatgcctataatcccagcattctgggaggccaaagaggcaggaggattgctcgagctcaggagtttgagaccagccagggaaacatagcaagacctcatttctactaaaaataaaaaaattagcccagtgtggtggtgtgtgtccttatagtttcagctagtcaagaggctgaggtgggaggatcacttaagcctgggagattgagtctgcagtgagctattattgcaccactgctctccagcctgggccctgtctcaagaacaaataaaatgaaagagacgtagattgtcctgcttctcagacacatttttgtctaacactgagatccaggaga

SEQ ID NO: 66497 - DNA, 671 bp, Homo sapiens
accccattagtcctgaagatctattctgatttcccagaaaaaaggttagggaaactgcaacgtgtggcagttacaaaaacacttcaaaccaatacccaacaggggaagaaatgcagacacgctctgaactccagccagcgagccagttcaaaaccaggctttacctgtccaaggaaatcccttccctgggggacatttaaaatggcttagaggctttctttctttctataaagcagagtttggggtgctctcttgctcttggggtgctctctcactctctctgtctctctctttctcagttwcatgcattaaacgtttacaagtatctaccatgtaccgagtattatgctaggcactgaggtttctagtatgaatatggctcagtccctgctctaaaagaagctgaaattcagttagtgggtggcaatgggcacaggtgcaaatgatggagcaaacagtaatacaatcaattaagtcctataagagaagatagaagaacagggacaaggaagtgttgaagtcctcctgccaggactgaggcacaggtgggaattgggtgggtggagaggcgggaagctgtgaggcggggaggcacaggtgaccctggaggaaaggcttcaaggataattagttaaccaagtggctaagtgaggtgcaggagaggagaggga

SEQ ID NO: 66498 - DNA, 671 bp, Homo sapiens
accccattagtcctgaagatctattctgatttcccagaaaaaaggttagggaaactgcaacgtgtggcagttacaaaaacacttcaaaccaatacccaacaggggaagaaatgcagacacgctctgaactccagccagcgagccagttcaaaaccaggctttacctgtccaaggaaatcccttccctgggggacatttaaaatggcttagaggctttctttctttctataaagcagagtttggggtgctctcttgctcttggggtgctctctcactctctctgtctctctctttctcagttacrtgcattaaacgtttacaagtatctaccatgtaccgagtattatgctaggcactgaggtttctagtatgaatatggctcagtccctgctctaaaagaagctgaaattcagttagtgggtggcaatgggcacaggtgcaaatgatggagcaaacagtaatacaatcaattaagtcctataagagaagatagaagaacagggacaaggaagtgttgaagtcctcctgccaggactgaggcacaggtgggaattgggtgggtggagaggcgggaagctgtgaggcggggaggcacaggtgaccctggaggaaaggcttcaaggataattagttaaccaagtggctaagtgaggtgcaggagaggagaggga

SEQ ID NO: 66499 - DNA, 671 bp, Homo sapiens
accccattagtcctgaagatctattctgatttcccagaaaaaaggttagggaaactgcaacgtgtggcagttacaaaaacacttcaaaccaatacccaacaggggaagaaatgcagacacgctctgaactccagccagcgagccagttcaaaaccaggctttacctgtccaaggaaatcccttccctgggggacatttaaaatggcttagaggctttctttctttctataaagcagagtttggggtgctctcttgctcttggggtgctctctcactctctctgtctctctctttctcagttacatgcattaaacgtttacaagtatctaccatgtacygagtattatgctaggcactgaggtttctagtatgaatatggctcagtccctgctctaaaagaagctgaaattcagttagtgggtggcaatgggcacaggtgcaaatgatggagcaaacagtaatacaatcaattaagtcctataagagaagatagaagaacagggacaaggaagtgttgaagtcctcctgccaggactgaggcacaggtgggaattgggtgggtggagaggcgggaagctgtgaggcggggaggcacaggtgaccctggaggaaaggcttcaaggataattagttaaccaagtggctaagtgaggtgcaggagaggagaggga

SEQ ID NO: 66500 - DNA, 850 bp, Homo sapiens
agtgctggctcagtgcctaaaacatggcatttgctcaagaaacgtgggatttcctcttctctcaaagtctatcttttcctcacaactctgttctccagaatttccaaagtggtgccgcctgcacctccagtgacagacacagtcacaggcatttaaggcctctgccagccaacctcgtgtgatctcctgagttgcctggctgtctttttctatcctctttctttgtccctgaagacagatgaggctgacagtccccaggcttagggccactgaatacaggcccaggctggggcctgtggtgtgagggcagagttgggggaacttagcatcctggagggtgtgcagctggacatgactggcaaggaaggtgagtctagcatcagcaactgtatttgcctcaactgtcccaccttacacatcacccaggaacatttgagcctggagacagggttatcatagcacaaagccacagcaagctttgctggaccctgctcctccagcctgggggactcccactggcacagacaggtcaaatcctgtcagcgtgattcagtttgaatcaacaccatttaaatccacccaccatttaccaagcactcttcagtgccaggcacgtagggagaccctggggatgcagagatggcccaatccccaccctccatgggctttcggcatagttggagagcmagctaccaataagctctatccacaccagtggtgctcaatcctgcagaaggttgtgagattgatacctaggcccactcagaacatggaactggaatctgtgccccctccatgatctgcacacacacacacacaaacacacaggtggacacatgcacagacacac

SEQ ID NO: 66501 - DNA, 1001 bp, Homo sapiens
gcattccaagacaagcaaaccaatagaattttaagaagtcatttatcctttttgaaaagataaacctatttggagattacatattatatgatttgttttcaaatctgaaacaatcatccataacattgcctctggccataattagtattagaaacattagtcatttatcaaatacatgctggctaaattactaagaatatttcagaagatattgcatccaaaacttgtcaacttaaggaacaaagtaaaagtctgggcttttaaaatatagataaggtgtacttaaaatcagtttttattaagcttataggcaaagtttctactgataattttaccattattatcttcaatcttgatataataatggagtttgagaagaactagtagaatctcatgtatgcagttgaagagactgaggatcaagtgggtaaaacctacttcctggcagatcagagatcccagcctaagtttctctggctaatcccttgttcatgcttcactgtagttgcgtactggcatatcttcagagttcaataaagattatagtcagtatttacaaattgctccagatatgttgaattaaataaactaactggaatatcatctgaatatgcaaaataatgattgagaattaaactaagacagtatattgtgttgtggggtaaaagtagggggatttggtttgagagttaagaagggaaagtgctgttacatgatacttttaaattagattgtttaattaaattgaattaacctttaaaaaatcctcatataagtctgagttatagccatagatatattcaaagcatatatatatatatacacacacacacaaacatctcccatatatgtgtgtgtgtgtgatccactgatttrctcagcaactattaattgatcccttattatattccacccaagcattgggtatgcctttgagcatatataaatgaaagatacagcatttctcaaggggcctgtagccaagtggaatgattgaagta

SEQ ID NO: 66502 - DNA, 700 bp, Homo sapiens
tttctcaggttggagcctggaaaattaggctgacaaaagacagattaacaagagaaaagcaaatgcaagtttattaacctgtttatcctacacaacatgggagtgctcaaagatgactgactcaaaggggtggttagaacttgggtgtatgtatawaacatcttaacaaagaacaataaaattttagaatagtgacaagataagggaaaaggactgattttctagggcagcaaatcacagaaagttaaatatatagggaaattaatagaaggtaagtgctggttgataaagtcagctatgtagattcctttggagtgatcttagggctaagttgtcttggtgatggacttctgtccctgctggtgggtagaggggaggacacatttacaaatttatgtcccgcttttaggcaaatgtgggtagtctgagggcttttttttttttttttttttatatctgctgctgcttcttttttttatctgcttcttcctttagctcaaaataatccttatgccaaagtgttcttttttgggtggcattttctgctattctccatggacaaagttcatattagaaagatagataaaccgcttcctcatcctgcccctgtgaccttattacttggagatgtttgcccccagaaggtctcctctcttctccaggtgagtttgcttgcaaatctttgcccataaccagaagg

SEQ ID NO: 66503 - DNA, 587 bp, Homo sapiens
taagctctttctttaagggctttttttttccacttgaagtttgggaaatatcagtcaatctaaatatatagaaattcaattattctccttgcctatataacctcttaaatattgtataaatgagctcccacaagcttatggaattttatggaggagtttggcaagagttcacaatcctgttcttagctacttgcaaacggttatgtgacttaggaaagcctcttaatctagctaaccttcttattctccaaattagaaaatagaaattatgaattgggccctggctaatgaagggacaaacctgtcggtatctggctctgtttacattttgcaatgtggtcagaggttaagtcagtaaggacgggacaaatacacatgtaatagattaagaatgtaatgacagaaaatcatacaggatctacawcctcctaactactgacaaaggatttctctaccttttcaaaatgagaactaggcgatttaagggaggagggaaggtaaaaagtgacactgagggaggtacagttgaactgaagacctaacagaatttactagaaaggaatgtattaaaattgactggtggatat

SEQ ID NO: 66504 - DNA, 512 bp, Homo sapiens
gagagaatttatatctaagatctataaaaataatgctcctcatagatcgttggtaaacgagaaaactgctttaccatggtatatgtatatgggcaaaaactgcttctaaatcatcaccaccatcactatcaaagacataaaagacgtttgcagaactgagcaccatgctaggcagtgtacaaaagttttgctttgtactactgtcctgattaaaaggagtaaaattctagagatccatttctattaaatttcatacaattccatatataaagagamaatgtcctttagagcctcttcctatctgagtatctgtgggtccgtgactatgtggcccacccaaggagtgatatttgtgctgtaccaataaaatctagtgtcaaaattatgggagacacttccaaactctcacagcttagcaaaacagtgtcactatcagagtagtccaaatcacgaaaaagaatagcgagttattcttcaaagcaattcacagatctgcctaagggtgcaaatta

SEQ ID NO: 66505 - DNA, 1268 bp, Homo sapiens
gatatgccacttttactcctattataatacatgtggttgaaacaactgttttccctaaatgaaatggacttatcctctatcaaaaattttatacatttaaaagtgctatatagagcagtgttatacaacatttaggtgttaaagtatattaactgactgacgttaaagttcactttgtagattcacataaggccactctttagttggttcagcttacctaaagaagacagcaaaaagtaaaggaaggaaattaaacacatctgtggttcactagaattgaacaattacagttyggcatttcataggtttgaaatctaaaccatttacttggcagatgcaaaaattacttcagtgttacactgaagaattataccatttgggtccagtccatagtgccacaggcatggatgatgcaacttccaactaagttacagagtatttttacagcacttaccaactcattataacttcatatatttaagacattttccttccgattcatacaatggttcctgttcattgagtttagtcaaggcaggttgggatggtggcttgggatgggagaagaaaaaaaaaggctgtgtgaagggtgtggtgagaatagtctgccacaagctaggtctccctgaatgtggcctattattcattttatgggataaatcagggcaaaagctctttctctttccatagtctcaataatagccagctgtggcttgagcaatgtcttctaggattatcacagcagagatcacagcttcctaaacactcagatgaatagtttaaaaatttatattagaaggggattcttctccaatgatttctgactttgaaaataatactaatggccacgagctacccaatgcctgactcctatggttttctgacaaactacatataaataaacaaacaaaccaaataaataaaaacaaataggtttaagtcatatttcttaaaaaaataatagtttgttattgccattattattgtttttattcaggatgtagagctcatctggattgctgcttctgaaataagacagaaaacagaattacaatataatagaaaggacagtgaactggtagttaagcaacctaggttcttctatctgcactaaccagctctgctggacaaggctgatatactgcaggacagaagttttctgtcaaaagaaatccatgttccaaatgacttctcagactattttagttctgaaattcttacactacctaattccataccttttattttattacttctatatagtatcc

SEQ ID NO: 66506 - DNA, 1268 bp, Homo sapiens
gatatgccacttttactcctattataatacatgtggttgaaacaactgttttccctaaatgaaatggacttatcctctatcaaaaattttatacatttaaaagtgctatatagagcagtgttatacaacatttaggtgttaaagtatattaactgactgacgttaaagttcactttgtagattcacataaggccactctttagttggttcagcttacctaaagaagacagcaaaaagtaaaggaaggaaattaaacacatctgtggttcactagaattgaacaattacagttcggcatttcataggtttgaaatctaaaccatttacttggcagatgcaaaaattacttcagtgttacactgaagaattataccatttgggtccagtccatagtgccacaggcatggatgatgcaacttccaactaagttacagagtatttttacagcacttaccaactcattataacttcatatatttaagacattttccttccgattcatacaatggttcctgttcattgagtttagtcaaggcaggttgggatggtggcttgggatgggagaagaaaaaaaaaggctgtgtgaagggtgtggtgagaatagtctgccacragctaggtctccctgaatgtggcctattattcattttatgggataaatcagggcaaaagctctttctctttccatagtctcaataatagccagctgtggcttgagcaatgtcttctaggattatcacagcagagatcacagcttcctaaacactcagatgaatagtttaaaaatttatattagaaggggattcttctccaatgatttctgactttgaaaataatactaatggccacgagctacccaatgcctgactcctatggttttctgacaaactacatataaataaacaaacaaaccaaataaataaaaacaaataggtttaagtcatatttcttaaaaaaataatagtttgttattgccattattattgtttttattcaggatgtagagctcatctggattgctgcttctgaaataagacagaaaacagaattacaatataatagaaaggacagtgaactggtagttaagcaacctaggttcttctatctgcactaaccagctctgctggacaaggctgatatactgcaggacagaagttttctgtcaaaagaaatccatgttccaaatgacttctcagactattttagttctgaaattcttacactacctaattccataccttttattttattacttctatatagtatcc

SEQ ID NO: 66507 - DNA, 757 bp, Homo sapiens
tttattgttgagacaaagagtctctccatcaggaattaccaacccaacccttacataattgccttcgctcaacattcaagtgataatgccttctattaaatttctctgtaagtttatctcccaaatattaaaaatgtagacagccatctcagtaaagcattgcatattctaaaggagcttataratgttttactgtttatagttcatagtcaaaacccacaattccactctttatattctcagacctttagttttggcttagttttaagctggcctgagactgactcagtttttgactgaatgtttaaagcactgtttggaagacatctgagcaaaaggcctgatggagaaactgatgacggcagatttcctctgcagaactggcaggtgttccctcgctgagccggcttcaggccctgctccgtgacctcacccttgcttcttcctctccatccttagtcttcatctctttccaacttggttccgcgtttgaatcttccaggaaaatgccctgcccatttcaatcagcaaaatgcttttcagagctttaatgtttaaagctgtaaatatctcctccaaattctgatgtaaaaataaattcgttgggccaattttaagtagttacttgtacgcaattatattctctttaaacggcacattttttcagggtctcctgttaaacaaaatcttagaacctggaaacagcctgactactctggggctaagggcccgtaatgagcagttgtcttccctttaa

SEQ ID NO: 66508 - DNA, 707 bp, Homo sapiens
actggtgagctgataggagtggaggagcagcagcctggaggcagagtgattggagggtgattgcagggtgtagcaagggaggccagcagtgggcaaaataagcaggtaatagcttcttagaaacagcaaggaaatcctttcagaaactgattttataaaagtcatgtggctattttaagcagataacaacatatattactgctacattgcttcatgatctcccagcacattaaaatgtgtcattgaatcttattttctgttttcatcaactttgtatactgtagctagtgatctcttatttttaaaactttgggtgtcattttatgtaacatagtgagttgactgtaagcattctttccaaaagccttcagtacttggtaatstttttatgtgatgtcaagagttttttgcatatagaattcaaattacagaactagctttgtctggaagatcagatgtcaattggaacatttttaactactttttcaacaattatggtggcatcccttgatctgctgctacatactttgtaccacttggtttaaaaaccttgagttacagtagcttctactgtctctttagccgactctgcaccttgagttggcattagaggaggaagtatgggatttggtagacaccatagtgttacagatttaattaatacgatttttcagctgacctggcaggagagggcattttaaagcttt

SEQ ID NO: 66509 - DNA, 926 bp, Homo sapiens
tagactgggggcggggaggaactgcctcttgtcccaccagtgtaatatcttagtctaattctagcctaatgaggatgcatagcctgagggacctaattaaataagtctatatttatccgcatgctttgttttctgccaaggatattttaagtgggagtttagaagagtcactgaaatctggcagggatgtgtatctgcacaggaccaccagagtcactctgtatgtgtaactcgctactgtggttacacgcacacattcacacagtcacacctgaaaacatctctttatgcgcaggcaacaggtagtcaaattgcaaagactttctttctgtaatggcactctattcatactgaatcaataacttgcttctggggccctggagccacccagggctatattcatactgaatcagtaacttggcttcttcggccccgaagtctctcttctgacacctacattgctacatcgaatatttcattaaaaggyattaacactagcagatggggtcaaaccagccttgctgagagttttaaaaaatctttggagcacaaaattctattttctgtaaagcattttgctgattgtttcaggttttctagcctctgccttcttatcttggcatctccacctttttcttatactctcctctctcagactggacagtaccttgccctatctgcagccaacctactccatctcttacccagggcaggggcagtgggcatttgtgtgagaagcaaacacaggagaactagctggggagaatgtcagtactctgacaatctggagcaagtcagagcggagaggggctttagagataacctagcccaccctcctcacttgacagaggagtaaagaatgatctcagaacttgcctcaggacacacagcggatgaatggctgatgcaaactagaattcatgcct

SEQ ID NO: 66510 - DNA, 703 bp, Homo sapiens
tttggaaagaatccatggatgagaacccagtttgcccaggattatctacctgataatctccttggaccgtaaattccacaagggcaaggactgtgcattcactgctatgtacagtaggtgctcagtgaatatttgttgactgcctgaccagattctaagcactgactaaatagttacattctagaaaaatccagaaaaaaggagtttccccgaagcccatgaaaccctatccctgcccctcattttcaaacccccgtctccaatttgctacstccctaatccactggggcactgatctatactgatgcgggatgtgttccattgttgtagaatataaaaggatgagagaacacttctgtggccttacccgcagaccaaggaaagccccttgtcaagccagtgggcacctcttgttgcccatgcctttcttctcaaccctcctgctgtctccctgtcaggaggtcaatgagtgagatcgtgtgtgtctcacccccatcatccaatggccttggcccggtccctgtttctgtgagtgtcgaccgagcccatgtggatagcaacctgcagtttgagtacatagatgaccctcgggtccagcgcatcgagccagagtggagcattgccaggtgaggtggaaggtgggagggatgcacctggaagccacccagcatgatccctgcagcccaagtctggctcatgagag

SEQ ID NO: 66511 - DNA, 787 bp, Homo sapiens
  misc_feature (1)...(787): n = A,T,C or G
cccacacttctcagagctgcccctggacgaccaggtcatcctgctgcgggcaggtgagtggcgaggcctaggtggggatggggatgccatgcagatgggacacgtaccaggacactcccccctcccgggatactccgcactcccgggacactcccctgtcctgggacactcccccctcccaggacccactcctacctcccgggacactcccctctcctgggacacactcctacctcccgggacactcccccttcccggaacacactcccccctccctggatgctcccatctcccaggacgctcccctctcccaggacgctcccctctcccaggacactcccgactcctgggacacacttctacctcccgggacactccccactcctgggacacacttccccctcctgggacacacttccccctcctgggacacacttccccctccagggacacacttccccctcctgggacatactccccactcctgggatgctcccatctcccaggacgctccccgctcccaggacacacttctacttcctgggacgctcccctttcccgggacactccnnnnnnnnnnnnnnnnnnnnnnnnnnnnnnnnnnnnnnnnnnnnnnnnnnnnnnnnnnnnnnnnnnnnnnnnnnnnnnnnnnnnnnnnnnnnnnnnnnnnccccctcctgggacagtmcccactcccgggacactcccctctcccgggacactccccgctcccaggacgctccccactcccgggacactcccctctccccggacactccccactccc

SEQ ID NO: 66512 - DNA, 923 bp, Homo sapiens
ccatcatgcctggctaatttttctgttttttgtagagataggattttgccacattgcccaggctggtctcaaactcctgggatcaaatgatccacccgccttagcctcccaaagtgctggaattataggcgtgaagcactgtgcctggcctttatttccttaaaccactgagatctgggatccatatgtgatagcaggagtcagcaaactgtgacccaggccacatgtggcctgctgcctgcttcttgcggccctaaggtcttgcatctttcaaggtgtacctttccactgggcacctacatgccagcatcatagtttcaatttgccccrtggctcatatggcttaaaacactgactacctggtgcttcaggagaaggctttctgcgtctggcatggctgccttaggtcagggtcccttggaagcagcctctgacagaatacttgagtgtgagtagtttatttgtgggggtgatcccaagaagctctgatacggaagtgaggtacgtgagcaagctggccaccactgtgagaaatttgggtgcagtccccaggggacctctggatgacagtggtgaatccccctgagtgttccgtctgagggagaggaagctggggcatttctccccactcctgtccctcgccacagacagagaccagagaaactctaaattagaggctgcaggtcagggagtgccggggaacgggcagcgtcagccacagctgcctttgctgagacctttgctgaaaccccttcactggacagatgagaaaccaaggctaacgggggtaaagcatcatgctccaggctgtgaagacaggaagaggcagagccggcctgtgtctaggcccggctgctcctgggcaggggtcttcctgctctcctacctcactggatttcccaagctcagcctggtggggtgtg

SEQ ID NO: 66513 - DNA, 725 bp, Homo sapiens
acagatattctgtctatagcacaactacacagcaatacagggaaaggcatcccaggctgggggaacagcatatacgaaggctcagaggcaggagagaactgaggtgtgcaaagagtaacacagagacacatggggagagaggctggtgatgaggcggggaccattggggctgagggttctccatgttgcccaggcagacatgtgctggaattgctggatgtatcgcccagacatccagcaattccagtgcttcttctcaatcccccttcgaatgcctctttcacctttcacaaacgtttyctcctgctcaggaggcttgcctggcctgtgtctttgctccctccttcccttccctctctccctccatcccttcctctgccttatagactcctccctgagaagaaggccagctcccagtcttcccagtcttcccctccctcaggcccaatccagcctgagcacggtctggatttagtctttaggcttggtcaagagtgtgtttgcaaacctcttcactccttgctggctagagcttcccatcttcttaaccaggtcccctgagactccaaggcaggcacccactggggctgatcacatgaataaattgggtgtagttccaagaggtgggaactgtggttttgtaaattcacaagttgtctgcatttcacagtgcacaggtgtaccatggtgaatcagagctccaggcaggctcatggtgttagccc

SEQ ID NO: 66514 - DNA, 999 bp, Homo sapiens
aagccccatcaaggcaagctgggtatttactatgtgacatttagacatatagtaaatatgtgctaaaagcaaagagaagatcctgtaagcaaccatacaaaagacagattccctatcagagagcatgtaggctgccagccaatttccaacaacaacaaaaaaagccccaaacaaaaacaaagccccaaacaattagaaaatattttcaaagtgctccaaaagaactgttaacttcaattctgtaccagataaatgtcattgaaatcatggtggataaggaaaatttcagacaaactaaagctgagctagatcctcctcacagacccactctaaaacaacttgtaaataatataaatcaagaggaaagaaaatgattccagaagggagaatgagatgccagaaggagtgacatgtgaaagaatcatttagatttactcacacattcatccaaggccgactgagtaagtactcttgggaagtcagcagggaagtggggagtagaacagaaagggaggtggccaagggggaggctctcagcaaagcccgaagagtgaagagcagggcttcggcctggctgttaccccactccagggaggggctgggtttttatgcttcccaccctcaggcctggtcaagagtaggtggagrgcagccaccgttccctctgattcttccagcctatgggaaaaaatgggctgcaatatcccaagggcaaaaaataaaaatataaataaataaaaagacctagaattgctgctcttggaagcaaaagtccactgacgccagagggtgctcaagaaatggtataaagcggaggccacacatcagccttgtctactttgactgcattaaataatatccaatttgaaagattaaaaaaaagaactaaaatatcagccacagctaacaggagaggatttggtggcagttaaagtgtcttgcgtttcttttactgtttaagagaaaggtagagaaatcaatttcaggcttaggtatgca

SEQ ID NO: 66515 - DNA, 999 bp, Homo sapiens
aagccccatcaaggcaagctgggtatttactatgtgacatttagacatatagtaaatatgtgctaaaagcaaagagaagatcctgtaagcaaccatacaaaagacagattccctatcagagagcatgtaggctgccagccaatttccaacaacaacaaaaaaagccccaaacaaaaacaaagccccaaacaattagaaaatattttcaaagtgctccaaaagaactgttaacttcaattctgtaccagataaatgtcattgaaatcatggtggataaggaaaatttcagacaaactaaagctgagctagatcctcctcacagacccactctaaaacaacttgtaaataatataaatcaagaggaaagaaaatgattccagaagggagaatgagatgccagaaggagtgacatgtgaaagaatcatttagatttactcacacattcatccaaggccgactgagtaagtactcttgggaagtcagcagggaagtggggagtagaacagaaagggaggtggccaagggggaggctctcagcaaagcccgaagagtgaagagcagggcttcggcctggctgttaccccactccagggaggggctgggtttttatgcttcccaccctcaggcctggtcaagagtaggtggagagcagccaccgttccctctgattcttccagcctatgggaaaaaatgggctgcaatatcccaagggcaaaaaataaaaatataaataaataaaaagacctagaattgctgctcttggaagcaaaagtccactgacgccagagggtgctcaagaaatggtataaagcggaggccacacatcagccttgtctactttgactgcattaaataatatccartttgaaagattaaaaaaaagaactaaaatatcagccacagctaacaggagaggatttggtggcagttaaagtgtcttgcgtttcttttactgtttaagagaaaggtagagaaatcaatttcaggcttaggtatgca

SEQ ID NO: 66516 - DNA, 519 bp, Homo sapiens
cactggggtctaaatgagtttttcctaaaacaggcctattcacaaggtgagcctggccatctcacaccatttctttcatgcctctgttttggcagacatttccccatcttcattcatcttcctgcaagaaacaactccaattcacaccatgaattgtaatgttaactatactgtacagtggtttatttaaaagccagaatctatgttgtttgatagccaaacttacagtgggggaagggyagacaacccagtcatcaaaggataaaaatctatactaatcttaaaagcaaaacacagtgtagtatttcttgtctatttttctacaaaagaaggccattgtatttctgttcctggccatgtcagcagtgatggtccaccccacaacggcccccaccagtttttttcaagcattgattgttgacttcccctgacaccccatcacaacccattagtactgaaaactgacaagcccagctgcagcagcaaaatggcaagtttgaaagaaaatatcgaaagcac

SEQ ID NO: 66517 - DNA, 582 bp, Homo sapiens
atcccgggacttggtttcatgctccgagcccagccctgtgtccacctgcagatgaccagttcagatcgtccgcgttctagcccatttgggccactcttgcatccaatctttctggaaagcattctttggcattatttggttgcaccacacctgacgttgtcctgaagtgcctgagtgtctggttcttctcccctatattggggaaataggargggtaggtctcctccatggctgctgggtgagagagcaggggacaaacgccagaaccatgagcaaggggagaggctggagattgcactggaaaggtgggtttaacatggaccacaaaggcaagcagaccctgactgtgcatcaggaactgaggcgccttccccagagaacgctcagagaaccacctgggatgaagatgggtgtgagatttgcccagggaataatttgtgcctcagaggtggtccggatggaatccagagagggtgccagaactctggtggttgttttccgtgcttctggcccttatttaagtgaggcagggccatttaaagctgccatgatatgaaacatattggcttatcatcaacaaag

SEQ ID NO: 66518 - DNA, 582 bp, Homo sapiens
atcccgggacttggtttcatgctccgagcccagccctgtgtccacctgcagatgaccagttcagatcgtccgcgttctagcccatttgggccactcttgcatccaatctttctggaaagcattctttggcattatttggttgcaccacacctgacgttgtcctgaagtgcctgagtgtctggttcttctcccctatattggggaaataggaggggtaggtctcctccatggctgctgggtgagagagcaggggacaaacgccagaaccatgagcaaggggagaggctggagattgcactggaaaggtgggtttaacatggaccacaaaggcaagcagaccctgactgtgcatcaggaactgaggcgccttccccagagaacgctcagagaaccacctgggatgaagatgggtgtgagattygcccagggaataatttgtgcctcagaggtggtccggatggaatccagagagggtgccagaactctggtggttgttttccgtgcttctggcccttatttaagtgaggcagggccatttaaagctgccatgatatgaaacatattggcttatcatcaacaaag

SEQ ID NO: 66519 - DNA, 648 bp, Homo sapiens
tttaaaatgttttttgtagagatagggtttcgctgtgttgcccaggctggtcacgaactcctggactcagatgatcctcccacttcagccttccaaagtgctgggattacagacatgagccactgtgcctggctggactcgccctgacttgtaacagctgggttacttttgtttgttttgaattctccttctctctagaccagtactctgtgtactgtgtttggtttcttttagttaatgttgtttttgtgagattcatgcatacygtgtgtagaaatagttctttcattttcattctggatggtttccattttatgactatgccctatacctcagactggatattttccagtttaggggtgttatagtgctattgttactgggggtccttgttcttagagctcccaagatggtggtgggccgcttccaagatggcagtaagtctcttgttctctgacctggggttcttggcctcacggattccaaggaatggaatcttgggccatgcggtgagtgttatagctctattcagctcgattaggaggaaccccgggcacttagcccgcgcaagaacaatggcgagcctctagcccaattgggagcggcaatgggtgccgcctcgctggatcagaagtgcagtggacaccc

SEQ ID NO: 66520 - DNA, 648 bp, Homo sapiens
tttaaaatgttttttgtagagatagggtttcgctgtgttgcccaggctggtcacgaactcctggactcagatgatcctcccacttcagccttccaaagtgctgggattacagacatgagccactgtgcctggctggactcgccctgacttgtaacagctgggttacttttgtttgttttgaattctccttctctctagaccagtactctgtgtactgtgtttggtttcttttagttaatgttgtttttgtgagattcatgcatactgtgtgtagaaatagttctttcattttcattctggatggtttccattttatgactatgccctatacctcagactggatattttccagtttaggggtgttatagtgctattgttactgggggtccttgttcttagagctcccaagatggtggtgggccgcttccaagatggcagtaagtctcttgttctctgacctggggttcttggcctcacggattccaaggaatggaatcttgggccatgcggtgagtgttatagctctattcagctcgattaggaggaaccccgggcacttagcccgcgcaagaacaatggygagcctctagcccaattgggagcggcaatgggtgccgcctcgctggatcagaagtgcagtggacaccc

SEQ ID NO: 66521 - DNA, 522 bp, Homo sapiens
gcttgggaggctgaggcagagaattgcttgaacccaggaggttgcagtgagccgagatagcaccactgccctccaggctgggcgacagagtgagactccgtctcaaaaaaaaaaaaaaaaaagaaaaagaaaaagaaaacagaataagatagtaacagctacaaatattcatgtaaatctttccatatagaacaggagaacaagattgaacctcatattaaaattatctattgaatgccttattacagcagttcccaacctttttggcaccaggactggtttcatggaggaccgttttttcacagacagggagagggagatggtttcaggatgattcaagcacattacatttattgtgcattttattcccattattattacattataacacgtaattaaataattatacaactcaccctaatgtggaatcagtgggagacctgagcttgttttcctgcaactagatggtctcatctgggggtgatgggaggcaatgacagatcatcaggyattagattctca

SEQ ID NO: 66522 - DNA, 971 bp, Homo sapiens
gttttgcttaatcaggcatcaccaacatagacactgtcttaaaatccccagctaatcctgccctcctcatcactctgaggccaaagtgctgggattatgttgtatttatttttgtctactcagttcatctaattagaatagtaggagaaacagggctaggaacatacatctcctcattcatggaacctaataagtgaaagacccgacaacccaacccttttacaaaagtgcttgcaatcccttaggcaagggacctaagctgccagttgagcttcccatggactggaaacatggaaaatgtgagctctttgtcacagggaggacctaataagagaccaggggccaggagcggtggctcacgcctataatcctggcactttgggaggccgaggtgggcggatcacaaggtcaggagatcaagaccatccgggctaacacggtgaaaccccgcctctactaaatacaaaaaattagccaggcatggtggtacgcgcctatagtcccagctacttgggaggctgaggcaggagaatcgcttgaacctgggaggtggaggttgtggtgagccragatcgagccattacactgcagcttaggcaacaagagcgaaactccatctcaaaaaaaaaaaagaagaagaagaaagagaccaggaagattacatgctaaacttttcatagattacccacataacacttcacagttatcataattgtctgcttacagctctctgtctggtacaaggactctgtctatcacaagagatgttcaataaatgtctccaatgaataaattactgaatgaatgagaggtgtttccaagtacaccattactatttacccaaataagaatttagcttgtcttggtgtttgtgtgtacacaaagagaaaataaggtaagtctttcagaaagtaccttactacctgtttcggatctaagatggtgaaaccagtttttaaaaagagaccacg

SEQ ID NO: 66523 - DNA, 665 bp, Homo sapiens
catctgcagatgaatcaagagttcattctcttcccatgtggtagatctggggatttgtcacattcccttcagcrgctgctgctgcctcttttaagttttaaacaaaatagaaatggagtctcactgtgtcacccagactggtcttgaactcctggcctcaagtagtcttcccaccttagcctcccaaagtgctgggattataggcgtgagccaccgcacctagttgttcagcttcttctgttacttgaaataagttaaggtcctttaatagtttcacaattcctgagccaggcgccgtggctcacgcctgtaatcccagaactataggaggctggggcaggtggctcacttgaggtcaggagtttgagaccagcctggccaacatggtaaaaccccatctctactaaaaatacaaaatttagccaggcgtggtggtgcgtacctataatcccagctactcaggaggctgagatgagagaatccctgaacccaggaggcagaggttgcattgagccaagatcgtgccattgcactccagcctaggcaacagagcaagactccatctcaaaaaaaaaaaaaaaagaagaagaggagtttcataacttctgaattcagaatcagaagccataatattacctgattacatgaggagaaactggtactga

SEQ ID NO: 66524 - DNA, 665 bp, Homo sapiens
catctgcagatgaatcaagagttcattctcttcccatgtggtagatctggggatttgtcacattcccttcagcagctgctgctgcctcttttaagttttaaacaaaatagaaatggagtctcactgtgtcacccagactggtcttgaactcctggcctcaagtagtcttcccaccttagcctcccaaagtgcygggattataggcgtgagccaccgcacctagttgttcagcttcttctgttacttgaaataagttaaggtcctttaatagtttcacaattcctgagccaggcgccgtggctcacgcctgtaatcccagaactataggaggctggggcaggtggctcacttgaggtcaggagtttgagaccagcctggccaacatggtaaaaccccatctctactaaaaatacaaaatttagccaggcgtggtggtgcgtacctataatcccagctactcaggaggctgagatgagagaatccctgaacccaggaggcagaggttgcattgagccaagatcgtgccattgcactccagcctaggcaacagagcaagactccatctcaaaaaaaaaaaaaaaagaagaagaggagtttcataacttctgaattcagaatcagaagccataatattacctgattacatgaggagaaactggtactga

SEQ ID NO: 66525 - DNA, 364 bp, Homo sapiens
cctcccaaagtgctgggattacaggcgtgagccaccgtgcctggccagaggttagaagcattttaaatggtataccttgaacagactgttattagaaaatgaatattaaatactctgctggagatagctgagaagraagtgaggaacacagtagaggaaagcaagattgttttttagaaaacctaaataatcagaaccagaattttggtagttaatatgaaatcctcctgttgagggtgagtacaaagagaattatgtggagaaaacctgttagagaaaacctaaatcatcaataaaagtggtgctggtgaagcctcagaagcaattgaaaaacatgttgctggaactggaggaaaaaggatcc

SEQ ID NO: 66526 - DNA, 968 bp, Homo sapiens
gaataggtgatttttggatgactcctatgtgctaactaccattgtacttgtaggtgttaccatgcagaacaaaaggtaaagtattccttgggaaataaacagccaaataaagacttaaatacacacaagatctcagctatcacattcgataatttccagaaagaaaagaagtgtgataccagagcacatgacaagaagtgggtttgagggtgagaggtgggggtggtgtcatcaaagtctttcttaagtgaatgatgatgtataagaaaaagttgatggttctggacactggctgcacattgcagtctcttggggaggcctaaaaacctttaggccacatcccagaccaatygaaccggagagttgggtttggggcgcaggcatcagtatttatttatttatttatttatttatttatttgagatggagtctcactctgtcaccaggttggagtgcaatggtgcaatctcggttcactataacctctgcctctcaggttcaagcgattttcttgcctcagcctccccagtagctgggactacaggcgcctgccaccatgcgcagttaatttttgtatttttagtatagatggggtttcaccatgttggccaggatggtctcgatctcttgacctcgtgatccgccctcctcggcctcccaaagtgctgggattacaggcgtgagccgctgcacctggccagcatttttttaaatcacctcaagtgatatcagtttgcagcccaggtttaagactccctgaacttaaggctataggggagatatgcaggcctgatgaaagagtgacatgaaagaagttagtgtcagaacaaagtgtttgatagcacaaaaaagaccaagaagacaaaagatttgtgtatgtataatgcacttgtgtaatataatgtatttactacatgagtgaataaaacagattagcttttaatacatgctattaaaagataagctac

SEQ ID NO: 66527 - DNA, 634 bp, Homo sapiens
agccaactccttcattgaatagatgaggaacataaagccaagagaaaatgataggcttgacaaagtcaaaataaccagacccagattgtctgacttccagcccaatagccttccaggagagcaacagacattgtgaggaacacaatgtcccctgtgacacaggacacaatgtcagaaatcagcacccattttccttctttggttaacagttatttggttttcttttgggaagtcatgcttgctcaacaataagtcctcttggtcccccagagggttacttccccagccctaagggtgtactcacaacccaggccagcttaattagcatgtcttatacccttgactatagccaatgggtttgtcaaaggcatgaaattcagcttggctcagtaaaactcaattccagaacttttgctagaattgtggtgaagactccgtgtgatcattagccataaagatggggtgaaccttggtctgttgggggtcaccatgtggaggtgcttagttgagagtgaagttagcagaaagagaggasagcccaagagagaaggaagtggagagagagaaagggaggaaaagaataagggcaggggaggatgagagagagcatgaaatccagatttgagtcgctgga

SEQ ID NO: 66528 - DNA, 1107 bp, Homo sapiens
ttagggtggaatacaaattttccatctgagtatagtctccaccatttgttagtcttgttccagccttttcactcagttattttactggcctagcccctgaaaacagttaaatttgcagttcctgtgtagactctgccaaagagggtgggggaaattaccactcctaggtgtttagaaaacaataaaaattgttggcatttcccttgggaaataaagcaaaattacatcttcccacatttgctttttcctcaagacagatgtaaaagaattgtcttcctttatccctctaacccttggtgttataccagagatcaaaaactgtctagggatgattttaaagcagagtgcttgagtagcttcccagaccattttaccaccaccaactaccttccccaactagaagaagaaaaaaaaaaaaaaaaaaacagactggcttactatctaaaatcccaacctaggccataataattaaagtttgaggtacactttcataacaatgagagtctttttaaaaatatttacctttttatcaccaaacactgatgatttaattaaaagttttctaattatccaggatgtttcacaactgctacacaagtttctagctgttctgcatttgatcattattttggtcatcctgcaataaatttcatctgtgaaatatgtggttctacataagagacatcaaagacatttttaaaaccttcatctctagaagttcactccaaatcacagcagcagaaatggaaagtctccacaggaagcactcaccaaaaccagaagggactccagaaacaaatttagccttamacatttacaaaaccacaagaaaaattatctcttgattcctcatgctatgagcactcaaaaacaacaaattcaaatgatttgtgcttttcaagtcttctgctcatgttagcctgacaataaacatccctgctctacacggaactaagagaggttaacataagaagagcatcccgtagggtcttgctactcaaagtgaggtccataggctcgcagcatctgcatcaccagggagcttaatagaattcagattctcaggccccacccagacttcctgaatagaatgttcactgtaagatt

SEQ ID NO: 66529 - DNA, 736 bp, Homo sapiens
gccctgcatttactcttgaaaatggcttcttgtccaaagagaaattgatgattattaacgattatggtgttccctaaggaagggctcccctatgctcatctatgtcccctctggttgcttcatgtatcagtaatttatttgcatttactcttgaaaacggcttcttgtccaaagagaatttaatgattatgtgattatgatgttccctaaggaagggctcccccatgctcatccatggcccctctgacttctcagctgagctgcatctcaactctccaacatgaaaactatatccccagagcaatggatggttgaccacctgcatcaaaattacacagaggtgtttgataaaagttcccattcccaagcctcattctgtctataagacaggattctcaggaaggtggaacagggtctaaatgaggctgggaaaatgaaatgcagttgtatgactgaactcatagagaaaatccctgatgtcaataaggttagaagaaatacgcaaggctgtaaactatgactgtgaagtaaacgagaaatagctccctctctgacagaagcacactagatgtatttacaggtatatagcaaattgttgcagaagttaaatattgattttaaaacaattcctataaaaagatcagcagttgctaaaggttggggagtgggagatacgtgagtaggtggagcacagagcatttttatggcagtgaaaawaccctatatgatactccaa

SEQ ID NO: 66530 - DNA, 1004 bp, Homo sapiens
taaaaccccaaaaaacataatttaatataaataattataaaaattaatcatagtcccccagcccaacaataaaccccattaatattttggtctgttcctttccaatcttggtgttttatgaaagtgtgtgtaataggtacagttttatatccttttttcccctcatatcgaatataaaactcaatttggcatagtaaagttagtgggggaagtaaagtcattgtcaagagggagggaaccacagaggtcaaccactttttaaaatgtctccccttttttcataaaggatttaaggtagcagagatcaatacagtaatttaaagaactctgacttataaataaagttggttattgacttagaactgatatttcactcacaggtctgtgagtgaggtctgagatatcttcagaaagaaagtttccttttagaactctgaactactgcactgcatatctttgatgctaaacaaaagaattttttatctccagtacagtcagttttagtatttctgggggagcttgggagtaatagctcacttagagagtttaatgaaagtttagactcttcaaaacattgcacataattgccaaattttatttgttctcttggggagtttataggccccctaagcccatggacctgttagagaatatgtgtctaggaaggttttctggaaaaaccatttaggtccttatttgagagaattctcatttcagtaaatcaagcttttctcctttttttttttctttctgatcctgacaatgctaacctagaagctgttacttgctaactgttactaacgtaaactaaggggaagaaagggaaaaaggactcytacttggcattgaggaacatgtcagtctgactaaattagcagattgagttttaacaaaaaactctataagattttctctgactctatcagcataaggcagtagaaaatccagtatttccttgacaacttgcttatccttcccttattaatttcttttttttttttttt

SEQ ID NO: 66531 - DNA, 1114 bp, Homo sapiens
actgtgtgttttcattcctacagaaaaccaaacctttgatgacagaattctcagtgaagtctaccatcatttcccgttatgccttcactacggtttcctgcagaatgctgaacagagcttctgaagaccaggacattgagttccagatgcagattccagctgcagctttcatcaccaacttcactatgtaggtgacacgctggtcagggatgaagatttctgcctagggtggtcaggttgagcctgagatgtgaggtccacagccttgtgactgtgaggatttatattccagtagatggtatatagatcagaaggtcaattcttttgttcaaattcattggttggttcattcattcattcattccttttcttcttctctttttccctccctccttccctccctctctccctccctccctccctccctccctccttccctgcctccctccctccctccctcccttccttccttccttttctttccttccctcctcgtctctctcccttccttctattttctcttttttattcaatttttttcttcctttctttctttcctctttctttctttccttcctccccttcaacaaatgaatgacctttatgggccaggttactcttcatgaaaactggtgcacttctctgagaaagacagcmtcacagtgctgcacaaattccagtagggagaaccagtcaatagataaatgaacaaagaataaatgagatgaatttcagacagttgcaaatatgataaagatggcaagtcagaccaagagggtcttcttcagttagggagatctgggaagagctttcaggaggctcttcctcctccatggtgaagttgagggttgaaagacaaggcagtgtagaacctttgatatactagattggatatctttcctccttctctgagccaagaagtaaagatatgtaaaacgggctaggtgttgggtttaatttttggcccaggtcagatgtaagttggtgaatcttcatggtagtgtgagcagatcttgtgacttttctcctggagaatcacagaggcaccatgggttgggtcttgctatttggacctgttgaaaattgccctagaataaaatgaatgattcaaagg

SEQ ID NO: 66532 - DNA, 1210 bp, Homo sapiens
tctatttcctcaacttgaggtatgtgaagatggtgtatgggggtggtgaatgatgagtattgatcccagatctcccagcagtacctttggaggccacagtagcatattccctattattctccacacttctcccrgttgcacctggagaaatgactgctctctgacacaaccttgaagttaaacatttttctttctacaaaatgggcagcaacatctccctacttctattatttatttttatttttgttacattagtttattttatttatttttgaagacagggtcttgctctgtcacccaggagggagtgcagtggagcacacacagctcactgcagcctcaacctcccatgctcaagtgatcctcctacctcagcctcctgagtagctgggactacaggtgtgcaccaccacactcagctaatttcttttttttctttctttttttttttggagagacgaagtctcactatgttgctcaggctgatctcaaaatcctgggctcaagcagtcctcccacctcggactcccaaaatgttgagattacaggtgtgagccactgtgccaagctatctttgttttacttgtgtctttattctggccactgtaagtaatagcgaatgccagattgtgttgcctgagtgtgctgtcgtacagactaggaccgagtctaacacgtcctgacacagccaagcagaatgaaaatgcacgaggcaaaaacaatggcagtcagagctttagaaagccagagagcaaccatcttattaataacgagactagaatgagccagtgttatgtatttgttgtagagccaatgttttctacctcagatcagattattttcaaaattcaagttttgaatgaaatcataaggtggaaaaggaaatatagtttaaaatattaaacttgccaggcatggtggctcacacctgtaatcccagcactttgggaggctgaggtgggtggatcacctgaggtcaggaattcaagaccagcctggccaacatggtgaaaccctatctctattaaaaatacaaaattagcctgacagggcggcgcgtgcctgtaatcccagctacttgggaggccaagacaggagaattgcttgaacccaggaggcagaggttgcagcgagctgagatggtgccactgcactccagcctgggcaacaagagcgaaactcccgtctcaataataatgacaataataaa

SEQ ID NO: 66533 - DNA, 1210 bp, Homo sapiens
tctatttcctcaacttgaggtatgtgaagatggtgtatgggggtggtgaatgatgagtattgatcccagatctcccagcagtacctttggaggccacagtagcatattccctattattctccacacttctcccggttgcacctggagaaatgactgctctctgacacaaccttgaagttaaacatttttctttctacaaaatgggcagcaacatctccctacttctattatttatttttatttttgttacattagtttattttatttatttttgaagacagggtcttgctctgtcacccaggagggagtgcagtggagcacacacagctcactgcagcctcaacctcccatgctcaagtgatcctcctacctcagcctcctgagtagctgggactacaggtgtgcamcaccacactcagctaatttcttttttttctttctttttttttttggagagacgaagtctcactatgttgctcaggctgatctcaaaatcctgggctcaagcagtcctcccacctcggactcccaaaatgttgagattacaggtgtgagccactgtgccaagctatctttgttttacttgtgtctttattctggccactgtaagtaatagcgaatgccagattgtgttgcctgagtgtgctgtcgtacagactaggaccgagtctaacacgtcctgacacagccaagcagaatgaaaatgcacgaggcaaaaacaatggcagtcagagctttagaaagccagagagcaaccatcttattaataacgagactagaatgagccagtgttatgtatttgttgtagagccaatgttttctacctcagatcagattattttcaaaattcaagttttgaatgaaatcataaggtggaaaaggaaatatagtttaaaatattaaacttgccaggcatggtggctcacacctgtaatcccagcactttgggaggctgaggtgggtggatcacctgaggtcaggaattcaagaccagcctggccaacatggtgaaaccctatctctattaaaaatacaaaattagcctgacagggcggcgcgtgcctgtaatcccagctacttgggaggccaagacaggagaattgcttgaacccaggaggcagaggttgcagcgagctgagatggtgccactgcactccagcctgggcaacaagagcgaaactcccgtctcaataataatgacaataataaa

SEQ ID NO: 66534 - DNA, 647 bp, Homo sapiens
tcccgtctcagcctcctgagtagtagggactacaggcacgcaccaccacatcagctccgggcgacagaatgaggctccttttttaaaaaaaaaaaaaaaaaaaaactgactctgaagcttaaaaccttcacctttaggaagaaatcgtatttgtttgtttgagaccgagtttcactcttgttgcccaggctggagtgcaatggtgtggtcttggctcaccgcaacctcygcctcccaggttcaagagattctcctgcctcagcctcccaaagacctgggattacagacgtgcatcaccatgcctggctaatttttgtatttttagtagagacagggtttcaccatgttggccaggctggtcttgaactcctgacctcaggtgatctgcctgccttggcctcccaaagtgctagggttacaggtgtgagccactgtgcccggcctgaggaatcgtatttggattactcatctctccggccactttacttacaaaaaactaaactaagaagtaaataagccagaacccctccctactcatcccctttggtctccccaagaagaggaggattctaagaaaggagctggagagacagtggggtcttcgggggttccctgagacgcctcttcctgcccttgttccagctttg

SEQ ID NO: 66535 - DNA, 647 bp, Homo sapiens
tcccgtctcagcctcctgagtagtagggactacaggcacgcaccaccacatcagctccgggcgacagaatgaggctccttttttaaaaaaaaaaaaaaaaaaaaactgactctgaagcttaaaaccttcacctttaggaagaaatcgtatttgtttgtttgagaccgagtttcactcttgttgcccaggctggagtgcaatggtgtggtcttggctcaccgcaacctccgcctcccaggttcaagagattctcctgcctcagcctcccaaagacctgggattacagacgtgcatcaccatgcctggctaatttttgtatttttagtagagacagggtttcaccaygttggccaggctggtcttgaactcctgacctcaggtgatctgcctgccttggcctcccaaagtgctagggttacaggtgtgagccactgtgcccggcctgaggaatcgtatttggattactcatctctccggccactttacttacaaaaaactaaactaagaagtaaataagccagaacccctccctactcatcccctttggtctccccaagaagaggaggattctaagaaaggagctggagagacagtggggtcttcgggggttccctgagacgcctcttcctgcccttgttccagctttg

SEQ ID NO: 66536 - DNA, 922 bp, Homo sapiens
ggatccagatcttcccagcagcaggctttatagatttctgtgtctcccccgctgccccccgcatgcccttctgctgcagccctctctctctattaccgggcatcttggcagcatttcccgggaacctgcacctgctctggggctcatcggtatatgtgctggaaatgcgtgtgaatgttcagcgtggcgggggtgggagcccatggatggtttgagtgtttctcaggagaattcagagtacctcaaatgagggtgccttgttcagcagtggagttcttgttctggtaactactttctgtggctaagcctgggtggaaatgcagaatggacactgtatctaattgctggtaacctatggatggagggagctgcagttccagtgtggccccagtttataaatacatgaacattcattaatgtaaaattaaattrgaatgaaatttcccatccagttttgtttagaaggcagaaataagtgggttggctgtgtaattttgctgcggatgctggagttggtagtcacaaggtgctaatagtaatttgctctttgcttgtgcctccatcccagatctcgaggcagatattaccaccttggttttgcacaggctcattgaggttaaagggctggttggaagttacttggcaaggggttgagtgcggaggccctaaaattctctggcccgttagaccttgagctagtcagtaaactagaaatggaccgagacccgggagacctgaattccagtcctcactctgtcactgactcagtgtgtgggcaaaaaatgatcagtttcctcacctataatggaagggccagtggtactcttccacttatttggatctgagttaatatttgaacttagacctcacaaaaggcacacaatgctaatgtaagcatcatttatggccaactttctctgag

SEQ ID NO: 66537 - DNA, 894 bp, Homo sapiens
gcattcatcagctgctacagaatcactaacacagccatgagttgcatctgcagctgggactcaaacctgtgtgggcctttgactgatcagaaacgattgccctaggtgatgacaactccgaaagagaaaactctttcctcctttgctggctcctcttacactaacaatcaagcaagtgaatgttacgctctctcacctccccaaggatggagccgctgactgctcaactgtaagctcctcagtggtgaaggccaggttatggccttcctccatagatcctgcaatttcccaaacatggtaagctctcaaatcaattctcaccactcaggacacacaaatattcctttctcactcttcacaacttctcttcatctagttctgctacatctgaaactatattcaaattatctttgtctcatgagccacaaccaattatttacttatccattcagacatttactgagtgtttttttatgggccaagaactagctagacactggtaggggagagagggaaagataaaaatggcatcatctctattttcaggaagctcatactaaaaatatgcagggagtacagctttagaaagttcacgggtttgtagaattgggactagataagattcttgccttaaagatctttacactttgggccagtgaagaccaccatgaatratgtgagggccctgggtatcgtataacctgggccagacactccccaggctgccagccaatcagcagtacagtcacaatgatgccactgggcgtgctcctgctcctttaggtgggctggcttggctctgtttcgggctaagctgaaaaaaaaaaaacccatgttccttctgtaacaagtcttggccaagtttcacaagtcatttcttcagactgtgtgtat

SEQ ID NO: 66538 - DNA, 1037 bp, Homo sapiens
atctggctgagacctatctgaattaatggctaaraagatttgagtcataaaaaaacaattgctgttttaagccagttgtatctcccaaaattcatatgttgtgtctcccaaaattcatatattgaaacttaattgccaatgtgacaatgttaagaggaggggcctttaagagatgattaagtcatgagggcagaggtctcatggatgggattagggtccttataaaagggcttaagggagtgggtttactctcttattctcctcttctacttgaataaacattatttgtacccctacttttgcccttccattccttctgccatgtgaggagacatagatggtgtcatctatgaggaagagaccttcactagccactgaacctgttggtatcttgatctggtacttcccagcttccagaattgtgagaaataaatttctgtttcttttttaatcaattatctagtctcaggtattttgttatagcagcacaaatagactaagacaaggtggtttgttatgctgccatagatttttctgggttctgaattctttaatatcagaaactctatggcattcatctttatttctcgacagcagccaccagtaggcccaggcatttgcacaagggtgggttcttttctagaagtgtctccagacattcaaatgtgtttctgaatcagagattttcatccttgactgtacattagaaacagggagattgttcagtcctggcatatgacccaatcacatgtgacatatgttatagttactcctttataaaatagaagaacatggtaaaatgaaaaagcaaatacttctttaatttctgtttaagagataggcaaatggatgaattaaaacatttctatttgattttattaaggtatgagtgtttcttttaaattagaaattactgaaaaatcttgtttttctctgagctgtggctttcctcattacaggggataatgggaactgcatttaaatctaatagatgtaaattcatcattggtagacatttatggactactggttatgca

SEQ ID NO: 66539 - DNA, 1037 bp, Homo sapiens
atctggctgagacctatctgaattaatggctaagaagatttgagtcataaaaaaacaattgctgttttaagccagttgtatctcccaaaattcatatgttgtgtctcccaaaattcatatattgaaacttaattgccaatgtgacaatgttaagaggaggggcctttaagagatgattaagtcatgagggcagaggtctcatggatgggattagggtccttataaaagggcttaagggagtgggtttactctcttattctcctcttctacttgaataaacattatttgtacccctacttttgcccttccattccttctgccatgtgaggagacatagatggtgtcatctatgaggaagagaccttcactagccactgaacctgttggtatcttgatctggtacttcccagcttccagaattgtgagaaataaatttctgtttcttttttaatcaattatctagtctcaggtattttgttatagcagcacaaatagactaagacaaggtggtttgttatgctgccatagatttttctgggttctgaattctttaatatcagaaactctatggcattcatctttatttctcgacagcagccaccagtaggcccaggcatttgcacaagggtgggttcttttctagaagtgtctccagacattcaaatgtgtttctgaatcagagattttcatccttgactgtacattagaaacagggagattgttcagtcctggcatatgacccaatcacatgtgacatatgttatagttactcctttataaaatagaagaacatggtaaaatgaaaaagcaaatacttctttaatttctgtttaagagataggcaaatggatgaattaaaacatttctatttgattttattaaggtatgagtgtttcttttaaattagaaattactraaaaatcttgtttttctctgagctgtggctttcctcattacaggggataatgggaactgcatttaaatctaatagatgtaaattcatcattggtagacatttatggactactggttatgca

SEQ ID NO: 66540 - DNA, 1069 bp, Homo sapiens
atagggttctatttttttaaaacatgaaaaaatcttctaagaacttaactaatatctttttatgatgttataagttctatctttttggaagaggatcaaaggtaattttttcctagtgagttatatattaaaatttttctaacttaaacctgtaatattatatgctaaaaaatatatatttttaagtaatggaaagtattcatcagttaaattcaaaacctagtttctttgttctgggaagtgaggcatcaaaagtcttttaaatagagccataaatgtcatattattgatagaaagaataagtctgctggaaattcaaaagacagccagttgccagggaagatgaaatatctcgtgaaacatagttgaagtcagattcagaaggccttgaatgccagactaagaaagatagactttattctgatgcaaatggaagtccttgaagagatttttgtagctctaactaatgaatatcctttgttcttctccattaaagctggtacattgaaaatgtatatgcgtatgtatattcatatctgaatgtatgtacaccaaatgtattcacccctaggcaggaaacaatgtgtctataaagaagaaacaggaagaacgattaaggcattcattaattagggtacatttacatttccagagtcagctaaaatcatccacttatttaaatggaaatctcctcagtctattacagccattattattcagcagtaagagataactagtttgaatttcacaagcagagaaaattgtattgtctgttgcttctctcaggggtcactattactcaacttttgagtaaaattacagttcttaggcaagaaaattatttattgagtgcctactacgtgcagaaccgttggataaattccatataaatcccatttactcctcacagcaacttcatgtgattgatatttataatccaaattttatcrgaagaaaatctgctagagtttaagtaaaataagcaactggccaatgtgaacctacttttacacccagaattgttttactctccacattctgtataagcgaatagatgaaaacatcacat

SEQ ID NO: 66541 - DNA, 1069 bp, Homo sapiens
atagggttctatttttttaaaacatgaaaaaatcttctaagaacttaactaatatctttttatgatgttataagttctatctttttggaagaggatcaaaggtaattttttcctagtgagttatatattaaaatttttctaacttaaacctgtaatattatatgctaaaaaatatatatttttaagtaatggaaagtattcatcagttaaattcaaaacctagtttctttgttctgggaagtgaggcatcaaaagtcttttaaatagagccataaatgtcatattattgatagaaagaataagtctgctggaaattcaaaagacagccagttgccagggaagatgaaatatctcgtgaaacatagttgaagtcagattcagaaggccttgaatgccagactaagaaagatagactttattctgatgcaaatggaagtccttgaagagatttttgtagctctaactaatgaatatcctttgttcttctccattaaagctggtacattgaaaatgtatatgcgtatgtatattcatatctgaatgtatgtacaccaaatgtattcacccctaggcaggaaacaatgtgtctataaagaagaaacaggaagaacgattaaggcattcattaattagggtacatttacatttccagagtcagctaaaatcatccacttatttaaatggaaatctcctcagtctattacagccattattattcagcagtaagagataactagtttgaatttcacaagcagagaaaattgtattgtctgttgcttctctcaggggtcactattactcaacttttgagtaaaattacagttcttaggcaagaaaattatttattgagtgcctactacgtgcagaaccgttggataaattccatataaatcccatttactcctcacagcaacttcatgtgattgatatttataatccaaattttatcagaagaaaatctgctagagtttaagtaaaataagcaactggccaatgtgaacctacttttacacccagaattgttttactctccacattctgtataagcsaatagatgaaaacatcacat

SEQ ID NO: 66542 - DNA, 1127 bp, Homo sapiens
tgtaatttagatgcatctccagtaatgcaaagcgagagtgggaaaaagcaagcaggcggcggtgcggcgtgcagagagctgtccagcgccggaggtgctgaaaccgggactagctctgtccagccctatgcgaggaacagcagcggcagcggcggcagcacgagcagccgccagagcgttggcagccacttcctatgctcatcggattgtttcaaatactcagggtgtaaagaggcttttcatatttttctaccagctctgattcccgtcccatattttggaccataaatgctggcttttaaaatgcggatttctttgaaaagcctgactaaaaggttacatagcttggattgggtgataggatcttctctgctgctggttagggatttttcctccttttagaatagctgctgtgaaaatttcaccctggaaacgggaagcagcagcagcggcatcagctggttccgactctcattgcctttgcctggtatccaggggaggggtgggtttcagacctaagcttcctactccacacttcactcagtccagctcgcctctgacgtccttgacatttctttccctcaactgcttctttgccctggggcagaagcattaagctaaccccaagtccgctagaacattcagaggaataaccccaccccaaagtccagtaggagtagggaagagagcctggttcaattttctctttggtgtagccatttaaaatgctaaagcatatggtttatttcccaccccagcagaacaataaaaatggtatcaacctacgtcttgttcgtggtgggggggatgggggagaacccttccacccccagcagaactacactacaggaagagagaaaaagaaaaaaaaaaaatgctatagagctcaaccaatcaactttattatcattacacgtgttctgtactgaatgcaccaattgtcacctcccctcccccaggcatggaaattmtccagctagcaaacctgtatgtgtgtgtgtttaaatttcaaaccaagttactatctgtgttaaaaattacttcaaaactctaagagaaaaacacatggcttgatgttaattttgatatggtgcttttgattttgcttcctccatctctgaatgcct

SEQ ID NO: 66543 - DNA, 673 bp, Homo sapiens
tgccatgtatttaaataaatatatactctatcttcctatcatgctgttactcctttgaactattacttcttaatatgttaataagggaagtggtttgaaatttcttgaagggcagcgctgaaccctcaakggcgtaattaacattttaatgagcagtgaaggcctttcctgttttggatctcaactgtgtgtctcctgagtggatctcaatctgttgagctcagagaatgaggtgattctatcttagtgagattttaaataacaatagatcatacaggccacagtttcagcctgctactgctctctcctttgttaggaaagttcacttgtattctgatgtaccacatcagagtacaatgactactttcagctctggtttcttttttggtatgcacagaaactgtacgcataacagtcataatccaggagtggctaatttttagtaactgaccaagtaattgtaagttctccttatttgcaaggtacagtagctaactgctatttggagacacaacaatttgcagaagaagtattggataatacttgtaatttaattatttgcaaatcaagctttgcctaatacaccaaaggtacgaaacctcttcattggagacaagtttgaaaaggtcattaaaaagctatttgttttgagatttcagaaagcaaagtacct

SEQ ID NO: 66544 - DNA, 1323 bp, Homo sapiens
atgcccatgtgggtgtgtgcattgtctcgtgtgtttcacatgtgcatgcttttgggtgggaatggctgcaygtggctatgagtgtatgctgccaaagccagaataagggcagagactgatagttgcaggtacaggcggcttctcctacaggctcccagacagccaagtatcacagggcagctcctctcaggttcccccatggggcctcttaagaagctttgcccctccaaagggaactgttcccaggagttcagcttgttttgttcaaaaaatatcactggggcccctgctgcctccatcattaccctctgaggcgctcccctccccatgccaggtagcctccttcggctgcagtctcaggacctcaaaccacttgcagcttcagatgatgctcagagagcaagacccacctttactgaaagggttattatctttgctccataacaggcttttgcaagaactcagaagttatcaagaaaatccaactcggccaggcacggtggttcatgcctgtaatcccagctctttgggaggctgaggggggtggattgtttgaggacagaagctcaagaccagactggacaacatggcaaaaccccgtttctactaagaatacaaaatagtagttgggcacagtggtgcacacctgtaatcccagttactcaggaggctaaggtgggagaatcgcttgaacccaagaggcagaggttgcagtgagctgagatcatgccactgtactccagcctagacgacagagcgagagtctgtctcaaaaaaaaagaaaaagaaagaaaatccaactcaaactctataaaccaactctataaaaatgaaagatttctgtgcagcaaaaggaatcaaataaatttaaaagacacacaaatttactagaaataattatctataatttatattatagactaagagtaatatctatgacatgcaaagagttcctgcaaacaaataagaaaataataacaacctgatagtaaatgggctgacatattgtcaagtatttcaaaaagaaatattaccaaaagccagtaaatagatgaagaaagcttaaactgtcgagtaacaatgaaaattaaaatgtgtgataaaatcactttttgcccaacaggtttactaaactaaaaaatgtaatattcaatgacaaagggggtgtggggaactgagcacactcacgtgctgtgggaggggatataaattgatattggaggggaggggacaatttaatagtatctgtcaaaattgatagatttggggattacagtgcacatcctatacccaagcaatttcacttgcaaaaatctgtgttgc

SEQ ID NO: 66545 - DNA, 779 bp, Homo sapiens
tacctgctgtgtgttggagggcaagttaataaatccctctgagcctcagtttccccatctatacaatgggggatggcaataggacctccttcctaggacaacggtaaatattcagtgaaataacccatgtaaagcattcagatcagcacctgacacgaagtcaatgttamcttttgtgtataacaaatcctatcatcagcatgttttgcttttgttcattattttgaaagattagaaattcagaaaaatcaagagaatagtataataatcacacataatcattccacctagattcacagcaaatatacaggcatgtgttctcccttttaaaaatgaaccaaacattacagatcaagctgcagccctcccagccacccccgggctcccctctggcctcctttctcctgggcaggtcccagcaggagtgtcatgcatttgcttttgctccagtcattctcccaagtgcagctcccgtgctgggtggttggaggccttataccctgaacccgatgatgcagagagggacgcctagagacacaggtggcaggtgagcagcaggcgaggcaggaggagccatccaagggagggccccatgagctgccccacagaaggggaggtgagaagagggccggaagctgttccaggcgcctgatgggctctgagatctgccagtttcctgacaatggtttagtcatgatcacctgcacacagtcccagggccacttgcaatgtcacctgcacagttagccccacctcccagtgtcaccaatacagtcaca

SEQ ID NO: 66546 - DNA, 1252 bp, Homo sapiens
tccctggacacagggcaagggcatcaggacaccccctaccttgtgtaatcctccaggcacctcactggctccgtgtcccagaggaggcaagtgacttgcttggaggggcaggtgatttctgctacatgaaccttgtgtgatgggatactctggatggcccagatccaagtctgatggtccagatcccagctctgccccttacacttgtgtggcctcaggcctcagttcccccacctgtaaaatggagatgaggccagtcacggtggctcacacctgtaatcccagcactttgggaggccraggtgggcggatcaactgaggtcaggagtttgagatcagcctgggtaacatggtgaaaccccgtctctactaaaaatacgaaaattatctgggcatggtggcgcgcacctgtaatcccagctactcaggaggctaaggcaggagaattgcttgaacctgggagagagaggttgcagtgagccaagatcgcaccactgctctccagcctgggcaatagagtgagactcagtctcaaaaaataaaataatataaataaataaaatggagatgataattctcgcctccacagttgctttgaagagtctgggggataagacctgggcacatagcaggtcctcagccagtccgagagccctggattgtgtgggctccttgccaagcaagggctttgtcttgttcaaagctggatccaagggcccaacgcactgccgggcacatagtaggttctcaataaatatttgctcaagaggttaatgaagggtccttaccagccttcagccctacaggcttgacccaacttaagccactttcttcccaagcgctgctccccagcctcctcttggaaagaaacttgctggctagggtggagccctcgtctgcaggtgagaagctgcctccccaggctggaagtcccatgctgcaatgacagcgttctgacaccagggggcgcagtctcttaaggtttccacagcagcctgggtccttcccgcgggggcctggagggctggagaggatgcggcccacccggtggggcacctgcccaccctcgttagcggagatctacggggtcgttctaaaactctatggagcagcagcattacaaccaagtcatcatccctcaaagcttagaaagaagcacttcttcaggtctcgcctcctccactgactttaagccactttctagtgccctgtcctcaaagactatctatggtgacccccttgctccccaatt

SEQ ID NO: 66547 - DNA, 691 bp, Homo sapiens
gaaggaagtcatttcacttcattgggcgtcagtttcctcagctatgagctgaagataatgaatggcccttgcatggcagttgtagtgggggcaaaaggtaagatgtgttgaagagcccagcagaaggcctgacacagagtagggctcgatgcattgtagtgaaygacagacaggtgatgtgaggactctgtgggtggagagcaggaatgtgtgtatccaggcaccctctggcattgctgaatgcaccaagcaggtgtggtgtctgtcccccagacttctgacacccctcatttctcactctgagccctgcttcggagtactctgctaccagtttcattggatgtcagcagttaccaacccaaatgcccctgcaatggcccaccaacttgatcatccagatggaaaatcatggccacctggaggaggaaatagccaggcaagagtgggcagaggaaccatccagcccaggactggggtctctctctcctcctccctctgccatcattgttgggatagggtggagggagtgagtggggcaggaacgggctgagtgtgcttcaagcccagactcactcactttctgaaatgttttttgaaaaccccaagcacattgcgtgcgcgcgcgcgcacacacacacacacacacacaaacaaacaaaaaaacactattgttattgctataatgtctggc

SEQ ID NO: 66548 - DNA, 691 bp, Homo sapiens
gaaggaagtcatttcacttcattgggcgtcagtttcctcagctatgagctgaagataatgaatggcccttgcatggcagttgtagtgggggcaaaaggtaagatgtgttgaagagcccagcagaaggcctgacacagagtagggctcgatgcattgtagtgaatgacagacaggtgatgtgaggactctgtgggtggagagcaggaatgtgtgtatccaggcaccctctggcattgctgaatgcaccaagcaggtgtggtgtctgtcccccagacttctgacacccctcatttctcactctgagccctgcttcggagtactctgctaccagtttcattggatgtcagcagttaccaacccaaatgcccctgcaatggcccaccaacttgatcatccagatggaaaatcatggccacctggaggaggaaatagccaggcaagagtgggcagaggaaccatccagcccaggactggggtctctctctcctcctccctctgccatcattgttgggatagggtggagggagtgagtggggcaggaacgggctgagtgtgcttcaagcccagactcactcactttctgaaatgttttttgaaaaccccaagcacattgcgtgcgcgcgcgcrcacacacacacacacacacacaaacaaacaaaaaaacactattgttattgctataatgtctggc

SEQ ID NO: 66549 - DNA, 1049 bp, Homo sapiens
aaaaccatcgctttcaccatgaggtctttgtaccaccacactcccttctctaggctcttctacatccaaaataacttcatctggccaggcatggtggctcacacctgtaatgccagcactttgggagactgaggtgggtggatcacctgaagtcaggagtttgcgaccagcctggtcaatatggcgaaaccccgtctctactaaaaatacaaaaaattaaccaggcatggtggtgggtgcctgtaatcacagctacctgggaggttgaggcagaattgcttgaacctgggaggtgaagtttccagtgagccaagatcgcgccactgctctccagcctgggtgacagagcaagactgtctcaaaaaacaaaaacaaaaccaaaaacaaacaaaataacttcttttcgacaatcatgaacccaatactaaaacttccacaatttctaactcatgctaaagatgaccagcttagcagttccacaaccaaccagattctaatttctgctttgggctcagctgttctacacagtaatagcaatggctattcttcttgaggactttctggcataaaaagccctttcctggccgggcgcggtggctcacgtctgtaatcccagcattttgggaggccgaggcaggtggatcacgaggtcacgagatcgagaccatcctggctaacacggtgaaaccctgtctctactaaaaatactaaaaattagccgtgcgtggtggcgggcgcctgtagtcccagctactcaggaggctgaggcaggagaatggtgtgaacccaggaggcggagcttgcagtgagccgagatcacgccactgcactctagcctgggcatcagagcaagactccgtctgaaaaaaaaaaaaaaaaaaagccctttcccagccataatcaccattgatgttcacaaatagcctcacaaggcaggtctcatcatctccatcttgcasattagaaaatagagatgacttgatcagggctccaggtggtgccttgctgggtctctgagaagtggtggatgctatgtcttcttcattaag

SEQ ID NO: 66550 - DNA, 1049 bp, Homo sapiens
aaaaccatcgctttcaccatgaggtctttgtaccaccacactcccttctctaggctcttctacatccaaaataacttcatctggccaggcatggtggctcacacctgtaatgccagcactttgggagactgaggtgggtggatcacctgaagtcaggagtttgcgaccagcctggtcaatatggcgaaaccccgtctctactaaaaatacaaaaaattaaccaggcatggtggtgggtgcctgtaatcacagctacctgggaggttgaggcagaattgcttgaacctgggaggtgaagtttccagtgagccaagatcgcgccactgctctccagcctgggtgacagagcaagactgtctcaaaaaacaaaaacaaaaccaaaaacaaacaaaataacttcttttcgacaatcatgaacccaatactaaaacttccacaatttctaactcatgctaaagatgaccagcttagcagttccacaaccaaccagattctaatttctgctttgggctcagctgttctacacagtaatagcaatggctattcttcttgaggactttctggcataaaaagccctttcctggccgggcgcggtggctcacgtctgtaatcccagcattttgggaggccgaggcaggtggatcacgaggtcacgagatcgagaccatcctggctaacacggtgaaaccctgtctctactaaaaatactaaaaattagccgtgcgtggtggcgggcgcctgtagtcccagctactcaggaggctgaggcaggagaatggtgtgaacccaggaggcggagcttgcagtgagccgagatcacgccactgcactctagcctgggcatcagagcaagactccgtctgaaaaaaaaaaaaaaaaaaagccctttcccagccataatcaccattgatgttcacaaatagcctcacaaggcaggtctcatcatctccatcttgcacattagaaaatagagatgacttgatcagggctccaggtggtgccttgcwgggtctctgagaagtggtggatgctatgtcttcttcattaag

SEQ ID NO: 66551 - DNA, 742 bp, Homo sapiens
aagggctttatatgctacttcccattttttcacacagtgtagtaaaaagaagtgtctagggtttaataatagtcataatatttatcgattcatcagggcattttttaaaaaccacagtgttaaaagtgtgtggtggtgaaggatgcaatgattgttagtgcagtttggtgccactgcctggatctgtgtaactaccattgtttgtgcaccagcagtgtacatgtcagacttcgaaaaaagcaaataatttttttctttttcttcttttttttctttttcttttttttttttgagatggagtcctgccctgtcaccaggctggagtgcaatggcatgaacttggctcactgcaagctccacctccccagttcaagtgattctcctgcttcagcttcccgagcagctggaattacaggcatgcrccatcatgcctggctaatttttgtatttttagtaaagacaaggtttcaccatgttggccaggctggtctcgaactcctgacctcaggtgatccacccatctcagcctcccaaagtgctaggattacaggtgtgagccaacgtgcccagccttgcctatgctatgctttcaatacatcaaaagtaaaataaatacgatgtatgtttttaataagttaaacataagcatctgaattttacatatccacaaagctggtttctatcagagtgattatcaaatagcaggaatatgctaaagaagtcagacagaatgacagagagt

SEQ ID NO: 66552 - DNA, 1185 bp, Homo sapiens
  misc_feature (1)...(1185): n = A,T,C or G
ttccttaacagaaatgatcagggtacactcctctctctagcctaacgctaactaaaaaggcaaaagattatactaagcaactggtttctgctaagttgtttttaaatttaacagtgttttcaacaccaaagttagatataactggtgaaaaaccaactggaaagtcaaaattttactgtatgattgttaccatctttaagacattcctgaaggattttgttgaaggctgacaaattctattacatcacataatggtcacataatcacccaaaaatttaaagtgagcctagaaaaagtaaacattcaataataatagctccattcccacatttgagaagtacgaccctatcaaaactaacaatagcttttatgaaatcagtgattctttactgggataaagagaaggcgtgatggtgagttaagttctgctccaggccaggcacagtagctcacgcctgtaatcccaacactttgagacgatgaggcaggtggatctcctaagatcaggagttcgagaccagcctggccaacatggtgaaaccccatctttattaaaaatacaaaaaattagtcaagggtggtcgtgggcgcctgtaattccagctattcaggaggctgaggctgcagtgagtcaagattgcgccactgcactcagcctaggcancaagagcaaaactccatctaaaaaaaaaaaaaaaagttctgctctgcagccttcataggtatcagaattaatttatttttgtctgagcacatgacatacacaaatggaagaagacatttttttctgacttctgtccccatttttgtaacttaggcaaaagattagacttagtacccttactatagaattcatcatgaagaagtaattagatactcaggcccttctgatgaaaacaaccaaaagatgggtgaaatttaaaaaataataattaactgagctagtgataaaataatctgcagaaatcaaaaaacaaaagtgatgggggaactacgagagataagcaaacaccaaagacttcccactgctggtatttcctgaccctagtgacctttaaattctcttctaacagctgaatggaacggtatgcaggaaacagatgctaaaacttagggtccactcaagacagggaggacaacaggaragatgagcatgaagccgagatctctaaagggtttctcttc

SEQ ID NO: 66553 - DNA, 737 bp, Homo sapiens
ctttgtgaatgaaagatggttagtgtaagtatctcaagagggtttcctctgcatttgcgtaggtctggctgtcctaaaagatcgttggtttcaagttctatgtgtgtgaggagctggtgggcacgttaacaagaagagcagtactcagaataggaatgtccttgtcctgtgtctgctgtaaaaaccaaagtgctatgtatgagctcttctctgctctctccactctcacgcactcctcagacaaaagatcacccactttctggcaagaccatgactctagccttatcctaaaggtgaaagcctggcaaaccagccactctgaaggggacagaaaggaggctccattgagccagctattctgaatgaacttctttaattaccatggtgatggcaacacagccatgcwcctactatgaactgttgattccaaactcaagcttccaccagggctctctcaagaagcccagggtcagctgttaactaacacttattaattattctctctcctgctgtaactttttctactagctgttgtctctctaatcctatttactatcttgcaatcctctaggaatcctcaaaaatatctgatctattaataacacagtctatcctctagctctattccagttcaataaacttaacgcaaacaccacactcaccacactcacatgacatctttctgttatttctataaaaattttagaatgggtgtgcacatgcttagactgatctca

SEQ ID NO: 66554 - DNA, 737 bp, Homo sapiens
ctttgtgaatgaaagatggttagtgtaagtatctcaagagggtttcctctgcatttgcgtaggtctggctgtcctaaaagatcgttggtttcaagttctatgtgtgtgaggagctggtgggcacgttaacaagaagagcagtactcagaataggaatgtccttgtcctgtgtctgctgtaaaaaccaaagtgctatgtatgagctcttctctgctctctccactctcacgcactcctcagacaaaagatcacccactttctggcaagaccatgactctagccttatcctaaaggtgaaagcctggcaaaccagccactctgaaggggacagaaaggaggctccattgagccagctattctgaatgaacttctttaattaccatggtgatggcaacacagccatgctcctactatgaactgttgattccaaactcaagcttccaccagggctctctcaagaagcccagggtcagctgttaactaacacttattaattattctctctcctgctgtaactttttctactagctgttgtctctctaatcctatttactatcttgcaatcctctaggaatcctcaaaaatatctgatcyattaataacacagtctatcctctagctctattccagttcaataaacttaacgcaaacaccacactcaccacactcacatgacatctttctgttatttctataaaaattttagaatgggtgtgcacatgcttagactgatctca

SEQ ID NO: 66555 - DNA, 784 bp, Homo sapiens
tacactagctttgtaaaagtattttattttgattctgacaggatgaggttgagaggcacgactcctttcggacttgcatgaaggtttaagctacaaaaaaaaaatactcaaatcgatatttctttgtttcactttcctcatctggaaaataagggtaataattatgttacaacgataaaacatgtttcaaatagtgcctggcgctcaacacaaaatggaaagtttagaatggacattcaaagtcaacattttaaaagttggggggccgtgcgcagtggctcatgcctgtaatcccagcactttgggaggccgaggcaggcagatcacgaggtcaggacatcaagaccatcctggctaacccggtgaaaccccttctctactaaaaaatacaaaaaattagccgggcatggtggcgggcgcctgtagtcccagctactcgggaggctgaggcaggagaatggcgtgaacctggatggcagagcttgcagtgagccaaggtcgcgccactgcactccagcctgggcaaccgagcgagactccgtctcaaaaaaaaaaaaattwaaaaaaaaaaaaagttggggtgggcaaatacagccctcgggctgccagcttgctcctccagatttaatgagcctctgctatgtgccagccacctgcttagtacttcagatacatattccaatgtaacccttacgatgaccttacagatccatcatttcatacttattttacacacaggggaatatgacattcatcattgcactaaccagcacatacagggcca

SEQ ID NO: 66556 - DNA, 1129 bp, Homo sapiens
tgtgtcacttggtcctaaaaatattcctctaagaaatcattagcattatctggaaaactttaaaaagtgatacccaaagcccagtttaattgaatcagaatctctggaggaagggcttagccattattattattattwtttttttttctgagatggagtttcactcttgttgcccaggcttgagtgcaatggtgcgatctcagttcactgcaacctccacctcccaggtttaagtgattcttctgcctcagcctcccgagtagctggggttacaggcgcatgccaccgtacctggctaatttttgtatttgttgtagagatgaggtttcaccatgttgttgcacaggctggtctcgaactcctgagctcaagtgatccgcctgcctctgcctcccaaagggcagagattacaggcatgagccactgcacatggcccttttagacctcttttaatctttgggtttcttcaaaaccatttgcttcccttgcaatttatttttgggataaaccagttgatactgtagggcttcccacagtttagattttgctgattataactttatggtgttatttaacatgttcctttgtcccctctattccgcatagattgttcgtctggtaaggatataataaacttattaaatgttagcccattgtgtcattcctccttagtaggggttaagaattatgctgccttcaggaaggggtctgcatgttgaggttgcccaggtctgagtgcaactaggatatacaatgggagttgagatcatcattgtggggcaggatagtgtagaaaatggcagggaagctgctctttgcctcacctcctcacagcctctgttcttgacatctgcctctctcttagagtggtgtggaacatgtctcttctctgaactccctctcctttagtcctgtcacactgaagacattgctggaggcatttctgccacctgggtgaatcaaagaaccaactaatttgtgaggatgtgtagaggaggcattcctaactttccacttatctgataagacccaggtgaaatctttcatcttggagcgggggacagtgatcctgtttccccgtgccacccccatcttggagcacaactgatcactttgttcttggtagaac

SEQ ID NO: 66557 - DNA, 1129 bp, Homo sapiens
tgtgtcacttggtcctaaaaatattcctctaagaaatcattagcattatctggaaaactttaaaaagtgatacccaaagcccagtttaattgaatcagaatctctggaggaagggcttagccattattattattattttttttttttctgagatggagtttcactcttgttgcccaggcttgagtgcaatggtgcgatctcagttcactgcaacctccacctcccaggtttaagtgattcttctgcctcagcctcccgagtagctggggttacaggcgcatgccaccgtacctggctaatttttgtatttgttgtagagatgaggtttcaccatgttgttgcacaggctggtctcgaactcctgagctcaagtgatccgcctgcctctgcctcccaaagggcagagattacaggcatgagccactgcacatggcccttttagacctcttttaatctttgggtttcttcaaaaccatttgcttcccttgcaatttatttttgggataaaccagttgatactgtagggcttcccacagtttagattttgctgattataactttatggtgttatttaacatgttcctttgtcccctctattccscatagattgttcgtctggtaaggatataataaacttattaaatgttagcccattgtgtcattcctccttagtaggggttaagaattatgctgccttcaggaaggggtctgcatgttgaggttgcccaggtctgagtgcaactaggatatacaatgggagttgagatcatcattgtggggcaggatagtgtagaaaatggcagggaagctgctctttgcctcacctcctcacagcctctgttcttgacatctgcctctctcttagagtggtgtggaacatgtctcttctctgaactccctctcctttagtcctgtcacactgaagacattgctggaggcatttctgccacctgggtgaatcaaagaaccaactaatttgtgaggatgtgtagaggaggcattcctaactttccacttatctgataagacccaggtgaaatctttcatcttggagcgggggacagtgatcctgtttccccgtgccacccccatcttggagcacaactgatcactttgttcttggtagaac

SEQ ID NO: 66558 - DNA, 737 bp, Homo sapiens
ggtgaatatttcatgattgttttaaaagaatgttttctttctttcatgcagaactgtatatacctaacacttgagcttaacaactatttatatttctctacttttatttgtctctttgctccatcagttcctgaaaggggcttattaaaatctaaccacagttgttttattgcattttcttcagacttggtttatgttttgagaccacattgttaagtacgtatacattcattttatcttcatattcttcttgagtgttttaccaatttttaatattcctctggttattattatgtttttttacaaaactttgtgtgacaattaattatgttggcttatttttggttcagatttttctgattaactttattacatttttaatgattattaaaagggtgccctgcaaatgcataatgcyatataaataaaaaaaatctaaaaaaaatctaatctgattggtgagttcaactcatttacatttgtacaattcctgttatattctttattttttatagagatggagtctccctatgttgcccaggctggtctcaaactcctagcctcaagcaatcctcctgcctcagcctccaaaggcctataggggcttcttttcttttaggttctttttctgtgtccatgatatctgctccctctggcatacattgttaaatgagctgttgttcttatttaatgactcatttttcctcctgaatcatattgccttggaactgtattag

SEQ ID NO: 66559 - DNA, 654 bp, Homo sapiens
ttgatcttgtgtgaagactcctagggttatgagtgggctagcagcccaggctccacaggcttcttgctccctgtcacatcctgtcatctagcctggtgactggcacagaggaggtccttagccaccctgctgaatgaacacaccggacgtctaggctcccctcacatwtctgtgcagcgccaataaccacatcctgttgtaaactctgccgcctcgctcagacagagcagcttctagagtgtcaaggaggaggacggtggccatgggccacgatggcatgtgcgtgactgcagcagagaggacggggcacacagaggacagtggctggaggagtcgggtgcatgtcaggtcatgtttcacaaatgcagtggtcctgcattgcctgcccctgctcctctcgcactcagggctgggaggagggtgaagcaaatgaggcactggctccaggcacaaaatataagggggcttctccattctcaagatggacactgtgctgggccatagcagagcctgaggcaaaagggagaatcactgatcctatcattatctaaaatattgatgtttaatcatgatttttttgtattaaatatgatctttaaaaatattgcattaaaatattattcatcttgattactgagctttttgctgccctta

SEQ ID NO: 66560 - DNA, 918 bp, Homo sapiens
caaatacatataaatacatgaacacatatttatacattatttttacaaaaggaattgtacaatacaaacttcacttaatatattttgaacattgctggtaagtttttattttatataattatatttaaatagctgcttagtagtccattggatggatggatggaccgtaatttttaaaattaattcactattgtgggacacagattgtctccactttttcactagtagaaacaagcctgaactgtacatctttatagaaaacctctccacattctgttttataacgggtgcaaagttagttgtgggggggtctttgaatttctgaatcatatgttggaagaattatgatttgcatgtgggagctttgctgcctgcagcagtcagggctgggatcttggagccagtagagtggcatggagacttcacaaattaaccaaaattttatwtggatttaataaaacaatgtccagaagagaaagtgtcaggccccgactggaaaactgtgcaaaggtctgatgataactgtaacaggggaattggcaaatgggagtttgtcgagagaaggacacagggtggtggagggttcttcaagggagccctcaaagcagtttcaagtttgtaggcagaggggtgcccttttggccacaaaatgtgtggatttgagttttttcagtcataatggaccacagcgttgaagacggaatgccagcaactgattcagttgaagccctgcagctttctgtaaaagaaatctagagggcaagtgtgatgaccccatgttcatcacaggccaaggctttgtcttgtccatcatccttagtgcctggcttccatctcgatgattacctcatggtcgtatgtgacagctggactccagacatccctagtcctcacatctttgtctcaggcagcgctggt

SEQ ID NO: 66561 - DNA, 918 bp, Homo sapiens
caaatacatataaatacatgaacacatatttatacattatttttacaaaaggaattgtacaatacaaacttcacttaatatattttgaacattgctggtaagtttttattttatataattatatttaaatagctgcttagtagtccattggatggatggatggaccgtaatttttaaaattaattcactattgtgggacacagattgtctccactttttcactagtagaaacaagcctgaactgtacatctttatagaaaacctctccacattctgttttataacgggtgcaaagttagttgtgggggggtctttgaatttctgaatcatatgttggaagaattatgatttgcatgtgggagctttgctgcctgcagcagtcagggctgggatcttggagccagtagagtggcatggagacttcacaaattaaccaaaattttatatggatttaataaaacaatgtccagaagagaaagtgtcaggccccgactggaraactgtgcaaaggtctgatgataactgtaacaggggaattggcaaatgggagtttgtcgagagaaggacacagggtggtggagggttcttcaagggagccctcaaagcagtttcaagtttgtaggcagaggggtgcccttttggccacaaaatgtgtggatttgagttttttcagtcataatggaccacagcgttgaagacggaatgccagcaactgattcagttgaagccctgcagctttctgtaaaagaaatctagagggcaagtgtgatgaccccatgttcatcacaggccaaggctttgtcttgtccatcatccttagtgcctggcttccatctcgatgattacctcatggtcgtatgtgacagctggactccagacatccctagtcctcacatctttgtctcaggcagcgctggt

SEQ ID NO: 66562 - DNA, 918 bp, Homo sapiens
caaatacatataaatacatgaacacatatttatacattatttttacaaaaggaattgtacaatacaaacttcacttaatatattttgaacattgctggtaagtttttattttatataattatatttaaatagctgcttagtagtccattggatggatggatggaccgtaatttttaaaattaattcactattgtgggacacagattgtctccactttttcactagtagaaacaagcctgaactgtacatctttatagaaaacctctccacattctgttttataacgggtgcaaagttagttgtgggggggtctttgaatttctgaatcatatgttggaagaattatgatttgcatgtgggagctttgctgcctgcagcagtcagggctgggatcttggagccagtagagtggcatggagacttcacaaattaaccaaaattttatatggatttaataaaacaatgtccagaagagaaagtgtcaggccccgactggaaaactgtgcaaaggtctgatgataactgtaacaggggaattggcaaatgggagtttgtcgagagaaggacacagggtggtggagggttcttcaagggagccctcaaagcagtttcaagtttgtaggcagaggggtgcccttttggccacaaaatgtgtggatttgagttttttcagtcataatggaccacagcgttgaagacggaatgccagcaactgattcagttgaagccctgcagctttctgtaaaagaaatctagagggcaagtgtgatgaccccatgttcatcacaggccaaggctttgtcttgtccatcatccttagtgcctggcttccatctcgatgattacctcatggtcrtatgtgacagctggactccagacatccctagtcctcacatctttgtctcaggcagcgctggt

SEQ ID NO: 66563 - DNA, 1398 bp, Homo sapiens
aaaattattattttaactcccattcaaatttccttttagcttacattgagactacaatttgtattaaaattactactgaatgaaaatattggtacatccaggtgagtggttatttctaaagtaagatctctgatatttagttatacatgacattgcaagtgcattattcaccgattgttctaatgagtataagaaaagaagaaatgtgataattaataaacttaactgcagaatttcagctaagatcataagaccagaaatacgaacttgctaccatcagtctttcttgtcaggagcattacattctgtttagtttttcatgcaccagagttgttatgttaataactgtatgatggtggagtggaaagaacacaaactcagtgtcagaaagaccaacgggggctgggcgcagtggctcactcctgtaaccccaacactttgggccgaggcgggcggatcttaacacttgagaccaggagctcaagaccagcctggccaacatggcaaaaccccatctctactaaaaatacaaaaattagccaggtgtggtatcacacatctgtaatgctagctactggggatgctgaggcaggagaatctcttgaacttgagaagcagaggttgcagtgagctgagatcgtgccactgcactccagcctggttgacagagaaagaccctgtctcaaaaaaaaaaaaaaaagactaaccaatccaggatccctcatgtcctatctgtgaccatggatcaattatttaacctcctgtgcctcagtatcctcatttgaaaaatggaaatgstaacatcataccacaaaggataattgtatttaatgaagtgacatacaatgtataggatacctggcacacagaaggtactcaaatcaatgacagctgtgtttcctgcccatgatggacaacaggactcatctgccctagaaagatctggtttatcaagagggctgtttgtggcaattctggagttgtgcaatgcattatctgcatgtccttaagcggtagccctctgctttaatcagttcttcaacagaggcaatgcactcttttttcagactattggccagggttagaaatgctagtattgcaactaagctaatgaatagggacacaaagggagtcagatatgggtctcgttaacaccatactataagccaggggtcagaaaacagccctctagccaaaattatttttgtaaataaagttttattggaacacagtcacattgattcatttacatagtgtctatggcttctttcacactacaacagcagatttgactagttgtggcagagaccatatggcccacaagcctaaaatacttactatctgtctctttgcagaaaaagtttgctgagcttctctctaagaacccaaactacaact

SEQ ID NO: 66564 - DNA, 1097 bp, Homo sapiens
tccaccagccttggcctcccaaagtgctgggattacaggcmtgagccactgtgcccggccatagtctgtaattcttacatacatctttgtgacaagacagtattcatagaggattgcctgaagaacatgcagtccatcttttcctctaggttggtcactgtgaaccactcttttccacccaaacaccctaccttctgaatccgtggctcaccacagcagtgattattagaagaattttaaacttttttactcatttgtatctggaatttttatgcaagaactcacactgatatcttacaaactcaaatttgactcttgcttgtctataaaccaaccaaaagaacaaactaaaaaggttcttaggtctgtagatctcatgaagatagagagtagactggtgagtatcagaggacaggaagggtaggaggagggaagatgaagaagaaaaaaagtttcctccataaaaagagttattaggtttaggaaaagtcaatgtagtttaatagaaggaaaactctctgaagaatcagaatacaggaatccctctggaaaaaagcatttacagtgagaaacacaaggttttagaacgtggctgatataaggtgacaatgtgattaaaaggtggttgcaatgaaatgcaaatgataatgaaggacaaaaattattcatagcctaataataaaagaatacttcttatttttttcttttttttaaaaaagaatacttctttaagctaataaagatctactgtgatgtgctggcaaataatgaacaggttgacagagaaggtggggagcgctgattttagcatttgtcaatttccatgtgaatcaaccatggctgatttgaagtgatcaacataatgtcaatgaatgtgaagttgggaaaatatgtgtacagttacaccttttgagcaggtaccagctgcctccaacacaccactgagtcaatctcaaatgatcagctcatatcaccattaatggtgcaatactagaagcttatgatcagaagccagaaaaggatgtctgctatcactagtactacttatcatttggtcagagtgtctagaacaatgattctcaaacacagcttctaga

SEQ ID NO: 66565 - DNA, 812 bp, Homo sapiens
ttaatatatagcttggaaattgtagctgttagaaatggaaatttccagcttggttatcatatctacctaagaaaaaaactacagaaggtggtagggctttgttgatgatcaattatactatttaagcaaacacatttggtgaaagcacgttttccccttctgctaaagctgctaaagtaatctcttcatttgtaagacaaaagaacattcacctagcaggacattatagagccaccataaatcctttgagtccaagccaatttggagtggaaaccatagataattacactgggttaaggggaaacaattaaatctagattaaaacttctttaaagcaagtttttttctttaaaaaaaggggaaaatgtgagaattgggcagtccccttgaagaaaagcagtgtgccaatatcctttgggagtgttttgtctcttctggatgctagcccaggaatcattaactagctgtgtgacaatgaacagtttgactattttgctgatctgagcctcagtttccttatcattaaattaaggggttgaggtgcaccatctatcatcccagttgtcaaattctgtgatattaactaggatttatgcaaggtgctatcctagggaatccagtagacagaaagaaaattcactggttttatttcacttgcaagaaagcacctctttattatccagtatttgcccctcagctaggtcacactgggctcatctcagagctctgttggtccagggttgactagttctctgctttgtttccaaragaactcaagcagatgggaactttccttgagagatgtggatcca

SEQ ID NO: 66566 - DNA, 912 bp, Homo sapiens
atgactgttaatgcaacttttaaagcaatattatttttgaatataattgtgcaagcttatttaattacagtcatgtcatgtaactcattgcttttcaggaatttcaggaaattttacgctcaaaaagcatggcgaagcctcagagakgctgaacgatttccttggttcagtaaatagctctcatctttcaggctgtccccaaaacaaaagttgttttctaaataatgtgcttcctactaatccttgttaacctcattctagaaaggcaatgccatctaatggaaaacgagggtcaggagacacatgttcccgtacaacataattacatgaacctgaccaaatccacacttccccgggcttcattttctctttaacaaaacggagagaacaagagctctttgcaacctcacggtcaaataaacctacagctgaaataagggaggaaggctgaaaagcattctgagctctttagaataacaggaggttcaacactcttgttatttggaaagagataatcataaaggtcagtatgtatctttagaattttctcaatagaacccaggcacttgtgtgcaaataaaaaaccaacacaatgcttggaattctgtcaccttgtacacagtgatcactgagcaaatatttgttgtttgtggagtgttctcaccctacagacattttcaagtctgcatggagaacccaggaaaacatagcaagagaaggaccagtgttgcggggggtgggggagggctggggaggggcagattataatgaaaagtgcttccatgagtattttcttccacttccattccatttctgcctctaaaagtttctctgcccaattcttattcctggctagagcatgatagaaccacttctagaccataaagactggggtagtccctgcacacacat

SEQ ID NO: 66567 - DNA, 665 bp, Homo sapiens
tagagaattttaaaacattaactcactctgccctaaaaaactgtttacatagtcgtaatcatataaatgccgtccaattttctcaactttcagaaggaatatacaggccaacagttgcatatgatggctctcaaaaacartttggcctccagacagattttgtttggctcatgacattttttaaaaatgactgcacagctcttaggccacaggaaccattcttctctgtatctctcattaggtcagttcccaaatttctgcaaacaggaccctgacgacatttgagtttaatgcctcaggtgggtaatttcttattgtagggtacccagcattctctcccttttcttttggtaacagcatcctgatttcctctttggaaaccccttcagtgctttaggtgaggctttaggcctggttccaggggaggaacctgagatcagggtcaggtaatcagcctgcccttattccctgttcagggactggagtgagaacacatggttccaatcagagtaaatccccaaacgggctggacacagtggcttacgcctgtaatcccagcagtttgggaggccaaggctggcagatcacgaggtcaggagtttgagaccagtctgaccaacatggtgaaaccccatctctactaaaaatacaaaaattagctgggc

SEQ ID NO: 66568 - DNA, 665 bp, Homo sapiens
tagagaattttaaaacattaactcactctgccctaaaaaactgtttacatagtcgtaatcatataaatgccgtccaattttctcaactttcagaaggaatatacaggccaacagttgcatatgatggctctcaaaaacagtttggcctccagacagattttgtttggctcatgacattttttaaaaatgactgcacagctcttaggccacaggaaccattcttctctgtatctctcattaggtcagttcccaaatttctgcaaacaggacccygacgacatttgagtttaatgcctcaggtgggtaatttcttattgtagggtacccagcattctctcccttttcttttggtaacagcatcctgatttcctctttggaaaccccttcagtgctttaggtgaggctttaggcctggttccaggggaggaacctgagatcagggtcaggtaatcagcctgcccttattccctgttcagggactggagtgagaacacatggttccaatcagagtaaatccccaaacgggctggacacagtggcttacgcctgtaatcccagcagtttgggaggccaaggctggcagatcacgaggtcaggagtttgagaccagtctgaccaacatggtgaaaccccatctctactaaaaatacaaaaattagctgggc

SEQ ID NO: 66569 - DNA, 566 bp, Homo sapiens
agattaggagtaagatagttcgcaaaaacatttttttcctttttctatttccccctccacccccaccggtctgtcaatttatttatatgaaaatccacaatctaaaaagtttggctagggaattcacaaaactgcctctactyaaaatgaatcacatgatatcaaagcagtctggaaaaatttggaaatgatcatcagtgtatgcctagtggtacggaagggaactgacctatgaaactattcataatatggatgtttttgtgataatcttctgagagttgaaggcaggaggaggaagttatttaaaaaaaaatggtgccactgctcttaagagttatttacttattttctttccatttttggcatcagtgaattttaattgttgagtattctgattagatggagctgtacaattatttcaaagttcccggtaatcccagtttgcagatgcagtgtagaggaaaggttttctaaaaggtacactccaaagatatctcttgaccatttttggtcatttcctagccaagtagcttaggaccagacttaaaaaactgagaagtctttgg

SEQ ID NO: 66570 - DNA, 566 bp, Homo sapiens
agattaggagtaagatagttcgcaaaaacatttttttcctttttctatttccccctccacccccaccggtctgtcaatttatttatatgaaaatccacaatctaaaaagtttggctagggaattcacaaaactgcctctactcaaaatgaatcacatgatatcaaagcagtctggaaaaatttggaaatgatcatcagtgtatgcctagtggtacggaagggaactgacctatraaactattcataatatggatgtttttgtgataatcttctgagagttgaaggcaggaggaggaagttatttaaaaaaaaatggtgccactgctcttaagagttatttacttattttctttccatttttggcatcagtgaattttaattgttgagtattctgattagatggagctgtacaattatttcaaagttcccggtaatcccagtttgcagatgcagtgtagaggaaaggttttctaaaaggtacactccaaagatatctcttgaccatttttggtcatttcctagccaagtagcttaggaccagacttaaaaaactgagaagtctttgg

SEQ ID NO: 66571 - DNA, 752 bp, Homo sapiens
ttccaacttccggagttcccaggtgccttaggccccaccccctcgctcttcaagatggcctctgaggtgcctcctgcatggcagccttcctggcgttcccaggtgggattagacctatctttccttccctgtttctgaccttaggtttcattctctcaagaactctttgtggacgtgctagtggctctcatgacccctccataacacatttgtgttggcataatgtggttttggaactgtgccttttctcaaaagacatggttgctggcaattttagggacttcagcgggatggtagggaggatggtgcccctgctccctgggatggaagagggcaatggggagagatggtccagatagagggatatggaataagcagctcctgggctgctggctcggttcccatctctgcgaaggcctcgctgtggctgggatgtgaactttggtcatgacttggttctagtaaggctgttacattattcatttgaccagggagaaagggtgctagggccaggggaaattattatataatgaagtatgtgttttagtaaatggatgaactcacattctagctttgatatgctgagtagattttagccaggaagaaggaacaaggcactgccagattgattgagagggggaaggggaaggaggacctcactggtggggcggagctgacagtgcattaggtcacacggagggcacagccttccatccggcagtcacccctcagagtctcamtcaggccctgga

SEQ ID NO: 66572 - DNA, 938 bp, Homo sapiens
gcaatccactgtcactcttgtctttctctcccttcatctcagccaaggaggaaaagagaaataactcatccagcaggcatttcacgaatatttagtgagtagctaccctaccccagacactgctttcagttcatcagtgaacaaacagacagtgattgctgatctcagtaagcccactgcaagcagcattaataatgtactttgttagcatcatctgacatcaaaacatacactgagccaggtgtggtggctcacacctgtaatcccagcactttgggaggcagaggtgggaggactgattgagaccagaagttcgacaccagcctgggcaacatagtgagacccttgcctttacaaaaaaaaaaaaaatgagctgggtgtggtggcatgcacctgtagtcccaactactcaggaggccaaggtgggaggactgcttgagcccaggaggttgaggctacagtgagttgggtcatgattttgccactgcactccagtctgggccagagagcaagaccctttctcaaaacaaaacaaaaaacaaacaaaaatccccaaacacctgtgraaatattacctgcagctaattctgtagcacttgttaattcatgggcaaaatttattcagaaagttagggagttggccgcacgcggtggctcatgcctgtaatcccagcactttgggagaccgaggtgggtggatcacgaggtcaggagatcgagaccatcctggctaacatggggtttagtagaaaccccgtctctactaaaaatacaaaaaaattagcctggtgtgggggcgggtgcctgtggaggctgaggcaggagaatggcgtgaacccaggaggcggagcttgcagtgagccgagattgcaccactgcactccagcctgggcgacagagcgagactccatctcaaaaaaaaaaaaaaaaaaaaaaaa

SEQ ID NO: 66573 - DNA, 582 bp, Homo sapiens
gaggcaggagaatctcttgaacctgggaggcggaggttgcagtgagcagagatcacgccattgcactccagcctgggcaacaagagcgaaactccatctcaaaaaaaaaraaaaagaaagaaagaaaggaagaaagtacacttgtcaatatagaaggatggaccatattttatttatgaaattacaagcttcgtttataacttttagacctatgtcatgcgggcctccatttgtactcttgcctgggccctgaaaatgctggaagtggggtgaccacaccatgtatttcaatcctaggttggttatttattgcttttatggtgacagaaggattggaatttggtcagtagtgaaggattgtttctttgatacataccaatttttcagtctgtcaaagggatcaccaggctctatatcctagagcaatatttaatctaacatcaataattcatgacaataccagaagaggggctatagttttctttgtaaaggaaaatgaaggtatcaggttggattatggcttcaagaaataactgtagtgacagcttttctttatttaaatttctagactttttctaagta

SEQ ID NO: 66574 - DNA, 582 bp, Homo sapiens
gaggcaggagaatctcttgaacctgggaggcggaggttgcagtgagcagagatcacgccattgcactccagcctgggcaacaagagcgaaactccatctcaaaaaaaaaaaaaaagaaagaaagaaaggaagaaagtacacttgtcaatatagaaggatggaccatattttatttatgaaattacaagcttcgtttataacttttagacctatgtcatgcgggcctccatttgtactcttgcctgggccctgaaaatgctggaagtggggtgaccacaccatgtatttcaatcctaggttggttatttattgcttttatggtgacagaaggattggaatttggtcagtagtgaaggattgtttctttgatacataccaatttttcagtytgtcaaagggatcaccaggctctatatcctagagcaatatttaatctaacatcaataattcatgacaataccagaagaggggctatagttttctttgtaaaggaaaatgaaggtatcaggttggattatggcttcaagaaataactgtagtgacagcttttctttatttaaatttctagactttttctaagta

SEQ ID NO: 66575 - DNA, 1628 bp, Homo sapiens
cacactgattgcaaattgtatcagctaaccaatttttgaagaggacttttcaaagcaaaaagttagttatgacttcttaaagttctttgttattttcacatgtgacattaggggtacatgtcagaagtgaggcagtattagtcacaagaggcaaattaatttacccttgatacaccatttaataagacagtcaagaaagaaagtttgcagaaaagccactgtctggtagatactaaaggcagaatgaagacttctgcaagcaagcaaaggaaacagacacctcaaaaaccattctctctcctaagtgctgatctcctataagatcccacaaaagaaaaaaaatttaattactaaaaataatataatgaggaaggatcaagaagaaaaattgcctttagcatagacactgcttctttttaagtcaagtattttaagctccggttctttttttcttagagatggggtctcactctgttgcccaggtgggagtgcagtggcgagattataggtcactgtaaccctgtaacctcaaaatcctgggctcaagtgatccttccatctcagcctcccgactagctaggactagaggcacgagccactgaacccaatttgtcctttaattgttttatttatttatttatttatttttttgaaatggagtctcactctgttgcccaggctggagtgcagtagcacaatctcggctcactgcaacctctgcctcctgggttcaagcgattctcctgtctcagcctcccgagtagctggaactacaggcacacgtcgccacgcctggctattttttgttctttctttcttttttttttttttgtattttagtagagacgcaatttcactgtgttgtccagactggtctcaaactcctgagctcaggcaatccactcgcctcggcctcccaaagtgctaggattacaggcatgagccactgcacctggcctttttatttttttgtagagactggatctcactaagtttcgtaggctggtctctaactcttgggctcaagtgatcctcccaccttggcctcccaaagtgctaggatcacgggcatgagtcactgcatccagccaatgctcaagttctttaaaaaatatatatacttttctcttcacaagaagctgaagaaacagtatcacctgctgacaatgatayatacaattaaaacaaggtggggctcagtggctcacgcctataatcccagcactttgagaggtcaaagtagaaggatcacttgaggccaggagttcaagaccagcctgggcaacaaagtgagaacctgtctctacaaaaagtaaaataattagctgggcatagtgatgtgcacctgtaattccacctactaaggaggcctaggcaggaagattgcttgagctcaagagttcaaggttacagtgagctgtgattgcaccaccgcagtaaatcctgtgcaacaaagtgagaccctgtctttaaaaaaaaaaaaattacaacctatatcatacaggccaatagatggaatgactgtctgcaaagagctatttagaacttcactatgaaaacctgtgcttctgtttctgtttaatacaatacagtgtcatggctatgagcacaggatctggagcctgtat

SEQ ID NO: 66576 - DNA, 845 bp, Homo sapiens
caaggggactttatctacccctaccccaaagtggggtccctttttaagcagcttgacccaggatgctccagtttcacacctgctgcttgggccwatctgataacagacttcctgcatttatgttcagaagaaggccttagttgcccaataaatggcatgatgacccacacctgcagccaggaatgcttgtttgtcccccgttcccctttgcacatttagagcccatgtggaagagattgtgggtagcttcaggcctgtggtggtgtgtgtctgtgtacaacaatgcttaagcccacgcccctttgctagtgtgagcttacttctgtgtgtttgtgtgtgtgtgtgcgtgtgtctgcttgggcttgtttaacgtgtgtgtttgtgtctgtgtgtgcatgtgtctgtgtgcatgtgtgtttgtgatttcatttctggttcatgttcccttgtgagtgcgtgcattgtgtctgtgtctgtggtctgtgggtgcctacctttgttagtgagagtcagcaaatggacgtgcagagacaccctgcctgcacacactgaaatccggatcaatgtgttcacatggctggactggaaaaaaggagagagatgacaacttgacaaatctcataatgactcagaattacacacttagagcatccagaaggagaacgggaaataatagtgagccatgaggtactgggtgaagggggcattcattcaccacgacatttcatttaaaagtaacatgttggcagctttttggtggaccagaaggactaaactggtgacctcaatctgtgctcctttaagaatgaaagtgaagctttctccaggcctaatgttgcagagga

SEQ ID NO: 66577 - DNA, 845 bp, Homo sapiens
caaggggactttatctacccctaccccaaagtggggtccctttttaagcagcttgacccaggatgctccagtttcacacctgctgcttgggccaatctgataacagacttcctgcatttatgttcagaagaaggccttagttgcccaataaatggcatgatgacccacacctgcagccaggaatgcttgtttgtcccccgttcccctttgcacatttagagcccatgtggaagagattgtgggtagcttcaggcctgtggtggtgtgtgtctgtgtacaacaatgcttaagcccacgcccctttgctagtgtgagcttacttctgtgtgtttgtgtgtgtgtgtgcgtgtgtctgcttgggcttgtttaaygtgtgtgtttgtgtctgtgtgtgcatgtgtctgtgtgcatgtgtgtttgtgatttcatttctggttcatgttcccttgtgagtgcgtgcattgtgtctgtgtctgtggtctgtgggtgcctacctttgttagtgagagtcagcaaatggacgtgcagagacaccctgcctgcacacactgaaatccggatcaatgtgttcacatggctggactggaaaaaaggagagagatgacaacttgacaaatctcataatgactcagaattacacacttagagcatccagaaggagaacgggaaataatagtgagccatgaggtactgggtgaagggggcattcattcaccacgacatttcatttaaaagtaacatgttggcagctttttggtggaccagaaggactaaactggtgacctcaatctgtgctcctttaagaatgaaagtgaagctttctccaggcctaatgttgcagagga

SEQ ID NO: 66578 - DNA, 878 bp, Homo sapiens
tgaaaaactgccccctgagaattgcctagacgactgtacccggaggtgaatgaaggtgtctggccagacacttgtgagtgtgcgtggggatacgtgtatttgtctgaggaactatggaagcacagatgaagatgggaaaaagttgaagcgtgatgggagttaaaagttaaaaacgaggtcctctgacactcagagtcgcaatgccaccccaaagacacagtccaaatcttcctgcattcttttcttctccctttgtccctaggaaggggcagaagcaccccctggtgcatgctacctacatgtgaaaaaagaatccgcatttgttgacaagtgacagaaagggggtgactcctgttccatggtcatgtgagtcttcttcctggaatgccctgggagtgcaggcccacacccgagattgatgttcctcttgtgagagtggttcacactctcatgagtgtgagaatcattacccgtggcatgaattttctgtcctatgaarctctgctcattcccagtgcggcctacacatccaggaagatttgtaacaagcaaagacagaaaacatttgcaatatttgaagagctgtgtgttccatgctgctgcccaggcactgagcggcatgggtagcatatgtaacctttagagcaacgcggtcatggcttcgcatcccaagaagcgggctgtatgatggcccgcgtcaggatttcttacgtctgcctggaaaccctaaagagccggcaaaatttgtcctcgaccgactcattcatttttagggctgaatatcccgcaagcaccagagttcagcttgaggaccccagagagctctgtatcaaaccaaggcacagttgccctaccaccatcccacccaacacattcca

SEQ ID NO: 66579 - DNA, 455 bp, Homo sapiens
agagatctgcattttaaacatctgcccaagtgactctcatgsagtttggtacctgactgtagacttatttttgagatgcaaagtttaatgcataccctaccaaatcatgaccccagtgcacctcttaagtggtcatctctgtgctagtttttagagcttgtcacccttgctgtatatacatggcatgctccagggtgcatttaaagcgttattttctacatatgtttagaagtcattccttaacccaataacctattaaaatccacttatgttttatttgtattatttagtggttttattttacattttatctcctccatgcacttgaaattgaatatgttgtttggttgtgaaatagagatctaacttatttttttcccaaatagttaattgtccatgttccattttttgaacaattctgctttttttccaccaatttaaaatgccgcttttat

SEQ ID NO: 66580 - DNA, 1084 bp, Homo sapiens
attgtattataagacatggacttaaactacacttaatttttcaaatatataaaggaaaatatgaaaacattaagttgcaaatgtgcaagcatgaaaatatagttgaaaagaaatctagaactgragtacaacagaaattaacaactcagtggatgttttaagcttatactatacacaagaggagacatatttagtgaaatcgaagataagtaagaaaactggacataataaggcacagaggaacaaataaggttagagacagagtagatatagcaaaaaggtctaatatatgtgtatttcaaattccagcagaatagaagaaatggaacaaaagcaaaaattttaaaggcaatgactgagaattagccaaaacagatgtctgaaatgattcagattcaaaagaacctatgcaacacaagtaggaaaaaaaaacaaaagaaaatacacctaggcatttcagagtcaaaataaattcagagtaaaacaaaagacaaagagaaaatctacaaatcattcaaaaatattaattgcaaagaagaaataattagggttccatctgtcttatggaaaacagtatgacgcttcctcaaaaaagtaaatatagaatgaccacataatctagctatcccactgcagggtatttatccaaaagaaaagaaatcagtatatcaaaaagatacctgcaccccatgtttattgcagcaatattcacaatagcaaatatatggaattaggataaatttccaccaatagagaaatggataaagaaaatatagggcatatatacacaactaaatattatatggccataaaacataaagaaatcatgtcatttgcatgtatggaactaaaggctattatgcaaatcataactaaaggctattatgcaaatcatgtcatttgcatgtatggaactaaaggctattatgttaggtgaaataagccaggcacagaaagacaaatatcacatgttctcacttatatgtgggagcttaaaaagttaatctcatggtggtatggagtagaatgatagatatcagaggctgggaaaggtaggcgggtgagagtggggagctgagaaagg

SEQ ID NO: 66581 - DNA, 1084 bp, Homo sapiens
attgtattataagacatggacttaaactacacttaatttttcaaatatataaaggaaaatatgaaaacattaagttgcaaatgtgcaagcatgaaaatatagttgaaaagaaatctagaactggagtacaacagaaattaacaactcagtggatgttttaagcttatactatacacaagaggagacatatttagtgaaatcgaagataagtaagaaaactggacataataaggcacagaggaacaaataaggttagagacagagtagatatagcaaaaaggtctaatatatgtgtatttcaaattccagcagaatagaagaaatggaacaaaagcaaaaattttaaaggcaatgactgagaattagccaaaacagatgtctgaaatgattcagattcaaaagaacctatgcaacacaagtaggaaaaaaaaacaaaagaaaatacacctaggcatttcagagtcaaaataaattcagagtaaaacaaaagacaaagagaaaatctacaaatcattcaaaaatattaattgcaaagaagaaataattagggttccatctgtcttatggaaaacagtatgacgcttcctcaaaaaagtaaatatagaatgaccacataatctagctatcccactgcagggtatttatccaaaagaaaagaaatcagtatatcaaaaagatacctgcaccccatgtttattgcagcaatattcacaatagcaaatatatggaattaggataaatttccaccaatagagaaatggataaagaaaatatagggcatatatacacaactaaatattatatggccataaaacataaagaaatcatgtcatttgcatgtakggaactaaaggctattatgcaaatcataactaaaggctattatgcaaatcatgtcatttgcatgtatggaactaaaggctattatgttaggtgaaataagccaggcacagaaagacaaatatcacatgttctcacttatatgtgggagcttaaaaagttaatctcatggtggtatggagtagaatgatagatatcagaggctgggaaaggtaggcgggtgagagtggggagctgagaaagg

SEQ ID NO: 66582 - DNA, 602 bp, Homo sapiens
cagtatcatctctaacattgtgrgctccagtaagggtgactttggtcccattatgcacagaagagccaaaaaaggggaaggaggaagaaccatcacctaccttaccacctacctccctgtccctcagccccgctatcactggggtaaaaacaacaaagagaaaacggaggtttttcctgagccccctcctccaatgaataggaaaaaaacaagggatacattacagctgtgggaacctgtcttaagcaagctgtattagaaggggagctcttagcctgcctggtaatgcaagatcaacaaggcaatcaggtatataaacacatttcttttaatgcttataaaaagataagaaaaggcattagaggctggagctgtatggccaagcaggcggtagatagaaaggctcggcagcagggaagctcgcagacctggagctggcaagagctcctgagaacttggcctgcagtgtactggggagccaggcccagctagcctgctaagggaggagaggaggcgcacgctagagagagggagctagcctgctaaggacaggcaggaggagtgtgagggacagactacctggccgttagcagccacagggg

SEQ ID NO: 66583 - DNA, 1456 bp, Homo sapiens
ttttgcctgatgtatcagtgtgtatgacacaatctcatcctttcatgcaaggattacaatgtcctatgaaggtcacagataacaagaaggacttattttaaagtaacattatttagttgatatatcctgggcaatgaaaaacattgctgaatggtattccaaaacttaatttctctttgaaaataattagactatttcactgcaactaagaacatcaaatgattggctagacaatgtgaccttaagatacttttgtttctttgaaataatgggggttttcaaaacagccacatgcctaatttaggaccccatgattcatgtaagacattattagtttttcagcttggtaaaggggcagttggttgccatgaaacagtaagcttaatttaattatggaaaaggtctttataatttttttgcccttgatatcacaacttttctaccattttctcccttatacaaatgaacaaggattgactttttaaatagtggtgaaattatttttctggaaatgtctttggttaaatggcagagagtttaggacaatacaatggagacagctttccccacatattgcttcattgcaagatattagttgggatatctaccgacctacctacctacctacccacctacctacctacctacctacctacctacctacctacctacctacctatctacctatctacctacatgtctctgtgaaacatttacctttgaagagcaaaaattactaattctatatactgccattggtggaaaggtcttttctccttttaatccatctgtcccatcacacaaacttgcctacttttgaactagcattctatattattattcagaataattttaggaaaagagccacgttcaatttattgagaattttctagagtaagaatggtatgaaatttgggtatctgcagatgagaaataagctatgcattattaactttaaaagttggagattgctcttccaaaaatatgcagtatcactgtatgagaagataaggtgactgctgcctgtgtaggggtagctgaagttaccaaaagacatttttgtccctagaaacatcttattacaggggcaaagtccctgggaggagtaaagctcactaatttatcatgtctagcaaaatgtctcattcagagaaggtgctcagttattattaagtgaatgtgctagtacaggtggcaggtaagacaggttgtcatcttggracacatgaacatggcagtggagacatcgcctgccaggcacagtgctgtgagctttatgaattctgcctgccctcacttcccaagataagaaagatgccttccactgggctgttccagcacctagggtctactcatctcatgcctgtgtctcccacaaggtcatgagttctttaggagaactgtgtttaatctcctccgctctgcccccaatccagcacctggtacatactggcta

SEQ ID NO: 66584 - DNA, 642 bp, Homo sapiens
ggattcctgaaaaaaatctacaattttaaaataatttccatgtagtattagaacttgctaaagaaactgtaataagctattttgaaaacgaagactgcttttgtgaaatgaataatttctttgattttcaaacagttttattaaagcacacatctaaaatgtataagtagattaggattgcctagaacaataattgtagttaataaaaaatagaacagataaactccaatttacaataaacaatacaaaacaggaatgactcatggactgcttattgattgactatattcagaagccctgaatatatgtattattggtattttatggctttaattaagacagttgtctcttatgaagtactataaagtgcaatattaaaaaattaaaaaacccaaaaggcatccattgtccttcagttttattctgataagaattggggatttgtttaattaaatggcaagaagttatctacccttaatttatgcatgtaatttcatccttaaaataattttattcaggatttcagactttttttacttktctgttttttatgacatgattttaaaaattagtattttcttttggttagctgagtattttggagaactgttagtctccaaggccttagttacttatggatcc

SEQ ID NO: 66585 - DNA, 1397 bp, Homo sapiens
tggggtttcaccatgttggtcaggctggtctgactcctgaccttaggtgatccaccagcctcagcctcccaatttttttkttgtgtgtttgtttgttttgagacagagtcttgctctgttgcccaggctggagtgtgatgccacttgtcccgggttcaagtgattctcctgcctcggcctcccgagtagctgagattacaggcatgtgccaccacgcccggctaattttgtatttttagtagagacgaggtttcaccatgttggtcaggctggtcttgaactcctgacctcaggtgatccacccgcctcggcctcccaaagcgctgggattacaggcgtgagccaccacgcccggcccaactgctcctctttaaacactgtcctcacatattgcttccattctggtactttctgcagccaagattccacttttcccactgtctgcagcacactgccacctagacatggccccaacacctgaaacaacatagatgaacctggattcactgttcttcctcctaactatatcctcctgcttttccacttccctagacctctctgtcctcccaggaatgcaactctgggagccgtcttggatttcctctcctttttgttcctggcttttgatcagccccgaatatatgcagtttgtcaatggcggcatctctgtatccattccttgaacaaggcccccaagaccttctgctaggatcatttcaaaggctgcccaccaccccccagttttctgcaaggcaaagagtttagggagctgttaacagggcaacagggtacggtgggggatggttggaatatgaagtaaaactgggaacgtttaaactggtacgtctttcttattttgtcacaatgaacatttagtctattaaaggctctgaaaagtcctgtagtaaagaaatctgtaaaatttatttatcccagggcttcccaaacttacttgagctctgattgctagttttaaaaatttattcattatattaaaatgcaactttttcgtaattttatttatttatttatttattttttagagagggtttcacactatcgcctaggctggagtgcagtggtacgatcatagctcactgtagccctgaactcttggcctcagcctcccaaagtgctgggattacaggtgtgagccactgagcctggcctgagagcttctttcatggcctccttattaacgctctgcaggacatcgtttcaaggttcattggtttagaaacactaagctagtttatcttttctttcttttttttgagacagagttgccctctgttgcccatactggagtacaatggcacgatcttggctcactgcaacctctgcctcctgggttcaagcaattctcatgcttcagcctcccgagtagctgggattac

SEQ ID NO: 66586 - DNA, 1048 bp, Homo sapiens
tgattccaataactagaaagaagaggtgtagattcagagacctcatggtattttcggttgcctctccacttccccttttctccagctctaggtttggttgtgacaaactctgctcttagcccagctttgcaaactggaaggaaaaataaagtaatttttttctcccaacacgcacatatacatacctcaatgtaagtttctgattggtccagatcgcgtctcctgcctgttctyaggccaatcactgtggtgaagggaacgagacactgtgattggccagatctggatcacaggttctccctgtggccagcaaacaggcagacccatgagaatggcatagtcaagagagtgacagtttccccaagagaaagagaagtgcagttgctaaaaggatggaggaaacgaatcccgagcagaacccctcctcccctcccctgcgaaacaaatgactctggaccaactatctagtaacaacataataattgtcacgacttgttgagctcttactattatcagagaacgcgccagtactttgtaatgtaaatataattacctttataaagcaatgtatatacatctagccctctgaacaactcaaaaggtagatgttattaggcccatttcacggatactaaaactgagacttaaataggccaatggacctgttcaaggacctgctgtttgccacaattgcttctttgtgcttcaattttcctgtatatagggcttcctaatattgctgtacctttcaaagatgtttttgacatgaaagagaaagaagtatgtcaaggttttgagacttactcattccacccatgacgtgccctggcctgcattttcctatgtgtagccttcaaggccacgtcctccacagagtctgcctgactcctccagagatcagtgaagcctccttgctccagattccccagcaactcccccacagcgctctcctggcagccatcaccttctctcccacatcatagatatgtggctgttagctccctcgctacactgtctggtatagagaaaagggaccatttctaatgca

SEQ ID NO: 66587 - DNA, 761 bp, Homo sapiens
ggatcctcatggagagctcacagctgcctgtaccagctcagaatccactggatcatttcactgatcttggatctatctaaaaaagattacagagtaaacaattcttcaagccacaggatcttatggtgggtattttctgttttgtttctgtctgtaaaaagtgaattataaaaacaaaacagaaacaaacaaaaaccccatctcccttctttttttctattcgttattcctgaacaacatccacttccttttctgctcttgtctacctttgcaatttctggcacagatgtgctrtgctgagtgccaagtttaggtccacagatgtcgtcataaaaaacaggaactagaaaattagaaaatctcagtgctttgcaatgcttattagcgcaaaactgcagcaatatgctttatagtttttactagtaggctcttgggggcaagtctactcattggtttgtggacttattcttactacaaaatggatcattctgtatagaccacatctcttgattaagagatgtgtctatgggacttaaaaaaaaggtgaaactctgatgtatgattcctggtgtactgtccaacaacaacaacaaagaatttaggggatggagggaatcaagattcatctggtatatagtttaaactccctctcagtgtagaaattgtcccagcaacatcacataatcttgagttttagagttgacgaggaccttataaagataacaaggcaacttcttggaacccacaacctcacattagaa

SEQ ID NO: 66588 - DNA, 758 bp, Homo sapiens
tatggcagttaacagtctgtctaagaatattttcagctttatgaattaatctgtgcctcttagtttatggtaaaccattctgctttttaattctcaattccgttcgagccacttcatgtaggttatttgacttcttaaagagcgaggccagtttccgaagtggtgctctgaaaggtccgccatctcagagaatcaagtctcacagtaaggaaaaaaagaagagactggataaaaggaaaygattttatggacagaaacacactctttttttattttattttacttattttaattttatttgattttaaattctggggtacacctgcagaacgtgcaggttacataggtaaacttgtgccatggtggtttgctgcacccatcaacccatcacgtaggttttaagccccgcatgcattaggtatttgtcctaatgctctccctccccttgccccccaacccctgacaggcctcagtgtgtgatgttctcctccttgtgtccatgtgttctcattgttcaagaaacaaactcattttaaaaatctatcgtaaggagcttgagacaaaaagtgctaaaacaccacagatactaggtaagccagtggtagtatttaaagacactgaagcagtagaaatttgagatgttgttccagataacacaagtacctcccactgattaacattttgtcctacagttctgttttaaaattcttttatgggtgctgggaaaactggctagccatatgcagaaagctgaaact

SEQ ID NO: 66589 - DNA, 758 bp, Homo sapiens
tatggcagttaacagtctgtctaagaatattttcagctttatgaattaatctgtgcctcttagtttatggtaaaccattctgctttttaattctcaattccgttcgagccacttcatgtaggttatttgacttcttaaagagcgaggccagtttccgaagtggtgctctgaaaggtccgccatctcagagaatcaagtctcacagtaaggaaaaaaagaagagactggataaaaggaaacgattttatggacagaaacacactctttttttattttattttacttattttaattttatttgattttaaattctggggtacacctgcagaacgtgcaggttacataggtawacttgtgccatggtggtttgctgcacccatcaacccatcacgtaggttttaagccccgcatgcattaggtatttgtcctaatgctctccctccccttgccccccaacccctgacaggcctcagtgtgtgatgttctcctccttgtgtccatgtgttctcattgttcaagaaacaaactcattttaaaaatctatcgtaaggagcttgagacaaaaagtgctaaaacaccacagatactaggtaagccagtggtagtatttaaagacactgaagcagtagaaatttgagatgttgttccagataacacaagtacctcccactgattaacattttgtcctacagttctgttttaaaattcttttatgggtgctgggaaaactggctagccatatgcagaaagctgaaact

SEQ ID NO: 66590 - DNA, 974 bp, Homo sapiens
ttggagtggtttcccaccccctcctgctaggtaccccggccatctggaaagaggacttccgaagttcaaataccagtctcttgtgaaaatagaatttacttaaaacttactccatatctctagtagttgtagatgtttacaatttagaaaattcaaaagagtttttcttttgtgttttgcatttctttctgattaaccaattaactcagatgtgtgcgcatgtcgtaaacttagttggtgctctccaaatatttattgaagaattaattaattttaggtatcaggtaaattcaactgatcacagcaaactacggaaccagtagctgaaaataactgtgaaggtaattgctacagaggaaatgctatttgaacaagctaatttgcttcaagatgggatctgaaaagggattcttrgagctacttgggtatgagaaggactgcctgaaaagacattttctttaggcttcccagaatttgaattaaaagagaagagagagactgcttgaagacacagtggaagattaaaaatatccctggcactaaagccttcagagttcttcaaccacaactgccctggttgcaacaacagaggccactgggccccattttcatcaacttttgaaaattgcaacaattaacagtgttcttctcaagagaaaactcttctgacatgggttttcatgtttaaagtaaaaaaggaacaccccacaaacattctttctgacctacaccttttctattttctagtggaaattgtaaccacaggttaccatgttttccttcctgtgtttgaaaaccacatgtgttttagtgaaaacattaaggtgagtaatgaaatggaaggtttcaaagtgccagccacctgtcactagaaatggaaatatctcacttattctttcttctacagcaataaattagagtgagcagaaggtgtaatttttagtcaatccatctcagctgaatacaaatcatgc

SEQ ID NO: 66591 - DNA, 773 bp, Homo sapiens
gatcctcacaggatgcgttgctccaggctgcaaaaacctctgtgaattctcacccatctggtatcttaacaggatgcattgccccaggatgcaaaatcctctgtgccttcagtcaaatggtccattgaaaacagtagtgtctggagtcrtcccttaatcaaggtgccattaatacatgggagtggtccagtccaggcaggtgaagcaaggcattagcatgaaggcaggctcgtaggatattctgaacccagatacatcatagacaatgggtttgccacagggatgacattagaaaaaaaaatactttaccttttttatctcccaatcatggtcaaatgatctcactttggagagaaaatctggtgagaatgaaatagagactgctaagtctgaagtagggaacgattatgaaaacctctgcaggcacagcaccttaatcaactcaggcagcaaactcctggcaaagccctcacctccatcatctgtccatctatccatccactcagccatctatcttcaaataggagagttttaacatttgctaaaaggctacatgcatcccctctgcatgtttgccattctcaggattgaggagctgctgggtgaaggatgtcattcatccctgtctcagtttcagttgcacgttttgcatgattttgaggaagagaaaggaaacagatccataattattttccaaagatcacctctttaagtaaaacatcggttttctatactgcataacaggtgattgcaaatgcagtagcttaaaacgg

SEQ ID NO: 66592 - DNA, 773 bp, Homo sapiens
gatcctcacaggatgcgttgctccaggctgcaaaaacctctgtgaattctcacccatctggtatcttaacaggatgcattgccccaggatgcaaaatcctctgtgccttcagtcaaatggtccattgaaaacagtagtgtctggagtcatcccttaatcaaggtgccattaatacatgggagtggtccagtccaggcaggtgaagcaaggcattagcatgaaggcaggctcgtaggatattctgaacccagatacatcatagacaatgggtttgccacagggatgacattagaaaaaaaaatactttaccttttttatctcccaatcatggtcaaatgatctcactttggagagaaaatctggtgagaatgaaatagagactgctaagtctgaagtagggaacgattatgaaaacctctgcaggcacagcaccttaatcaactcaggcagcaaactcctggcaaagccctcacctccatcatctgtccatctatccatccactcasccatctatcttcaaataggagagttttaacatttgctaaaaggctacatgcatcccctctgcatgtttgccattctcaggattgaggagctgctgggtgaaggatgtcattcatccctgtctcagtttcagttgcacgttttgcatgattttgaggaagagaaaggaaacagatccataattattttccaaagatcacctctttaagtaaaacatcggttttctatactgcataacaggtgattgcaaatgcagtagcttaaaacgg

SEQ ID NO: 66593 - DNA, 587 bp, Homo sapiens
agtcctcatcccaggagtgcatccttgagctattaggaaccgtgctgtgacagtgctgactccttgttagagaaaagcttgcttgaatgcaattattgcttcgcttgagtttgtgcattatttactaataacagctacaggaaaacaagatcttcaacagagataaaagaaaatttgccaaccaacagctctaagaatgggctgacgaacctgtagaagctcacgaaacactgatgaagaaagcaatgattaactggctgcctattgtgcacatttcacagaaatgttttggtcatcatttcccctaatttcccttaaaccccccctggatcaagatccagaagcaaagctccgagaggtggtctctgagtgctagttcactccctcctctggtttgccggcttcttgaatgaagcraactttcttttcaccaaagctctcttgagtttttggctttcaagcaatgagtagcccagatctgagttcggttacaatgatagtgtttgtttgtgtctcttagtgtgggaatgggtagaaaaaattgtctgtgctgagagtcagccatcctcatgggccaaggttaaggc

SEQ ID NO: 66594 - DNA, 865 bp, Homo sapiens
agaaatcactaactataaaagaaaatattgattagctacacttcatcaaaataaaaaatttctcattaaaaaacactgttaagaaaatgaaagggtgagccwcagactgggcaaaactatttgcaatacctaaatctaaaacagaacctgtatccagaatgtataaagaatcccttcaatttaataataaaaagacaacccattaaaaacatgggcaaaacaacttgaatagacactttacaaatacatttgtgttaatagtcaataagcacatgacaaatacccaatgtgttgtcatcatcagggaaatgcaaattaaaatcattaagagatatcactatagagccactaaaattgctaaaatttaaaatattgaacaatcagaagcggcatacattgctggtaggaatgtaaagtggtaaaacaattttggaaaaaatttaacagtttcccataaggtctttcccctactacccagcaattgcactcctaaatatttacctaagagaaatgaaagtatgtgcccacacaaagacttgtaaacaagcatttacagcagctttctttatagtagcccaaaactggaaataaccaaaacatctaccaacggttgaatagatcaacttcagaaagatcaaaaagccagtgtattcagttaaataaagggcccttttaagagagtaaaggtatacgtcaatcacgtcaaagagcctctagggagaactagggtatccttcagccattagcacagaagctaaagagagtgaactgattaccttgaaaagatctgtgggtgtggctttataaatacagtgacatcaatgaaattaccaaaacccctgacttttttttatctttttctttt

SEQ ID NO: 66595 - DNA, 865 bp, Homo sapiens
agaaatcactaactataaaagaaaatattgattagctacacttcatcaaaataaaaaatttctcattaaaaaacactgttaagaaaatgaaagggtgagccacagactgggcaaaactatttgcaatacctaaatctaaaacagaacctgtatccagaatgtataaagaatcccttcaatttaataataaaaagacaacccattaaaaacatgggcaaaacaactygaatagacactttacaaatacatttgtgttaatagtcaataagcacatgacaaatacccaatgtgttgtcatcatcagggaaatgcaaattaaaatcattaagagatatcactatagagccactaaaattgctaaaatttaaaatattgaacaatcagaagcggcatacattgctggtaggaatgtaaagtggtaaaacaattttggaaaaaatttaacagtttcccataaggtctttcccctactacccagcaattgcactcctaaatatttacctaagagaaatgaaagtatgtgcccacacaaagacttgtaaacaagcatttacagcagctttctttatagtagcccaaaactggaaataaccaaaacatctaccaacggttgaatagatcaacttcagaaagatcaaaaagccagtgtattcagttaaataaagggcccttttaagagagtaaaggtatacgtcaatcacgtcaaagagcctctagggagaactagggtatccttcagccattagcacagaagctaaagagagtgaactgattaccttgaaaagatctgtgggtgtggctttataaatacagtgacatcaatgaaattaccaaaacccctgacttttttttatctttttctttt

SEQ ID NO: 66596 - DNA, 865 bp, Homo sapiens
agaaatcactaactataaaagaaaatattgattagctacacttcatcaaaataaaaaatttctcattaaaaaacactgttaagaaaatgaaagggtgagccacagactgggcaaaactatttgcaatacctaaatctaaaacagaacctgtatccagaatgtataaagaatcccttcaatttaataataaaaagacaacccattaaaaacatgggcaaaacaacttgaatagacactttacaaatacatttgtgttaatagtcaataagcacatgacaaatacccaatgtgttgtcatcatcagggaaatgcaaaytaaaatcattaagagatatcactatagagccactaaaattgctaaaatttaaaatattgaacaatcagaagcggcatacattgctggtaggaatgtaaagtggtaaaacaattttggaaaaaatttaacagtttcccataaggtctttcccctactacccagcaattgcactcctaaatatttacctaagagaaatgaaagtatgtgcccacacaaagacttgtaaacaagcatttacagcagctttctttatagtagcccaaaactggaaataaccaaaacatctaccaacggttgaatagatcaacttcagaaagatcaaaaagccagtgtattcagttaaataaagggcccttttaagagagtaaaggtatacgtcaatcacgtcaaagagcctctagggagaactagggtatccttcagccattagcacagaagctaaagagagtgaactgattaccttgaaaagatctgtgggtgtggctttataaatacagtgacatcaatgaaattaccaaaacccctgacttttttttatctttttctttt

SEQ ID NO: 66597 - DNA, 1938 bp, Homo sapiens
ctgaatataaaaataaagcagccaaataaaattcagatgaccttgggaatactacacaagtaaatcacgagagatgagcgaacgaagcactgggcaaattgttcgaaacaaagggaaagtttctcagctcacaagatgaaagctttgattttctcataaaagaaaactaataagaaatagttattttcctgaaatacaacgttccaaatgggagttggcgggggggagcaacagtattttaatacattttgcaatctgcaatgctgcttgattttgttgtataattttgcgatatgcttaaaaggtggaaaatagaattaagagggttggaaacgtgaagtaaaatattttggttctgatagtaccaatcagaaagcagaaacagccacacactgcctttattattcttcataaaggctgaggcagaaggggaaagtgacaccgaagtctctgtggcgcaatcggttagcgcgttcggctgttaaccgaaaggttggtggttcgagcccacccagggacgcgctctccttttatgagctggtcgcgggaagttttgcagaaatcgagttcaggcctccgggataagaaggggtggatttccagggaccaagcaaagaaaccaccgacccttacactacgcggccagccggcgagcccttcgctttcggccggtgcagagcggcctcctctcccccgctgtcctctcccggctgcaggtgagcgcggccactccttccccggggtcttcacggcggtctaggcctcgccagggtgctggagcggggacgcgcagaggccgcgcgggcccgtttgccgcgcgcgcccgccgctccagctttgcgcgtccccggaggcccgcgcgtacacggggaaggcggcccgggctggtcttgctcggcttcgtgacgcgtgaaatgtaacggggccaccgaaatgcatgtatttcaacagtgtcaagttcaagctgcaaactgaaaactcctacattttgttgaagcatggccgcccttttgtctgttccctgtcagcgtaaacatctccgtttgcgacttaaacattaattgttcctggtattaatgccttcagaaataatttttgtgtagtaaatctttcgtgtggacaatattgtaagaatatatattatattttactttttctactaaaacgcttgaatttagtagagaatagaataagcctgcaacacttcccatcaaggcggaaaaggagaaaacctcttttacaatagtatgactgttaaacctgaaaaaaaagaatgatgagaaagattgaatgtgaagctgctaccatactttgcttcaactttctactttcaacgtcccctaccttttatttccccaaatgcaaagccctctcaaaatagtttccttctattttattactttgagaaataatcatagtttcatcataataattattgtyttggcttggactacagaaaattgaaagacagttttgaagaaaagtgtaagaactaatacatcttattcctgtggatatattgttttatattcgttatgtttcagctcagttgacatattaataaaggcttattttattgagtgctttcgtggagaaaggtatgtaatcttcataagtcttccaggtcctattattgccattgtacagatgaggcaactgaggcacagtgcgactgagtaaatagctgagtaatttgccggaagtcacagtgagtttggaacctgggtagtcaggcccaagcccaagctcctccctgatgtactgccttcttggaagttccttcctctaaaatacagctacctaattagttaatttgaaaccaaaagatacttgaattggtttttatgaagtttcgttaatattttgctccaaatcttgtaaagggggtaaaataaaaaccaacacaacatttgtggcgtgctaaagggcattgttaaa

SEQ ID NO: 66598 - DNA, 1241 bp, Homo sapiens
acaattttgtactgtcattttctcttgatatcttgtaataattttcccatattaatatgtaatatatttttccctgctgtgtaatatttcatccagtacatataccacagcacacttaactattccactatcaccaaacatttaagatgtttcatttcttcatggtcatayataatgctgaaatgagggtctttgtatataaatatttttttctttcatatttaggaaaaatttcttgtgtagtgtttttataagctacaccactaaggcagagtattactacatttaaagttcttgatatctgttgctaaactgccttcaaaaaaggtggtgtcaatttgcactttcaatggctgtatatgagaatgtctgttttgccatacttctagcagcagtgagaattgtcaaaactattttctagttattttgagaaaaatattaatactatctccttattgctttaatttgtatttctttggttattagcaatgctgataatttcctcaagtttgttaacttgctttcttctgtgatttggctgggcatactttaaaaagcatcttataataaagctatttataatgtacagtgatatcatatagatagtattgtgataatatattacacattgtgtattgatataactcacacaccataccattcacccgtttaaagcaaacagttgaatgacttttgagtatattcatagggttgtgcaaccatcaccacaattaattttacaacattttcatcactccaacaaggaatcatgtacctattatcagtcactccttatttacccccaaacccctttacagacctaggcatacactaatctctactttctgtctctatatgtctacttattctggatattttatataaatggaatcgcacaacatatgatcttttgtgactgcattctttcacatagcgtaagttttcaagaggcaaccatgttgtagcttgagatagtgccttcttcttgattgtctaataacattttgttgtacagatataactcattttatttatcagtttatcagttgatggatattggagttgtttctactttttgactgttataaataatgcttctatgaacatttatgtacaggttttggggtggacacatattttcatttgtcttgggcctaaacctaggagtgcagttggtgggtcctacggtaactccacgctgagtattttgaggaattgccagagtgttcatacctcctttt

SEQ ID NO: 66599 - DNA, 1241 bp, Homo sapiens
acaattttgtactgtcattttctcttgatatcttgtaataattttcccatattaatatgtaatatatttttccctgctgtgtaatatttcatccagtacatataccacagcacacttaactattccactatcaccaaacatttaagatgtttcatttcttcatggtcatatataatgctgaaatgagggtctttgtatataaatatttttttctttcatatttaggaaaaatttcttgtgtagtgtttttataagctacaccactraggcagagtattactacatttaaagttcttgatatctgttgctaaactgccttcaaaaaaggtggtgtcaatttgcactttcaatggctgtatatgagaatgtctgttttgccatacttctagcagcagtgagaattgtcaaaactattttctagttattttgagaaaaatattaatactatctccttattgctttaatttgtatttctttggttattagcaatgctgataatttcctcaagtttgttaacttgctttcttctgtgatttggctgggcatactttaaaaagcatcttataataaagctatttataatgtacagtgatatcatatagatagtattgtgataatatattacacattgtgtattgatataactcacacaccataccattcacccgtttaaagcaaacagttgaatgacttttgagtatattcatagggttgtgcaaccatcaccacaattaattttacaacattttcatcactccaacaaggaatcatgtacctattatcagtcactccttatttacccccaaacccctttacagacctaggcatacactaatctctactttctgtctctatatgtctacttattctggatattttatataaatggaatcgcacaacatatgatcttttgtgactgcattctttcacatagcgtaagttttcaagaggcaaccatgttgtagcttgagatagtgccttcttcttgattgtctaataacattttgttgtacagatataactcattttatttatcagtttatcagttgatggatattggagttgtttctactttttgactgttataaataatgcttctatgaacatttatgtacaggttttggggtggacacatattttcatttgtcttgggcctaaacctaggagtgcagttggtgggtcctacggtaactccacgctgagtattttgaggaattgccagagtgttcatacctcctttt

SEQ ID NO: 66600 - DNA, 1241 bp, Homo sapiens
acaattttgtactgtcattttctcttgatatcttgtaataattttcccatattaatatgtaatatatttttccctgctgtgtaatatttcatccagtacatataccacagcacacttaactattccactatcaccaaacatttaagatgtttcatttcttcatggtcatatataatgctgaaatgagggtctttgtatataaatatttttttctttcatatttaggaaaaatttcttgtgtagtgtttttataagctacaccactaaggcagagtattactacatttaaagttcttgatatctgttgctaaactgccttcaaaaaaggtggtgtcaatttgcactttcaatggctgtatatgagaatgtctgttttgccatacttctagcagcagtgagaattgtcaaaactattttctagttattttgagaaaaatattaatactatctccttattgctttaatttgtatttctttggttattagcaatgctgataatttcctcaagtttgttaacttgctttcttctgtgatttggctgggcatactttaaaaagcatcttataataaagctatttataatgtacagtgatatcatatagatagtattgtgataatatattacacattgtgtattgatataactcacacaccataccattcacccgtttaaagcaaacagttgaatgacttttgagtatattcatagggttgtgcaaccatcaccacaattaattttacaacattttcatcactccaacaaggaatcatgtacctattatcagtcactccttatttacccccaaacccctttacagacctaggcatacactaatctctactttctgtctctatatgtctacttattctggatattttatrtaaatggaatcgcacaacatatgatcttttgtgactgcattctttcacatagcgtaagttttcaagaggcaaccatgttgtagcttgagatagtgccttcttcttgattgtctaataacattttgttgtacagatataactcattttatttatcagtttatcagttgatggatattggagttgtttctactttttgactgttataaataatgcttctatgaacatttatgtacaggttttggggtggacacatattttcatttgtcttgggcctaaacctaggagtgcagttggtgggtcctacggtaactccacgctgagtattttgaggaattgccagagtgttcatacctcctttt

SEQ ID NO: 66601 - DNA, 1298 bp, Homo sapiens
tgcatttaaaacaaaatatggagcctgagaaaatgtccatatccttcactagatggtcagaggggaccatgacacacaaaaacgttaagaactcctgctcttgccgggtgcagtggcttacgcctgtaatcccagcattttgggaggccaaggcacatcatttcaggtcaggagtttgagaccaacttggccaacatgatgaaatcccatctctaataaaaatacaaaaaaattatctaagtgtggtggtgcacgcctggaatcccagctactcagaaggctgaggcaggagaattgcttgaacccaggaggtaaaggtagcagtgaggcaagatcatgccattgcactcaagcctgggcaacagagcaagactccacttcaaaaaaaaaaaaaaaaaaaaaaactcctgctcaggtaggattagttaatatttttacagggtgcacagattttccctgagaaaggtggaacaaggcctgagctgcttttaggccctcaaaagctggggtctgaacatgaatgagaacatgaagatggtctctggcagtcctgggcttctagattttccccagagtagatctaggaggaaattggttcccaccctgcagtttctccctgttggctgtgtctctcttgcttcccaaagagaggtttgcaaatgttcggcagggtctggacaaatatgtcatgaagttttaatttcacagcaaacttggttattaacctttttttttctttatccatgcccttcctaaaaatccttcccatccccactgcagactctgccccattttctcctcctttataattagggtgtaagcttgctgaacccaaacacctttgcctggtgaaagaatctatgtgcccctagcagtgcatgttttgttaatctgagtgcaaagtcagaacaggttgaagatctctgccacctctgacaaaggagctggaggcggggctgggtcccacatggaaactattcattagtcctgtatttttcctagtattccaagtcttccctaattccctttgggaggctggtactacctgggttgctgggtagagacaaatgaaatgaactcattagcatttgtaagcaagtccatgggagctgggcaggagggattcattctgttgagatgaacattgatgtaactcccaaagttgagatcagctgctattccagcatcaagctcagaagtatcttcctctgaatctctttttcctgggtttaaggatcctgccccgggggtaacacagccatcagcmcaggaagctccaaaatccagccttgagtatc

SEQ ID NO: 66602 - DNA, 1045 bp, Homo sapiens
tgttcaatattcggatatttccagttaaaactggcattgcacaatataaaaaggaatggtaaaagtcatgctaataatttaaaattttgactttacttagaatggtattaactagcaaatttaaaacaccatgacaaattgaaagtgagactggggaagaaagcaaaaagcatgttttctgactgtttgaacaaggggccccacattttcgttttgtagtgggtcctgaaaattatgtagccagtcctgcctggtgagccacctaccctcttgggcatttagttgtctatcagtaaactagatcattaacactgcgcctgcccctcctgctcacgggcacgttaggaacatgcgcttggataaaatccaagccagagatttagaaaccagtgtgtggtgccagctctcagccttggaaccacaagcccatttttcttaaaaagggatctggactggcatccaaagagatttcagtcccctcatrtaggtttaaccaccatgggcaaggcagtctctctcccaggtattcctctcactaggtgctctgctctagaaatgaagtctaaaagcagccccatcaatacagaacagagttagaaccacccggagagatttaatctggaatcccagcaagttgtgaaatggaaagactagtcggccagagagctgaggtctcacagtgtgcaaagaccagtcctcagtatctgcacccatccatttgagtttcaggtgaagcctaggatttgggagctcaatacaaagatgccagcatgaaggagggtgggtgccaactaggtttggatttagagacatcctccttttgggaaaggaaaatatcctgattccacttaggtttccaggaagaaggcatccccatttcagaacagttttctaagccaccctcatggaggtttcacctgcagctttcagtctgctttgtctgatgtttgaggatgcaactgcccaaaaatgggtctaaagtagcatcccgtcacgttctgtaaaaagtaatactgctttaaggtaacacttatggaatgaatga

SEQ ID NO: 66603 - DNA, 1045 bp, Homo sapiens
tgttcaatattcggatatttccagttaaaactggcattgcacaatataaaaaggaatggtaaaagtcatgctaataatttaaaattttgactttacttagaatggtattaactagcaaatttaaaacaccatgacaaattgaaagtgagactggggaagaaagcaaaaagcatgttttctgactgtttgaacaaggggccccacattttcgttttgtagtgggtcctgaaaattatgtagccagtcctgcctggtgagccacctaccctcttgggcatttagttgtctatcagtaaactagatcattaacactgcgcctgcccctcctgctcacgggcacgttaggaacatgcgcttggataaaatccaagccagagatttagaaaccagtgtgtggtgccagctctcagccttggaaccacaagcccatttttcttaaaaagggatctggactggcatccaaagagatttcagtcccctcatataggtttaaccaccatgggcaaggcagtctctctcccaggtattcctctcactaggtgctctgctctagaaatgaagtctaaaagcagccccatcaatacagaacagagttagaaccacccggagagatttaatctggaatcccagcaagttgtgaaatggaaagactagtcggccagagagctgaggtctcacagtgtgcaaagaccagtcctcagtatctgcacccatccatttgagtttcaggtgaagcctaggatttgggagctcaatacaaagatgccagcatgaaggagggtgggtgccaactaggtttggatttagagacatcctccttttgggaaaggaaaawatcctgattccacttaggtttccaggaagaaggcatccccatttcagaacagttttctaagccaccctcatggaggtttcacctgcagctttcagtctgctttgtctgatgtttgaggatgcaactgcccaaaaatgggtctaaagtagcatcccgtcacgttctgtaaaaagtaatactgctttaaggtaacacttatggaatgaatga

SEQ ID NO: 66604 - DNA, 2189 bp, Homo sapiens
atttttaacagttacccctcaactgacacatctttttcccccttaatggggaaattagtggcattaatactgtcccaggggttactgtgaagggaaataacatgtatgtaaagtgcctggcgtgtgtggggaatcaacacacatcattcccctctgcctccccactcccttaaagtaggcractattcagcaatctcacaaaactctgctgggtacaacattccagagccagggggagtcacagtttggaaaatcctgagtttgcccccatagggagtttgttttcatttgcttgcttttttttttttttttcccttagcaaagaggcagtatattgtagtaattagaatcacaggaatcagagacagctaggtttgggttaaatcatagccctctctgactaacttattatataatcagcctaaagtcatttaaactgaacctcagtttcctcatgtaacagctgcaagtaaaaatactaaaatctccatggctaaacacaatagaaattgaattcatgatcatattacagctcaatacaggagtactcagcaggtgacctcctctggaaggtgtcatgaacccaagctctttgcatttggtggctccaccatcctctagacctcaaggtcattagctggatcctctacatctactggcagaacaggagcgaggagctttgcaggggaggtttttatgggcctgggttggaaatggcacatgctacttcccctcggattctactgggcagaaccagtcacatggtttcacctaaccacaagggaatctgggaagtgtgctctagctgggtgctcaggaagaaaaggacgatgcataacagtccttgccgtatctcatctgttaaatgaaacaaatcctggagacaaccaagagggctgtggagagatttaaattagacaaaatgtgcagtatgctaatgcagatcctgtcccagaataagtgctcaataatggcagctattcagttcatcatccacgtgtgggtcagtaccattgcttatctactgtggaggacactagaacatggaagaaatacaccaccatagtgtgctacagtgactgtgcttcttgaagctaagatatctgattatcaacacacattgagcagacacagtgcttcatagactagggtccttgggagatgcaaatgaacaaacactgatccctggaatcataaagcttgttcttactcagtgtggctgatggacttggccccaatgcctataatgcaggtaaaatatattaagcatccagaaggaaatatgtcttaatttcagctaaagggattagggaagccatttggagaatgtgatatctaagttacaccatgaaggtttccaaaaggtgagatggcagggaaaggctttgttagggaagagaccaatgagagaaaaaccatggagagaagatcagagacagtttgggaaatggcaaataattcaaatggcagcaacagagtgtgagtgtggggacaaacaaagtggttacaggccagcaggaacagacataggcatggagatttgcatgctgtgatgaatgacactggctttattctatgggcaatggtgagccatgaagagtttagggtttccagcagcattattttgattatgacactgagcaaacttttgcacagctatcagagttggttaagacaggtatagtattttttgttttttgtttttgagatggagtctcactctgtcacccaggctggagtgcagtggcatgatcttggttcatacaacctccacctcctgggttcaagcgattctcctgcctcagcctctcgagtaactgggattacaggcgtgtaccatcttgcccagctaatttttgtatttttagtacagacggtttccccatgttggccaggctggtctcaaactcccaacctcaggtgatccacctgcctcagcctcccaaagtgctgggattacaggtgtgagccactgtgcctggccaggtatggtattttcatttcacagatgatggaactgagaccagaaactgtctaagcaatatatatattacagagtaaataattttagctacaaaatcagtgggttggactagaaactctttcatttcccctttgtatcagttaggtttttattccacaatgctgcataacaaaaggctcctaagtctcagttgcatacaacaaaa

SEQ ID NO: 66605 - DNA, 557 bp, Homo sapiens
tgctacagcaagctcarataaatagcttttgtttttctcattcggttattcttgtttgtttctagatggttcaacttgtcttccatagtaacagaagtttagctgggcatatggccagctgaatgaagactttcttttccagccttccttgcagctagataggttcatgagagtacattctggccaagggaatgaagttgaaaatgttgtgtgacaggcagcactcaggaatgtgctttaagataaagccagcatgtactctttgtcccttcaagcctagtgtgacttgataagctagaaataggctgggtctctaaaatactcttgatagagcagagctaccatactagccccagacttttatgtgacagagaaataataacaataacaataataatagcagcagcagatacatttacatagccttacaatgtgtgaggcattcttctaagctcttaataaatactaattaattcaatcattacaacaatcctataaagtaggttctattattactgtgttttttagaaaatgtgacacagagaagtaactggccc

SEQ ID NO: 66606 - DNA, 694 bp, Homo sapiens
aaagtggaaatggttctctctacatgtaatgattgttaacctgaagttacaccawggcaatttgatcttttggtgcttttgtaattttcccatagtagacaatcatttgatctgagagggcaaatgccagaatgtctagaacaagtaggacctcgaacaaccaggggaaataacaatggttacactaaattggaagataaaactgtcacctggacattttgggctccttatgctcttaaccaataggcaaaaaatgggttcctttaatgaagtggaccaattatttggaaagccactaatttcttacctttaggaagcccagatttttagttacacttgatgctggctatccctatcctaataacctgggatggcaagccaccagggcctgtctcataatagcagaatgtcagaaaaccaattgcaaataagattaggtttaactggaattatttattgtcagctaaatacaactaattcttatttgttcaaatatatagaatttcagatactcttgagttcaagtttctacttgatatcaacaataactttgctgtattttgctaatatatattatctttcctgtagttgagcaaggctagcatgattgttaattttagcatgtcagcttgactgggctaagggatgcccccataactgacagaacattattaatggttgtctgtgagactat

SEQ ID NO: 66607 - DNA, 694 bp, Homo sapiens
aaagtggaaatggttctctctacatgtaatgattgttaacctgaagttacaccaaggcaatttgatcttttggtgcttttgtaattttcccatagtagacaatcatttgatctgagagggcaaatgccagaatgtctagaacaagtaggacctcgaacaaccrggggaaataacaatggttacactaaattggaagataaaactgtcacctggacattttgggctccttatgctcttaaccaataggcaaaaaatgggttcctttaatgaagtggaccaattatttggaaagccactaatttcttacctttaggaagcccagatttttagttacacttgatgctggctatccctatcctaataacctgggatggcaagccaccagggcctgtctcataatagcagaatgtcagaaaaccaattgcaaataagattaggtttaactggaattatttattgtcagctaaatacaactaattcttatttgttcaaatatatagaatttcagatactcttgagttcaagtttctacttgatatcaacaataactttgctgtattttgctaatatatattatctttcctgtagttgagcaaggctagcatgattgttaattttagcatgtcagcttgactgggctaagggatgcccccataactgacagaacattattaatggttgtctgtgagactat

SEQ ID NO: 66608 - DNA, 746 bp, Homo sapiens
cctgcaactcatctttgtaatggttctcctcagtcctagattactcatttagggagcaacttatttttaatataaatttattttaagataaataagtagataatttactaattaaattactaattggagtcctcttacccctatttagcacagtgatcagacgttccagccttatgcttgtctctatttgcattctaagccagtgggttactgttttctcttccctgcttatatagactatatttggttttatttttctccattcacatacccaaatgtgcttgttgaattttttttttgagttggtaactgttacttaatagcacctggarcagattgcataactttctggtatttttctgttgtgaaaaattcagtctaattcagtttgaatactacttttatatttgattcaaagttgtataagttttcttaactctatcaagggccaggctggagatatagtagatttaaaggaggcagggaggtctattctttctatcccctctctacttctgccccttgaagtagacacaggttgatggagccatggtcaggtttgaggatctctcttccttatcaagacctaactcttttgatgttggatgctaggaaagggaacaggaaggaaaaacaaacatcattttacttaatgatgcatggtggtggctttctctgttgattatcacctcccctccaacactcacagaccatcagttattttacaaatcatcagtggtttacct

SEQ ID NO: 66609 - DNA, 694 bp, Homo sapiens
caaggggttcctcaataaaaaaagaaccttaaatgtcatctggttcagtagtttcgtttcaagcaataaaaaataactctcctatgcagacaagtatttttgaaaggaccctttcttgacctctggtacactgagcaaccccttgayttcagccctttcttacctgcctttaacaagcagccctttattaaattgttcttttatttcaaagttttttctaaatatcttcattttcttcttttatccttgaccctcccctgtctactggcacacaggatgtcacttgcatttatatttccaactgcactgccccctaggtggctgaacattcatgaactgagatttctaaggtaattttacatggataaccttttatttgttgggtaagatgggactacactttaataggtagtagattttggagggaaaatatgtttatttacaaccacaaattctgcctggtttagtaaagtcccacatatggctgaattacttgcttcaaataaaaaacccaaacaaaacaaaaacaaccttttccagaaccccaaaacacacgcatgtgcacacatacacatacacacaaacaacatatcctaaaacaacaacaaaaaatcacactgagtatgcacaataagactatgctaatgggagggatggattatttaggaaaaagatgtttcaatatttaaggatc

SEQ ID NO: 66610 - DNA, 1160 bp, Homo sapiens
tcctttcctactccaaattacaaagattttactcaaagtgtgctgttttctccctgttgtcttttttattttttagaacacatctcctttgcatactcctcacactgcgatgactggtttacctgagtgtctgttactcacgctgtccccagagaaagggcagcactgcaatccgaggtcccagcaaggacccgccgggctggtgctcagcacaggactggaccaacgcccttgtggatcaagaatttctgggtttttgtagggtattaataagtcatcagagcatgtggatatttaatatatttgattatttgaaaagggaaaaggatattcaaaaaaagaattttaatayctttttatgttgatgacaatatcattttgtaaacttccaaatattaagtattaaaatgcatatatttttatttctaatcattttcataatcaccttgaaattaaaatgaacatctttttctttttttaaatttggaggcagttcaaagattctggttttgagaaggaaaaaaatggacttgccagagtggtgcttttcaacaaaataagtttgtgataatagacacccctaaatgcaatgctcgcaggagtaaaaatgaaacacagacacagagctggagacaatcttgggaagtcagactactgtggtcctctgaattaacctctcatggtatttacaaaaatcttagggagttagcctaacatatctttaatttttatcagtattgattatggatgagctccacagccagcccttacctcattgacaaacacagagtatcgtgccaaaatctgcagagtgagtctccacaggcgatgcaccagtaatggcaagaacatctcatctgaccaacacctcctaaggctgctccaagttctatgagaagccaaaaggcaatacggactttcagctagagaaaaaacaacaacaacacacatttaaggaatttcaggcaattttaggctatagtctaatgtgagacttccgatgtacgattcaaaggtaaagaaaatggccttctgaagaaaaccatgtggtcagcaaagctgttggaggcacagggatgacgagtggccacaatccaagttccctaccacatccttcatgccacgcacaattttacatgacactatctcccaggtgtttg

SEQ ID NO: 66611 - DNA, 1632 bp, Homo sapiens
attctcagtgagacgcaggagcacctgaccctctaccatgcagaccagtcctcagcctgggaggaaggcagatcacagccaatttgctaaaaaaaaccagctgttcacataagcacaccaaggggccatatcccctggacaagttatattcaggaatgaaaatgaggtctgtttcctatattcttattcatttttcatctctataaagcaagaactctatacaccaaaactatttggtttatttttaccttattaaaaaaagaagtcaggctgggtgtggtggctcatgcctgtaatcccagcactctggaaggccaaggsggggtgaatcacttgaggtcagagttcgagaccagcctggccaacatggtgaaaccctgtctctgctaaaaataaaaaaattaactaggcgtggtggtgtacacctgtaatcccagctactttcgaggctaagccaggagaatagcttgaacctgggaggcgggggctgcagtgagccaagatcatgccattgcactccagcctgggcaacacagcgagactccatctcaaaaaaaaagcaaaaaaaagaagtcaaactaagtgatttttaaggtccaacttactgtatgattaaaaaaaaaaaacagtaaaagtacgctcagaatactgcaatccagatgacttggtgaactgaatgaactcatttaggataccatgccacttatcactttaagggagttacctggggcatcttccaggacatctgtaagtgctgcttctaaggatcccgctatttctctaaatctgagataaaaacaagaagaagaattaatgtttatgactctgacagatgcctttccctatccattctctgtttttcctaagtaacaggaacttcctctgtcactcactggtaagtccagcctcggaatgcctattctcccaggcttttttttttttttttttttaactgaacaagaaatcgtgactaagccactgttatataagggttctctgttatttgcagctggtctgaatcataacttaccccatgtttctcaaattaaacaaactgccagttaagtctccatcaagaagttgttgctggtgagcagcacctgattatgatcctctattcacttcaaggccataaaactttggttcctccaacccatctatcttaacaccatcacaggaaggtaaacgtccccaagctaagaaagctgcattctgtacctgtgttggcagcttgagaaaaatcacaggaagtggccagttaaaactagaactcactgcttggtgctcttctaatctgtgaccctctcccacgtccatggtacttgcccttcgggttctacggctgtctgtaccagcgcttcctagatgtgcgttcttttttccctgatgacagctggctcacctggcacctcagctcatcctgtcacagacttctgttctaataatggatatggacatgtttttatgactttgtgaaaggcaaatgtgttatatagtttttttaagctagctgcttttgcaggcattgttttctaactatataactcttgcaatttcatatatctctttactagcatgctcttttgtcacctgctaattgccttactagtaatgaattctgatgcatgctca

SEQ ID NO: 66612 - DNA, 705 bp, Homo sapiens
taaaaatctctgaattgcttttaatatctccatatcctctcaagtgacttcttgtttgtttatcttggtctttgtctcttatgttgttgatctccctcagatgtctggtggtccttaggagatcctttatatttgttgctgaaggactgtagattagtataggtagttcatgtgtgtttcctttgtagttaggcaggtctatttgctctgaatgtgagggctgactctagcctttgtgtgcagagattcttctctttggtacatgcaggtagggagcaagcaagtacatctggaactccaccaccttcaaaggaaagtagggcacttaaaagtatttccctcctagctggagatgactttcctttctaccctctggctctaccctcaggatttcctttttatctgctgggtctacatcagatattactttgcagtgctttcttgccccaacttcatacctttggctgtcccttagaaaatcattcataagttcagaaaaccattcttagaattcaaattgctctatacacatcttagaaaggaaagagctacttaaccaaaatgtcccaaggacatctttccagttaaccaccaagaggagggatgtccctgctctttaattcatcccaccccacctccaaggctcagcccagaccactgtttmaaagctcactcttgtcctccatatgtgctaattcctagctt

SEQ ID NO: 66613 - DNA, 1108 bp, Homo sapiens
ggagaaaaggtattcgggttgtccctcttttctatgcttctaattttagattgcctagatagactagttctggccttgagcacttgttcttgcctctaaggaagcccgaactcaccaagttccattcattctagcacaatctcaatctgtggttatctaggccctttgtctgtcttgggctatgataagctattccctattctttttaactgagtttctaatacctccttaaattgacctttaactaacacctctggccaatctagcataacatagtttatcctcgttttttttttttttttttgagacagagtctcgctctgtcacccaggcttaagtgcagtggcgccatctcggttcactgcaagctctgccttccgggttcacaccattctcctgcctcagcctcccaagtagctgggactacaggtacccgccaccacgcctggctaattttttgtatttttttttttttttagtagagatggggttccactgtgttagccaagatggtctcaatctcctgacctcgtgttctgcccgcctcagcctcccaacgtgctgggatyacaggcatgagccactgcacccggccaatagtttatcctcttgacccaactctagcctctcacacccaagacccatcatagcaaggcaatgttaaaacaaaggttaagggtccttgcagcaaggatatatcatctctgtgtcacagtccctatctgagtacctggcacagaaatactcaaaaaaatgtttgctggatgaatgaaatccatacctaataatgcaataaccacacttacatagcacttagtttcatatttacacctatactctactgaggataggaaatgtacatgttaggtttctgaagctgaatattttaaaatggattactgagagcctcttctgtggagcattaactagaagatggaggtgggaatgaaaggttgataagttcttttaaccaacactaacaaacaactacactgtattaatgctctcctggaaaataaagtatgtcatcagcttcaaaataccataagcattaactaaaggggagaagataaattatgcaaagataagaactgacaggaattcaatt

SEQ ID NO: 66614 - DNA, 1120 bp, Homo sapiens
cctatgatcacatctcctgtgggcagttttaatgctataccatataggtataatttgaatttacttttggaagtcacttgctttgatatatttttggttttcaatgtttgtctaattccttctttatcacacaaatgctgaataagagcctctgaatagatgcctgattacttatgttatttgtttatagaaaaatagcatcaaaacaaaaaccaaaatgtttcatccattttatctcaaaccatgtttcctgtgagtcctagatgatgctatgtcctgtgatggtttctgtttttagatattacttcggctggaaagatccacatgagttcaaccaagttttccacactgccccctagattatccttgatcttatactggcaatttctgctggtcaaagctgctgctgtctacgaatattctttctcgtcttcttaaggcctttcctaaaaataaagaaaaacaaaaactttctctgttatgttcactagtcacatacaacactttctaatgccttggattgctaatttttctgaattctactctaagtatcttggtgtgatggttaatattgagtgtcaatttgattggattgaaggatgcaaagcactgttcctgggtgtgtctgtgagggtgttgccaaaggagattaacatttgagtcagtggactgggagaggcaaacacacccctaatctgggtgggcaccatctaatcagctgccagtgtgtctaggataaaagcaggcagaggaacatggaaggattagactggctgagtcttctggcctccatctttttcctgtgctggatgcttcctgccctcgaacatcagactccaagttcttcagcttttggactcttggaccttcaccagtggtttgccaggggctttcaggcctttggcyaccgactgaaggctgcaatattggcttccctacttttgaggtcttgggactcgtactgacttcctggctcctcagcttgcagacgccctgttgcgggacttcactgtgtgattgtgtgagtcaatttgcctaataaactccccttcatatattcatctatccagttagttcggtccctttaaagaaccctgagtaatacacttgggagtcagga

SEQ ID NO: 66615 - DNA, 765 bp, Homo sapiens
ctggaggacttgttaaaacacagattgctggacctcacccacagagtttctgattcagcaagtccaggtggggcctgagaatttgcatttctaacagtcccctgctgatgctgaagctactggtcaggggaccacattttgaaaaccgctggcctataagcaagaagttgctgtctttgtttctttaaccatccagggtgggaggagggacccctctgttccacgcagccactcagaaatacaggctggcagtggctcctccatcttcagtatgttctctccccaaattactcttgtcactgccattgctgcccytgaagaagagaaaagaaggatggaggaggcctggaagtttgatacattgcttctgctaacaattcactggagagaattgagtcacatgatcacccctcattgcaaaggaggctggtaaatgtagtctctgcctgggcagccactcaccactaaaattctcatggtgatgaaggagagaacccaaccatacagtggctcttaagtaatacgacactaagagagccaggagcactgttcacatcatgctcttgctcagaatcttcactaagattcattccctacaaccaggctttcttcatgatggcattcctctaccttctttccatccatagtctatgcagagtcaagctagaccgctgactaagcttcccccagccgttcaagcctctgagatatttattcatactctaatctctccctggcacatcatcaccttccacccctgcctat

SEQ ID NO: 66616 - DNA, 666 bp, Homo sapiens
tcccctggaacaggtaaaacccttcagggaatatggaggcctgtgcatctcttctgatgctgttttctcatccccctcaaagcactaaacaaggtttcctttcagagcccatttttctgatgggtgatgctcagggatttccagcatccccagtctctctctccatgtgctcacttgagcacctctttaatagaaaacaccctggattagggtctgagagctcgggatcatggcctggcatcatcagcacctaacatggagccctcagtgtattgtctagcttctctcaaactcgctatcttcatttattttttaaaaagtttcatagatgttttaaaaccctgactttgggaaccacagaaccctgaattaagagtccagtttttccaaatcttttgytcaggatcacatgaaaaactttagctaccattcaaaactacaggtgctgagaggtaagcaggagatgggaaaatgcagcctaccatcactcttctggaagccagcagagttcttagctcaggacaggtggggccttgtgaagggctgggtaagcaaatggatggaggaaatgaccctcaaaaggtgtatgtgcctggttaacgtggagacgagctaatcccaagtggttattttgctcatttaacatcacattaaccagataaaaaa

SEQ ID NO: 66617 - DNA, 1526 bp, Homo sapiens
tcagcctcccaagtagctggtactacaggtgcaagccaccatgcccgactcatttttgtattttcagtagagattgggtttcaccatgttggccgggctggtctcgaactcctggcctcaagtgacctgcccgccttggcctcccaaagtgctaggattacgggcaggggccacagcgccctgctgcctccttgtagtcttgagctgcattgtcagactcagcaggggcatcatcattcctggaaaatccactcgaggctcaggacagtaacctctttctccagaaaatctggtaattctgtcatctgacaacaaaacaaacacaactttgttcttgtattatttccatgcaagaaattataaaacacatttggtctcctcttcaaaggacaccaaaagcagtttgtgtaaattcctatcctttcttccccaagtgctgaggtgctactgggagagctgaagtgctttgcccaaactcactmcctgatattccctaggatgtaagctccatgtgatgaggcaatactgtggtggtgttctgactttttatttttttaagtatgctattttatctgctagctgtgtgcagttaatctgcacagacacatctccttgtctgtggttgtcaggcctgagtcctgcgtcttgtccttcctaggaggagcctgttgggccctccagcaccgggagacatgcatggcaggcattttcctggggtgtcccaggatcccagtcttttacttcccctgctgtcctccgtgccctcctgctcctggccctggtgatccccagcagagccgaggagccagtggccctgctctcagaggcttctacagtctccctcagccctgcgggagacctccaggggtggagatgggcaggggcgtagcgtcatccagggtggggtgggctcagctaattggttccctccccccttgtctggtgcacttggcctctgaggggagcccaggaggaaaggacccagccttctttcctgtcacctgcccagccagcgcaggagcatgcgtgtttgtggcaaggatcaggagctgggcagggcaaggctagggctgtggggtggtgctcttgcattgcagggcattgaggaagaaaacaccagcttgtactatggggtagagggccgtgaattggaggggaaagaacagatcttaagactgtgtgttcttcataatgcccaagacatttaagtgatagatttggattatttttaaatgactgttcttgtgattggtgggttgtgttcatttggccaccccgttctttgggactgaaagttcctggctcggacactatgatgtcacatgtgcattttccttctcggtgcttccattaataagactatttaaaacctccaaccactggagaaagcagaaagagcttggcctcagccgttagcccacctctgctgccaagcagtgttgcagccctgagggaggaactgtcctcatctgtgctgaaggagagtcccagcaggggcccccaggtcctgccagcctgaaggcgcc

SEQ ID NO: 66618 - DNA, 701 bp, Homo sapiens
cacaggtcgagggctcagtcccacaaaactgccctccatttccgaggtggatcgcaagcccctgattgcctaccctgtctttctgaccagccacctataaatcgaggttcccaccatgtcctccatgggtttgattattttgctagagaggatcatagaactcagggagacgcttaaatttaccagttcctgataaagatattgctaaggatacaaatggagaracgcataggatgaggtgtggggaagaggcgcggagcttccgtgccctcccacagggcagccatcctccaggaaccccttcgtgttcagctgtccagaagctctccaaaccctgtccttttggatttttatggaagcttcattatgtaggcaggattgattaaaccattggccactggtggtcagcttaaccttcagcccctctgccctccctctaatcctgccttggtctttcaccagctccatcctgaagctacctaggggctgccagccatcagcccattcattagcatagaaaagacagcacttcggagagtctaaggatgttaggagttgtctgccagggaacctggttgaagatcacatatatattttaccataccaaagtgcacctcaagtcttcgaacacagatccccttaaattgaaaggataaacaactcagatactgccatatcagtggaacccaattcagtccatc

SEQ ID NO: 66619 - DNA, 701 bp, Homo sapiens
cacaggtcgagggctcagtcccacaaaactgccctccatttccgaggtggatcgcaagcccctgattgcctaccctgtctttctgaccagccacctataaatcgaggttcccaccatgtcctccatgggtttgattattttgctagagaggatcatagaactcagggagacgcttaaatttaccagttcctgataaagatattgctaaggatacaaatggagagacgcataggatgaggtgtggggaagaggcgcggagcttccgtgccctcccacagggcagccatcctccaggaaccccttcgtgttcagctgtccagaagctctycaaaccctgtccttttggatttttatggaagcttcattatgtaggcaggattgattaaaccattggccactggtggtcagcttaaccttcagcccctctgccctccctctaatcctgccttggtctttcaccagctccatcctgaagctacctaggggctgccagccatcagcccattcattagcatagaaaagacagcacttcggagagtctaaggatgttaggagttgtctgccagggaacctggttgaagatcacatatatattttaccataccaaagtgcacctcaagtcttcgaacacagatccccttaaattgaaaggataaacaactcagatactgccatatcagtggaacccaattcagtccatc

SEQ ID NO: 66620 - DNA, 554 bp, Homo sapiens
ttttaacactattaacacttatctgatgttcctaccttatctgatgcttttccctgtgcagccctcactagtataaactgctagatctctcacacctggcctgccactgggacaggtgttaggctcagcacccttgctcctccagttgctcccatatcagtgctcacttagcttacatcttcccctacatcccaagtcttggagtatcttggatgctgacatccatccatggagccatcccgcactttggcctttcatttccttgaacgttttttccgtgctccccttcttttcccaaagtcaagtttattgccatataattttctaaagctttatctaggcttaattgatgaacaataaactgcatatatttaaagagtacagagcaggtgcggtggctcatgcctgtaatcccagcactttgggaggccgaggtgggcagatcacctgaggtcaggagttcgagaccagcctggccaacatagtgaaaccccatttctactaaaaatacaaaaattagctggrcatggtggcacgtgcctgtaatcccaaca

SEQ ID NO: 66621 - DNA, 508 bp, Homo sapiens
aaaaaaaacaaaagaaaaaaagaaagaagacaggaaaattagacagactctccccttcagatacacaaacaatcatacatacttcctccccaactctgtgtacgggaacagaggctgggcaagggtctaagaaaacaggaaatgttaatacaaataacaggtcaggccaggagcagtggctcacccctgtaatcccagcactttgggaggccaaggtgggcagattacctgaggtcaggagtttgagaccagcctggccaacatggcaaaaccccatctctactaaaaacacaaaaattagccaggtgtggtggtgagcccctgtaatcccagctactcaggaggctaaggcaggagaattgcttgaacctgggaggtggagaktgcagtgagctgagctgagatcacaccactgcactgcactccagcctgggcgacattccgtctccaaaaaaaaaaaaaaaaaacaaatacacacaaaaaaatcataggagaacactatgcagca

SEQ ID NO: 66622 - DNA, 658 bp, Homo sapiens
agcaaaatgaaagtgaaatgctgtttctggatttgtgcgtgttgatgagaatgttggtttttgtttttttactgagagcaaaaaagcatatgtagcattaaacctggaggaaatcattgcttgcctctgagctatcctaacagtggaatatgttagaatttctggggctctgtggcagggcagaattccatctgattaaaatggaacggacaaggccagctgacatctcaaagtcctgtctgagcagctgagcttccaaagactaattgctaaaaagactagatcgagttactgtatccaaaatatttggctattcctaatcggactgtggttaagaaaaggcctcctgcagctttgctcagttggcaggcagacaatttcccatgattccagcttagcaccarttagaaaattatagggggaaaaaaaagtccctaacaataagattgccaagtaaatctggagtttccttcttggtaatgattttgatttttcacaacctgagagggaatctacaagttgccctttgtcagccccttcctttctagcccccccatctccatacagttgtgtggtggttaaccagtggggctataaggtttcattcccattagtcaagctcatcatagaataaataaccattgatttatggttgcct

SEQ ID NO: 66623 - DNA, 877 bp, Homo sapiens
agtagggaacaacgctgtgatttggaccctggcttctcggacagtgcccgttggccacagtccatcttgcttgttgaagaggcggtgactgtgaatagttgaaggcagtgagagacgcattgtagcctctctgcgaaggttactgtcctcaggctcagctctaggcagatcactagtttatttgccagtggtgacggaaattaaagcactgccagggcatgcctgagcaacagttggtgattgctttgggctacagacctggcttttcccaaacatttgttctagctagtgaggtgtgcaagttggaaaaggctgttagaggcagccatggctaaagggtaggaggggaggctgcagaagtgggggaagtggaactgtaggcaggcgcagacgctgtggaaaaaggaattggagaggaagagctgagatttggggtattttagggatttaagcaaggcaagatgtaatcaccccccaaagtgtacatgaagccctcagtagtgcttttgaagttacttcgtgtttttaaacatccagttagcctttagaacggtatcaggtgagatgagttcagtcaatgaagccagtcacaactggcgtccacctgagagccccgttggcctgatctccccaggttatgggctacaccggcatgcttataagtttcactctcagtgaaagacgccccgcaggcccccgacggaggagtgctcagcccctggacatgccttttgggaatgctagccccagttcggratttgtttcctgtttagctctgccggtgacccccggtcagctgtcctctggcgttccccagcctcacagaaggggaagggcacaggtttgtcatttctgtccccgtctctttgttccttgc

SEQ ID NO: 66624 - DNA, 847 bp, Homo sapiens
cttattggagcccttttcaccataatccatcacttcaaaaatgaagccactcctgagaggtgacaccccatttctacctgtgttttcagtctttcccacacagatatttcccaggacttggtgtgcagtaattataagctattgtaactgcctgttcattttaaaatttctttctttgtgaattgggtttggaagaggtggagaactacaggcaaatctctgcaaaatgaacacagtcattcacccatacagccacatctagtctgtggacaaatgcaggggccacttggtgctgggctaggtgccgagaacgcaatgtaaatcagacccagggtctcgacagccaagaagagagtagatgaatccatagcatccctaagctagagtaggaactagccaccttacagcagtagctacaggctttggggctgtaagtgcattcattcctaggacttatttcctcaatcttactctctcatttgtccaaacaccagaaaggaaattagttgagaatgttagagctgttctgtgttctccaaggtagcacagttcaaaggcaatataatgtgagccacrtatataatttaaaattttctagcagtcacatttgtaaaaagtaacaagcagtggtaaaattgtttattttctttcgtttaatataccccaaatgttatgatttcaacatgtattcaatgcaaaaattatttataaggcattttaacattttgtactcagtctttgaaatatagtgttttttaaactttcaacacatctcgattcagagcagccacatttcaagtctgcagtagctgctgctggctgttgttgccatattgtacagggctct

SEQ ID NO: 66625 - DNA, 847 bp, Homo sapiens
cttattggagcccttttcaccataatccatcacttcaaaaatgaagccactcctgagaggtgacaccccatttctacctgtgttttcagtctttcccacacagatatttcccaggacttggtgtgcagtaattataagctattgtaactgcctgttcattttaaaatttctttctttgtgaattgggtttggaagaggtggagaactacaggcaaatctctgcaaaatgaacacagtcattcacccatacagccacatctagtctgtggacaaatgcaggggccacttggtgctgggctaggtgccgagaacgcaatgtaaatcagacccagggtctcgacagccaagaagagagtagatgaatccatagcatccctaagctagagtaggaactagccaccttacagcagtagctacaggctttggggctgtaagtgcattcattcctaggacttatttcctcaatcttactctctcatttgtccaaacaccagaaaggaaattagttgagaatgttagagctgttctgtgttctccaaggtagcacagttcaaaggcaatataatgtgagccacatatataatttaaaattttctagcagtcacatttgtaaaaartaacaagcagtggtaaaattgtttattttctttcgtttaatataccccaaatgttatgatttcaacatgtattcaatgcaaaaattatttataaggcattttaacattttgtactcagtctttgaaatatagtgttttttaaactttcaacacatctcgattcagagcagccacatttcaagtctgcagtagctgctgctggctgttgttgccatattgtacagggctct

SEQ ID NO: 66626 - DNA, 569 bp, Homo sapiens
gcaggagaatcttatagctattatagttatcttttatgtgttttctgaagttcatggaagctgtccctttgtcggtttccaaatgttgtcagccttatttccctgcctatggcaacacattttaaatagggatcagtctgttgtatgagtgatttaagttgggtgtaagcaagaagttcctgcttgtgcgggacattaaactattgaattcattcccaaagattgttgacttcccctttcagagttttaaaagtaagatgactgtttaccaggggctcattgttccacgtgagagagcctggctttcctgcctctcctcaggcttcctggmgctgctcttctgatggagttgttcctctccctggttgtttataatggattctaacagaggagctgggagctgacaggagggcccgggaccggagggggtcccccacctccccagctgagtcctatctccagcattgccactcctaccttttttcccaggccaagctctgtgttctcctgctcgtccctcttctcagtgtgcctcctgcctcgctgggggtagggaaatgacagtcgga

SEQ ID NO: 66627 - DNA, 533 bp, Homo sapiens
ctctggcttctatttagatgatcattcaacttttctcctttaatctgtcaatgtgcacattaatttccaaatttacaagttttaattttcaaatattaaaccaaacttgcatttctgaaattagtctaatwtggtcattatgttctattcttttggagcattgctggtttggttttatgaaattttgtttaggatttatgctgtgttctcgaatgagattaacctgacactatttattgttttatatacccaatacttatttctattcatttacatatttgtcacttttcattctcttcttttcttcttgcatctttgatgtttgattggggaacattttcttgatgcctaaataacatcctttagaatagccattagagagttttctggtaacacactggctcagattttgtgtgtatgaaaatatattgatttaatcttcatttctgaagtacatttccactaggcatagaattccaggttctctcagcatgttggagatataatcgcactctcttccagctttcattgct

SEQ ID NO: 66628 - DNA, 533 bp, Homo sapiens
ctctggcttctatttagatgatcattcaacttttctcctttaatctgtcaatgtgcacattaatttccaaatttacaagttttaattttcaaatattaaaccaaacttgcatttctgaaattagtctaatatggtcattatgttctattcttttggagcattgctggtttggttttatgaaattttgtttaggatttatgctgtgttctcgaatgagattaacctgacactatttattgttttatatacccaatacttatttctattcatttacatatttgtcacttttcattctcttcttttcttcttgcatctttgatgtttgattggggaacattttcttgatgcctaaataacatcctttagaatagccattagagagttttctggtaacacactggctcagattttgtgtgtatgaaaatatattgatttaatcttcatttctgaagtayatttccactaggcatagaattccaggttctctcagcatgttggagatataatcgcactctcttccagctttcattgct

SEQ ID NO: 66629 - DNA, 1292 bp, Homo sapiens
  misc_feature (1)...(1292): n = A,T,C or G
ggaagtttttctagggcagccccagaaaatttagggagtaacatctcttgattttagagaaatttcccatagaatttgtttcttttcttccagagtagatgaggaggaagagtctcatagccttgtgccctacccatttagatttgcactcttcctggtctcaggcatctgacaccaacagccagagcataaagaragaagggattaaatctagtgtcccgaagccctacctcaatcctcctgagacccagcctccagcatgtcaggtgcggggactggggattgctccaggtcacaggcattcctaggtgttgatgcagagatgatattctgtgccctgggtcagcctaggtgagatggagacagcagattccctcctgagagctggagcagcctcttcagtttgttttattctcacttaacaagtctgcaaaggtgttaatgtgtgccaaagtgtattgggttgtaggcctcagaaaagggtgtttaaggagctgtggcactatcaactctcaggtttgcgttagacaagattagcatcttcccttttttgttctgaaggctgtttgcttctctgcattggtaagtggctaccttcatgggaaaggccagggatggagggccagctcttagtgaatgaaaggagagaatttgccttcaaagactgtcatgcaaaagaactaaagataagatattgaagaaggctttttctgttattgggctagtttatagttggaggaccttctggttcttttattgggagcagtgaactttttctaagaatagctcagaagtactgacctgtggctagagaagggcagatccttatgtgtttatcctaatgataactcgttcttctcctgctagagaagagctttatttaatgccctnnnnnnnnnnnnnnnnnnnnnnnnnnnnnnnnnnnnnnnnnnnnnnnnnnnnnnnnnnnnnnnnnnnnnnnnnnnnnnnnnnnnnnnnnnnnnnnnnnnntgctatggtagaatctgtggcatacccaggctgccagcctcatacttctctgtgctcatttctttagtaggtggaacattcatttattcacagtcccttaggacactactgtgttaggtgctaagcctgcagaaatgtatatgttgaagtcactaccctcaaggagtttatagcatgaataaatcttttttgtcagcatttgtaatctagtatcaaagaataatcctaacagcaaattctctgcctccatctgataatgatgcagtccgtttggctaccaaacatgttcctataataaattg

SEQ ID NO: 66630 - DNA, 605 bp, Homo sapiens
tgtttaccagcagctgggggcagtgggggtggcggcatgtgtgggaaaagccaaggccaagaactccagtgacaacagcactgtcacgcctctggggtccacagccctgtggccctgctggccatgacctcggctttaagagaagtcataaattaaaggcattttaaaaatgaattattctatggctgggtgcggtggctcacgtctgtaatcccagcactttgggaggcagaggtgggtggatcacctgaggtcaggaattcgataccagcccagccaacatgttgaaaccccatttctactaaaaatacaaaaatcagctgggtgtgttggtgggcacctgtaatcccagctacttgggaggctgaagcaggagaatckcttgaaccgggaggcagaggttgcagtgagccaagcttgccttggtggaggtgggatgtgtgggcctggctcaggagagggctcacaaagagttggatgctgaagccttgagatcgcatgataggccacaggggcacccacgtggagtgggcaggcagggcagtggcgggacaagccacaggccagcagctccctgcattggtggatttatggggagaggaaag

SEQ ID NO: 66631 - DNA, 605 bp, Homo sapiens
tgtttaccagcagctgggggcagtgggggtggcggcatgtgtgggaaaagccaaggccaagaactccagtgacaacagcactgtcacgcctctggggtccacagccctgtggccctgctggccatgacctcggctttaagagaagtcataaattaaaggcattttaaaaatgaattattctatggctgggtgcggtggctcacgtctgtaatcccagcactttgggaggcagaggtgggtggatcacctgaggtcaggaattcgataccagcccagccaacatgttgaaaccccatttctactaaaaatacaaaaatcagctgggtgtgttggtgggcacctgtaatcccagctacttgggaggctgaagcaggagaatctcttgaaccgggaggcagaggttgcagtgagccaagcttgccttggtggaggtgggatgtgtgggcctggctcaggagagggctcacaaagagttggatgctgaagccttgagatcgcatgataggccacaggggcacccacrtggagtgggcaggcagggcagtggcgggacaagccacaggccagcagctccctgcattggtggatttatggggagaggaaag

SEQ ID NO: 66632 - DNA, 734 bp, Homo sapiens
agcctgcaagtggctcttaaaccgtccggactaattcagtgagtgtgagtccttggagccctccaagacctgcaaagcccctcctttcactctgtgtcctcaaacctcctttctagacaaaagagatagaaaacatactcaccggttcctgaacaaaggctgagccagcttcgaggtggagacccatgttttgtcaggactgaattcatgcttgacctctgcggtggtggcaccctgcctggacytccagccacatgccaatgccacaggcctctctaatcagacacacaggtctccgtcctgctttgcccagttgccatctcaacatggaaggcttctccccgactcagccccagtcttaatttctgcagctggacctgtctgcacagaaaaccaaggcgctctcagccctgccaatttgctccccgtccaacacaggtcccctgggcgctgtatatttgaaggcacagacttcgcagccgccgctcacactgcatttccttgttggtggttggttccttcttggattttccattcctgagtgcccatttgcgccctggaatgggctcccacactgctggctgccctggaggtgccgtccctcctttccaggaaagcaacaccacagagaccccggcctctgcaatcccagcagccagcagcagcccctctgctgggctccttggctaccaggaaggccttagtttggtggctttcccctgccaggcagagag

SEQ ID NO: 66633 - DNA, 572 bp, Homo sapiens
ggtctgtgcaaactccctcagggagcccccctgccctgtagctctcrcttaacttcctaggggctgctgagcccacccagaggttgttggagttcagcggggcagcttgtctcccttgtcagcaggggcgtaagggctgggtttggccatacaaggttggctacgccctcaatccctgaccgttccaggcactgagctgggcacccacggaaggacatgctgtccagactgtgatgactgccagcacagggcatctcgggcttggctggtctgcgaggccttgcccctgtggaactctgggttcctgttttctcagtcttttttgcggctttgctgtggttggcagctgccgtactccaggcttgtgtcggccactcagatgagggctgtggtgcgagccagtgcaggagagctgcgcttgggattgtgccctctcctgtgtctgtcctccggacctacccaggtctccaccatcaggaccctgtctttgggtttagaagaccaagtatggggaaaaccaggcaccagcctctgcagcaatgggtccctctagcctgtggacaccagctggg

SEQ ID NO: 66634 - DNA, 829 bp, Homo sapiens
tcttctgttgctgggtggattgtgttctataaaaggtcaatttgagtaatttggctaaaaatgttgttttggccttttatgtccttattctgtctatttcttttatcaattactgaaaaagagtgctaaagtttcyaaatgtaactatagatttgtctgcttttactttcatttctatcaaggttggcttcatacttgttttgaagctctgtggtggatagtgcatagatatttgagtttattgtgtgtcttcctaagaaactgacccttctaaaatgatctagttttccttttatctttgataatgttgttttgaagtcaactttgtctgatagtaacatagccacttcaattttcttctttcttcttttttttctaaagttttctagaaaaacatttatttttctccaagttttaaagtgtgtcaccaggtttgttgtacagattatttcatcatccagcaattaagcctagtccctattagttatttttcctcatcctctccctcctcccattctccactctcaagtaggccccagtgacttttgttcccctctatgtgtccatgtgttctcatcatttagcttccacttataagtcagaacatgcggtatttggttttctgttccagtgttagtttgctaaaaattatagcctccagctccatccatgtccctgcaaaggacataatttcattctttttaatggctgtatagtattccatggtgtatatgcaccacattttctttatccagtctctcaatgattggcatttagggtgatttcatgtctttattattgtgagtagtgctgcaatgaacagacacat

SEQ ID NO: 66635 - DNA, 829 bp, Homo sapiens
tcttctgttgctgggtggattgtgttctataaaaggtcaatttgagtaatttggctaaaaatgttgttttggccttttatgtccttattctgtctatttcttttatcaattactgaaaaagagtgctaaagtttccaaatgtaactatagatttgtctgcttttactttcatttctatcaaggttggcttcatacttgttttgaagctctgtggtggatagtgcatagatatttgagtttattgtgtgtcttcctaagaaactgacccttctaaaatgatctagttttccttttatctttgataatgttgttttgaagtcaactttgtctgatagtaacatagccacttcaattttcttctttcttcttttttttctaaagttttctagaaaaacatttatttttctccaagttttaaagtgtgtcaccaggtttgttgtacagattatttcatcatccagcaattaagcctagtccctattagttatttttcctcatcctctccctcctcccattctccactctcaagtaggccccagtgacttttgttcccctctatgtgtccatgtgttctcatcatttagcttccacttataagtcagaacatgcggtatttggttttctgttccagtgttagtttgctaaaaattatagcctccagctccatccatgtccctgcaaaggacataatttcattctttttaatggctgtatagtattccatggtgtatatgcaccacattttctttatccagtctctcaatgattggcatttagggtgatttcatgtctttattattgtgagtagtkctgcaatgaacagacacat

SEQ ID NO: 66636 - DNA, 894 bp, Homo sapiens
tttgggagcagcctctattttgggagcagcctctcccagcctggaagaggcgttcccatacatcctgtgcacaggtcctgctgtagcctcagtatttttcttacctgttcacatgagctttatagagtaaggatactaactcttcatctgtcatcgtgtggcaagtattgtttcattttttgctttttcattttctttatgccttttctgcttttctggtttagccttttctgcttttaaggtgttgaatggactcagtgattccttagaagatgaaaaaaagctcgtccgctcctcctcctctcagaaaaccctgagaaaaatccacctcaggacaggatgggcacctgtgctgcgctatacggtaccatcccatactagcgcacgactctacaggatccgttactattctccaaggtcttaatggcttgagcccatctggggcaggagactcaacctcagctcttgagacgctactcagkgggaggaacgtggtgttgagaaggacaagagctcatcagaaggcggagtactctgctctggggctcagcccttcccagttgccttctccgcaccacccaaggggatctgccctcacttcacatagctttgacttttatggctatggcttgaatccttcatacagtgtttattctgcctccgaagtatctgaaggaccttcgcatatgcctggtcacctccacagtctggaagctcttgggaataaggatcacatcttctcccttgggatttctcaaccacctaacatctatgaggctctcctgcagcagccctttcgctactgcagtaaaatctcatgatcacctcccctgcaacacatgcacacacacacgcacacgcaaacacacacaggcacacacacgcacacacaca

SEQ ID NO: 66637 - DNA, 601 bp, Homo sapiens
gaccatggatctcacctgcccatggagcccacccccctgcccatggagcaccctctacctgcccatggagcaccctccacctccccatggagcaccccccaccccgcccatggatctcacctgcccatggagcccaccctacctatccatagagtcccctccacccacctgcccatggagccctctgctgggtgttgttgggcaagtgcatgacctgatcatgtgggcaggagctcccccagtccccaacttttagcactattccctggaccacccttctcatcagctccaggtgcccaaagrgtgctcaggcaggcaccttacagggtcaaacagtggttgcctccactcctgaacacagaaaaactgacatggaaaacacacagagaagcacagggcactccacacagatcaggggccagtgtgtaagggttcgtaaggatttcctttttttaggcaatgaggcaagtgtggaggacggagagagagaggagatgagcatctctgaaggcgctctctgaggaggatgcagggaaacatttgctagcatgggcgtgttcaggagagaggctttctatgcaggggagctgctcagcctcta

SEQ ID NO: 66638 - DNA, 601 bp, Homo sapiens
gaccatggatctcacctgcccatggagcccacccccctgcccatggagcaccctctacctgcccatggagcaccctccacctccccatggagcaccccccaccccgcccatggatctcacctgcccatggagcccaccctacctatccatagagtcccctccacccacctgcccatggagccctctgctgggtgttgttgggcaagtgcatgacctgatcatgtgggcaggagctcccccagtccccaacttttagcactattccctggaccacccttctcatcagctccaggtgcccaaagggtgctcaggcaggcaccttacagggtcaaacagtggttgcctccacycctgaacacagaaaaactgacatggaaaacacacagagaagcacagggcactccacacagatcaggggccagtgtgtaagggttcgtaaggatttcctttttttaggcaatgaggcaagtgtggaggacggagagagagaggagatgagcatctctgaaggcgctctctgaggaggatgcagggaaacatttgctagcatgggcgtgttcaggagagaggctttctatgcaggggagctgctcagcctcta

SEQ ID NO: 66639 - DNA, 601 bp, Homo sapiens
gaccatggatctcacctgcccatggagcccacccccctgcccatggagcaccctctacctgcccatggagcaccctccacctccccatggagcaccccccaccccgcccatggatctcacctgcccatggagcccaccctacctatccatagagtcccctccacccacctgcccatggagccctctgctgggtgttgttgggcaagtgcatgacctgatcatgtgggcaggagctcccccagtccccaacttttagcactattccctggaccacccttctcatcagctccaggtgcccaaagggtgctcaggcaggcaccttacagggtcaaacagtggttgcctccactcctgaacacagaaaaactgacatggaaaacacacagagaagcacagggcactccacacagatcaggggccagtgtgtaagggttcgtaaggatttcctttttttaggcaatgaggcaagtgtggaggacggagagagagaggagatgagcatctctgaaggcgctctctgaggaggatgcagggaaacatttgctagcatgggcrtgttcaggagagaggctttctatgcaggggagctgctcagcctcta

SEQ ID NO: 66640 - DNA, 875 bp, Homo sapiens
tcataaatcaatgaatgtaagaaacagagtagggagtaaagagacaaaaagaatagcaaagcataattattctcaaaagatgaaagaaacaaaacgctgcaccttcagtaagtttccatcttggctcataaaaaaaaaaaaaaaagtctttagggcccgtctacaaggctgagattctgcagggagagtgcactgcagaycacctggccatatggccagtgtttttttcctgataatggcattttccctctattcctgcctccttcctaccctagtaagctaggctgaacagctggaggataatatgtctttcctttctttctcttaaggaccatagctcccaggcttcttggttgttggttctgggtcactgttctgagcctctctctttcccatttcacattcctaagtgctttctaagcaaaggacaccccaagaccaaaagatatgcgaaaataataggaaaaaaatgggcactaaaagtcgaaattctcaaaagtccaaacattcaacaccgcgtctgccctttcacccaatcaccttggccaaagcatccatccctctttgttttgctaatacccagtgttagaatcttttattgccaaaggtctcactttagaatgtctgcacctaggaattaagggacagggatttccctgtcaatatctgcagtggtggagaggaagccagtcctcaaacagactgagagaggtgaggggaacccaaaagagtacagcatcagggaagaagtgtttcaaagggggcaaggagaatccacaaaaccaaatgcaaagaagagtcagaaaagcgaggactggctgggcgtggtggctcaggcctgtaatctcagcactttgggtggctgaggcgggtgg

SEQ ID NO: 66641 - DNA, 540 bp, Homo sapiens
atggaaatgacccccacccagccagctaccctattataatgacattagtggattattagtgaaatatctgtgaataattagtgaacattattgaaaaatactatttcttgtagagtacaaatagctatctttaaattagttaactatctcttatgaaggaaaycattcggtttattttagctttcaaatcaaatcacgcaaccaactttaaagttttttcacaagcttgaaaacacacaaatattaaaagccacaaagtggctgggcacagtggctcacacctgtaattccagcactttgggaggccaaggcaggtggatcacttgaggtcagcagttcaagaccagcctggccaacatggtgaaaccccatctctactaaaagtacaaaaattagccaggctgattacaggtggtggtgttcacgcctgtaatcccagctactgggaaggctgaggcaggagaatcacttgaacccaggaggcagaggtgacaatgagccgagatcacacctctgcactccagcctgggctgacagagc

SEQ ID NO: 66642 - DNA, 683 bp, Homo sapiens
cagagacagaaagtcaaatactgcatgttctcacttataagtgggagctaaacaatggctacacatggaagtacagagtggaataacagatattggagattacaaaaggtgagagggtggtcaggatatgatgttcactactcacataatggatatactaaaagagcagacttcaccactatgcaatatatgcaagtaagaaatctgcatttgtacctcctaaatatgtaaaaataaaaataaaaagaccaccattagaaaaaaatgtgtcttcattggcaccaggaattaaaggaaatttcattattttcttcattatcaaaaagttactctgatatggttgctcatttattagacttactttcattccaatattttaataatattttacaaattttaaggatataggagggaatgagatacagacggcctattactaatagcacgcaaacagcaactgtgactccaataaaatccccatcaaagatgtggaattgtactctagtttgatgtttggtttctggtcctgcccacaaatacttgtttcgccaggacattccattccagtaaaaagttgtgtaagaaggactatatcaggatgtcagactgccaaccacctcctcgctttgccagtggaattatgtgcacgtgtgtgtgtgtgkgtgtacacacatgtacatgaa

SEQ ID NO: 66643 - DNA, 909 bp, Homo sapiens
tgcatacattgttgctggaacggtaacatttgcaaaaccttaacattccatgtctcatatccacaggaataattcttttcagaattgtagctggacaaatcctaaccgatgggtgttaagtttctaagatcaaagaatttttgagctagaaagcctattggagatctacaggcagctccactctagacagatgaggaacttgaaacctgcagtgctcaggggacctgcccaaggtcaaccatcagcttgagcgtggaccagagtccaggtccactgactcttgggcagcgcccagcactgttgtgatgcaacttgcaacattttccacctcccggcatcatggcagcctcgcctgagtttttggtgtgggagggtgtcatgtacagggaagggactgggggatacaggcaagtaagggctcacatgtcagccctgccacttacatgctctgtgtctagtcaggttactggacccatccgcgcctcagtttcctgtccttgatgaatgtttgtttgaggatatgagggtgcatggcacataggtgaagaagtgattgcctcttttctctcatctcctgctcccgtgcctctccataaagcaatccgctgtcaacctgcctcctgagcacggcccctctccatcaatggtggcagcagatgctatttgccacgaaggctgaatcaccaaaggctgcagtgtggggccrgagaaagctcctgatgtgagtctggcacctcaagatggtgtctccctcactggggctgcaccacttcatttcacaggctttgcagagtgatgggttttaaagcacagtttcacaactattccactagaaggctttgggtccatagatgagtaaatctgaacatctcttctcatggccatgctgcctgtcacctcagtgatgca

SEQ ID NO: 66644 - DNA, 955 bp, Homo sapiens
atgtgtatatgggaagtggatatttgataagaatggtcccaaataccagtggagaaagtatataattgagacaattgaggcatgtagaaaatgtgaacaaaattatagggctaatagatgaaagtgttggagaatatctttgtgacctttgggtcacaaaaggcagaatgtcagtaaccatttggcaaaaaaattgatcaaatttgactacaagaaaagtaagcattttkgtttaatagggacacctgaggtcaggtgcctgataaaagatatttacaaggaactcaagtcaatacagaattaatatcaaaatttgaccaagaacttttacaaatgagaaaaaatagaaatacagcagaattttggcaaaagctaatccaacagcattttggcaaaaactttaataggcaattcatagaagggaaacatctgaaaggctagcagtatataaaagtcatttatgggcaggcacggtggctcacacttgtaattccagtactttgggaggccgaggtgggtggatcacctgaggtcaggagtttgagaccagcctggccaacatggtgaaaccccatctctactaaaagtgcaaaaattagccagacatggtggcatgtgcctgtaatcccagctactctggaggctgaggcaggagaatcacttgaacaggggaggtgggaagttgcagtgagccaagcccatgccactgcactccagcctgggcaacagagtgagactccatcaaaaaaaaaaaaaaactcatttgtaatcagagaaagacaaattaagacaactatgaacttcttaacatctatcagagtggcaaaaattagaaagtcagatattatcaagtgttggtgagaacagcagggtacaggaaccgtcatgtcagaggacaagctgatacatgctttctggaagcaatctggctatgcttagtgaaattaagtatgca

SEQ ID NO: 66645 - DNA, 1294 bp, Homo sapiens
taagtggaaatgaacccaaagatgtacagcaaactgctgagaaatgggaagggtatgaactaaggcagtaagcaggcatagaacaatctgacatataaaataaatagggcacaacagttgctttgatggagtggtgaaagagataggaggtgagaaagggcataagcaagatttgatcattgactatgcgagggtgacaaggaaaaagaggggctgacctacatcagcaattcctgcttctggcatagagatggtatcacttctgttgcgaagactacagggacagcaggcagcatgctgtatatatttctagcatgtgaaacggaagtagggcaaggaaaaaagtccttacgttcctactttttacatggttcacacacattgtagaataaaccctttgcctgggtcacgtaaaattctacctttttattattattattatgctttaagttctagggtacrtgagcacagcgtgcaggtttgttacatgggtatacatgtgccatgttggtttgctgcacccattaactcatcatttacatcaggtatttctcctaatgctatccctccccctgccccccaactcacaacaggcccccatgtgtgatgtttcctgccctgtgtcaaggttttctgtccttgtgatagtctgctcagaatgatggtttccagcttcatccatgtccctacaaaggacatgaactcatccttttttatggctgcataatattccatggtgtatatgtgccacattctcttaatccagtatatcattgatggacatttgggttggttccaagtttttggtattgtgaatagtgccacaataaacatatgtgtgcatgtgtctttatagtagcatgatttataatcctttgagtatatacccagtaatgggatcattgggtcaaatggtatttctagttctagatcctcgaggaattgccacactgtcttctacaatggttgaactagtttacactaccaacagtgtaaaagcgttcctatttctccacatcctctccagcacctgttgtttcctgactttttaatgatcgccattctaactaaaattccaccctttgtataaaacatttgcccggtccatttgactctgaatcaccttggtatgtataattgccaaatatactttttttccagatggcaattcacatctgccttttagcttagtgctgaatggaaggcaaataattgaggaggttcagtaaggatagttctccattaaaaacaaaagaaaaaaaaagagaaaaaaaagcgccaacctaactgaata

SEQ ID NO: 66646 - DNA, 1294 bp, Homo sapiens
taagtggaaatgaacccaaagatgtacagcaaactgctgagaaatgggaagggtatgaactaaggcagtaagcaggcatagaacaatctgacatataaaataaatagggcacaacagttgctttgatggagtggtgaaagagataggaggtgagaaagggcataagcaagatttgatcattgactatgcgagggtgacaaggaaaaagaggggctgacctacatcagcaattcctgcttctggcatagagatggtatcacttctgttgcgaagactacagggacagcaggcagcatgctgtatatatttctagcatgtgaaacggaagtagggcaaggaaaaaagtccttacgttcctactttttacatggttcacacacattgtagaataaaccctttgcctgggtcacgtaaaattctacctttttattattattattatgctttaagttctagggtacgtgagcacagcgtgcaggtttgttacatgggtatacatgtgccatgttggtttgctgcacccattaactcatcatttacatcaggtatttctcctaatgctatccctccccctgccccccaactcacaacaggcccccatgtgtgatgtttcctgccctgtgtcaaggttttctgtccttgtgatagtctgctcagaatgatggtttccagcttcatccatgtccctacaaaggacatgaactcatccttttttatggctgcataatattccatggtgtatatgtgccacattctcttaatccagtatatcattgatggacatttgggttggttccaagtttttgstattgtgaatagtgccacaataaacatatgtgtgcatgtgtctttatagtagcatgatttataatcctttgagtatatacccagtaatgggatcattgggtcaaatggtatttctagttctagatcctcgaggaattgccacactgtcttctacaatggttgaactagtttacactaccaacagtgtaaaagcgttcctatttctccacatcctctccagcacctgttgtttcctgactttttaatgatcgccattctaactaaaattccaccctttgtataaaacatttgcccggtccatttgactctgaatcaccttggtatgtataattgccaaatatactttttttccagatggcaattcacatctgccttttagcttagtgctgaatggaaggcaaataattgaggaggttcagtaaggatagttctccattaaaaacaaaagaaaaaaaaagagaaaaaaaagcgccaacctaactgaata

SEQ ID NO: 66647 - DNA, 1294 bp, Homo sapiens
taagtggaaatgaacccaaagatgtacagcaaactgctgagaaatgggaagggtatgaactaaggcagtaagcaggcatagaacaatctgacatataaaataaatagggcacaacagttgctttgatggagtggtgaaagagataggaggtgagaaagggcataagcaagatttgatcattgactatgcgagggtgacaaggaaaaagaggggctgacctacatcagcaattcctgcttctggcatagagatggtatcacttctgttgcgaagactacagggacagcaggcagcatgctgtatatatttctagcatgtgaaacggaagtagggcaaggaaaaaagtccttacgttcctactttttacatggttcacacacattgtagaataaaccctttgcctgggtcacgtaaaattctacctttttattattattattatgctttaagttctagggtacgtgagcacagcgtgcaggtttgttacatgggtatacatgtgccatgttggtttgctgcacccattaactcatcatttacatcaggtatttctcctaatgctatccctccccctgccccccaactcacaacaggcccccatgtgtgatgtttcctgccctgtgtcaaggttttctgtccttgtgatagtctgctcagaatgatggtttccagcttcatccatgtccctacaaaggacatgaactcatccttttttatggctgcataatattccatggtgtatatgtgccacattctcttaatccagtatatcattgatggacatttgggttggttccaagtttttggtattgtgaatagtgccacaataaacatatgtgtgcatgtgtctttatagtagcatgatttataatcctttgagtatatacccagtaatgggatcattgggycaaatggtatttctagttctagatcctcgaggaattgccacactgtcttctacaatggttgaactagtttacactaccaacagtgtaaaagcgttcctatttctccacatcctctccagcacctgttgtttcctgactttttaatgatcgccattctaactaaaattccaccctttgtataaaacatttgcccggtccatttgactctgaatcaccttggtatgtataattgccaaatatactttttttccagatggcaattcacatctgccttttagcttagtgctgaatggaaggcaaataattgaggaggttcagtaaggatagttctccattaaaaacaaaagaaaaaaaaagagaaaaaaaagcgccaacctaactgaata

SEQ ID NO: 66648 - DNA, 1294 bp, Homo sapiens
taagtggaaatgaacccaaagatgtacagcaaactgctgagaaatgggaagggtatgaactaaggcagtaagcaggcatagaacaatctgacatataaaataaatagggcacaacagttgctttgatggagtggtgaaagagataggaggtgagaaagggcataagcaagatttgatcattgactatgcgagggtgacaaggaaaaagaggggctgacctacatcagcaattcctgcttctggcatagagatggtatcacttctgttgcgaagactacagggacagcaggcagcatgctgtatatatttctagcatgtgaaacggaagtagggcaaggaaaaaagtccttacgttcctactttttacatggttcacacacattgtagaataaaccctttgcctgggtcacgtaaaattctacctttttattattattattatgctttaagttctagggtacgtgagcacagcgtgcaggtttgttacatgggtatacatgtgccatgttggtttgctgcacccattaactcatcatttacatcaggtatttctcctaatgctatccctccccctgccccccaactcacaacaggcccccatgtgtgatgtttcctgccctgtgtcaaggttttctgtccttgtgatagtctgctcagaatgatggtttccagcttcatccatgtccctacaaaggacatgaactcatccttttttatggctgcataatattccatggtgtatatgtgccacattctcttaatccagtatatcattgatggacatttgggttggttccaagtttttggtattgtgaatagtgccacaataaacatatgtgtgcatgtgtctttatagtagcatgatttataatcctttgagtatatacccagtaatgggatcattgggtcaaatggtatttctagttctagatcctcgaggaattgccacactgtcttctacaatggttgaactagtttacactaccaacagtgtaaaagcgttcctatttctccacatcctctccagcacctgttgtttcctgactttttaatgatcgccattctaactaaaattccaccctttgtataaaacatttgcccggtccatttgactctgaatcaccttggtatgtataattrccaaatatactttttttccagatggcaattcacatctgccttttagcttagtgctgaatggaaggcaaataattgaggaggttcagtaaggatagttctccattaaaaacaaaagaaaaaaaaagagaaaaaaaagcgccaacctaactgaata

SEQ ID NO: 66649 - DNA, 1294 bp, Homo sapiens
taagtggaaatgaacccaaagatgtacagcaaactgctgagaaatgggaagggtatgaactaaggcagtaagcaggcatagaacaatctgacatataaaataaatagggcacaacagttgctttgatggagtggtgaaagagataggaggtgagaaagggcataagcaagatttgatcattgactatgcgagggtgacaaggaaaaagaggggctgacctacatcagcaattcctgcttctggcatagagatggtatcacttctgttgcgaagactacagggacagcaggcagcatgctgtatatatttctagcatgtgaaacggaagtagggcaaggaaaaaagtccttacgttcctactttttacatggttcacacacattgtagaataaaccctttgcctgggtcacgtaaaattctacctttttattattattattatgctttaagttctagggtacgtgagcacagcgtgcaggtttgttacatgggtatacatgtgccatgttggtttgctgcacccattaactcatcatttacatcaggtatttctcctaatgctatccctccccctgccccccaactcacaacaggcccccatgtgtgatgtttcctgccctgtgtcaaggttttctgtccttgtgatagtctgctcagaatgatggtttccagcttcatccatgtccctacaaaggacatgaactcatccttttttatggctgcataatattccatggtgtatatgtgccacattctcttaatccagtatatcattgatggacatttgggttggttccaagtttttggtattgtgaatagtgccacaataaacatatgtgtgcatgtgtctttatagtagcatgatttataatcctttgagtatatacccagtaatgggatcattgggtcaaatggtatttctagttctagatcctcgaggaattgccacactgtcttctacaatggttgaactagtttacactaccaacagtgtaaaagcgttcctatttctccacatcctctccagcacctgttgtttcctgactttttaatgatcgccattctaactaaaattccaccctttgtataaaacatttgcccggtccatttgactctgaatcaccttggtatgtataattgccaaatatactttttttccagatggcaattcacatctgccttttagcttagtgctgaatkgaaggcaaataattgaggaggttcagtaaggatagttctccattaaaaacaaaagaaaaaaaaagagaaaaaaaagcgccaacctaactgaata

SEQ ID NO: 66650 - DNA, 1294 bp, Homo sapiens
taagtggaaatgaacccaaagatgtacagcaaactgctgagaaatgggaagggtatgaactaaggcagtaagcaggcatagaacaatctgacatataaaataaatagggcacaacagttgctttgatggagtggtgaaagagataggaggtgagaaagggcataagcaagatttgatcattgactatgcgagggtgacaaggaaaaagaggggctgacctacatcagcaattcctgcttctggcatagagatggtatcacttctgttgcgaagactacagggacagcaggcagcatgctgtatatatttctagcatgtgaaacggaagtagggcaaggaaaaaagtccttacgttcctactttttacatggttcacacacattgtagaataaaccctttgcctgggtcacgtaaaattctacctttttattattattattatgctttaagttctagggtacgtgagcacagcgtgcaggtttgttacatgggtatacatgtgccatgttggtttgctgcacccattaactcatcatttacatcaggtatttctcctaatgctatccctccccctgccccccaactcacaacaggcccccatgtgtgatgtttcctgccctgtgtcaaggttttctgtccttgtgatagtctgctcagaatgatggtttccagcttcatccatgtccctacaaaggacatgaactcatccttttttatggctgcataatattccatggtgtatatgtgccacattctcttaatccagtatatcattgatggacatttgggttggttccaagtttttggtattgtgaatagtgccacaataaacatatgtgtgcatgtgtctttatagtagcatgatttataatcctttgagtatatacccagtaatgggatcattgggtcaaatggtatttctagttctagatcctcgaggaattgccacactgtcttctacaatggttgaactagtttacactaccaacagtgtaaaagcgttcctatttctccacatcctctccagcacctgttgtttcctgactttttaatgatcgccattctaactaaaattccaccctttgtataaaacatttgcccggtccatttgactctgaatcaccttggtatgtataattgccaaatatactttttttccagatggcaattcacatctgccttttagcttagtgctgaatggaaggcaaataattgaggaggttcagtaaggatagttctccattaaaaamaaaagaaaaaaaaagagaaaaaaaagcgccaacctaactgaata

SEQ ID NO: 66651 - DNA, 614 bp, Homo sapiens
aaaggttgaggtttggctctcattagccagaaaatccactgacatcttccttttcacaagacttggaaactgaaaggaacttgacagctggaagacattcagtaattgttggttgtgccattgctgttgtgctggttatcactgccatggggaaaatgaatgtatcagaattattccatccttgtctctgtctttgattgggcctagcaatgccatctaccctgccactctctctatttggtgaagagaaaactaagacacaggaagggagaggaaaagaagattagctaagagtaatggcctggattgttctatatgcaaagtgagagtgcagaataagagcttcccaacttttctctactgttcgcttattcgatcaccctgtgtatgtagtttgtatgaggagcttagtcatcttacataatttaaaggggtccacatgccttaaattatatgaatagttaytcatttccctatgataaacactgttggttcccagtggtctttaaaatgcaaacatcctacgtgtaccataaatctctaacacttttcaaagttaagtccctttagaataaaagaatgaaagaaatatctgggaaacattataaagttgg

SEQ ID NO: 66652 - DNA, 861 bp, Homo sapiens
cccaggagtgtcctgatgaaggctatttttgaactagcggtgcatgaaaagaaaaatctgctttgaatgtggatgagtaaacaacacaacacacacaaatttaaatttctgaagaaacaatttccacatatttcaccttttcgctcctattctcatcccagtcacatggttaagaaaatctcaatctgaatatggataatctgaaaactctaaatatcactctctgaaaagatattaattggaaagtacttttctaaattataaaattagaaaaagttcatatgttgtattgcttttttgtgttttgtttttgtttgttttttcttacccactacaagctttctgtttggagtgactattacatagcagcaccaagtaaccactccccgactctacccytttttttgatgtaatttgaagaagccagcccattatataaaggaaagtgaattaacctttcttcctactcatctcttcaccagacaggcaacgggaggccctggccaatctctgtgcaatttgatctactctcacatttgaaagtgtaagaaagtacagtgtagaggaaagacacaggcttggtaaccaggtaaatctaagtttaaatccttgctctgattcttattaactacatgagcttaggaaaattaatttcctgaacctcagtttgaccatgtgcgaaaatgtaaccaaagtgtggtcatgaggattaaaaaaaatacgtgtattaaatacaagtagctcagatcttgactcattaaatgcccaacaaatggcacatatttccttttacgtatttttgtgttttaaaaaaaattgtaaatatttatctatccatctacttatctaaccatccatcca

SEQ ID NO: 66653 - DNA, 836 bp, Homo sapiens
tcttacccagggaccaatacatataaaaagagaaaacacctctgagcaaagaatgtttccaatcaccctccaaaattaaaaagagagaaaaagagagagagattaagtgcctgcacaaacacagccacggcccatggacggtgcttatgccgagctaagccccctgcaatttaacacagacatcagtttattgcctagctgtgtttgatttttatattcctgaaattttattgtgccaggagtagggacaacaaaagataaagtaaagcaaaaatgtaacaattgcctctgtcatttcatctgtgggctcctttcatgagtaactgcatgcccaattttgatctccaagtaatgtcacagtaataaaaccaaactgactcctcctcacacacacacacttcctccactaccttgataaratgcagaattagttcattactgatgctaatagatatcattacctaagtcgttttcaccacagggctgccaatcagcgggtccaaagaaagatgcagagaaagctctaagtgtgacagccactttcccctttttcagtccctttctttggaaaattggtcttctccaaaagaaagggaagaaaacatccactggctctctgaggaaaggtttcccaaggcctgtgatttgctgacatgcggggagttatgatgttatgagaacagccctgatgacagcaatactatcccacactgctcctaggatgtccagagcaatccaagcgatcatgataaacttcatatgtgagggcagagggctccgcctgacccacagagccaggcacatgaaagaaacaataaaaacttgatttaactgtg

SEQ ID NO: 66654 - DNA, 953 bp, Homo sapiens
tgcatctccgtgagtcaagggacagacaccaccaaacccctcttcatgcctctaccatgcacgtaaggaaggagacattccagacacccaatccactagttccccattagtaggcagaagcagagtggtagtttttgagccattttccgcatagtcgccctgcacgcacttgtgagctaagctaatatgattcaatgcagaacacaacacaggtcgaggagtgaatcattctgccagggacgtgcaagtgacacagctggagggcgtgtgaagcatcacctacagttcaggtctcctgcaggcgttggcagatgccaggaacgcacttcggagctgggcgacagagacttttgtgtccagcatgctgatctccccataaggcccttcggtcttggagctgggcagctccagctctctcctggaagctgggtccttatacttcaaggcctggagctgaggggggcctgtgaaatctgacagagagcgggtacggaccttgcgctttttcgaggcttccctgttgtgaccagttggtttggcgtcttgggacacaggctcactttgaatgtagagaaccatctcgctcctgcctgtcctctcagtgggctggtgcggagcttgagggggttgtgccacgttttccagttccttctgatgctctaaggtgactgtgctcacagcaggcttaccaaagtcctcatttctagagggatcttctgggcttctcactagcccatcaccctccaaagccagtagggttttcttgctttgctcgagagcttcagtgaagcacacatcttcttctttttcttctccttctccttccccttcttcttcttctgcttttgactcgcagayatggagaactgggctatcccttccgtcaccttctagaaccgtcaagctgggaggtttggggacattctgggtggctgatgctacccagctacact

SEQ ID NO: 66655 - DNA, 730 bp, Homo sapiens
tccctccttagcgtctcaacagtagctagccctgtaggcacatgccatcatgcctggctaattttttwattttttataaagacagggtttcactatgtggcccaggctggtctcaaactcctggcctcaagtgatcctcctgcctcagcctttcaaagtgctaggattacaagcgtgagccaccgtgtacctggcctactcctaaccattatgctctgatgttccactctttaaaaaaataatacaacagctttgagagaggtaaaaaggttttcacaagatttcacgacatcctaagtagtatctccaagataaatctatatgccttttaataaccatagagatttgcatctgacttctctgcctggggcaaaaaggatctttgtcactgcaaaagtcccaacatagttttatatcccacacctaaggatacctttttgcctggaaagacgtgatagggatctctccctagatcttgggataggagtccactgcctcgtacagacgacccgtgagcctggtacacttacgccaaggtctcactaagggtgggtattacccttgagctcagttttacttagtttactacacccaagagaaacagatgtgcacttagcatctcctgagtacaacacactgtgttatgtgcagagaaggaaaaaagaaactccggcaatagtgaagctagaaggacttctaaataaaagtaatttaaagttctaagtagaag

SEQ ID NO: 66656 - DNA, 1092 bp, Homo sapiens
tttcttccctgctatataaacccctaattttagtcagtcagagagatggatttgagactgatctcccatctcctcacctgcagcacctgaataaagccttcttccctggcagtactgattatctcagtgattggctttctgtgtggtgaacagcagcaggatcaagaccgaaccactggtgttttggtaacattacctctcagtgtcacctaaacacatacacactcattcattcttctgtttttaagtggaaaaaaaagagtgtgtgtgtgtgtgtgcgcacacgcacaatataaactctttgagagcaaagactaacttaataaacacaaatactaggtaaatgctaaccagcttacccccaatgcagagagcttacaaagcagtctttgagcatgatgataaagtaaaacatgtttctggaactgcacacagaggtttgcagagatttcctcttgtcaaaggtaagtacaaaaaaatccacaagggtttggctggctccaatggagcaagagaggtcactctgggccctgagttatcaccttaaggggccggagcagctggcagttggaacactgagctggacattggtttggagaaattagagctagctttttctgcttttgacaacagccttgaccacacaaagggctacatttaggttggcatttgcctaggatgtaacgcccatttggccgtttggagtcgattttccacccctcttttcctactggcacacagctgtgacccttgggtcttggaaacwcctgtggagatttagccttggtaacaacagagttcttcccaggtcatcagaacccatctgcctcctagactagagatcacttacttacggacatttctaaataaaggatgacaaagtaactggatcaactacatgtttaatcattgctatttaaatgtgatcatttctcaatttcaaatttaaaaagtgtaaacttaaggaaagagaaataatgccagggactaaatagtattaaatctccctccatgtgagtgccccagatgtcctattctataaaattctcccccttccctttttgccttcagctcagcagacaccctttgctg

SEQ ID NO: 66657 - DNA, 683 bp, Homo sapiens
tccagttccacctttacagaagttcgtttacagaagcccgagctacaccattgcacagaatatccatgtcacaaacctgtacatgtaccccctgaatctaaaattaraaaaaaaaaaaagtccaggtcaggctcagtggctcacacctgtaatcccagcactttgggaggctgaggcaggaggattgcttgagcccaggagttcgagaccctcggcaatatagcgagatcctatctctcctaaaaataaaaaattaaaaattacccggcatagttgcatgtgcctgtcatcccagccacttggggggcttaggtgggaggatctcttaagtccaaggggttgaggctgcagtgagccgtgactgtgctactgcattccagcctgggtgacagaataagatcctatctcagtaataataaaagtctgtttagtcaaggagatcagcaccagaaacatacagactggcacatgttctcataggcgttctgtccactctccccgtcccaccagtggaggtgcatatgacccagctagcttcttggaggaggcacctgaatggcatctttagtgatcagtcagatgcagccagttgagaaggaagagggaaggtgttccaggtagtatgcaacacgaggcctggagcctgctattttcagaaagttgataggaattacacatgctac

SEQ ID NO: 66658 - DNA, 646 bp, Homo sapiens
gggaattgaagctaattctgggaggaggcaggaagggccgaaaggagactgtaagctggaggttagggagagagttctgctcaaggaaattcggacaacacaatacgcatctacccagacatggttggtcacttaggaacagccttacctttaggaagtgcaactaaaagctgagcatcgattcctctttcgtggttagcgagctgttctttatcttcgagtgagaactccttctgaaagctaaaaattactccattartaaagttaagtccatttaaataaagatatataagtgaaaaaatgcagaacacaaaaattatgatattgttacacatcattcaatatgtacacatagattgcaggtaaaatgttttatattggggagtaaattggtaacttttttcatttatttatatttctgtaaatatttgattttttgtgcaactaattacagcaggattggcgggtggcgtggtgtgatgtgtgaaaacattgctgaactgggagtcgtgagctttaactcagactgaccacctcttcttgacctaagaatagctgtgcaagcttgcattaattactcaacctctctgtgctacaatttcttcttcagaaaatcagtaacttgtctaggtgatctacactctgt

SEQ ID NO: 66659 - DNA, 646 bp, Homo sapiens
gggaattgaagctaattctgggaggaggcaggaagggccgaaaggagactgtaagctggaggttagggagagagttctgctcaaggaaattcggacaacacaatacgcatctacccagacatggttggtcacttaggaacagccttacctttaggaagtgcaactaaaagctgagcatcgattcctctttcgtggttagcgagctgttctttatcttcgagtgagaactccttctgaaagctaaaaattactccattaataaagttaagtccatttaaataaagatatataagtgaaaaaatgcagaacayaaaaattatgatattgttacacatcattcaatatgtacacatagattgcaggtaaaatgttttatattggggagtaaattggtaacttttttcatttatttatatttctgtaaatatttgattttttgtgcaactaattacagcaggattggcgggtggcgtggtgtgatgtgtgaaaacattgctgaactgggagtcgtgagctttaactcagactgaccacctcttcttgacctaagaatagctgtgcaagcttgcattaattactcaacctctctgtgctacaatttcttcttcagaaaatcagtaacttgtctaggtgatctacactctgt

SEQ ID NO: 66660 - DNA, 646 bp, Homo sapiens
gggaattgaagctaattctgggaggaggcaggaagggccgaaaggagactgtaagctggaggttagggagagagttctgctcaaggaaattcggacaacacaatacgcatctacccagacatggttggtcacttaggaacagccttacctttaggaagtgcaactaaaagctgagcatcgattcctctttcgtggttagcgagctgttctttatcttcgagtgagaactccttctgaaagctaaaaattactccattaataaagttaagtccatttaaataaagatatataagtgaaaaaatgcagaacacaaaaattatgatattgttacacatcattcaatatgtacacatagatygcaggtaaaatgttttatattggggagtaaattggtaacttttttcatttatttatatttctgtaaatatttgattttttgtgcaactaattacagcaggattggcgggtggcgtggtgtgatgtgtgaaaacattgctgaactgggagtcgtgagctttaactcagactgaccacctcttcttgacctaagaatagctgtgcaagcttgcattaattactcaacctctctgtgctacaatttcttcttcagaaaatcagtaacttgtctaggtgatctacactctgt

SEQ ID NO: 66661 - DNA, 623 bp, Homo sapiens
tgagaacacgagtggtacaggcccactaccttcacctgtcccctggacaatgrcttagcctcccctctggcctccctgccccctctcaggccccaccacgtccattctcccctctgcaaccagagtgaccattcaatatggtcaatccagccatgtcatgtcatccctctgcttaaatcctcctaggagtttcccagcctaccagtgatgaagttcaaattctatgtcctgtttaccccaccattctgcaggagccatgaggcttccaaattcagggagtgtaaggacaccacatatgcacagaggctgtgccacaggctgcacctgccagtgaccgaacatggtggagatactgaggcaggctcacttctgagagacacggggcttcccgaaagccctgctgagtcttccttagactgcacacttctgtgtctgggacatttccacccaacctcccctccctcagagtcagccttacctaaaccctcagaaatttcatccaggcttctccgtaattaagggaggagctggactcgtagcctgcaatcctaggtaaggggcacagaggaagcaccagccactgaagttatactttcctgcacatggggtcccccactgtctca

SEQ ID NO: 66662 - DNA, 623 bp, Homo sapiens
tgagaacacgagtggtacaggcccactaccttcacctgtcccctggacaatgacttagcctcccctctggcctccctgccccctctcaggccccaccacrtccattctcccctctgcaaccagagtgaccattcaatatggtcaatccagccatgtcatgtcatccctctgcttaaatcctcctaggagtttcccagcctaccagtgatgaagttcaaattctatgtcctgtttaccccaccattctgcaggagccatgaggcttccaaattcagggagtgtaaggacaccacatatgcacagaggctgtgccacaggctgcacctgccagtgaccgaacatggtggagatactgaggcaggctcacttctgagagacacggggcttcccgaaagccctgctgagtcttccttagactgcacacttctgtgtctgggacatttccacccaacctcccctccctcagagtcagccttacctaaaccctcagaaatttcatccaggcttctccgtaattaagggaggagctggactcgtagcctgcaatcctaggtaaggggcacagaggaagcaccagccactgaagttatactttcctgcacatggggtcccccactgtctca

SEQ ID NO: 66663 - DNA, 623 bp, Homo sapiens
tgagaacacgagtggtacaggcccactaccttcacctgtcccctggacaatgacttagcctcccctctggcctccctgccccctctcaggccccaccacgtccattctcccctctgcaaccagagtgaccattcaatatggtcaatccagccatgtcatgtcatccctctgcttaaatcctcctaggagtttcccagcctaccagtgatgaagttcaaattctatgtcctgtttaccccaccattctgcaggagccatgaggcttccaaattcagggagtgtaaggacaccacatatgcacagaggctgtgccacaggctgcacctgccagtgaccgaacatggtggagatactgaggcaggcwcacttctgagagacacggggcttcccgaaagccctgctgagtcttccttagactgcacacttctgtgtctgggacatttccacccaacctcccctccctcagagtcagccttacctaaaccctcagaaatttcatccaggcttctccgtaattaagggaggagctggactcgtagcctgcaatcctaggtaaggggcacagaggaagcaccagccactgaagttatactttcctgcacatggggtcccccactgtctca

SEQ ID NO: 66664 - DNA, 1182 bp, Homo sapiens
tatctttcaaagtatatttgccatttttagttgtctctttgttcatattaattgtttttttggttatttgcttgcttgtttcagtttattgctttggtggatgaggtttgtaaaattctaacattttactatactttttagttcatgaatttttaaattgtctactctgaatattaaaaagatgaagtgcttcatattgtataattctattaggtatctcaatctgtaaatgaagataacatgatgttgtagcattataagctttctaatattcaaaagtacttattgctgagggaagtagatcagattatttgcattttatttttactctcttcattggattattaaacagattcttttaagcctaattgctatctgtggaattaagccttaattactggctattttttgcaagctgctaccatgaatgtatcttatttatctatctccccaatgtctaaaatgcaatatttaagacgtgatataggggcacaataatctggaatgtctaggcatttttaaaaaattgttaaaataaatgtgctttataattttaatgttactaaatatttataaagaaataatataagtaatgtcttagaacaggatcaatgaagagtccatacagggttaacatgctcaaagttccaatgtttgcttaatgtatttttctttaaatataattgatcccattggacaatatactgttctagaactaggacactctctttttcatctttatatctctagtacttagcacagttcccagaacacacaagacactctattaaactattttaaactgaaccattagattccaaaaatatatatgtcaaataaatgaaaaaataatgacttacaggtactaaatattagaaatctatcatcattcagcatcaactgtttttaaagtccaccttcaaatatgagttataggcaatgtagcagatatttttatttgaatttattttattttggaaaaaattgccaactccctgagacacctttaattatctggagtaacttaagggtacaaagtaaattaaaatatgtttactaatattaaaaaatcaagatgtattagraaacacaatgatgggtttttttcatgtattttttaactaggattcaacagcctgtaagaatgtattgcttattttatggtatgtatttgttcagtat

SEQ ID NO: 66665 - DNA, 587 bp, Homo sapiens
ccctcattggttgccttcagttagtgccctcagttggcaccctcagttgtttctcttcagtctgtggtccgcagttggtggtcttcagttgttgggcagtggtgaaaggaggatgaatccatttgtgctctctcctcccccagacacagctctcaggcttgttgcatccggacccttctaaaataaaccagacaggttggcaagttttttttttagcagacaagtcagctcagggtacaggggtgatgcaaggtgcgggctgctagtgcagtgccgccccatggcccagggctgcccgtgccagccatacgtttgccgggaagaggtgataggtgttgagctctgtagacttgggggcaagcgaaggcccaagcagcccgagaagagcagaggtgccccatggggaccacactgaactgtcacatgtgcaccaaagccagccccagtcagggccggcacaagsgttctgcagagccagcctgaggttctgatgtctacgagtatgcagacagcgaaggtgcaggccgcgatatataggagcagaggcaccctgaacacgctgtcccccaatgccagctacaagtgga

SEQ ID NO: 66666 - DNA, 706 bp, Homo sapiens
ggtcatttaaggcttcacacatgaggtgacaaaaaattggcaaatgtctgaggttaaaatatttaaagttgtaccaggattcagcaaacatgtaataaataaaatatataaactgcacatgtatcatattttctattcccattttaaccaactattctagttacctgcctaaccactagtatggactgcaccgaataagaggaaatctggaagcaaatttcagctgtagatatgatttggaaattactaaaacccagttaaaatagtaagtgtagattagcatttgtctaatatctatctatgtctcatatgtatatacacacaccayacactgtatatgagagtatgtcatattagccagtggaagtatgtcaaggatgaagtgcttaatgatatgcattaaatgctagagagatccgtgaactataactgaaacatgaccactagatggagcaatttcagtgacatggtgtgaatccaggcagaactgacccagaaagcaaatggtagttagaaatatgcctcgtgaaagtagacaactctccaccagccaggatgaccagaagttcagtaaatgttgccgaggtaagagacagagcagctgtgacaagtgcgatgacttctttgctcttatacatttccttcatgtttttgcatattcttcctggtccaaatctgtatttactatgctgaaaactataatata

SEQ ID NO: 66667 - DNA, 706 bp, Homo sapiens
ggtcatttaaggcttcacacatgaggtgacaaaaaattggcaaatgtctgaggttaaaatatttaaagttgtaccaggattcagcaaacatgtaataaataaaatatataaactgcacatgtatcatattttctattcccattttaaccaactattctagttacctgcctaaccactagtatggactgcaccgaataagaggaaatctggaagcaaatttcagctgtagatatgatttggaaattactaaaacccagttaaaatagtaagtgtagattagcatttgtctaatatctatctatgtctcatatgtatatacacacaccatacactgtatatgagagtatgtcatattagccagtggaagtatgtcaaggatgaagtgcttaatsatatgcattaaatgctagagagatccgtgaactataactgaaacatgaccactagatggagcaatttcagtgacatggtgtgaatccaggcagaactgacccagaaagcaaatggtagttagaaatatgcctcgtgaaagtagacaactctccaccagccaggatgaccagaagttcagtaaatgttgccgaggtaagagacagagcagctgtgacaagtgcgatgacttctttgctcttatacatttccttcatgtttttgcatattcttcctggtccaaatctgtatttactatgctgaaaactataatata

SEQ ID NO: 66668 - DNA, 706 bp, Homo sapiens
ggtcatttaaggcttcacacatgaggtgacaaaaaattggcaaatgtctgaggttaaaatatttaaagttgtaccaggattcagcaaacatgtaataaataaaatatataaactgcacatgtatcatattttctattcccattttaaccaactattctagttacctgcctaaccactagtatggactgcaccgaataagaggaaatctggaagcaaatttcagctgtagatatgatttggaaattactaaaacccagttaaaatagtaagtgtagattagcatttgtctaatatctatctatgtctcatatgtatatacacacaccatacactgtatatgagagtatgtcatattagccagtggaagtatgtcaaggatgaagtgcttaatgatatgcattaaatgctagagagatccgtgaactataactgaaacatgaccactagatggagcaatttcagtgacatggtgtgaatccaggcagaactgacccagaaagcaaatggtagttagaaatatgcctcgtgaaagtagacaactctccaccrgccaggatgaccagaagttcagtaaatgttgccgaggtaagagacagagcagctgtgacaagtgcgatgacttctttgctcttatacatttccttcatgtttttgcatattcttcctggtccaaatctgtatttactatgctgaaaactataatata

SEQ ID NO: 66669 - DNA, 622 bp, Homo sapiens
aggcactaagctctgtattctaataggaatgtagatatagtcccttaatagttttgggacaaaacacacacacacacacacacacacacacacacacacacacacacataaggttagtaaatgaaaaggccaagtggcaaatgctaccacaggcagtcaggataaaggagcacaggtatcgaataacatcattttaacaatttatcaggcatttactacgtgccaggtcctgtgcttggtattttatctaccttacctcatttaatcctctgaacattccaagatgaggcattatttttaatccccattttatagatgaggaaataggcacatcaaagcagtgtaatgccatagttcctcagcaggttcagggyagagccatatccagattaggaacggtgaagctctaggccaagggactagggttggcagtaaactctcatctgccccatactgattcaaaattttgtaataagttagcagaagatatactaaggtttaatgttttcaagctattaaaaaacaatttagacctggcgtggtggctcacgtctgtaatcccaacactttgggaggccaaggttgggggatcacttgaggccagagttcaagaccagtctgg

SEQ ID NO: 66670 - DNA, 853 bp, Homo sapiens
attgtaatggggtgatattttgaaaactactagtttattttctcttttgtctttctgagtatatgaccttaccctagaccacttgaaacatctttgcagggaggaagaagagattaagactttttcctgaaagaatgcaaaaagagaagataaggtaataatccactttagacaagtaaaatagaattttctgcagcctcaagagaatatattccaaattcttttcattctcccactttagcacattaaccatcttacctggaagacacagctccytgaatttccccaatcctttgcctctagtccccacaatttatcattaaggcttgagcttgagttagacttggaggtttgcatcagggcaaatagaatatgaaacagggaagcctgcaaatttctggaactgagtcagtaggagcagaagagcaaaaaagaaagaggaaagttttggctcagagagggagaaagatgggggcaataaaaagctagtgacaagagtaataacaaggacaaaaaagctttgcttcctcctccaatcaggattttgaaatagatcacttcttgggcagcactccatcctgagataactaagagtagggtcacatctacttgctggagcaagtagagggaggccatgatatttagttttctgaaccaattttggtttttatatgtttagatgaggcccagaaataggtgagaggtggctgtggagctagctagcaacagctgagtgagtagcatcatagcaaatgtcgcagagagacaacccaagataggatcagaagagaatctttgctagatccctgaaaggtaacatcagtaggatctgaggtgaggacaagactagcca

SEQ ID NO: 66671 - DNA, 1245 bp, Homo sapiens
  misc_feature (1)...(1245): n = A,T,C or G
tgaggaataggggtgctgggcaggaggtttgctgctttatacagggcatgcatatatgcagcacaagacccacacatttactatttattacaattgaaaatctctccatcagcctctttcccacgtaaatcttyactaaagtgaaaaataatttgtcatttatgtcattcttttttctgtatgctctaaatgcttttaatgaatatatagcaatattgcatgctcttctgttgaatgtttctcagctctcatcaacacagcttgttggtaagacaaagctgagtttactgcttaccacgctctgggagaatgctcccttggcagagtttctacagggtttcagggagaaaggcaaggtcagattttattgagaatcggaagtttggtttaaggtggggctttcaaagcaagagtttgactaagattgggtcaggatcatgtttaccaatttagagttagtggaagtagcatggcaaagaatttgaggcaaggggttcaagagtctgacagaattgtaaaccaacagttgatgcttcccagtgaaaagctgacagatcttttgggaacttccagtaatgaacaatcaagtcatttccgagggcaagagtaccctggaagagtcaagttatgccaatcaagttatactaataaagctacaaagacatcatagtaaagtcatgttaatgtaaactctttgaatatataaatagatggcatgcatagtaaaagtggaataaagcttcatgcaattcctataaaccataacatagatacgtttttaaattcttgataagttggttttgagaactgtatgaaatgtcatgatcagagatgactccagtgtcaaatttgttttctctattttctgttctgaaacttccaaggtgttttgacatccattgtttttgtcatctggatccacagtctaaaataggacaaaaattttgtttctgacccattttaaatctgtaccgatagattatatgaacacatattattctatttgcttaaactggctgtgatacaaatagggatgattctaggccaaaatatttgttctttgcaactttgcaatttggcatttgatcaccaggtcttcactccacttttttcacttttcacacctgggccccaattttnnnnnnnnnnnnnnnnnnnnnnnnnnnnnnnnnnnnnnnnnnnnnnnnnnnnnnnnnnnnnnnnnnnnnnnnnnnnnnnnnnnnnnnnnnnnnnnnnnnncaaata

SEQ ID NO: 66672 - DNA, 1245 bp, Homo sapiens
  misc_feature (1)...(1245): n = A,T,C or G
tgaggaataggggtgctgggcaggaggtttgctgctttatacagggcatgcatatatgcagcacaagacccacacatttactatttattacaattgaaaatctctccatcagcctctttcccacgtaaatcttcactaaagtgaaaaataatttgtcatttatgtcattcttttttctgtatgctctaaatgcttttaatgaatatatagcaatattgcatgctcttctgttgaatgtttctcagctctcatcaacacagcttgttggtaagacaaagctgagtttactgcttaccacgctctgggagaatgctcccttggcagagtttctacagggtttcagggagaaaggcaaggtcagattttattgagaatcggaagtttggtttaaggtggggctttcaaagcaagagtttgactaagattgggtcaggatcatgtttaccaatttagagttagtggaagtagcatggcaaagaatttgaggcaaggggttcaagagtctgacagaattgtaaaccaacagttgatgcttcccagtgaaaagctgacagatcttttgggaacttccagtaaygaacaatcaagtcatttccgagggcaagagtaccctggaagagtcaagttatgccaatcaagttatactaataaagctacaaagacatcatagtaaagtcatgttaatgtaaactctttgaatatataaatagatggcatgcatagtaaaagtggaataaagcttcatgcaattcctataaaccataacatagatacgtttttaaattcttgataagttggttttgagaactgtatgaaatgtcatgatcagagatgactccagtgtcaaatttgttttctctattttctgttctgaaacttccaaggtgttttgacatccattgtttttgtcatctggatccacagtctaaaataggacaaaaattttgtttctgacccattttaaatctgtaccgatagattatatgaacacatattattctatttgcttaaactggctgtgatacaaatagggatgattctaggccaaaatatttgttctttgcaactttgcaatttggcatttgatcaccaggtcttcactccacttttttcacttttcacacctgggccccaattttnnnnnnnnnnnnnnnnnnnnnnnnnnnnnnnnnnnnnnnnnnnnnnnnnnnnnnnnnnnnnnnnnnnnnnnnnnnnnnnnnnnnnnnnnnnnnnnnnnnncaaata

SEQ ID NO: 66673 - DNA, 569 bp, Homo sapiens
atgattaggttataccagacacaggttttaaacatattatcttatttaagcaccacaacaaacttaaggtaagtatagtcacaattctatagaaaagactgagatttatagaggctaagaatttgcaaatggtcttggtggtaatagaggataatgtagattctctgattcaacaactgctacagagttatggaagcgtttagtttatttagttcattctatttttgagatagggtctcactctgtcacccagactggagtgcaatggcctaatcatggctcacggtagcttcgacctcccaaggctcaggtgatcctcctgtctcagccccttgagtagctgggactacagggacatgccaccacgcctggctaatttttctatttttagtagagatgaggttccaccaggttgctcaggctggtctcargcttctgggcttaaatgatccagaacccctcagcctcccaaagtgctgggattgcaggagtgaaccaccatgcctggtcagttatgtaagcatttagaactggaaggacctaatgggtcatttagtttaatcctatca

SEQ ID NO: 66674 - DNA, 839 bp, Homo sapiens
ttctcagaacatatcgttgtcgttaaatgatgcgtgactgtattgtattcattttatatgtaaataaatttaaaagttgaattttaaaaattgttttcacacttattatttattcgcatatcataaaaacctgcagctttctggaatttaaaacaaaagcttagtttgctgttttcccttgagatggttaggttgtctaaagtttccaagtataaaagccaatgtaaaactttgattattctttgacattccttcaggatctaatttatgtgtttccttttgtgattccctgctcccaaagcagactgcgttgcctactcatctgtgctccagtggcgaaattcttaattctgccttagaaaatgtattgcrtataaacacttcccagatcttctcagacatatgttgaagttattttattggatattaaaggaataaagaccttaaaccattaaggttttgaagacacttaggttacatttctctatataaactcattcatatgttacgaattcagaatggcatctgagatcctagatcccataatttgggtcttcttactgaaggataaatggccaaagaggaaaaacaaaatattctgttaatctaggcaagcatgtgatagctctgaatacaggaatgttccagtaaactctaatggaactaaggcaggacacctgtaaaaattactttgtgagtgtagtcgatgctttctctcgctgttcacaaccacagttttagccaagagaacaaggaaatgccaatcccaagtacacctcagagagtagcagtaaaggcatgaaagaaagtcaggtttgggcagaagaagctggctcgca

SEQ ID NO: 66675 - DNA, 1055 bp, Homo sapiens
gggttgggccagacgtgcactacacatcccaactgtctggtaagtttccaggggtccatggatcagattggaccctttcactccagccagcagaaacccctgacctgcatttgttgttgctactctggttggaaggctgggacctaagagcttgattctgagtctctctaccctgatgagtgaaaaggaggtgcagtcaacccatgctctcgctcctcatgctgcagggctggtgtctcgatatccagaaccagtgaagctgaatgggactgtgctagtttgacggtgaccaggtggaatctgatctcccctagcactgattgcccacccctctgcttctactcagagcttccacagtggcacatcccattttagcaccctcatcctcaactggccccgtaactaactgctacttatctcttaggtgggcagcatcacttacactaatcaaaaagctttctttcagtcaccagccaggctgatttcagataccaggtgtcttcatacagcagatatttactgagcacccattatgttctgacattgagtttgtcattgtactaagaatgtggtatacaaaggtagacacgatccctgccctcatgcagatttagtgttaaggggatgcagacaaagaagcagaaattacaatatggttgaagcgggtaggaggagtgccccactatatatatcagctagatgtgggcaaggttagtgactgctcacccctggagaaataccatctatgtcaatctctagccactaaggaatagctaggtagargggtgaggaatcgggagtgagtaggcaagagcagtcctggcagatgggtcagcatatgaaacagtcatacctgcattgtttggaagaactgtctagtgctagaggaagactcaaactaaattggcctacttaaaatggacttctgttaactttaatatagttgctaatacttttgcatattaacaatagctaacatgttttgagcactcaataactaatagtgccaaatactctgtgtacttaatgtgcatgatcttatgagaatccctgaa

SEQ ID NO: 66676 - DNA, 3266 bp, Homo sapiens
ttaagtaaaattttcataattttggggtaattactccattccttggggcagtgatagaatgtataagtaagtatacattcttatttttctgaaatccttgtatcaagaataacctgtaattttacataattttatttttcacttggagatgccatatttaatctatggacttaaagaactctgcagatttgaatactttactaagttcagattcacttctctgcttaaaatccttcagtgattttccttttctttaggacaagtccacattccttaataaggccctcaggatgtggggtgctgtcccctgcccactcttgcagctgcctctctccactctgtctgcctgtgccccagccactctgcccacctcttcttccttgaacaagctgcttcccactcaaagtcttcactcagctatttcttctccttggaataatgcccttcccccttgttgcctggcaaatttcaggtctctgcttaaatgttacttcctcggggaagaaacactctccttgaagttatttgtgttcttttccttcacggtacttaaataattgtttgtgtaagtatgggtttaatccaatctccctacaagctaccaatgcctgggcacaggatatttgtaactctatctcatgattgtattacttctacctagcatggtgcctggcacattggagacactcaaaaattacttattagatgaatggatgaatgaatgaaaaattatgtggtctgtaaaactcatgacctcaaaatggcattgaagtcaaggatataatccttcatataaaaatgtgaattttcctatcactggatctctagataattattttctggagagaacatgttaacctctaattacttgagtacgttgagagagtcattggccatcagccatcaacctggagagagaccgtgggcagtaaggtgatggagcctgctgtgaccatgttctgttgaaagcttttatcaacaactgagatgatgatgttggtgcagtgttaatcagactgataggatgctggagggatcattcaagtataatgcgccctcattaggatccaaaaggatctcactcaacaggtttcaatgggggarcaaataacaatacgcaaggttaataaaggaaaattccaagtgggcactggacttaggtcccccaaatctaattaaacaaatgcagaatgagtggtcttaagagcaaaacatgtgaaaagcatggagatttttattgactggatgagtcaatagcatggcatgcctgtcagagacattgattagacgttagcttcctataatggaagcaccgtgtcaacagccaatgaagtcatggagcttccctagtcagaccacccctgctgtgccatgcccagttccgggaggcagatgtggagggagacactgacagttgcactgctgtgagcatttccaaagatgtcaaatgagaagcagttgaagggctgaggattcctagttaatgaggagtcaaatttgggagaaagtaatgagactgtcaagcaaaagccaggaccatttgatttgttctccacaggtctaaagggtagacccagggtacacaggaaaattccagggaagtggatcttagttgaatttgaggagctgtccagcaggggagtgggctgtgcagagttcccctttactaaagcaaattacatttaggcaggaaacgaagaaaagagctttcagaagctctctgctagtttatagaggttctatgagagtagtaggagcctttcttcctctgtgtaggtccagaatctcatgtagtttggacctcagcatgtttggagggccaaaccaaaggtaaacagccagttaaaacaattatttttaaagatctcatttactgtgtctagaattccatgatctatcctaacactcaaagggataatcttattcctcttcacttttgccacagacgcaacagaatggaggctggaagacaacttgttgtggagggaattcatgcactgggtaaaaattgataggcttctgccaaggtctgacatcaccgagtttctgtgattctagtagaagccagaagtatgttctctgtaattagagggaattagacaaactatcaggaaatgccatacagagccttcagaagaaaagaaatacaaaggaaaatcagactgacgattatgttctgtaaagctgcttctcacaattgtggcagccactacatatacacagtctcccaacccaggagcactatatgcccatagccacagaggagagattatgaatgagccagagcaaattcttcctcctagagggaaaaacaggaagtgtatctcttcctgctcatattctcattctacagttctactcgcatctacatgattaagcatattgtttatgaagaagccaatgaaaagaacctgaaaaaagatacatggtgaattataaagtattattccgaagaataatggttctctgtctctttcctggtttgcactaaaaccttacattcaggaagacaagcacacttagataagattatccatcctcttcgttgccagaggttaaagtgcaaatgtcctcatgagaagtttagtccaaagacacatttgaggggatccatcactaaaagaagcagtgttcatgatagcaaggagttaactctctgttatgaagtaataagctctttgattaaaagactgcattttccaaaaaagattacactttgcactagaatttggtattgctttataagcatatggccttagcaattgaaaaactgacttgaattttaaaacataccgattttaaatattgaagttgggcttgacatttttaagctacatgactgtgggcaaatgatgtaacctctctatgtctaaattccttcatctgtaagatgaggataataatgccaatgcctaccttgcatggttcttatgagaatgaagtaagaaaatgtatgaaagcccccagcatggcaaaaagcaagcactaaattaatgggagccactgagagagttgaggcctagtcattttcaacctgtaggatatagagctgtgtctgcttggggcggtagttggggtacagcttaaatagcatttgcttttgggagctagaatgagatctccaatactttcagatgatcctgggggaaaggatgtattagttccattcacttctttgatcaatatcttagtaatataaaggaagtagcattcgtttttgaaaattacttgaattaggagttttctagttagatttcatttcaata

SEQ ID NO: 66677 - DNA, 1213 bp, Homo sapiens
tgtcaataacagctatcatggaaaaataacaagcaaaaactgtttttctacctgtcttcattttttgccactcctcatgtttccttctatttctatttgtgaaagtttgaatccctccttcttgatgcccttaaatccataattacttcttatgacaactcttttgacgcccacattataaattattcattattttgaatgacgccttaatttcaaatgcactcttgtactcctactttgtcttctgtatttttctcctatattatttttatacctttaaataatcttgctttgagacttctggcatctttctgtctttttctctgagagatgcccctagaatgctgttgctacagggaatttaaaaaatcaagtgattctggtatttccctcattcactcttacttcattcctgctttcttcctttgctcttctggttccttacatctagagtgctctcttctgccccatctagcctgtcctttcgccacttccttcaaaacctgatacaatattaatttgcttcagacaactctcctggactaacctactccaatttactgtttctctcgacctctgggaatgtcagtaaaaactatacatttcattctcatttacttggaaagtgtttgtttttgtaatttcattcagttatttagttatatattttgtaatattttattatttatataattactatatacccttyctaattcctgatttttccttattagttttaagcataaccattattttataatataaacatgtaattggttgcttaatatctgtctctcctgctagaatacaagctcttttggctaattgcttattgttttatccccagagcctaaaaaatatacacagtaattactcaattaatattatagtatctttgaactatcgttcagatattagtgaaatgaaagtgctcacaaatgcttgctgattttttaaagcccgattttggctggaatccctcatactttttgttaacaggtgggatgtattttgctgtaagatgcagaaaaccttaccaacacacacttaaattgaaagacaccagctgtttacttagccataagtccaaatgtgggcagttctaatgttggtttgactgtccaatgttgtcatgcaggacctaggttcttcccatcctcctccctggccatccgaagttgctggctttctacagtattgcaccataatgtca

SEQ ID NO: 66678 - DNA, 679 bp, Homo sapiens
aaacgtgttattcgcaggaaatgtgcgacagtaacgaacaggtgagactagtttgagaaggacatagtttaaagaaagtaaactgaataaccagttactgcaaaaaataatgcaggaaagcttggggatgtatcgtctcctaaatttgacgttatgggtgggagaggatgtgtaactaagatgcaatgctagcgacagaacgctaagttttaaaactcaatagtgaaagaaaaaaaataatgttttgggaggaacgcctggaagacccatgcaactgctgcacgatgtttccttaaggaccggaacatttctcaccctgaagacaaaagtccctgtgttctcgattcagcccacatccctcagcaccatttccatgcccatcatttaggcagaatgccacggaggcgacgtgaaaagtggaattcatcattctggcttgcaacgcatcttgttcttttgccagaacagggcacagcaactggctcctcaatctctgcccctcccaaaccccagcagccggtccctgtctccatcccgccggcctcggtggcaaggggctcgcgagctctggttggcttggccgaagcttccgtcactcgccagctcacctacgattggttggcagagcgtgcgcgaagrgccccgcctggcaaggcactgggaggtgggcttgcggatc

SEQ ID NO: 66679 - DNA, 679 bp, Homo sapiens
aaacgtgttattcgcaggaaatgtgcgacagtaacgaacaggtgagactagtttgagaaggacatagtttaaagaaagtaaactgaataaccagttactgcaaaaaataatgcaggaaagcttggggatgtatcgtctcctaaatttgacgttatgggtgggagaggatgtgtaactaagatgcaatgctagcgacagaacgctaagttttaaaactcaatagtgaaagaaaaaaaataatgttttgggaggaacgcctggaagacccatgcaactgctgcacgatgtttccttaaggaccggaacatttctcaccctgaagacaaaagtccctgtgttctcgattcagcccacatccctcagcaccatttccatgcccatcatttaggcagaatgccacggaggcgacgtgaaaagtggaattcatcattctggcttgcaacgcatcttgttcttttgccagaacagggcacagcaactggctcctcaatctctgcccctcccaaaccccagcagccggtccctgtctccatcccgccggcctcggtggcaaggggctcgcgagctctggttggcttggccgaagcttccgtcactcgccagctcacctacgattggttggcagagcgtgcgcgaagagccccgcctggcaaggcactgggargtgggcttgcggatc

SEQ ID NO: 66680 - DNA, 1345 bp, Homo sapiens
ggggcagtctgtgagactgatgccttaacctttaggatcatttctatctctgtgcagtgaatgtcagaattaaattgaattatgggatagccgtttggtgttggagaattggttgttgttgaaaagacataaaaatcattatcaaaaataatgaagagtcttctagaggaaaaaatgttaaattgggaagtgtgaaaaattgtgcgaaattaatattggcatgcaaaaatttaaaaattagtagtcaaagtagttaccatcaaaaaagctacatcagaatgtcacaaccaaaatattatctacccatattttcagtcattacacagttttcatcaagtgtcattggtgtgcacagagcgtagcattattctaatttttgagagacacactctcagaaactgatttctttggtgaaagaaacaccctcccacgtaaaagatgattgatatctactttaaaaaatgtcaggactccttagcatataagagctgaagagagtaaaatataaagaagaaactgaatcattagaactagtataatttaatttttaatttaaatcctataatgttctgcaaatgtctggaataaaaagaaaggacatatgcatatgcatgtatccttgtatgcacatacgtatacaaatatacacagcaaggcatcactctggaaggactcataagagactggattagggagggagtgaacggtggaagtagaattcggacgagtaaaagagacatgtttcccccttttgtatctccttatgtgctatttgaatatttttcactttatcatacgcaggtgttacttaagattatataaaataaagataaagccctatcattactggtatttcgcaaatgaggaaacaagttccaagtagtttagtacttatttatgaaagcaagtgaaataaatcttctttcagagctccttctagacttagctttcaggcatctaaatcataaatcactattattaaagatctgtatcagcaggggaaaaacaaatttttagataatgaacagtaacaccgaaagcagttatccatgagattctgatgtcttcacaggacattaggagagcttagcacwcataaggacattctcatattcataggtacagggggcagagaaattctagggagaaaagggcgggtctctgacaaaactcagctctcaatctgaaaagcctgaaacccatggcccaaagtgacaacttctctccccgttttcccactcgaatgttgtcttttcctaaactacccatggcccaccccaccccccatcctgtgcccataaagaccccagaaccagctggcagaggggagaagcagctgtacatc

SEQ ID NO: 66681 - DNA, 537 bp, Homo sapiens
gaaaaacacagaatcttgggaaattttagcctattacagacattaaggaggaacagtctatctgcttcttatttctcttaaaacacacacaaactgcagtgtgggcggccaatgttaccctggtgatttccttccctctgttctcagctaaaattgtgcaargctaatatgagcacctgagttctacaagagaggacacaatttagaaagggaagctattagagagcaggggaaggaatggggacttccataggctgaatgctaatcagattaaaatatgtgcaaggaaattatacttatgcattttaatctgaggcaactgagctggtgcacattttcttagctgaaaggaatggcggaaatgagctcatttgagtagtgtggggacagtggcctcactcttgtcttcccgtgcagtccccttacgttgcacagtatcctgcagaatgatcatttttctccatcgtggaaataaggttgcttaaaagggccagaaggtactgctgattccaagtcaagctgactcagactgaagga

SEQ ID NO: 66682 - DNA, 537 bp, Homo sapiens
gaaaaacacagaatcttgggaaattttagcctattacagacattaaggaggaacagtctatctgcttcttatttctcttaaaacacacacaaactgcagtgtgggcggccaatgttaccctggtgatttccttccctctgttctcagctaaaattgtgcaaagctaatatgagcacctgagttctacaagagaggacacaatttagaaagggaagctattagagagcaggggaaggaatggggacttccataggctgaatgctaatcagattaaaatatgtgcaaggaaattatacttatgcattttaatctgaggcaactgagctggtgcacattttcttagctgaaaggaatggcggaaatgagctcatttgagtagtgtggggacagtggcctcactcttgycttcccgtgcagtccccttacgttgcacagtatcctgcagaatgatcatttttctccatcgtggaaataaggttgcttaaaagggccagaaggtactgctgattccaagtcaagctgactcagactgaagga

SEQ ID NO: 66683 - DNA, 1015 bp, Homo sapiens
tggacaattacaggactcagtacatttacttcccttctcttggagtcatggtcctacctcttgttcaatgtttgaaagttgttatgctctatattttgtttggttttctagttggatatggtggaaggcaaatctcagagcacttaatctttcatggataaaatcagaactcccaaactctaactttttatgtactttttatcaaaacttttttcttggctgggcacggtggctcacgcctgtaatcccagcaccttgggaggccaaggcgggcggatcatgagatcaggagatcgagaccatcctggctaacatggtgaaaccccatctctactaaaaatacaaaaaattagccgggtgtggtggtgggcgcctgtagttctagctactcaggaggctgaggcaggagaatggcgtgaacccaggaggcggagctttcagtgagtggagattgcaccactgcactccagcctgggtgacagagcgagactctgtctcaaaaaaaaacaaacaaacaaaaaaaaaaaaaaaaaaaaaaaaaccttttttcttcagaaacaatctataatttatacttaggaaaaaataagatcgtgcccaaatattaactagtttatgcttatcccacccgattccttattaatatgccacatctccccactttcctacttgaactgawctcaggagcctcaagttatgaaacttggttcatctgtcaaatggggataataaaagtattcacagtttgtggtgaagatcaaatgagataagttatataaagcctggaatataataattgttctgcaaagggcaactattagtactactgaatgaatcacagaaagtggaaatactgatttagttgagtgagatggcaagattagtgggtccatttccctacaaataaacacagacaataacacacaaacacattttcagcatagtttcatttggtgacaacttttagtccaacaggccttgttaacttctttacaaaagttcctcaagagttcaa

SEQ ID NO: 66684 - DNA, 833 bp, Homo sapiens
tgtgtgtgtgtgtgtgtgtgtgtgtgtgtgcataaaatatgttatgagatttaatctccaaaatgtcagagagtactcaaacaaaaagagccaggtagagatttcttagtctgttttgtgttgctataacagaatactacaggctgggtaatttagaaacaaaaggacattatttctcatggttctggaggctggtaagtccaatatcaaggtgccagtgtctggcaagggcctttgtgttgtgtyactccatggcagaaggcaggagggcaagagaacatgagagagcaagacaggactcacttttatttatttattttttttaaaaacaaaccactcctgtgataacaatgttaatccatttacaagggcagagccctcatgcaccaataacctcttaaaggtcccacctcttaacactgttgcactgggaattcagtttccagcacatgaactttgagggacacatgcaaaccatagcaagagataattttactattcatgattaaacaattataaagcacctgccatttttaaagttacttctatgtgccagaactatgcagaccaatttatttatgctttctcacttatatcaatttaatttaacctaattcttataacaaccttacagcatattaaggtggtacaatgtagtggttaagagagaaagtttgggatcaaagagaactggattctcattttggctctgtcactttctggctgtgtgatcttggagaagctgcttgatgtcttaaagcctttttgtttgttaaatattaatacaggcatcacaatatctcatgttatgaaaaggacaaatgaagtaatgc

SEQ ID NO: 66685 - DNA, 654 bp, Homo sapiens
gggatccagggctcaagtgaggtgcaagcttggggactatgcactacttctgaatggaatccacacccatctggctcacagaagaaccactgttgtgaatcacattcttttcattatagcttatgattgataattgcttttaaaargtctaggctttggaatacccattttctatctcttctatttttcatgagctctctagacatactgtcatttcctctgaaaacaataacggtattgcctcctttataaatacacattttactagttcatgtttcatgatctgtcacattatgtagattgtgagcagtaactagggtaatggacatagcatagttgagcctcagaagaagggctaatttgtgtacagtgaggtcagcagcagagcaaacagccctgaagttactgcagcgatttcatcatttgaaggacgacaatgatggtcaagaccagcttgaaggcggagggcagaggacagaaggtggctcttttcatcaccccacactttaacatgtagtccatcataaataaagtagattatcacatttttcacatttcacaaacaaaattgccttttattttaggtggtttatttcctctttggtgaggctttcatatctttcctgtggctttcatatctttcctcctgcaatc

SEQ ID NO: 66686 - DNA, 654 bp, Homo sapiens
gggatccagggctcaagtgaggtgcaagcttggggactatgcactacttctgaatggaatccacacccatctggctcacagaagaaccactgttgtgaatcacattcttttcattatagcttatgattgataattgcttttaaaaagtctaggctttggaatacccattttctatctcttctatttttcatgagctctctagacatactgtcatttcctctgaaaacaataacggtattgcctmctttataaatacacattttactagttcatgtttcatgatctgtcacattatgtagattgtgagcagtaactagggtaatggacatagcatagttgagcctcagaagaagggctaatttgtgtacagtgaggtcagcagcagagcaaacagccctgaagttactgcagcgatttcatcatttgaaggacgacaatgatggtcaagaccagcttgaaggcggagggcagaggacagaaggtggctcttttcatcaccccacactttaacatgtagtccatcataaataaagtagattatcacatttttcacatttcacaaacaaaattgccttttattttaggtggtttatttcctctttggtgaggctttcatatctttcctgtggctttcatatctttcctcctgcaatc

SEQ ID NO: 66687 - DNA, 654 bp, Homo sapiens
gggatccagggctcaagtgaggtgcaagcttggggactatgcactacttctgaatggaatccacacccatctggctcacagaagaaccactgttgtgaatcacattcttttcattatagcttatgattgataattgcttttaaaaagtctaggctttggaatacccattttctatctcttctatttttcatgagctctctagacatactgtcatttcctctgaaaacaataacggtattgcctcctttataaatacacattttactagttcatgtttcatgatctgtcacattatgtagattgtgagcagtaactagggtaatggacatagcatagttgagcctcagaagaagggctaatttgygtacagtgaggtcagcagcagagcaaacagccctgaagttactgcagcgatttcatcatttgaaggacgacaatgatggtcaagaccagcttgaaggcggagggcagaggacagaaggtggctcttttcatcaccccacactttaacatgtagtccatcataaataaagtagattatcacatttttcacatttcacaaacaaaattgccttttattttaggtggtttatttcctctttggtgaggctttcatatctttcctgtggctttcatatctttcctcctgcaatc

SEQ ID NO: 66688 - DNA, 544 bp, Homo sapiens
cttccttacaccttatacaaaaattaattcaagatgrattgaagacttaaatgtaagacctaaaaccataaaaagcctagaagaaaacctaggcaataccattcaggacataggcatgggcaaggacttcatgactaaaacaccaaaagcaatggcaacaaaagccaaaattgacaaatgggatctaattaaactaaagaacttctgcacagcaaaagaaactaccatcagagtgaacaggcaacctacggaatgggagaaaatttttgcaatctactcatctgacaaagggctaatatccagaatctacaaagaactcaaacaaatttacatcattttatttttaatatctttgggtcattttattttatattgtctcataaacagaatagcataattttgcattttaacctagtcccagaggctttccccgctcagttttatccatttatatgtattgacataagtatattgtatttgttctcatttctggctcttttgttttcatttccttacttttcctcctccttatattaatactatt

SEQ ID NO: 66689 - DNA, 690 bp, Homo sapiens
aacacagacaagttaagaaaatgcagagctgctctgacagataagtaaacttgaaagaaaaataatgcttatcttgatgagctatcatgaggtttttgagatgtatctcaactggtcacccaggctggattgtggtggcacagtgaccatcctgcctcagtttcccgcatagctgggattacaggcaggcaccatcaaacccagctaattttwaattttttttttgtaaagataaggtctcactatgttgccagggctagtatcaaactcctggcctcaagcaatcctcccacctcagcctcccaaagtgctgggattacaggtgtgagctaccacacctagcttaatgtgagaatttaatgacaaagtttgttagatttggaaacactgaaggtattgtgtcattaattatcattgattctgattcccagctaggaactaactaataactattctgtttctgagaacccaaaatatcaaataaaaattaccagactgtagcatatgctcataaaaaccaactcatagtgaattattgagattttttttttggtaacaaattatcatattgatacataggggaaatatgcagatactggagctgagcttcagaagagaactggaaaaggtctcactcatcttggtgaacaggatggagagacctggactgagtatgaggaccatttaggt

SEQ ID NO: 66690 - DNA, 1527 bp, Homo sapiens
tagcaatggtgggtaagacctagttcaagcaagtgacctctgtctcctaccccatcctccactcaaaatgaaaacttagttgayatttgtcagtgttactcaactcccctggcagaaatcattttcctccagaaggaaggacaggggggattaacaccaggtcttaggcagtgagcagatgaacaagaacttacttatatgcaaacatggcaatcaatcattgcaagcaccccaccaactcctgacgagatgccttctgtctccactaaacatctgctagcaaacctttagagggaagtgtgtgtgtattttaaaggaaatgcgaaatgctcttttccctggagctttctgcttccctgaggttataactgcattagtggcaagagcatcagtctcatggcccagagaaggtcaaagtacatttccaaaacagtccagaaatcaaatttttgaggcaggataaagggtcagtctggttcagttagttgggtattcaaagcctattctttggccatcattgaaaacatctctgtctttttgcttgtgattaactgtgtaatgggaaatgtctattccaatatgccatcatcttgggcgttagcaagctggctgtgacggcacctacagggttgttctcccattgccttaggaacaggcttctgcagtacctgtatctcattccttggcagcctggtcgtgactgagatgcatctgggtctcagagagtgcatagcaggggccaggcagctactctatgactttacagtccggagaggaaaacactcatgttcccatcacagatgaggagcctgagggacgtaagttaggttgcccaaagtcacacagctcatagtggtggtagaagggcttacagtgaattctaggtgaggttttccagtggcttctatgtggaagaactcctaactatttgttagcacttaaagactagtcacatgaaataaaagaggaaccagcctccatcaatgcacccagtgaccccaactgggactcaaatcagtaataacatttccttctgcttagtacagggaaaaaccccgacactggactctgtgcttttctcactgggtcaagtctcattttcctgaacactgagtcctctctgctgtctcagcctcattcagaaatgtccatctctctgcgtcttcaccagcggaccgagagacccagcacccatcactggacttgagcaaggtcaaggtgactgaaggcagagagcaaaggagggtggccttgggctgggaagtcacaaccactcacttcccacccttttggacaaatgctgctttctggaaacagaaggtttatttgaatccttggtcctacatgacaaagggcttgatggcatctgcatcttggggatacgttcccctctccagcccctcacaccctgctcttccacatggtcccagtgctggcaaggatgtaggccaggcttccccgcgaggcccttgcaccccatgctcaacccgagctgctccttggccatgtaattttcaacctgggatc

SEQ ID NO: 66691 - DNA, 1527 bp, Homo sapiens
tagcaatggtgggtaagacctagttcaagcaagtgacctctgtctcctaccccatcctccactcaaaatgaaaacttagttgatatttgtcagtgttactcaactcccctggcagaaatcattttcctccagaaggaaggacaggggggattaacaccaggtcttaggcagtgagcagatgaacaagaacttacttatatgcaaacatggcaatcaatcattgcaagcaccccaccaactcctgacgagatgccttctgtctccacyaaacatctgctagcaaacctttagagggaagtgtgtgtgtattttaaaggaaatgcgaaatgctcttttccctggagctttctgcttccctgaggttataactgcattagtggcaagagcatcagtctcatggcccagagaaggtcaaagtacatttccaaaacagtccagaaatcaaatttttgaggcaggataaagggtcagtctggttcagttagttgggtattcaaagcctattctttggccatcattgaaaacatctctgtctttttgcttgtgattaactgtgtaatgggaaatgtctattccaatatgccatcatcttgggcgttagcaagctggctgtgacggcacctacagggttgttctcccattgccttaggaacaggcttctgcagtacctgtatctcattccttggcagcctggtcgtgactgagatgcatctgggtctcagagagtgcatagcaggggccaggcagctactctatgactttacagtccggagaggaaaacactcatgttcccatcacagatgaggagcctgagggacgtaagttaggttgcccaaagtcacacagctcatagtggtggtagaagggcttacagtgaattctaggtgaggttttccagtggcttctatgtggaagaactcctaactatttgttagcacttaaagactagtcacatgaaataaaagaggaaccagcctccatcaatgcacccagtgaccccaactgggactcaaatcagtaataacatttccttctgcttagtacagggaaaaaccccgacactggactctgtgcttttctcactgggtcaagtctcattttcctgaacactgagtcctctctgctgtctcagcctcattcagaaatgtccatctctctgcgtcttcaccagcggaccgagagacccagcacccatcactggacttgagcaaggtcaaggtgactgaaggcagagagcaaaggagggtggccttgggctgggaagtcacaaccactcacttcccacccttttggacaaatgctgctttctggaaacagaaggtttatttgaatccttggtcctacatgacaaagggcttgatggcatctgcatcttggggatacgttcccctctccagcccctcacaccctgctcttccacatggtcccagtgctggcaaggatgtaggccaggcttccccgcgaggcccttgcaccccatgctcaacccgagctgctccttggccatgtaattttcaacctgggatc

SEQ ID NO: 66692 - DNA, 1527 bp, Homo sapiens
tagcaatggtgggtaagacctagttcaagcaagtgacctctgtctcctaccccatcctccactcaaaatgaaaacttagttgatatttgtcagtgttactcaactcccctggcagaaatcattttcctccagaaggaaggacaggggggattaacaccaggtcttaggcagtgagcagatgaacaagaacttacttatatgcaaacatggcaatcaatcattgcaagcaccccaccaactcctgacgagatgccttctgtctccactaaacatctgctagcaaacctttagagggaagtgtgtgtgtattttaaaggaaatgcgaaatgctcttttccctggagctttctgcttccctgaggttataactgcattagtggcaagagcatcagtctcatggcccagagaaggtcaaagtacatttccaaaacagtccagaaatcaaatttttgaggcaggataaagggtcagtctggttcagttagttgggtattcaaagcctattctttggccatcattgaaaacatctctgtctttttgcttgtgattaactgtgtaatgggaaatgtctattccaatatgccatcatcttgggcgttagcaagctggctgtgacggcacctacagggttgttctcccattgccttaggaacaggcttctgcagtacctgtatctcattccttggcagcctggtcgtgactgagatgcatctgggtctcagagagtgcatagcaggggccaggcagctactctatgactttacagtccggagaggaaaacactcatgttcccatcacagatgaggagcctgagggacgtaagttaggttgcccaaagtcacacagctcatagtggtggtagaagggcttacagtgaattctaggtgaggttttccagtggcttctatgtggaagaactcctaactatttgttagcacttaaagactagtcacatgaaataaaagaggaaccagcctccatcaatgcacccagtgaccccaactgggactcaaatcagtaataacatttccttctgcttagtacagggaaaaaccccgacactggactctgtgcttttctcactgggtcaagtctcattttcctgaacactgagtcctctctgctgtctcagcctcattcagaaatgtccatctctctgcgtcttcaccagcggacygagagacccagcacccatcactggacttgagcaaggtcaaggtgactgaaggcagagagcaaaggagggtggccttgggctgggaagtcacaaccactcacttcccacccttttggacaaatgctgctttctggaaacagaaggtttatttgaatccttggtcctacatgacaaagggcttgatggcatctgcatcttggggatacgttcccctctccagcccctcacaccctgctcttccacatggtcccagtgctggcaaggatgtaggccaggcttccccgcgaggcccttgcaccccatgctcaacccgagctgctccttggccatgtaattttcaacctgggatc

SEQ ID NO: 66693 - DNA, 705 bp, Homo sapiens
cacttgcatgccatttctcagagattattggtttttattacctgatgggtggtatcctgaaaactgttctggagatatyttgtctggtcttgtgacaatttcagatggcagagcaaatccagtcctttttagtctaccttgactggaagtgaaaatcccgactcatttatttttaaagtttgcttttaaatgataggaagattggtctctagtatatcattttagctcacagtatatttttatggtagataatagtagcttcaatttatgcctcgtaaatcattgatgtaatttttctgtctggttattttccttatccttgtatttagggattcccgtcagatagcttttgattcacagaaaaatgtttgtttagatcataatttttgcattaaaatctccttaaaagtctctatttttactaattcttttacatattttctcaattttatagcatcctattattaattttcacctttcttaagacctatataactacaattaaaaagatgctgaacactagtcaaaaacagcggtggccattatttccacatgtgatgtaagttttttaggttacaattttttaataagttgtaacaaagtcaattttctcatgaatacactcattttagagcaggtgcacagatttttaaaatgtaacttagtatttatatactccaatccaaggtacattttgccctatat

SEQ ID NO: 66694 - DNA, 705 bp, Homo sapiens
cacttgcatgccatttctcagagattattggtttttattacctgatgggtggtatcctgaaaactgttctggagatattytgtctggtcttgtgacaatttcagatggcagagcaaatccagtcctttttagtctaccttgactggaagtgaaaatcccgactcatttatttttaaagtttgcttttaaatgataggaagattggtctctagtatatcattttagctcacagtatatttttatggtagataatagtagcttcaatttatgcctcgtaaatcattgatgtaatttttctgtctggttattttccttatccttgtatttagggattcccgtcagatagcttttgattcacagaaaaatgtttgtttagatcataatttttgcattaaaatctccttaaaagtctctatttttactaattcttttacatattttctcaattttatagcatcctattattaattttcacctttcttaagacctatataactacaattaaaaagatgctgaacactagtcaaaaacagcggtggccattatttccacatgtgatgtaagttttttaggttacaattttttaataagttgtaacaaagtcaattttctcatgaatacactcattttagagcaggtgcacagatttttaaaatgtaacttagtatttatatactccaatccaaggtacattttgccctatat

SEQ ID NO: 66695 - DNA, 736 bp, Homo sapiens
atggcttttacattgctatgtgtgttcattcaatcaactatttttgagtattataagttgaatattatagagaatattatgggaagtgaggcaggcaagtggttcacacctgtaattctaacactttgggaggctgaggcaaatggattgcttgagctaggagtttgagaccagcctaggcaacatggcaaaaccccatttctacaaaaatacaaaaattagccaggcagggtagcaygtgcctgtggttccagctactcaggaggctgaagtaggaggatcacttgagcccaggaggtcaaggctgcagtgagccaagatcatgtcactgtactctagccttggtgacaaagtaagatgctgtcttaaaacaaacaaacaaaacaatattatgggggactaagagaaatcgaatttatggctcctggctataactttgagttcatcttaagctctaatgtcctcattctttatgaaatgagagtatgaaactgcatgtcagcattcagtatgacaggagcattggagcagatttgaaaaggtgagtttcaatgtttataactgcttagggcataaaactgcccaaataggtagatcatctagtgatgcttatatggtataatttgtgagccaaagataccataattcctctggtataaaatgtgttttctccctgctgatcatacggagattttaaatcactattgcataaaattaattccaacttttctaaatt

SEQ ID NO: 66696 - DNA, 652 bp, Homo sapiens
tggtactttatatggttgttcttacatacgatgctctgaggatgtagtttgtgagaaggcagtgggaatgcagtaagtttaatcaaggtttgttgagtgagggaaattcaggaaacttctgtcagtcactttagccaatttgaagctctccyttttttgtgcaaagacaaactacagcttactcaactggtactaatttatctaggttcagcatttgattttattgggccttggattttcatctattttgtgtctatctcattgctccaaactagtacaagctcctgaattgccagggccacttcttattcctcctgggatgatcaggttgggcgggccagggtgctgctttaaaagtcagattttgcttctttagtcttccctattgttaatgaacagtttttggatgtcactttgtgcctagcttgttctaagtgtttatgttagttaagggttttctgtgtctatagaaggaaaaattcaaactgagttaagcccaaactagactttgttggctcacatagctgaaaggccccggggtagctgccttcaggcctggctggacctagtagttccagtgtcatcacaggactctaagaactgtcatggctctgcttttttatgtgctggtgccaagactatctgttcctgg

SEQ ID NO: 66697 - DNA, 697 bp, Homo sapiens
tccgcagtagcattagattctcataggagaacgaaccctattgtaaactgcataggcgagggatctaggctgcacactccttatgagaatctaatgcctgatgatctgtcactgtctcccatcatccccagatgggaccatctagttgcaggaaaactagctcagggctcccactgattctacatcatggtgagttggagaattatttcattatatattacaatgtaataataatagaaataaagtgctcaataaatataatgcacttgaatcatccagaaascatccccctccacagtctggggaaaaagtgtctttcatgaaaccagtccctggtgccaaaaaggttgaggactgctgctttgggttataaaccccaaatggcacctgtatgaaacgatagggaggtttatattattagtaatattaatttttatttcataaacagttgtcatcgagatatagccattattaatttttttaaaaaaaacttgacatctattttcaagttcttttaatgaggttactgcagaaaaaatgaggaatagacagagatggggtaaggggcagacagaggagagagagagagagagacactttggaaagtagatttaagctaggtgatgggttggtaggtgcagcaaaccaccatgtcacacgtttacctatgtaacaaacctgcatgtcctgcacttat

SEQ ID NO: 66698 - DNA, 741 bp, Homo sapiens
tgttctccctatgcctgtatttatctacattactatccaattgaaaatgttaacttctttaccaatataactgagtrgtttgcagatctctgtatcatgaccagaatagcccatccccttgtaatttggactaatgtctgagaaggcctgcatgagtaaaagttcaaattattttccagttaaaaaagagatattgtatgactttcaaacccagcaagaatggggctaggaaactatgacaaaaaaaaatctttagggaaacagtaagtaaacagatgagaatgattcagaactctgttttgtaagctctgtattgatgactctctttatggccatatacaatacccactgagaaatgctcatttataactcccgccatgcttaccatgtttaaaaacaacttattgttttaagtagcttcaacagtcacccgaaatcctattgacactgttaatttgcttagcaaagactttctttaagatcttaaaaggtaaactttcacccagcctctgtcagaatcactatggattagagttatccagaattaagaaggtttagttagctcacttccattctattgaacttactcaaaatgtcagaacattctacatttctgacatatacaatgttcatatgatgacagtttttatagatgcctcacatcatttaattccaggcaccccattttaattgtgtcctgttttatctgttgattttttaattggcaaataagtaatttta

SEQ ID NO: 66699 - DNA, 741 bp, Homo sapiens
tgttctccctatgcctgtatttatctacattactatccaattgaaaatgttaacttctttaccaatataactgagtggtttgcagatctctgtatcatgaccagaatagcccatccccttgtaatttggactaatgtctgagaaggcctgcatgagtaaaarttcaaattattttccagttaaaaaagagatattgtatgactttcaaacccagcaagaatggggctaggaaactatgacaaaaaaaaatctttagggaaacagtaagtaaacagatgagaatgattcagaactctgttttgtaagctctgtattgatgactctctttatggccatatacaatacccactgagaaatgctcatttataactcccgccatgcttaccatgtttaaaaacaacttattgttttaagtagcttcaacagtcacccgaaatcctattgacactgttaatttgcttagcaaagactttctttaagatcttaaaaggtaaactttcacccagcctctgtcagaatcactatggattagagttatccagaattaagaaggtttagttagctcacttccattctattgaacttactcaaaatgtcagaacattctacatttctgacatatacaatgttcatatgatgacagtttttatagatgcctcacatcatttaattccaggcaccccattttaattgtgtcctgttttatctgttgattttttaattggcaaataagtaatttta

SEQ ID NO: 66700 - DNA, 741 bp, Homo sapiens
tgttctccctatgcctgtatttatctacattactatccaattgaaaatgttaacttctttaccaatataactgagtggtttgcagatctctgtatcatgaccagaatagcccatccccttgtaatttggactaatgtctgagaaggcctgcatgagtaaaagttcaaattattttccagttaaaaaagagatattgtatgactttcaaacccagcaagaatggggctaggaaactatgacaaaaaaaaatctttagggaaacagtaagtaaacagatgagaatgattcagaactctgttttgtaagctctgtattgatgactstctttatggccatatacaatacccactgagaaatgctcatttataactcccgccatgcttaccatgtttaaaaacaacttattgttttaagtagcttcaacagtcacccgaaatcctattgacactgttaatttgcttagcaaagactttctttaagatcttaaaaggtaaactttcacccagcctctgtcagaatcactatggattagagttatccagaattaagaaggtttagttagctcacttccattctattgaacttactcaaaatgtcagaacattctacatttctgacatatacaatgttcatatgatgacagtttttatagatgcctcacatcatttaattccaggcaccccattttaattgtgtcctgttttatctgttgattttttaattggcaaataagtaatttta

SEQ ID NO: 66701 - DNA, 540 bp, Homo sapiens
cttttcttttttttttcttttcagataggatctctccctgtcacccaggctggagtgccgtggtgcgatcatggctcactgcagcctcaacttcctgggctcaagtgagccacccccctcagcctccggagtagcggggacaacacaggcacacaccaccacccccacctaatttttaaagtcttttggtagagacagagtttcaccatgtcagccaggctggtctcaaactcctgggcttaagcaatcctcctgcctaagcmttccaaagtgttgggattacaggcatgagccaccatgcctggattcaaatagacctgtttctaccacttcagttttgtggatgaatctgttgtaaattgaagcagatgagtgaagacaggtccagctgtgtgccttttatgaagtcagcagctgagtttgctgcagggaagtgccatgggcagccaggagctgtgggaggagtgatggctgtggggacaggctgcacgaacatggtgttcccatgcagtttcccagtagcccagtgacttacaggcg

SEQ ID NO: 66702 - DNA, 1894 bp, Homo sapiens
cacggcttatttggccctccagaacatcaggaggtcccccaccaactctggtgcgaggtgacaggtgcagatgagttgatgcagggcttaactctcctgaycccccatgacaccggaactctcctgatcccatcaccgaagaaccaagctgtcccccactctgcccctgagagatcaagctctaatcatggcctcccttgctcacacattctccatggttccacattggccttgtgagaaaatttctgcatccagcctgacattcaaacaccttgccctaatcagctcctgcctacttctctctatctttgacaaatatttctgtctagaaggtccttttttcccttcttcacctagccaactcctattcacacttcagaactcagctcaggtcagatgaggtggttcatgcctgcaattccagcactctgagaggccaagacaggaggattgcttgaacccaggagtttgagaccagcctgaacaacctgatgtaaccccatctctacaaaaaatacaaaaattagctgtgtgtggtggcatgtgcctgtagtcccaccctgaagtaggaggatcaattgagcatggaaggtcaaggctgcagtgagcagtgattgtgccactgcatttcagactgagctacagagaaaaaaaaactcagctcaagaaaaagcattcctccaagaagccctccctgttgttcctctggaatcccacagtccccatccttcccctgtagttctgaccccatggggctggcagtagatacatccaactttgtctcccctagactagacagccctctagatcaggcctaggagtggacagtaaaatttagagagtgcaacaggtgaagagagacgtgactgactccctcctctttagcttcccttgacaacttcctctcagactgccccagctgatatcctgcccaaaaacacacatgcttgcaaatccagccactaaccattgacctgtcttggactcaagtgtgaagagtcagccaagaatgcagacctggaagcctagggtgtatgtgtgtgtatttgtagtcaagtgaaaatcccacccaagctccagacagaccctggtggcccattctgcagatgttggtgaggttggtatttctgtggaggtgtcagcaaaggttgaatgtgccaggcatgaggcaaaggccaaggtttagggggacttctacacacacaacttcccccttgcctcgtccagccagaaagcagagagcagtggcatctgcccagcacagagacagatggatggatccactcacccgaggatagagcagggaagacgggacaggagaaatccaagagggcttctcaggggaggaggcatgtagtttggcttagatacagaggctagacaggggcctgagcagatgagtaggggactgggcatttgaagccaagggtcttgcacctccctacccctttctttgcaccctcatactcgagcatttattagcaacttgtgctaaccactgagctaagctgacctccaagtaattagaaagcttaagtaaaccaacatctgtagatgagaaaggtgactgaggacctactgttacaaaggcaaggtaatttgaggctgcaatgagctacgagcaactgtgttccagcctgggagacagaatgtaaaaaaatagtaataacagaaagtatacatcaatctcaattttttttaaaaaggcagatggttttacagttgttttatcaaaactcaaagaacaggaaagcccaaattatttcaacaaagtcagaccttttaaacagatgatagctgcccaagtcatttttatgaaacttctttatatcaaaacctaagtctaaaaagagaaaagtgttgaccttgatacgggctgtgttaggcagagatt

SEQ ID NO: 66703 - DNA, 1894 bp, Homo sapiens
cacggcttatttggccctccagaacatcaggaggtcccccaccaactctggtgcgaggtgacaggtgcagatgagttgatgcagggcttaactctcctgatcccccatgacaccggaactctcctgatcccatcaccgaagaaccaagctgtcccccactctgcccctgagagatcaagctctaatcatggcctcccttgctcacacattctccatggttccacattggccttgtgagaaaatttctgcatccagcctgacattcaaacaccttgccctaatcagctcctgcctacttctctctatctttgacaaatatttctgtctagaaggtccttttttcccttcttcacctagccaactcctattcacacttcagaactcagctcaggtcagatgaggtggttcatgcctgcaattccagcactctgagaggccaagacaggaggattrcttgaacccaggagtttgagaccagcctgaacaacctgatgtaaccccatctctacaaaaaatacaaaaattagctgtgtgtggtggcatgtgcctgtagtcccaccctgaagtaggaggatcaattgagcatggaaggtcaaggctgcagtgagcagtgattgtgccactgcatttcagactgagctacagagaaaaaaaaactcagctcaagaaaaagcattcctccaagaagccctccctgttgttcctctggaatcccacagtccccatccttcccctgtagttctgaccccatggggctggcagtagatacatccaactttgtctcccctagactagacagccctctagatcaggcctaggagtggacagtaaaatttagagagtgcaacaggtgaagagagacgtgactgactccctcctctttagcttcccttgacaacttcctctcagactgccccagctgatatcctgcccaaaaacacacatgcttgcaaatccagccactaaccattgacctgtcttggactcaagtgtgaagagtcagccaagaatgcagacctggaagcctagggtgtatgtgtgtgtatttgtagtcaagtgaaaatcccacccaagctccagacagaccctggtggcccattctgcagatgttggtgaggttggtatttctgtggaggtgtcagcaaaggttgaatgtgccaggcatgaggcaaaggccaaggtttagggggacttctacacacacaacttcccccttgcctcgtccagccagaaagcagagagcagtggcatctgcccagcacagagacagatggatggatccactcacccgaggatagagcagggaagacgggacaggagaaatccaagagggcttctcaggggaggaggcatgtagtttggcttagatacagaggctagacaggggcctgagcagatgagtaggggactgggcatttgaagccaagggtcttgcacctccctacccctttctttgcaccctcatactcgagcatttattagcaacttgtgctaaccactgagctaagctgacctccaagtaattagaaagcttaagtaaaccaacatctgtagatgagaaaggtgactgaggacctactgttacaaaggcaaggtaatttgaggctgcaatgagctacgagcaactgtgttccagcctgggagacagaatgtaaaaaaatagtaataacagaaagtatacatcaatctcaattttttttaaaaaggcagatggttttacagttgttttatcaaaactcaaagaacaggaaagcccaaattatttcaacaaagtcagaccttttaaacagatgatagctgcccaagtcatttttatgaaacttctttatatcaaaacctaagtctaaaaagagaaaagtgttgaccttgatacgggctgtgttaggcagagatt

SEQ ID NO: 66704 - DNA, 1894 bp, Homo sapiens
cacggcttatttggccctccagaacatcaggaggtcccccaccaactctggtgcgaggtgacaggtgcagatgagttgatgcagggcttaactctcctgatcccccatgacaccggaactctcctgatcccatcaccgaagaaccaagctgtcccccactctgcccctgagagatcaagctctaatcatggcctcccttgctcacacattctccatggttccacattggccttgtgagaaaatttctgcatccagcctgacattcaaacaccttgccctaatcagctcctgcctacttctctctatctttgacaaatatttctgtctagaaggtccttttttcccttcttcacctagccaactcctattcacacttcagaactcagctcaggtcagatgaggtggttcatgcctgcaattccagcactctgagaggccaagacaggaggattgcttgaacccaggagtttgagaccagcctgaacaacctgatgtaaccccatctctacaaaaaatacaaaaattagctgtgtgtggtggcatgtgcctgtagtcccaccctgaagtaggaggatcaattgagcatggaaggtcaaggctgcagtgagcagtgattgtgccactgcatttcagactgagctacagagaaaaaaaaactcagctcaagaaaaagcattcctccaagaagccctccctgttgttcctctggaatcccacagtccccatccttcccctgtagttctgaccccatggggctggcagtagatacatccaactttgtctcccctagactagacagccctctagatcaggcctaggagtggacagtaaaatttagagagtgcaacaggtgaagagagacgtgactgactccctcctctttagcttcccttgacaacttcctctcagactgccccagctgatatcctgcccaaaaacacacatgcttgcaaatccagccactaaccattgacctgtcttggactcaagtgtgaagagtcagccaagaatgcagacctggaagcctagggtgtatgtgtgtgtatttgtagtcaagtgaaaatcccacccaagctccagacagaccctggtggcccattctgcagatgttggtgaggttggtatttctgtggaggtgtcagcaaaggttgaatgtgccaggcatgaggcaaaggccaaggtttagggggacttctacacacacaacttcccccttgcctcgtccagccagaaagcagagagcagtggcatctgcccagcacagagrcagatggatggatccactcacccgaggatagagcagggaagacgggacaggagaaatccaagagggcttctcaggggaggaggcatgtagtttggcttagatacagaggctagacaggggcctgagcagatgagtaggggactgggcatttgaagccaagggtcttgcacctccctacccctttctttgcaccctcatactcgagcatttattagcaacttgtgctaaccactgagctaagctgacctccaagtaattagaaagcttaagtaaaccaacatctgtagatgagaaaggtgactgaggacctactgttacaaaggcaaggtaatttgaggctgcaatgagctacgagcaactgtgttccagcctgggagacagaatgtaaaaaaatagtaataacagaaagtatacatcaatctcaattttttttaaaaaggcagatggttttacagttgttttatcaaaactcaaagaacaggaaagcccaaattatttcaacaaagtcagaccttttaaacagatgatagctgcccaagtcatttttatgaaacttctttatatcaaaacctaagtctaaaaagagaaaagtgttgaccttgatacgggctgtgttaggcagagatt

SEQ ID NO: 66705 - DNA, 1115 bp, Homo sapiens
tatctctctatatatctgtcatatatttatctacctatctctatcatttatgtaatttaactcacctattcctatgtattaataatatatctgttatctatctatcatttatgtatttacctaggtctatcatttaattgtcctaatttatgtcttttctattaattayatacctaccatctatctcgttctaacagttatctatttctatctagtttaacctatttagtttatttctttccatctgtaatagaatatgtctattgtctatctatatatccttttttgctttttttgagacagtattattctgccacccaagctggaatgcagtggcacgatctcagctcactgcaacctccacctcccgggttcaagtgattctcttgcctcagcctcccgagtagctgggactacaggcccagtcaattttttacagaccaccacgcccagccaatttttgtatttttagtagagacgggttttcatcatgttgtccaggcttgtctcaaactcctgacctcaggtgatctgcccgcctcggcctcccaaagtgctgggattagtggcgtgagccaccgcgcccagtctgtctatatacctttctctctctctctctccacacacacacgcacacacataattgtttttgtaagcatctggagaatacgtctaatcatctaatctcccatttcaatttgggatccattacttccacagtcaacactatccaattagcaatagccacttaaacacttcaggcatcttggaatgtctgtttttctaagccaagatctaaaaccttggatgtcagattttccagatctcctgttttggggactggtgtgaaaacgtcattcgatgacaggccgacccaggtggcccctgccttaacatcaaacgccatcaaactctccgaacacgcttctggctccaggcaggtgccgtttttctccccacagaaaggtcagctagagtcacccttaaaataatgcacttgtatattttttattgtgtggacaagaaattgggaacaggttcaggctgctcagaaaaacgtgttaagtttatttttgaacagaggtttattaaaaaaaaaaaaagccaaggaaagt

SEQ ID NO: 66706 - DNA, 1115 bp, Homo sapiens
tatctctctatatatctgtcatatatttatctacctatctctatcatttatgtaatttaactcacctattcctatgtattaataatatatctgttatctatctatcatttatgtatttacctaggtctatcatttaattgtcctaatttatgtcttttctattaattatatacctaccatctatctcgttctaacagttatctatttctatctagtttaacctatttagtttatttctttccatctgtaatagaatatgtctattgtctatctatatatccttttttgctttttttgagacagtattattctgccacccaagctggaatgcagtggcacgatctcagctcactgcaacctccacctcccgggttcaagtgattctcttgcctcagcctcccgagtagctgggactacaggcccagtcaattttttacagaccaccacgcccagccaatttttgtatttttagtagagacgggttttcatcatgttgtccaggcttgtctcaaactcctgacctcaggtgatctgcccgcctcggcctcccaaagtgctgggattagtggcgtgagccaccgcgcccagtctgtctatatacctttctctctctctctctccacacacacacgcacacacataattgtttttgtaagcatctggagaatacgtctaatcatctaatctcccatttcaatttgggatccattacttccacagtcaacactatccaattagcaatagccacttaaacacttcaggcatcttggaatgtctgtttttctaagccaagatctaaaaccttggatgtcagattttccagatctcctgttttggggactggtgtgaaaacgtcattcgatgacaggccgacccaggtggccsctgccttaacatcaaacgccatcaaactctccgaacacgcttctggctccaggcaggtgccgtttttctccccacagaaaggtcagctagagtcacccttaaaataatgcacttgtatattttttattgtgtggacaagaaattgggaacaggttcaggctgctcagaaaaacgtgttaagtttatttttgaacagaggtttattaaaaaaaaaaaaagccaaggaaagt

SEQ ID NO: 66707 - DNA, 848 bp, Homo sapiens
atatattaaaatttcaaccctttacttgtagatgagatggctatcctctgtttggtctagggcaaggattgataaactgtggcccgtgagccaaatctggctcactatatatgtttgtaaaaaaagttttattggaatacagccaaataatttaaagctgcttttacactgtaatgacagagatgagtatttgtgacagagaccgtacggccaacacaacctcagatatttatcatctggcccttttcagaagaagtttgctgacatctggtctagggctaaaacactatacttactgaaatcctcaatcctcccataaaatttagtattttctcaaaggtacccattatttaaataaatttaaataaaggaaatgtcacgattaataaagccaatcaagctttatgataaatattcattaagcatctaccayatgccaagcatataaatgtgaaataaccatttttgccatcatagaacataaaattcaattcataaaactggagatttttcttaaaaactgaaagctgtatattgagattaaatttgaaggaagagttattattttgttgaatatttaatttatcctttccatatccacagtttatttatttatttttatatttttttgagacggagtctcgctctgttgtccagcctggaatgcagcagcgcgatctctgctcactgcaacctctacctcccaggctcaagggattctcccacctcagtctccagagtaactggaatcacaggcacgtgccaccacgcccagccaattttgtatttttagtagaaacagggtttcatcatgttggccaggctggtcttgaactcctgacctcaag

SEQ ID NO: 66708 - DNA, 848 bp, Homo sapiens
atatattaaaatttcaaccctttacttgtagatgagatggctatcctctgtttggtctagggcaaggattgataaactgtggcccgtgagccaaatctggctcactatatatgtttgtaaaaaaagttttattggaatacagccaaataatttaaagctgcttttacactgtaatgacagagatgagtatttgtgacagagaccgtacggccaacacaacctcagatatttatcatctggcccttttcagaagaagtttgctgacatctggtctagggctaaaacactatacttactgaaatcctcaatcctcccataaaatttagtattttctcaaaggtacccattatttaaataaatttaaataaaggaaatgtcacgattaataaagccaatcaagctttatgataaatattcattaagcatctaccatatgccaagcatataaatgtgaaataaccatttttgccatcatagaacataaaattcaattcataaaactggagatttttcttaaaaactgaaagctgtatattgagattaaatttgaaggaagagttattattttgttgaatatttaatttatcctttccatatccacagtttrtttatttatttttatatttttttgagacggagtctcgctctgttgtccagcctggaatgcagcagcgcgatctctgctcactgcaacctctacctcccaggctcaagggattctcccacctcagtctccagagtaactggaatcacaggcacgtgccaccacgcccagccaattttgtatttttagtagaaacagggtttcatcatgttggccaggctggtcttgaactcctgacctcaag

SEQ ID NO: 66709 - DNA, 848 bp, Homo sapiens
atatattaaaatttcaaccctttacttgtagatgagatggctatcctctgtttggtctagggcaaggattgataaactgtggcccgtgagccaaatctggctcactatatatgtttgtaaaaaaagttttattggaatacagccaaataatttaaagctgcttttacactgtaatgacagagatgagtatttgtgacagagaccgtacggccaacacaacctcagatatttatcatctggcccttttcagaagaagtttgctgacatctggtctagggctaaaacactatacttactgaaatcctcaatcctcccataaaatttagtattttctcaaaggtacccattatttaaataaatttaaataaaggaaatgtcacgattaataaagccaatcaagctttatgataaatattcattaagcatctaccatatgccaagcatataaatgtgaaataaccatttttgccatcatagaacataaaattcaattcataaaactggagatttttcttaaaaactgaaagctgtatattgagattaaatttgaaggaagagttattattttgttgaatatttaatttatcctttccatatccacagtttatttatttatttttatatttttttgagacggagtctcgctctgttgtccagcctggaatgcagcagcgcratctctgctcactgcaacctctacctcccaggctcaagggattctcccacctcagtctccagagtaactggaatcacaggcacgtgccaccacgcccagccaattttgtatttttagtagaaacagggtttcatcatgttggccaggctggtcttgaactcctgacctcaag

SEQ ID NO: 66710 - DNA, 713 bp, Homo sapiens
cataccaatctactaaattggcgccctattcttctgaatcccgttttagaggtgagagcactgaggcttgctgagaacatgccwtcagctccagtgacacagccagcatggaatccagtttaaatgtgggcatgtctgactccacagcctctctgctacatcatgtgcagtctgctttttgatggccttttgttaattcctccttggtgccctgatatttcagaagttatatgtcatttagttacacattttaaaccttaggaaaccaagtctgcatcaacatttactaagtattgactggctctgcatttaatgttttacacgtccgttttgcatggtcaggatgtccagattatttcattagctcattattttggtcatatgtatttctgaaggggactataataatgaaaactagcttaaattcccaattattcaggctatttcatttaaagatgagaacagctggcagtttcaattcctcaagtgttgaaaaattgtggaaaagaaaaaccccaaaccagcgtgttaacaaatggcttagcgaatgaatcggagggattgtgttctctctgaccgtttctggatatcttctgtgtgtctccacaatctgggtgcggtgtgatgtgttgctccacggagaaaccacagttgaaagaataaacagggatgacagaataaacagaataaaccctgagtgtgggggaagcttt

SEQ ID NO: 66711 - DNA, 688 bp, Homo sapiens
ggatcctgtgaacctgagagcctrataagatcttttgtatcctttggagaagcactgagcagcaatcatttctttgtggacatgggtaccagcctacagaattccactgtgtagagtatattggtctccattcttctctggcttttgaaccttttaaaactactgctatgagcattttcctaatgctggcagacctcttgctgaggcacagatgtttataagttcctctgtgagttcttttgctgtactaggacaggatcaatttcataaccgttcagaaatccaaataccagaggctagcaggaacctaagtctgtatttcccctaggagctctagttcaatattcactaattcaatgttgattgtgactttacacaacacaacaatgacaatgaaagataattgacttacataattcagagcctgatacatggtaaatgctaggaaaagggaaactataatgcttataaggaattataataatttaattattcttgcatagtctttgcatggacatattaagttttaaggatgttcatagaaacatccttaaggagaaaaagtggagccaggcatggtggctcacacccgtaatatcctagcattttgggaggccaaggcaggaggatcacttgaggccaagagtttgagaacagcctggacaacttagcaagaccctgtctctat

SEQ ID NO: 66712 - DNA, 840 bp, Homo sapiens
tgcatctaaggcatatactcttgttgctttttgaattttctctctggcaattactcagcttggtttgtgtttcccaagatgcagagcactttacgagagtatgtatttgtttccaaattccgtattgctggacgtgttcaaaacgtatccattaagtataatagcatatataatggaaagtgtaaagagatattcttaacgaaagagtacataataattgcacaaaattaaaggactcttcttaaaggatataattgtttctttcattaaaaaaaggataacaatcttgcacagattctgtggcactttcaacatggcttcaaggagatttttgtcttactctttagtttcactgcatagaatttgggttagaagtgatacaaactgcagaaacacctttctagtgaattttagaaattttaagaacatttatatttcttattaaagatagtaaagcatcattaaatatatgaaagtgttttgattcaacaatattcagtaaatatctagagtgcctgctagatatgctaccacataaggatgtgggaataccacagagtttctccatgtaaggtagtggaaataaaaacataaaaaagacatggcctctgttacacagagttcccagtctggtggggagaaagacgcataaacagttaaataaagcatcatgttaatcaggctgtagtctggctacatatgttgaaaatgctatagcaaaacagatgagtgtgattaatgttacctagataagggcaaagaagtctttttatagraggtagtatttgaactgggtcttaaaatataaaaggaaattgatcagggatttgggtcaggtca

SEQ ID NO: 66713 - DNA, 520 bp, Homo sapiens
tcagagccatgtcctaactacataaccttgggcaaatcatatgacctctgtgtgcagtgtgttatggttaaatgggataacccagatgaaacatatagtaagtgttcaataaaagragacaagcagattagtcatagtctgggtataaaataattgcatcaaggcagcaacaacaaactaaaaattattctgtaaaatgaaattgtttttgctatgtatgtttttgtttgcaaagcaaatacttctataatgtattagttgctggtgctgagtaccaaataggatttgtttaatatcaagatctttcctatcagccagacatttgtattttttatgatggagaagaaatgtcttcctgcataataactaaaggaaggtagctacttagccattctcccattcttgttatttccaagtgaaagctagtgggaaacagagtactttgttgaagtgcttaaatggaagccattctaagttggctagctgctcagtataatatagacattacaaaataacatga

SEQ ID NO: 66714 - DNA, 740 bp, Homo sapiens
ttttcaggctctgactccaaatgttgaggtatccagattcagtccttggtctcttctctttgctaaagacacttactccttggtgatctcatcccatctttgtatcttcagctagactttccccagggtcacatacacaactgcctgctcaacctcacccctgggatatcttaaccttaactcactcaaggtaacttactccggrgaaaccaacaacacctgctcccgcatctcagccagtgcacacttcactcttctggctacttgctccttctctcacgaccacttctgatctgtcagtacatcctattggcaccaccttaaaaatacaaccagaaaatccattagaaaggaaacattcccagaaatcccatccctgttagttcacagttaacactggtaccaactccccctaaataaagtttgtatagataatcattgacacaaatgggctcaggagacacatacaggggccttgacgtctcagtaagattcaggcttttgtttattctctttgtgctgggggcagggtattccattcctgagtagttattttttcccttttttaaaaaattttcttgcttctagaggtgaaaacctgagtgtttttattcctttttcactcctcacaatgtcaaccctggacacacactagtagatatgggatggccgtacttgcactcataattctctgtctcacttctccaaatccccacttgaactaaatcatgactggatag

SEQ ID NO: 66715 - DNA, 611 bp, Homo sapiens
agaccaggcatcactgctccaatccactgaataagtgtatacattttctagttggggtcttctggtcaggaggggagggtattgtttgcctttggctttctttctgctctagggacttccttccatggtgcagtggtcaataaatgtgaagtcaagcgcaagggaaagacagcattctgcagcccctccttccggactgttctttgctggctcatttgtgcaaacttgaatattgtttgtttttaaggttccaccatctctctgagttcttttcttgcaggcattcatccttgtcaaatcaaacggtcaaagttcacattcatgccacaggacttgtcagggctccaaacaggcactttctcaaagtatttttgcccaaggaaccatctcgtgtatcacctcttgttgatctatttcacaagtttgagaacgctgaagtcacttctgcaaagaacaaagtaaatgcccaccaaataatagatgctatattgctattgtcatcatgattatcagtatgtagcaagaataaaagcataaaataaaaatatttaggtcacgaactcttacagacatcattgcattttagagaagcygtttggtactgaggatcc

SEQ ID NO: 66716 - DNA, 737 bp, Homo sapiens
caccttggcttcctgcctgtagcatctggggataaggttcctgccaggcatgatcggaatgaaaagatctccttgtttaactttgcacttccctgcttactaatgaggtcaaacattttttatatgcttagaagccattcgtattttgtcttttgtgacctttcaatgtataccctttaccttccattttattgagtcatgttctcactgaattgtggatataacttttgtatattccagatgctaatttttaaaatgtatctagtctcactctgtgatttgcattttactttgtttgcagtagcttttgttttctagatgattttaattttaatgtcttcagattaccatattttctttgtcatttgtgtttccaaaagcaattctctaccaagaggtcataaaggtagtcttcctatattttctcttaaawgcgttttttttttttttttttttttttttcttttgagacggagtttcacactgttgcccaggctggagtgcagtggcgcgatctcggctcactgcaagctccgcctccggtttcacgccattctcctgcctcagcctcccgagtaactgggactacaggcacccgccaccacgcccggctaattttttgtatttttagtagagagggggtttcactgtgttagccaggatggtctcgatctcctgacctcgtgatccgcccgcctcagcctctcaaagtgctgggattacaggcgtgagccaca

SEQ ID NO: 66717 - DNA, 3281 bp, Homo sapiens
ctaataagctctttctgtttattatttggttcaacatatattacaatttatccttaacagtctagatatgcaaataatttttggtgaataccacaacattttgtacttattaatgacagataaaaatggtgtatttacatttcttctctggtgtgttctttttctctgttgcttccattatatggaagaaatgcctagaatgatataaggaatatttggcagtgtagcctggtggataaatgagggaaaaacacaaatagtggtagacagtcactactacctccaattttacccaccaccaccaattgcyacgggtttaggagaggataaagaaaagtgggaatgaagttacataggtaagtggaccaaatcagtttgcattttctttccaaaaacccatacaaataggtgtagagcatcattccactgcatcacctggactatggggcagagctcttctctaatgatagtgcttttacctttcttcaagggagttgcaaatctgagtgttctcatctctggatttgcatttaggatagcttgctatcacctgagggctgggaaaaaccttcaggccaccacaggtgctttgggagtagatttgtgactcattccttattaggccaatgcaactgccctcttctttcaagcaccactggcactggcccctgacattaattttgtgactattttaaataaacaaagcataacaactagtaaatgaggaagaaaggcaaagtaggtgaattgtttgtagtttgccatttcatagcatgtttaagccttttaaaaattttttatttttatttttgaaacagggtctcactctgtcacccaggctggagtgcagtggcacaatcatagctcactgcagtctcgacctcctgggctcaagcaattctcctacgtcagcctcccaagtagctgggactacaggtgcttaccaccatgccagtctaatttttttatttttgtagagtctggttcgcactgtgttgcccaggctggtctcaaactccttggttcaagcaatcctcccactttgccctcccaaagtgcggggattacaggcgtgagccactgcacccagtctttaaaaaaattttaaatgcattttggttggctgggcagttccaatttctcatactacttgtgtcttgtgatggggagagctgtttgttggcttgatgaagggagaaacccctcttaccgataaggattgttaattctcttaattttattcattaactgaaaatgtgccagttaagagaaatcagtgagactaaaaatagcccatcagttctttagagattcagggaaacaaatttccaggcaccagatgcttcatttggaaattattttatttaatgagaatatcaatgtcttctgagtcacgggggtagtttggttagtgtggaccataatcatatatcaaccttacatgaaaccagttgtgatgttaatattgagtgtcaacttgattggattgaaggatgcaaagtattgttcctaggtgtgtctgagagagtgttgccaaacattaacatttgagtcagtggactgggagaggcagacccaccctcaatctgggtgggcaccatctaatcggctgccagcaaggctagaaaaaagcaggcagaaggatgtggaatgaacaacctgctgagtcttctggccttcatgtttctcccatgcaggatgcttccttccctcgaacatcggactccaagttctttggtttttggactcttagacttacaccagtggtttgccaggggctctcggacctttggccacagactgaaggctgcactgttggtttccctacttttgaggttttgggacttggactggcttcctagctcctcagctggtagacagcttagtgcaggacttcaccttgtgatcgtgtgagtcgattctcccaataaactccccttcatatatacatctatcctattagttctgttttttagagaacactgacaaatataccaatctagtggctgtttgacttcatagagtctagattttttgataccacattcattaatgtctgcagccccatgggtgaatagaaatcccatgaaacatttttatctgagccttggaatttctcctgctagggagggcaggccttttctgtctacttcccgaacttctcctcaaaccccaaccgtacaggaaacctcatacgacgggtgcatgttatccagtgatcttccttccttccttcaacaaatatgtattgaaccccttccatgtgccaagccctgtgatattaaaatgacaattaaaatagagtgatcaatgccatgataggcggtgtgaatgcattgcagggagctctccttagtttagaggtcagggatgactccagaggatgggacatttaacatttaagctaagatatttatcagattatctagttgagagtggggaggaaggtgggagttagagttggccatttggagcgaggaggtggggatggttaatgggtacaagaaaaacagaaagaatgaataagacctactatttgacagcataatagggtgacctatagccaacaactaacttaatggtatatttttaaataacttaaagaatataattggattgtttgtaactcaaaggataaatgcttgagagaaggggtaccccattctccatgatgtgcttatttcacattgcatgtctgtatcaacacatctcatgcaccccataagtatatacacctactatgtacccacaaaattttttttttaattagagctagccatttagagaattaaaagaagccagagtaattgacaaccactctatgggggtttacttcctgaagccttataaacaccatcacatgacatctgtatcccacagtttccatggggaactggttccaggacctcccacagataccaaaattcaggatgctcaagtccctgatatacaacggcctagtatttgcatataacctatacacatcttcctatatactttaaatcatctctagattacttataacacctaatacaaagtgaatgctaatgtaaatagctgttatactttactgtttagggaataatgccaagacaaaagtctgaccatgttcagtacagacgcaatttttaactagtattttcaatccatagttggttgaatccacgaatactgagggccaactgaatgtttagtaaatgttgggttctatttttattatcatcagtccttagcaattccagaagctagtcaatttttgaaataagtgaaatctgtccaaa

SEQ ID NO: 66718 - DNA, 1407 bp, Homo sapiens
cctcctacctcagcttcccgagtcactggaactacaagtgcgtgccaccacatccagctaattttttgtattttttgtacaggtggagtttcaccatgttgcccaggctggtctcaaactcctgggctcaagtgatcagcctgccttagcctcccaaagtgctgtgattaccagcatgaatcaccatacccagctgatttgggattttgaagtcatgatttaggcttttaaacagttaatctaaaattacatcaatctaatattggctgagtattggggatagatatgttttctgatttgctcatatcatctgatacatgtgtacctcttagatttcactattatttccaagtagtagattgtaaatagaaattctcctgttatagcaatttcttaattatgcataggggtagtagaaagaaaatttgaaaataagagtaattcatctaaaaatatatgttagccattgtttttcaactaaacctaagaatttaaccagaactcctgataagaagtcaagtcaagatgctaactggaattttacctttttacaatatctgtgaaggtggtaattagcacttacttgatccagggtgggctggtaattaaaagaaggaagaatatgggcagaaagcccaacagaacacagaagactgattttcaacctttattttttttaagcagcagatttccaatgaagcctcatgtagaaggtcaatataaaaatcagatcttaaggtataaaggttaaacagagcttctctaaattaggcagagctggtatccctccaactttctcccctcagggactgttgtggaagtaacactatagaacttattattttaattctatgcaataatgcattttgtttatgtaataatgtatttgtaacaatgcatttatatatgtaataatatatatgtaataatgcatttaatagtttgcaaagctctgtcatttcatcacatcacttgatttttataacaattctatgagctaagcagactagatattactattattattgccactttgcaaatgacttgcataagatcatctggcttataaatgacagatctgggatccaaaaycaagtctttaaagatcttatactatgatccactatgaaatccttcacttgtcagatcattgcattcttgttcagagttagagtatatgagatattctggatagcatgccaaaggataatagcaattatcattaaattaaaaataaaaaagcaaataaatgagtttttacatttgaccccatatgtaagaaggtaagtaaatatttttgatataaaattaaactcatatgaatagtcagtgtaggcaataatcaaataaacactttccctgctaagcctcaccaagtcaatccctacaaactttaggtaaatacaa

SEQ ID NO: 66719 - DNA, 1407 bp, Homo sapiens
cctcctacctcagcttcccgagtcactggaactacaagtgcgtgccaccacatccagctaattttttgtattttttgtacaggtggagtttcaccatgttgcccaggctggtctcaaactcctgggctcaagtgatcagcctgccttagcctcccaaagtgctgtgattaccagcatgaatcaccatacccagctgatttgggattttgaagtcatgatttaggcttttaaacagttaatctaaaattacatcaatctaatattggctgagtattggggatagatatgttttctgatttgctcatatcatctgatacatgtgtacctcttagatttcactattatttccaagtagtagattgtaaatagaaattctcctgttatagcaatttcttaattatgcataggggtagtagaaagaaaatttgaaaataagagtaattcatctaaaaatatatgttagccattgtttttcaactaaacctaagaatttaaccagaactcctgataagaagtcaagtcaagatgctaactggaattttacctttttacaatatctgtgaaggtggtaattagcacttacttgatccagggtgggctggtaattaaaagaaggaagaatatgggcagaaagcccaacagaacacagaagactgattttcaacctttattttttttaagcagcagatttccaatgaagcctcatgtagaaggtcaatataaaaatcagatcttaaggtataaaggttaaacagagcttctctaaattaggcagagctggtatccctccaactttctcccctcagggactgttgtggaagtaacactatagaacttattattttaattctatgcaataatgcattttgtttatgtaataatgtatttgtaacaatgcatttatatatgtaataatatatatgtaataatgcatttaatagtttgcaaagctctgtcatttcatcacatcacttgatttttataacaattctatgagctaagcagactagatattactattattattgccactttgcaaatgacttgcataagatcatctggcttataaatgacagatctgggatccaaaatcaagtctttaaagatcttatactatgatccactatgaaatccttcacttgtcagatcattgcattcttgttcagagttagagtayatgagatattctggatagcatgccaaaggataatagcaattatcattaaattaaaaataaaaaagcaaataaatgagtttttacatttgaccccatatgtaagaaggtaagtaaatatttttgatataaaattaaactcatatgaatagtcagtgtaggcaataatcaaataaacactttccctgctaagcctcaccaagtcaatccctacaaactttaggtaaatacaa

SEQ ID NO: 66720 - DNA, 527 bp, Homo sapiens
catggaaattcaaaccaagtcaacattaggtataacataaaaacttctaaacaaattttagattgaaatttkgaaccaggaatagttacatatgaaaatatcagtatgacttgagactaacatagaacaaactattactgaaattccgcaagttgtgcagaaaacaaaaaaaaagacatgaattttatctgcacaatttctaacctgtattagtgtcacaacccccaaaattagagtgaaaatgcaagcccagggagaagagaaatcaatgacctttagaattcacagcattttttctagtgtcgtttttaacttattttcccaaatggattctcaacaaaataaggcaaaagtaaaacaaatgaataacccttatcccatttatccctttgagatggatgagaacttgttttgtttcattttgcttttttacctttgtccttaggtgagaccactccaagttatttcaagcaagtgggatttggtatcatgttaagggacatgggggaattttcacaccagtcttt

SEQ ID NO: 66721 - DNA, 527 bp, Homo sapiens
catggaaattcaaaccaagtcaacattaggtataacataaaaacttctaaacaaattttagattgaaattttgaaccaggaatagttacatatgaaaatatcagtatgacttgagactaacatagaacaaactattactgaaattccgcaagttgtgcagaaaacaaaaaaaaagacatgaattttatctgyacaatttctaacctgtattagtgtcacaacccccaaaattagagtgaaaatgcaagcccagggagaagagaaatcaatgacctttagaattcacagcattttttctagtgtcgtttttaacttattttcccaaatggattctcaacaaaataaggcaaaagtaaaacaaatgaataacccttatcccatttatccctttgagatggatgagaacttgttttgtttcattttgcttttttacctttgtccttaggtgagaccactccaagttatttcaagcaagtgggatttggtatcatgttaagggacatgggggaattttcacaccagtcttt

SEQ ID NO: 66722 - DNA, 746 bp, Homo sapiens
ggatcccttccttacaccttatacaaaaattaattcaagatggattaaagacttaaacgttagacctaaaaccataaaaaccctagaagaaaacctasgcattaccattcaggacacaggcgtgggcaaggacttcatgtctaaaacaccaaaagcaatggcaacaaaagccaaaattgacaaatgggatctaattaaactaaagagcttctgcacagcaaaagaaactaccatcacagtgaacaggcagcctacagaatgggagaaaattttcacaatctactcatctgacaaagggctaatatccagaatctacaatgaactcaaacaaatttacaagaaaaaaacaaacaaccccatcaaaaagtgggcgaaggacatgaacagacacttctcaaaagaagatatttatgcagccaaaaaacacatgaagaaatgctcaccatcactggccatcagagaaaaatgaacatttcaaagatgtgcttccaaatgccaaatcatcactaaaaagctctgtggcatagaggaaatttcacaaccttttagtgcctcaattttgtggaagaatggttaggaggctattgcaataacaaaagaaaatttgaatagctgtatccaacatgaaaagattgctagtagaattaaatgagttactataggtaaaacaatcagggaagtaattaaagagaatctgcactaacattgttttattaatttaaaatatctgtacacaatcctttgac

SEQ ID NO: 66723 - DNA, 746 bp, Homo sapiens
ggatcccttccttacaccttatacaaaaattaattcaagatggattaaagacttaaacgttagacctaaaaccataaaaaccctagaagaaaacctacgcattaccattcaggacacaggcgtgggcaaggacttcatgtctaaaacaccaaaagcaatggcaacaaaagccaaaattgacaaatgggatctaattaaactaaagagcttctgcacagcaaaagaaactaccatcacagtgaacaggcagcctacagaatgggagaaaattttcacaatctactcatctgacaaagggctaatatccagaatctacaatgaactcaaacaaatttacaagaaaaaaacaaacaaccccatcaaaaagtgggcgaaggacatgaacagacacttctcaaaagaagatatttatgcagccaaaaaacacatgaagaaatgctcaccatcactggccatcagagaaaaaygaacatttcaaagatgtgcttccaaatgccaaatcatcactaaaaagctctgtggcatagaggaaatttcacaaccttttagtgcctcaattttgtggaagaatggttaggaggctattgcaataacaaaagaaaatttgaatagctgtatccaacatgaaaagattgctagtagaattaaatgagttactataggtaaaacaatcagggaagtaattaaagagaatctgcactaacattgttttattaatttaaaatatctgtacacaatcctttgac

SEQ ID NO: 66724 - DNA, 680 bp, Homo sapiens
attaaaaaatcacattaatttgtaattttaaatggtaattaaagctattgtgagggctcttttatcggccaaacttgtgaacaaaaaacagctcaaatttatgtgtaaataaaatatattgagatgaagcctttcattcaatgtgtgattttcagttcaaaaaaacacactgatgttcaagaacaaagactggtacaataactatctacaaaatgcttttgttactagattttaattccttcatcaaacagacacagtcaaagttgatagtgtcactagatctagaggtctatcaatatccttcccaccatttaatatgttcttaatctcagggaaattctaaatcatattcttctaaactgtacagttgactcctgaaaaacacaaggtttagggccatcaaacctccctaacccctccccaccaccccagcacagtcaaaaattcacatrtaactttggactccccaaaactaaactaacagcctactgttgactggacaatccttaacacatatttcatacgctgtatgtattttacaccgtagttttacaatgaagctagttacagaaaagaaagtgttattaagaaaattatagggaagaaaaaatacgtttacagtactacagtatatttatttctctcataagtttacaatcctgtgtttacaagatggatcc

SEQ ID NO: 66725 - DNA, 680 bp, Homo sapiens
attaaaaaatcacattaatttgtaattttaaatggtaattaaagctattgtgagggctcttttatcggccaaacttgtgaacaaaaaacagctcaaatttatgtgtaaataaaatatattgagatgaagcctttcattcaatgtgtgattttcagttcaaaaaaacacactgatgttcaagaacaaagactggtacaataactatctacaaaatgcttttgttactagattttaattccttcatcaaacagacacagtcaaagttgatagtgtcactagatctagaggtctatcaatatccttcccaccatttaatatgttcttaatctcagggaaattctaaatcatattcttctaaactgtacagttgactcctgaaaaacacaaggtttagggccatcaaacctccctaacccctccccaccaccccagcacagtcaaaaattcacatataactttggactccccaaaactaaactaacagcctactgttgactggacaatccttaacacatatttcatacgctgtatgtattttacaccgtagttttacaatgaagctagttacagaaaagaaagtgttattaagaaaattatagggaagaaaaaatacrtttacagtactacagtatatttatttctctcataagtttacaatcctgtgtttacaagatggatcc

SEQ ID NO: 66726 - DNA, 1113 bp, Homo sapiens
acacttgaatgacaccagaaatgtaacatttccaagtgggttgattcagagacctggatgacagttaaggtccaaggtcagctaaagaagccataaaaaaagacaataaatgacaaaatttggctgggtgtggtggttcctgcctataatcctagcactttgggaggccaaggcaagaagatagcttgaggccagatatgaagaaaaccccgagcaacatatcgagacccccatctctacaaaaattaaaataaaagaattagcctagcataatggcacatgcctgtagtcccagctacttagaaggctgaggcagaaggatcccttgagcccaagtattcagggttacagtggctatgattgcagaagaaaaaaattttttaagaaggaatgggagaaaatcaaggaaacttcttttaattatcaaaagacatttgtattactattactacaccattgaaaaactgaagacaatataagcctccaaaataaggcacagcaacatattgttttgagagaatattatgatgccaataagtagtttaaatgaaatataggcagataaatgcttatataaaacaatgctaaatgaaaaagtagaaagcaatgttatagaactcattgatcacaactatataaagatatatgagcccaaattaaaaagcagaagatggaataagcatagttgctgtattaaaacaaaataattcaatagatttttctgaaatacttatatgtttcatttaaatgcttagtatttaaaataatgggtgttagtattgaattcaattaaaaaattccaacagttatttgtaagtaaaattataccttagatgggcttggtaattactaytcaaaagttcatagcactagttccttttataaaaagaactgaaacatgtgtaacaaaaattatcaagctataatgtctttgcttcatacgttcaaatttttatgttttgtgctttgtttgtttgtttttaatatgatatacctgcactgactaacatagtgttattgtatgcttgtaatggtcctgtctttaaaacacagatcactgggacttgactttctagttccttttctggactaaaatttcctaatgtcctttat

SEQ ID NO: 66727 - DNA, 640 bp, Homo sapiens
ttgtttaacttagattgagggctcctggaaacatgggctctaaggaggaggaggagatgctaacccaaaggaaaatcttaatactcttaggaacagcaaagcaggcaatggttgatgggtggtgggtatgcaaccagcaaatgctcattattcatatgtttattcagattgagctctgtgatggttaattttgtgtcaacttgatttggctaaggtatacccagctagctggcaaaacattatatctgggtgtgtcggcgagggtgtacttggaagagattagcatttgattaagtaggctgagtawagaagatctgacctcaccaatgtagggagtcatcatcccattgttgagagcccaacaggacaaaaaggtaaaggaaggatgattcactctctcttcttgagctgggacatctatttcctctgtactcagacatcagagatcctgggtcttggcctttggacttcaggacttacaccagtcctccccttaggcctttagagccggtctgagagttacactcttggctcccctggttctcaggtcttggactggattacaccactggctttcctggttctctagcttgcagaaagcagatggggtaacttcatggcctccgtaattacatgagcc

SEQ ID NO: 66728 - DNA, 894 bp, Homo sapiens
ggcaatttatgaagctgggaagatagccagggaccagatgaggaagcactttttatgctgtgctaaggagtatgatttttaccctacagctgatgaaggcagggtgtcaaaatatttaagcagaggagagacaaaagcagacctgtgttttagaaagaaaactctaacagcagggtgayggatggacaggacacaccactcaagaagctatttcagtaattcagacaaaaggtggtgcagactcaaaataagaccatggcaaagaggaatagggaagaggaaggtttcaaaaatattaagaaagtggaatctaaatggaatagggtcagttcagaaaagcaaagattcataagctttgatatggagaagagaagaaagtttaaaccaaacccaaggcaggtggtaaggggtgtaccagaaatgggaaaaaagaacacactgaaagaaatgatgggcatatgagaaacattgtaccttctttctaacctttttatgggctagtctattccatggtctctgagtatgttaacccaaacaaataaaggaagaccccaactttccagggtgtgagcataagaggctgaaaaataattggtaattaagccttaaaatcaaaggcatactccatttatcctgttatcttattacaatgtgtttcaattcaacctatcacacaaaaggacaagaattcacttctagtgaagccttaacttgtgaatgctgggccttgttttattatgtatttcattagaagtttttgtgatgttgttttcctttcaattccatgaagaaaaagtaaaaaatgaggaatgtgaacttctcagatgatcctgtgactttgaagccacgtatctaaatatatgatctcttgcttttgcatttagaagccctggg

SEQ ID NO: 66729 - DNA, 1584 bp, Homo sapiens
ggtggatcacctgagatcaggagttcaagaccaccctagccaacatgatgaaaccccatctctactaaaaatacaaaaattagcccagagtggtgacgcatgcctgtaatcccagctactcgggaggctgaggcaggagaatcgcttgaacccaggagacggaggttgcagtgagccaagatcacgccattgcactccagcctgggcaacagagtgagactccatctcaaaaaaagaaaaacaaaaacaacaaaaaagaactacgtattgcacatactccttcaaacatattccttaacttttcctcacaaaaaataaaatattgtctcccaatcccctagaaggccaaaatggaagagaaaaggagatggaacacagggagccaaactatgagggttaatgagagaggagtcaaattccctctgttgtggcataaaccattcagttgcaatagtgaagggcaccagaagagaaaatcatgatcctcttccgcagagaaattaattactttcttagatttgaaacctttccagtgaaaattttcctgttgcccagaagcacctttctaattaatgatctttagtttctcaggtaagctcatgctacaaaaatcccctctcagctctttaagaggaagaggcatttaaggcacgaactgcaggctaataggagagttccatggaggaaatgaactggcagttggagttcatgcatgctactctcatgcatggagccttaggatgaggggccacaagaatctttgccccctagcttggtggacaggagtatgtgctgactcaaggctccagtgcattcttgaaaaatcactgcacagttagcttctaaattagtgagaacaattgtaaagatcaatagaaaacaccaagctctaaagacatttcctacagcataatttgaagaagtagaatacatgaagcagtgagccatagaaaatcaggtcttagmactaattagaaaatttctaagctttctctcttaagaaaatcagttcattggttaaggggccaatttgaaacatggttggtttacagattttcatctggactgaaaaaaattacagccagatatttaaaccaacattctaaataaaattgtgaaactgattaattacttactgttaataaaattgtaatgaaaaatcgattattcactagtagttaaaagctgttttccatatgtcagaataaagaaaacctataaagcagaaaaaaataaaacacccactagagtttcttgtttaatcagaaaagggggaaagaagcttaatactgtgtccccagaaacataacttcctcccttaagccctcattttataacatttactttcaacaatgtaataaacgtttacctcatgcttaactatgaatactaactagcaaggcaatcttcttctcttatagcttaatcccatctgacccagaatagagatgacccaaagagctattcgatgtttatctatatgtgtgtatggcttttttcaagtaagtagtttaggagtcatttttgctccccctatcaatggaaaatcctgctgaacttcatccagattcacccatctcattt

SEQ ID NO: 66730 - DNA, 1584 bp, Homo sapiens
ggtggatcacctgagatcaggagttcaagaccaccctagccaacatgatgaaaccccatctctactaaaaatacaaaaattagcccagagtggtgacgcatgcctgtaatcccagctactcgggaggctgaggcaggagaatcgcttgaacccaggagacggaggttgcagtgagccaagatcacgccattgcactccagcctgggcaacagagtgagactccatctcaaaaaaagaaaaacaaaaacaacaaaaaagaactacgtattgcacatactccttcaaacatattccttaacttttcctcacaaaaaataaaatattgtctcccaatcccctagaaggccaaaatggaagagaaaaggagatggaacacagggagccaaactatgagggttaatgagagaggagtcaaattccctctgttgtggcataaaccattcagttgcaatagtgaagggcaccagaagagaaaatcatgatcctcttccgcagagaaattaattactttcttagatttgaaacctttccagtgaaaattttcctgttgcccagaagcacctttctaattaatgatctttagtttctcaggtaagctcatgctacaaaaatcccctctcagctctttaagaggaagaggcatttaaggcacgaactgcaggctaataggagagttccatggaggaaatgaactggcagttggagttcatgcatgctactctcatgcatggagccttaggatgaggggccacaagaatctttgccccctagcttggtggacaggagtatgtgctgactcaaggctccagtgcattcttgaaaaatcactgcacagttagcttctaaattagtgagaacaattgtaaagatcaatagaaaacaccaagctctaaagacatttcctacagcataatttgaagaagtagaatacatgaagcagtgagccatagaaaatcaggtcttagaactaattagaaaatttctaagctttctctcttaagaaaatcagttcattggttaaggggccaatttgaaacatggttggtttacagattttcatctggactgaaaaaaattacagccagatayttaaaccaacattctaaataaaattgtgaaactgattaattacttactgttaataaaattgtaatgaaaaatcgattattcactagtagttaaaagctgttttccatatgtcagaataaagaaaacctataaagcagaaaaaaataaaacacccactagagtttcttgtttaatcagaaaagggggaaagaagcttaatactgtgtccccagaaacataacttcctcccttaagccctcattttataacatttactttcaacaatgtaataaacgtttacctcatgcttaactatgaatactaactagcaaggcaatcttcttctcttatagcttaatcccatctgacccagaatagagatgacccaaagagctattcgatgtttatctatatgtgtgtatggcttttttcaagtaagtagtttaggagtcatttttgctccccctatcaatggaaaatcctgctgaacttcatccagattcacccatctcattt

SEQ ID NO: 66731 - DNA, 650 bp, Homo sapiens
aattatgcaccacatccccaactgacaggctgttcctgcctctggggcagggtggcccatttgcaggacaagtgaactcctttctcatccctaccctaaggattttctccttgaaagagcaaaaagtcacagagaattaagggcttgagagggaataagggatgagacatattggaggacataatggcaaaagctatgcgatttgggttatttccttgtaagkgaaaaacaaaaataggaatggaaaatttgataaaccccaagtcctccactgctttgcaagaaaagcctgaaagaattttgagtctggaggacgagctcagaggaccctcatatatttacaaccttatctgaattgttaccctttgaaaaggagagaagtgatagttataaattgatgaacttagaaatgtcagggccccattattagaagcaagtaatgtgagactcttctggagtttcatgtagcttactatggctgtgaggtcatggcagagctctaggctgacctctgagtacggaaatctctcccctgcacttcccgttttacaggatttgcaggcagcagacactaaagacttgacatgtggaactccttgctggtggagaaagatgctgcaggcaaggtggagacagagtgaaactaaagg

SEQ ID NO: 66732 - DNA, 690 bp, Homo sapiens
tgaaagaatcataaatgtaacaattatttcccacaatgattgctttcacaatttcttgttctctgcaggatccttgttttttgtttttttttctttcagctcattgcaacaatcacacaattatagtgtgattcatatttaagattaaattttgcatgtctactgaagtatataaaatctctattttcataattatgaactatatatatcagtcaacttttaaagtaagtagtattaattgcaatatatgctctataagtgttatttatttagcttaaattttacaagcctaatcaatgacataaagcagagtgattaaaagtaattttaagatggacataaatagtacaatatttgaattgggaaacttaatctgtatgatggaaaagagataagaaataaaaacaattctcatgtggtgtatttaatttaaccttaaamattatgtcatcctccagaagctatttctggctttaagtgctttgaaatgtttagtaatgaactaaatgaagcttttttgggaaccctgatttaacagagtataggttgagttttaggagagggaaaaagctctctctcttcttgcctactccctactccacctcaaatctaatgaagagaagagagagtgaaagcaagtagggaagaggagaggaagaactaaaggagagtgagggaacagttccagag

SEQ ID NO: 66733 - DNA, 603 bp, Homo sapiens
tcctatgacgatttgtttaaatattatgaattttttgcaaaatgattaaatacaatgatgaaattgaaaataaaaattatagtatttaaaaaagctaaggtctgacaagatggctgaataggaacagctccagtctgcagctcccagtgaaatcaatgcagaaggcaggtgatttctgcatttgcaactgaagtacccagctcatctcattgggactggttagacagtgggtgcagcccacggagggcgagccatagcacagtgggatgtcacctcatctgggaagcacaaggggatgggaactccctcctctagccgagggaagccaagagggactgtgcagtgaggaatggtacattccggcccagatactatgcttttccccttgtctttgcaacctgcagaccaggagattccctcaggtgcctacaccaccagggccctgggtttccagcacaaaactgggcagctgtttgggcagacactgagctagctrcaggagttttttcataccccagtggcacctggaatgccagtgagacagaactgttcacttccctggaaagggggctgaagccagggagccaagcggtctagctcatt

SEQ ID NO: 66734 - DNA, 631 bp, Homo sapiens
tgcttcacaaccattttaaaatctggaatggaagaataattttgaaactggaattacaattaaattataacagaccaaacatgcaatgggctctcaacatcaccaagacagtagcagggggcagtaatctaaagatgtctgtgttttaaagcaatgtgtcatttgattttccacatactggaatattttgcatataattaggctctttttaaaaaggcaacacattattgaaagaaaaaaaaaacatgggaatcaggctgttccatgagtattttaggaaggaaaagtacacttgaaaaaatattcatttcactctattggtattgttttcccctaattttaagaatgagaagatgatagaaaaggactttgtctarcactttacaatttgcattcttgtaccttgatagacataacagtgagttgattttgtcaggtgtaaacagtgttttcacacttcttatagaagtgtgccttcattattattcaacatttaattaagtcataacaccagaaaagatctggtagtgagtttcagcacccatactatccatagctaatgacaaaaacagagtgctagatcttgaacctgtaaataatatttcaggcagaaaatatggtattgatataa

SEQ ID NO: 66735 - DNA, 857 bp, Homo sapiens
caactttataccctaagctatgtgtttattcttttggtatctgtaacagctttgcattttaccactaactcatgatgtaattgtattgaagacatttaaaactgcaattaaactcaatacacatagttcctatgctacaaacaacttactataagaagccagtaccacattcacacatgtacagacaaaaacagtgagctatgatcactgaatgcctgaaagacattgtattatgatgctgactgtaatatgcactataggtggagatgttaaaatttgaaagaaatggtatattcaacaatgaaacatagtatgtgtggagaagaaatagctaatgttaagaatagtgtttgttctccagtcatatatatatatatatatatatatatatgtatacatgaatataaatatatacacatttatatttatatatacacatatatgtgtgtatatatacatatacacacatatatgtgtgtatatatacgtayacatatatgtatatatgtatatatacgtatacatatatgtatatatatgtatatatacacacacacatatatatgtgtgtatatatatttctttttaactgctccttgcaaagctgggctaactcataggcagtgcgcctagaatcaacctccagagtcttttacatgaatgtcttaggaatatggaggaacatattgacaaatgttgcctttgtagaggcttaactatcaagaaataattggaaattgggtcaaactgatgtactagaagcaagaagctcatgtgtactgctctcatggagaggaaagaaaagggctagtgaacactgacccaacgagctgatcacttaagaaatcgctttggga

SEQ ID NO: 66736 - DNA, 857 bp, Homo sapiens
caactttataccctaagctatgtgtttattcttttggtatctgtaacagctttgcattttaccactaactcatgatgtaattgtattgaagacatttaaaactgcaattaaactcaatacacatagttcctatgctacaaacaacttactataagaagccagtaccacattcacacatgtacagacaaaaacagtgagctatgatcactgaatgcctgaaagacattgtattatgatgctgactgtaatatgcactataggtggagatgttaaaatttgaaagaaatggtatattcaacaatgaaacatagtatgtgtggagaagaaatagctaatgttaagaatagtgtttgttctccagtcatatatatatatatatatatatatatatgtatacatgaatataaatatatacacatttatatttatatatacacatatatgtgtgtatatatacatatacacacatatatgtgtgtatatatacgtacacatataygtatatatgtatatatacgtatacatatatgtatatatatgtatatatacacacacacatatatatgtgtgtatatatatttctttttaactgctccttgcaaagctgggctaactcataggcagtgcgcctagaatcaacctccagagtcttttacatgaatgtcttaggaatatggaggaacatattgacaaatgttgcctttgtagaggcttaactatcaagaaataattggaaattgggtcaaactgatgtactagaagcaagaagctcatgtgtactgctctcatggagaggaaagaaaagggctagtgaacactgacccaacgagctgatcacttaagaaatcgctttggga

SEQ ID NO: 66737 - DNA, 857 bp, Homo sapiens
caactttataccctaagctatgtgtttattcttttggtatctgtaacagctttgcattttaccactaactcatgatgtaattgtattgaagacatttaaaactgcaattaaactcaatacacatagttcctatgctacaaacaacttactataagaagccagtaccacattcacacatgtacagacaaaaacagtgagctatgatcactgaatgcctgaaagacattgtattatgatgctgactgtaatatgcactataggtggagatgttaaaatttgaaagaaatggtatattcaacaatgaaacatagtatgtgtggagaagaaatagctaatgttaagaatagtgtttgttctccagtcatatatatatatatatatatatatatatgtatacatgaatataaatatatacacatttatatttatatatacacatatatgtgtgtatatatacatatacacacatatatgtgtgtatatatacgtacacatatatgtatatatgtatatatacgtatacatataygtatatatatgtatatatacacacacacatatatatgtgtgtatatatatttctttttaactgctccttgcaaagctgggctaactcataggcagtgcgcctagaatcaacctccagagtcttttacatgaatgtcttaggaatatggaggaacatattgacaaatgttgcctttgtagaggcttaactatcaagaaataattggaaattgggtcaaactgatgtactagaagcaagaagctcatgtgtactgctctcatggagaggaaagaaaagggctagtgaacactgacccaacgagctgatcacttaagaaatcgctttggga

SEQ ID NO: 66738 - DNA, 857 bp, Homo sapiens
caactttataccctaagctatgtgtttattcttttggtatctgtaacagctttgcattttaccactaactcatgatgtaattgtattgaagacatttaaaactgcaattaaactcaatacacatagttcctatgctacaaacaacttactataagaagccagtaccacattcacacatgtacagacaaaaacagtgagctatgatcactgaatgcctgaaagacattgtattatgatgctgactgtaatatgcactataggtggagatgttaaaatttgaaagaaatggtatattcaacaatgaaacatagtatgtgtggagaagaaatagctaatgttaagaatagtgtttgttctccagtcatatatatatatatatatatatatatatgtatacatgaatataaatatatacacatttatatttatatatacacatatatgtgtgtatatatacatatacacacatatatgtgtgtatatatacgtacacatatatgtatatatgtatatatacgtatacatatatgtatatatatgtatawatacacacacacatatatatgtgtgtatatatatttctttttaactgctccttgcaaagctgggctaactcataggcagtgcgcctagaatcaacctccagagtcttttacatgaatgtcttaggaatatggaggaacatattgacaaatgttgcctttgtagaggcttaactatcaagaaataattggaaattgggtcaaactgatgtactagaagcaagaagctcatgtgtactgctctcatggagaggaaagaaaagggctagtgaacactgacccaacgagctgatcacttaagaaatcgctttggga

SEQ ID NO: 66739 - DNA, 857 bp, Homo sapiens
caactttataccctaagctatgtgtttattcttttggtatctgtaacagctttgcattttaccactaactcatgatgtaattgtattgaagacatttaaaactgcaattaaactcaatacacatagttcctatgctacaaacaacttactataagaagccagtaccacattcacacatgtacagacaaaaacagtgagctatgatcactgaatgcctgaaagacattgtattatgatgctgactgtaatatgcactataggtggagatgttaaaatttgaaagaaatggtatattcaacaatgaaacatagtatgtgtggagaagaaatagctaatgttaagaatagtgtttgttctccagtcatatatatatatatatatatatatatatgtatacatgaatataaatatatacacatttatatttatatatacacatatatgtgtgtatatatacatatacacacatatatgtgtgtatatatacgtacacatatatgtatatatgtatatatacgtatacatatatgtatatatatgtatatatacacacacacatatatatgtgtgtatatatatttctttttaactgctccttgcaaagctgggctaactcataggcagtgcgcctagaatcaacctccagagtcttttacatgaatgtcttaggaatatggaggaacatattgacaaatgttgcctttgtagaggcttaactatcaagaaataattggaawttgggtcaaactgatgtactagaagcaagaagctcatgtgtactgctctcatggagaggaaagaaaagggctagtgaacactgacccaacgagctgatcacttaagaaatcgctttggga

SEQ ID NO: 66740 - DNA, 765 bp, Homo sapiens
agcctgacaatgagtaatatgcagtttgatgtgaaaattagaaaactggcagatgaacctgcaaaagggaaattggatttccagagagacgaatgggaggccatgcggctgaatagagttcataagatgcaaacgcatgcagggagctgcagcccccactcgttcccagtgtgcaaaggaagttcctgcatcgcgtgcctattatttatttatttatgggcaaaaagcgagagttccatggtgtggtgtttattatcaaaatggatggattcaatatcaagcaatgatgtgttcaaaatgaaagccacatcattaagtgtcacaggcgtttattaacacagttccctccttagtcgaataaaacagccgttatcccaccaggtcccrcactctcgcttgccttttttctttgtctggctttggcagagtctccgtttctggagacagcttggccgacagcaaatctgggcaaagcagagatatccaagggaaggtaatgagggatggaagactcctagacagtagttttagcaaagaggagtccatcctctaaaagtacaagcattacttgttaactgactgcactctcacaaccatctgtgccattagcttgtccatttattgtctatcccttttctcctctctctaacctcttctctcattgcatattattaaaatcaagaaatggcttccattctgtgagctgtgacttctaacgtggccacatagctggtggagaggtgacaaccttcatctccaaggatc

SEQ ID NO: 66741 - DNA, 796 bp, Homo sapiens
ctttagaagggtctcgtaagagttccaagaactcagtgacttcagaattcaggtaatcagactggcagatgaatttttccttttagttgatggagcaagtataggagtttggccctgactttggcaggaatgtaatgacaccatcctcttgccctaggttgagtactcctatcagtccttgaagtaactgatcacagccaaaaggccactcttcaccgtgattatgatttctgtctttaattttcacatcatctatttagtactgcagctacgggcttactggcagctccagacaccagtgtccttgtgaacaaggctctggtagatttcaggcgagtttacacatccctagaggcagtacagcaaacggcaaacagctatttatgttaggtgaagatggactgcktcaaagagtctggacagcaactgagaaaaatgcatttgtcaaggttttaatgcatataattttccagcaaaggtgtttacttactccagtaacatactaagtaaactgcattaggaaaagcctctttagtattttacatccttttctataattgaccttagattctagattgcttaaaagaagtcgcccaagtcagagagagctttggggatacctggaattctcatttttaatgtgtgccccagggttgggaacacgctttgagaagctgtgctctagtgcctggttcctggtgctgaacccaaggatatgtgaaccagctggagacctgtaagagggagggcagaccactcaagttgttgcatttcataaattaaatcccttcatttt

SEQ ID NO: 66742 - DNA, 1107 bp, Homo sapiens
atagaaaccgctttagctgaggaatagaccagctaatgatttataacacctgacatttatatagcattttgcagttaacaaaatgcttcagcatacatctcatgtgatcttataatcaccccatgacatagaaagagactattaattatccccattttactgacaaggaaactgagactcctgcgaggctttaagttgccaggatctctggaggagtgaagctatgggagactaaaagacacccaggtggaagtggagcaggggacaaatggcgtgcgattgaagccggtaggacttgccaataaagcagrgaagggaaaacaggagcacctgcagcacggcgggtggagctgggtgggtgtgtcctgtttagcacggcccttctaaagacaccctggacccccctacataaatgtgcttctgccagcatctcctgttaattgacgagcccacctttttctgcaggtaatcatggtggcacccataaccagaatcttttcatttcagatcttctgtttcatattgccacctcccaaggcagtaattcagagcaaactccccaggtgattaatcctgaaaggtgctttttgtttttttaaggcgtggcagggggacagggaagttagtaaaacatttaaacatttgttcagacatagtttgcaaacttttaaatttgtatgtattgagtaggacacaatacaattttaatacaagggaattaaatacttgactatggtaatttttatttttgcacatttagcaattcatgatttgctaatactggtattttactgatgaggacaatctgaatgaaatgcacacttgaccaatcaagctataaatgcagactgggcatattctgtggtttaaatgagaggcatacacaggaagtatttagttgtttatgattggaaatctaccatgtactatttcttattactaatagaaattgtgccttataaaggagtggccatttgattgctgggttaggagtatacatggaaggcccggctgttcatttttctaactgcaggctatgcttccattggagctaaagcaaagaaaaaaatagtttgctcggaggctctacagaactgacaatatgca

SEQ ID NO: 66743 - DNA, 1107 bp, Homo sapiens
atagaaaccgctttagctgaggaatagaccagctaatgatttataacacctgacatttatatagcattttgcagttaacaaaatgcttcagcatacatctcatgtgatcttataatcaccccatgacatagaaagagactattaattatccccattttactgacaaggaaactgagactcctgcgaggctttaagttgccaggatctctggaggagtgaagctatgggagactaaaagacacccaggtggaagtggagcaggggacaaatggcgtgcgattgaagccggtaggacttgccaataaagcagagaagggaaaacaggagcacctgcagcayggcgggtggagctgggtgggtgtgtcctgtttagcacggcccttctaaagacaccctggacccccctacataaatgtgcttctgccagcatctcctgttaattgacgagcccacctttttctgcaggtaatcatggtggcacccataaccagaatcttttcatttcagatcttctgtttcatattgccacctcccaaggcagtaattcagagcaaactccccaggtgattaatcctgaaaggtgctttttgtttttttaaggcgtggcagggggacagggaagttagtaaaacatttaaacatttgttcagacatagtttgcaaacttttaaatttgtatgtattgagtaggacacaatacaattttaatacaagggaattaaatacttgactatggtaatttttatttttgcacatttagcaattcatgatttgctaatactggtattttactgatgaggacaatctgaatgaaatgcacacttgaccaatcaagctataaatgcagactgggcatattctgtggtttaaatgagaggcatacacaggaagtatttagttgtttatgattggaaatctaccatgtactatttcttattactaatagaaattgtgccttataaaggagtggccatttgattgctgggttaggagtatacatggaaggcccggctgttcatttttctaactgcaggctatgcttccattggagctaaagcaaagaaaaaaatagtttgctcggaggctctacagaactgacaatatgca

SEQ ID NO: 66744 - DNA, 1107 bp, Homo sapiens
atagaaaccgctttagctgaggaatagaccagctaatgatttataacacctgacatttatatagcattttgcagttaacaaaatgcttcagcatacatctcatgtgatcttataatcaccccatgacatagaaagagactattaattatccccattttactgacaaggaaactgagactcctgcgaggctttaagttgccaggatctctggaggagtgaagctatgggagactaaaagacacccaggtggaagtggagcaggggacaaatggcgtgcgattgaagccggtaggacttgccaataaagcagagaagggaaaacaggagcacctgcagcacggcgggtggagctgggtgggtgtgtcctgtttagcacggcccttctaaagacaccctggacccccctacataaatgtgcttctgccagcatctcctgttaattgackagcccacctttttctgcaggtaatcatggtggcacccataaccagaatcttttcatttcagatcttctgtttcatattgccacctcccaaggcagtaattcagagcaaactccccaggtgattaatcctgaaaggtgctttttgtttttttaaggcgtggcagggggacagggaagttagtaaaacatttaaacatttgttcagacatagtttgcaaacttttaaatttgtatgtattgagtaggacacaatacaattttaatacaagggaattaaatacttgactatggtaatttttatttttgcacatttagcaattcatgatttgctaatactggtattttactgatgaggacaatctgaatgaaatgcacacttgaccaatcaagctataaatgcagactgggcatattctgtggtttaaatgagaggcatacacaggaagtatttagttgtttatgattggaaatctaccatgtactatttcttattactaatagaaattgtgccttataaaggagtggccatttgattgctgggttaggagtatacatggaaggcccggctgttcatttttctaactgcaggctatgcttccattggagctaaagcaaagaaaaaaatagtttgctcggaggctctacagaactgacaatatgca

SEQ ID NO: 66745 - DNA, 1107 bp, Homo sapiens
atagaaaccgctttagctgaggaatagaccagctaatgatttataacacctgacatttatatagcattttgcagttaacaaaatgcttcagcatacatctcatgtgatcttataatcaccccatgacatagaaagagactattaattatccccattttactgacaaggaaactgagactcctgcgaggctttaagttgccaggatctctggaggagtgaagctatgggagactaaaagacacccaggtggaagtggagcaggggacaaatggcgtgcgattgaagccggtaggacttgccaataaagcagagaagggaaaacaggagcacctgcagcacggcgggtggagctgggtgggtgtgtcctgtttagcacggcccttctaaagacaccctggacccccctacataaatgtgcttctgccagcatctcctgttaattgacgagcccacctttttctgcaggtaatcatggtggcacccataaccagaatcttttcatttcagatcttctgtttcatattgccacctcccaaggcagtaattcagagcaaactccccaggtgattaatcctgaaaggtgctttttgtttttttaaggcgtggcagggggacagggaagttagtaaaacatttaaacatttgttcagacatagtttgcaaacttttaaatttgtatgtattgagtaggacacaatacaattttaatacaagggaattaaatacttgactatggtaatttttatttttgcacatttagcaattcatgatttgctaatactggtattttactgatgaggacaatctgaatgaaatgcacacttgaccaatcaagctataaatgcagactgggcatattctgtggtttaaatgagaggcatacacaggaagtatttagttgtttatgaytggaaatctaccatgtactatttcttattactaatagaaattgtgccttataaaggagtggccatttgattgctgggttaggagtatacatggaaggcccggctgttcatttttctaactgcaggctatgcttccattggagctaaagcaaagaaaaaaatagtttgctcggaggctctacagaactgacaatatgca

SEQ ID NO: 66746 - DNA, 840 bp, Homo sapiens
ggatcctgcycctaccagccatgtgacctttggcaagttgcataatatctgccttagttcagtgtcatcttcctgtaaaataggattataatagcagcaatacacaggcacgtaaaaattgtatgtgtgaatgtacccaacatgatcaatagcagtgtctgtgacatggtcagccctatggcaatatttgctattattttccattattattattggtgatactgtcactcttctacaatgactcagtgagataaagcatgtgaaagcatgtgagatagtctatcttttttctttctattcctgactttgtctgtgctattctccttgacagcctggtaaacagcactcattcttcatacttttccctgtaaatgtgtgagaaggacagttcatttttttccctgccccaagggactcattttcaaatgaggagacacataaataagaagttaatatatactttatattttcgaaaaataatagatatggagaaaataagagcttcttagaagaattcacaactgtgtaagtgacttctttggtccaaataatacattgttaattatttttttactaattattctgtttattatacactatgagttgccaagtttacttacttctgtatctccagggcttggcattttgctgaatgtatgaaaagtatgggaggtacttaataaggacttactcaccaggcgtggtggctcacacctgtaatcccagcattttgggaggctgaggcaggtggatcacgaggctaggagtttgagaccagcctgaccaatatggagaaaccctgtctctactaaaaatacaaacttagctgggcatggtggc

SEQ ID NO: 66747 - DNA, 730 bp, Homo sapiens
agcraggaccagggctccgcctccccggtcagtgtgagcagcgatgactccttcgagcagagcatcagggcggaaatagaacagtttctgaatgagaagagacagcatgagacccaaaaatgtgatgggtcagtggagaagaaaccagacacaaatgaaaattccgccaagtcactcttgaaatcccaccaagagccgcctacaaaggtggtgcatcggcagggcctgctgggcgtccagaaggagtttgccttccgcaaacctccccggttagcgaagatgaacgtccagcccagaagcctcaggtccaaggtcacaaccacgcaggagaacgagggcagcacgaagccggcaaccccctgccgcccttcagaagcagcacagaataaaggtgggatcaaaaggagcgccagcgctgcaaggaggggaaagcgagtcatgagtgcggcacaggcgtccgaggcgtccgactccagcagcgacgatggcattgaggaggccatccagctgtaccagctgcagaaaacacgcaaggaggccgacggggacctgccccagagggtccaactccgagaggagagagcgcctgaccctcccgcacacagcacaagcagtgccacaaaaagtgccttgcccgagacccacaggaaaacacccagcaagaagaagctagtggccaccaagaccatggaccctggtccagggggcctggacactgaccatgccccca

SEQ ID NO: 66748 - DNA, 587 bp, Homo sapiens
tggccccatcacggccacacccccagttcctcagccacctgactccaggggcccaggcagggccgtggcaggaaccgcgcaggtcccagaagggctgcggcccacagcagcccagcctggccttccccaaagacagaaccagggctgtgctgtgttttcagtccattggcccagagcccttgggcaggrgctccaagggtagtgggaacctcctgagccccattctccaccccagcccaaggcaccatggaaggcccacagtgaagcctcaggaatgtcaggaaatgcctggggctgaaccccagctccacccaccccacccagccctggacccgtggcccagggagactgagccccccaccagccccagccccagtgacgaggaacccaccatctgtgcagaatgatctccaggttgccctcgggggtgggccacagcgaggtgatgttgaccctcagaggggcctccacggtctccaggagggagaagtcactggccaccatggccatggagtaccaggtccctgccaactgagggggccttgagctgcatggaggtccccaccccaccatggctctggtcaccc

SEQ ID NO: 66749 - DNA, 587 bp, Homo sapiens
tggccccatcacggccacacccccagttcctcagccacctgactccaggggcccaggcagggccgtggcaggaaccgcgcaggtcccagaagggctgcggcccacagcagcccagcctggccttccccaaagacagaaccagggctgtgctgtgttttcagtccattggcccagagcccttgggcaggagctccaagggkagtgggaacctcctgagccccattctccaccccagcccaaggcaccatggaaggcccacagtgaagcctcaggaatgtcaggaaatgcctggggctgaaccccagctccacccaccccacccagccctggacccgtggcccagggagactgagccccccaccagccccagccccagtgacgaggaacccaccatctgtgcagaatgatctccaggttgccctcgggggtgggccacagcgaggtgatgttgaccctcagaggggcctccacggtctccaggagggagaagtcactggccaccatggccatggagtaccaggtccctgccaactgagggggccttgagctgcatggaggtccccaccccaccatggctctggtcaccc

SEQ ID NO: 66750 - DNA, 587 bp, Homo sapiens
tggccccatcacggccacacccccagttcctcagccacctgactccaggggcccaggcagggccgtggcaggaaccgcgcaggtcccagaagggctgcggcccacagcagcccagcctggccttccccaaagacagaaccagggctgtgctgtgttttcagtccattggcccagagcccttgggcaggagctccaagggtagtgggaacctcctgagccccattctccaccccagcccaaggcaccatggaaggcccacagtgaagcctcaggaatgtcaggaaatgcctggggctgaaccccagctccacccaccccacccagccctggacccrtggcccagggagactgagccccccaccagccccagccccagtgacgaggaacccaccatctgtgcagaatgatctccaggttgccctcgggggtgggccacagcgaggtgatgttgaccctcagaggggcctccacggtctccaggagggagaagtcactggccaccatggccatggagtaccaggtccctgccaactgagggggccttgagctgcatggaggtccccaccccaccatggctctggtcaccc

SEQ ID NO: 66751 - DNA, 1595 bp, Homo sapiens
caagctatactagcactacattccagacgtggtatagagaaaaggctcccgaagtccagttgttagatatggcagatcatggagaccttggtggaggaggtggcactgagttgggtattgaagagtggaatgggtttgaatgtgaaggaatgggagcaagagcaatgcagccagagggaatttcatgagcagaggtgtgaaagctgatgcagtgtggggtgaaacaaagcagcaagcattttgctttgactggactggggatatggaaggggagtagcagagaacaaggttccgatggcaatgatggctgggtgctccaacacactagaactacyggctgaggtgttgggcctccctgagctgtggacatgaaaccactaagggctttgaagaatgcaggcgagatgactggagcttcaggaaaaggaaccttgaaacactgcttaggaagaatcagggttttggctgaatcagtgcagtggctcacacctgtaatcccagcactttaagaggccgaggagggaggatgcttgagcccagtagattgagactgcagtgagctgtgattgcaccactgcactccagcctgggcgacagagtgagatcctgtcttaaaaaaaaaaaaagaagagggctgggtgtggtggctcatgcctgtaatcccagcattttgggaggccgaggtgggcagatcatgaggtcaagagatcgagaccatcctggccaacatggtgaaaccccatctctaccaaaaatacaaaaattagctgggcgtggtggcacacgcctgtaatcccagcaactcgggagactgaggcaggagaatcacttgaacctgagaggcggaggttgcagtgagccgagatcgagccactgcactccagcctggtgacagagtgagactccatctcaaaaaaaaaacaaaaaacaaaaaacaaaaaacaaacaacaacaacaacaacaaaaacaacaaacctctaattgctgatagaaagaacctatctggttggtggattgaagaggtatctctgtgattcatcctagtagacccatgcattgataacaagaagcaaaatcttcttacaccaggtctaaccaccccacctaagggtaaaagatgactgatgatgccagtcacccatgcagagtgctccatcccctggggccgctgggtcaccagggcccactctcccactcagactcaccagctgtgtcttctgctgccaatgccctgagcatcagttatgccaccgaagtcatcacagacacagtcattgctgctgacacacaggaacttctgcattgggatagtctcccaccaaagttgctatggccaaaacccagggccccttaaacccctgccgctaaagctgatgctactatcttcagtggctgcagaggctgccaaccaggcatccctgccatgatgccaggaccatctcttgaaatgaccaagctactggggccaaagctgctgacaccctgtggcctcaatggcccatgaaggctttagtggaacaatttttgatgttataccctctgtcattgtagcatgtgatcattacaactcaggcacgagcctgtgaggtctgagc

SEQ ID NO: 66752 - DNA, 1595 bp, Homo sapiens
caagctatactagcactacattccagacgtggtatagagaaaaggctcccgaagtccagttgttagatatggcagatcatggagaccttggtggaggaggtggcactgagttgggtattgaagagtggaatgggtttgaatgtgaaggaatgggagcaagagcaatgcagccagagggaatttcatgagcagaggtgtgaaagctgatgcagtgtggggtgaaacaaagcagcaagcattttgctttgactggactggggatatggaaggggagtagcagagaacaaggttccgatggcaatgatggctgggtgctccaacacactagaactaccggctgaggtgttgggcctccctgagctgtggacatgaaaccactaagggctttgaagaatgcaggcgagatgactggagcttcaggaaaaggaaccttgaaacactgcttaggaagaatcagggttttggctgaatcagtgcagtggctcacacctgtaatcccagcactttaagaggccgaggagggaggatgcttgagcccagtagattgagactgcagtgagctgtgattgcaccactgcactccagcctgggcgacagagtgagatcctgtcttaaaaaaaaaaaaagaagagggctgggtgtggtggctcatgcctgtaatcccagcattttgggaggccgaggtgggcagatcatgaggtcaagagatcgagaccatcctggccaacatggtgaaaccccatctctaccaaaaatacaaaaattagctgggcgtggtggcacacgcctgtaatcccagcaactcgggagactgaggcaggagaatcacttgaacctgagaggcggaggttgcagtgagccgagatcgagccactgcactccagcctggtgacagagtgagactccatctcaaaaaaaaaamaaaaaacaaaaaacaaaaaacaaacaacaacaacaacaacaaaaacaacaaacctctaattgctgatagaaagaacctatctggttggtggattgaagaggtatctctgtgattcatcctagtagacccatgcattgataacaagaagcaaaatcttcttacaccaggtctaaccaccccacctaagggtaaaagatgactgatgatgccagtcacccatgcagagtgctccatcccctggggccgctgggtcaccagggcccactctcccactcagactcaccagctgtgtcttctgctgccaatgccctgagcatcagttatgccaccgaagtcatcacagacacagtcattgctgctgacacacaggaacttctgcattgggatagtctcccaccaaagttgctatggccaaaacccagggccccttaaacccctgccgctaaagctgatgctactatcttcagtggctgcagaggctgccaaccaggcatccctgccatgatgccaggaccatctcttgaaatgaccaagctactggggccaaagctgctgacaccctgtggcctcaatggcccatgaaggctttagtggaacaatttttgatgttataccctctgtcattgtagcatgtgatcattacaactcaggcacgagcctgtgaggtctgagc

SEQ ID NO: 66753 - DNA, 1595 bp, Homo sapiens
caagctatactagcactacattccagacgtggtatagagaaaaggctcccgaagtccagttgttagatatggcagatcatggagaccttggtggaggaggtggcactgagttgggtattgaagagtggaatgggtttgaatgtgaaggaatgggagcaagagcaatgcagccagagggaatttcatgagcagaggtgtgaaagctgatgcagtgtggggtgaaacaaagcagcaagcattttgctttgactggactggggatatggaaggggagtagcagagaacaaggttccgatggcaatgatggctgggtgctccaacacactagaactaccggctgaggtgttgggcctccctgagctgtggacatgaaaccactaagggctttgaagaatgcaggcgagatgactggagcttcaggaaaaggaaccttgaaacactgcttaggaagaatcagggttttggctgaatcagtgcagtggctcacacctgtaatcccagcactttaagaggccgaggagggaggatgcttgagcccagtagattgagactgcagtgagctgtgattgcaccactgcactccagcctgggcgacagagtgagatcctgtcttaaaaaaaaaaaaagaagagggctgggtgtggtggctcatgcctgtaatcccagcattttgggaggccgaggtgggcagatcatgaggtcaagagatcgagaccatcctggccaacatggtgaaaccccatctctaccaaaaatacaaaaattagctgggcgtggtggcacacgcctgtaatcccagcaactcgggagactgaggcaggagaatcacttgaacctgagaggcggaggttgcagtgagccgagatcgagccactgcactccagcctggtgacagagtgagactccatctcaaaaaaaaaacaaaaaacaaaaaacaaaaaacaaacaacaacaacaacaacaaaaacaacaaacctctaattgctgatagaaagaacctatctggttggtggattgaaraggtatctctgtgattcatcctagtagacccatgcattgataacaagaagcaaaatcttcttacaccaggtctaaccaccccacctaagggtaaaagatgactgatgatgccagtcacccatgcagagtgctccatcccctggggccgctgggtcaccagggcccactctcccactcagactcaccagctgtgtcttctgctgccaatgccctgagcatcagttatgccaccgaagtcatcacagacacagtcattgctgctgacacacaggaacttctgcattgggatagtctcccaccaaagttgctatggccaaaacccagggccccttaaacccctgccgctaaagctgatgctactatcttcagtggctgcagaggctgccaaccaggcatccctgccatgatgccaggaccatctcttgaaatgaccaagctactggggccaaagctgctgacaccctgtggcctcaatggcccatgaaggctttagtggaacaatttttgatgttataccctctgtcattgtagcatgtgatcattacaactcaggcacgagcctgtgaggtctgagc

SEQ ID NO: 66754 - DNA, 826 bp, Homo sapiens
gcttaggctgatatccttgggaactgtggaggaaatcatgtatttacgacagatatacaagcaggtaaatatgtttccctttttctgtttcagaggtcaacatttatctgttttcaaaaattaggaacaaatttgtgtaaaatgtaagttttaaatcttactgtattgcggaatttaataagattataaaaattacccttgaatacacttttatgaaacagattctttggttcattgaatttttgagctgaaagttttctagagcagtacctcttaaactttagtgtacatgcgaattaccragggatcttgtcaaaatactgattgtgatttagtaggtctgagttagagcccatgatgtggaatttttaactagctcccaggagtcctagtaaaactaatcagcccacattttgagtagcaaggtcacagctccccaaattacaggccaagatgtaatggtttaccacaaatgggctacaggtgcactgatatgttggtcccacagctttctggacagcaagagtacctaagccagtgtgttagttcattctcatgctgccataaagaactgcccaagactgggtaatttataaaggaaagaggtttaattgactcacagtttcacatggcgggggaggcctcaggaaacttaccatcatggtggaaggggaagcaagcatgcccttcttcacaggatggcaggaaggagaagtgctaagcaaagagggaaaaaccacttataaaaccatcagatctcttgagaactcaatatcctgagaacagcagcatgggtataactgcccccatgattcagttacccact

SEQ ID NO: 66755 - DNA, 614 bp, Homo sapiens
aaataaaaagtatagtcactaaaatgcagttgaggagtggtttttgaaacccagagaaggcatagaaatattgtgttttgaaacaaggtagaaagagtgaagttgtaatgcaattaaaagcgtgagctgtatacaggcattaggtgattaaactgagttaagttaataggttttgcctttttgcatgttttgttagctatttgataatatttttctaaagagaaaaatgttccaagagaacaatattaaatgtgatcattcatcacatccaaagcaacatttttcttgttctgctcatttttgtttcattctgttttgtgaaaccaaagaggaggaaaggaaaaagaggaggaaaggaatttggtggtaataatcaaacttacattattggaragttttgagaaaacagccttctcaagagcagttattctgaattgttggtgaagttctaccaacataataagggaaagaaggagagaggtttgctgttttctatgttcaaatagagaacttggttagatgtgatattataaagatagaaagtgacatatagtcaaagttctcttcctaaaccagttctggtgttgtcactcttttgattaaatatcttcaga

SEQ ID NO: 66756 - DNA, 727 bp, Homo sapiens
ggatcatgttgaatgagtggcctttatttcaacccaaaagaagccagtgccaagaaggcaaaatgactgtaaaaactgagaaatataagtgggagctaaatgctgagtatacatggtcatataaatggaaacaaaggcactggggaggactatcaggaaaggagggagggggacatgggatgaamaactacctcttgggtataatgctcatcacctggatgacaggatcatccgtaccccaaaccctagcatcacacaatatgcccatgtaacaaacctgcacatgtaccctctgaatctaaaataaaagttgaaattataattttttttgaaatactgaaaaaattctgtgcactaatttccactatcctcaagctatagtaaaagtttctttgtgtatcttagaatcatagaatctcaagctgggaaggacactaacatatcttgtttaaagacattttggatcataaataattctacaaactgaaattaagtacaatgtcttaagcccataatatgttcaatgcaatagctttttctgccaagatatggtttatgtttttaagtaaaattacggctgtggagaggacagtataaccacataaaacagatgttaattgttaatttcatttcaaataattaaggtaacagagttagatatcagaattatagtgcttaaacttgggcagaagttagaattagtaaatctaaagattagcatgcagct

SEQ ID NO: 66757 - DNA, 1135 bp, Homo sapiens
agtgaagctcatctgggtgcctccggcctgaggcctctcctgaggctctggttcagctgttggcaccttgttccctcctcgcaggtgcctcaccacgtggccattgcctcctgccagggcaagtgatcctccagagagtggaaggaaatcgccctagagaggagtggggtattttgtgacctcacatcagaagtcacatcccttcagctctgcgtattctgtttttagacgtgagtcactaatcatcaccgaggttgtccctggaattcagcatgtccggaaatgcaatgctgattttcctctagggttggggaattgcgtttacactaaccaactcacaagtcaggaacttactaaccacaggagagtgtgcgtccacctgtaacgagagctgcatctcacaggacaccaatgccgctcttcagcaaaagcatctccagttgttcagagttcagacaagaaggctgtttggtgagccaagagtcagagaaaaaggaactggaagctcctaactgagaaattttacaagataaggcggcttaccccctcaggatattttccccaggaacagcctgatctaaagttaagtttccagaacggacattcaaagactctttgtcaatcttggttctgcatttactaaacatgggctgtgcagccagcttctcagagcctccgtttcctcctttgtaagggggtccattttaataaccactgtacctttattgcaggatcactatgaggccaaaaggaaaatggatgtgagtactgtggctgggacactgaatgtgatttttctgagtgtgtgctgcctgtcactagagccccgcctcttctcagcagatcggagatagacggataaacccaaagcctttgatttttttttttttttttttttgagacagggcctcgctctgtctcccagactggagcacagtggcatgatcagctcaccgcagtcttgagctctttgactcaagagatcctcctcactcagcctcctgagtggctggtactacaggcgcacaccaccacacctagctaattttttatttttcatagagacagggttttgaacgccttgcatcagctgatctttccgcgtcagcctcccggtaatgccaaagccgycatg

SEQ ID NO: 66758 - DNA, 624 bp, Homo sapiens
ccagctgctcggtcctgtcacgtctctcgctaccctcagggtgtgccctacactgcggcgtccgcctcagatgcagccgctggctaccctgcccgaggcgacgcaaaatgacgtctcgctcctgcacacgctctggagagacgctctaggccggcggaggaccacgtctctatggtgtgccgggggccgcgcgggccgggagttgggtgggctgggggacaggcgcgcccgcgccgcccgctccagctgggctagtgctgcacattccggccagcccctcctcaagaccccattcccaagccccttctcagctccctcgggccggcagagcggctctgatcaggtcagcggcggacgccgggaagaggcccggcttgggagaggtggtttggtgggttggctggttctagatggtgggggggtcaacactygagggggactgggtctccgagccgttgtccagcctgagccggagccccaggaaggttagagggaagggggataaatctctccggaagccccgcccgggccggggccgagttggtccgcggcggtggggaagcctgggacaccaccctggtgctgtcgcccgtcccgccgtccgcgcttggggtgcctttgtgg

SEQ ID NO: 66759 - DNA, 650 bp, Homo sapiens
tctcatcttttgttattgcgttttctgcttgaacgcatttcaatttaacttatggacatctattcttttaaagaaaaaaatcagggcaagagctgagtcacttttcttagttgtctcatcattgagtttctctggatagcattttcttcccaagtcctttttttcttgttcagccacttctaacttcatctttccactgcatttcaatcattcccagccagggccaattagctgacagtgcctcactccggggcccagggccccaattaacagccttgtgttttaatacaatgtcctattccattaactagtgttcagaaccttcggccttggctctaccagaamgttgaatcttttgtttcctcccattgtgcgatggtcagtcttattacctgtaactcctggcctttcattgcctgcacatatacagctgtccttggaacaacacaggtttgaactgtgcaggtccactcacacagttgtcttcttcctcctttgccacccctgagacagcaagaccaacccctcctcctcctcttctacctactcaatgtgattatccccttgcacttaatgaagagtagatatattttctcttccttatgattttcttagtaacattttcttttctctagctactttattataag

SEQ ID NO: 66760 - DNA, 650 bp, Homo sapiens
tctcatcttttgttattgcgttttctgcttgaacgcatttcaatttaacttatggacatctattcttttaaagaaaaaaatcagggcaagagctgagtcacttttcttagttgtctcatcattgagtttctctggatagcattttcttcccaagtcctttttttcttgttcagccacttctaacttcatctttccactgcatttcaatcattcccagccagggccaattagctgacagtgcctcactccggggcccagggccccaattaacagccttgtgttttaatacaatgtcctattccattaactagtgttcagaaccttcggccttggctctaccagaaagttgaatcttttgtttcctcccattgtgcgatggtcagtcttattacctgtaactcctggcctttcattgcctgcacatatacagctgtccttggaacaacacaggtttgaactgtgcaggtccactcacacagttgtyttcttcctcctttgccacccctgagacagcaagaccaacccctcctcctcctcttctacctactcaatgtgattatccccttgcacttaatgaagagtagatatattttctcttccttatgattttcttagtaacattttcttttctctagctactttattataag

SEQ ID NO: 66761 - DNA, 1226 bp, Homo sapiens
  misc_feature (1)...(1226): n = A,T,C or G
tgcattttatttttttaatattaaatatatttaaaatatattttttaaatcttaatctaacttcaaagagagaaagaactttccaagtataaaatcattgaaagaaagaaatcctaatgaaaacaatggattcatttgatttcrtagacatagataaatattttatatgcgcacacaaacataagtttaaaagtcaatcaagatattgggaaaatatttacctcaaatgtgataagcaaaggctactttccttagcatatgaatatttacacattagaaataaaaatgacaaagaaaaatgagcagatggcatttccagggcaattcacgggagaaaaaaatgcaaatggcttggtcaggcgcaggggcttgtaatcccacactttgggaggctgaggcgggtgatcacttgaggtcagagttcgaaacagcctggtcaacatggaaaaccccatcctactaaaatccaaatgacctggggggaagcgccacttgtggcccacctactgggaagctgagcnnnnnnnnnnnnnnnnnnnnnnnnnnnnnnnnnnnnnnnnnnnnnnnnnnnnnnnnnnnnnnnnnnnnnnnnnnnnnnnnnnnnnnnnnnnnnnnnnnnnaagttttagaatcaattgcagaaaagtggaaaaacatcagagatggtgatagttcatttttttcattaattgtatttattgttaaacactccagaaacaactcatcttaaaataaaccgttttaaaattattttctctctgtaatctggatcttttgttccccatccactatttataacgtgtaatttctgagatctgcaatagcattttatcactttctctttgttgctgttgattgtagcacaactgcatgaactgaaagtgcttccgacagtttgaaaagctaaaacatgactcagattgttgttcattctttggcactactactggccattttacaagcacaggatgagaataagaagttttgataatgaagacaatatgggaggtaagaaagtactaccagggaaagagtgtagaaaagaaatatttgacatcctaaatcctaccatctccttcccctaaaactgacatttattccaaattccatatttctgccactaacacaatcttgtcagacacatgagaaagtttggtgtcatcctcaaaccttttctccctatctggctctccagatcctcttctctctaattctctgtggattcc

SEQ ID NO: 66762 - DNA, 572 bp, Homo sapiens
tcccatcaatgccttgcctcagtccttagagaatacttatctgaacatttttgtcattaccatctatgcgttcacgctcatatagcatacactctcatggaaattattttgtggacaccttcttctccagaaagatttacaattttaaagcaatagacagaagactccattatatcatttttaaattgatagacctgattttttcagagcagtttcaggtttacaagaaaatttaccaggaagtacagagagctgccatatacccctttcccccarcccaacactttctcctattcttaacatcttgcattagtgtggtacatttgtcacaattgatgaaccaatattgatacattattattaactaaggccagttgtttatgggggttcactctttgtgtcatacagttctgtgggttttgatcaatgtataatgtcaggtatcccccattatagtatcatatagaattgtttcactgccctaaatacaccctctgttttaccatttcaatcctgcctctcttttcccaaatccttggaaaccactggtatttttagtctctatagttttg

SEQ ID NO: 66763 - DNA, 591 bp, Homo sapiens
aagaagagtattcagaggtttagaaaaaaatggctggccaaagcacaggtcaggagaatcactgaacctggaggttggaaagaaaacataattgtcaccagcttgactttctcttttccaactttctggtggtataagtctagataactttcatcctcctttttttttttttttttttttgagacggagtctcgctctgtcacccaggctggagtgcagtggtgccatctcagctcactgcaacctccgcctcccgggttcaagcaattctcctgcctcagcctcctgagtagctgggactacaggcacccgcyaccacgcccagctaatttttgtatttttaatagagatggagtgtcaccatgttgaacaggctggtcttgaactcctgaccttgtgatccgcccgccttggcctcccaaatgttgggattacaggcgtgagccaccacgcccggcttcatcttctttttttaaggcaaagtaagacttagtcccttcaggaaatttcccttttccctgacaccagggtgatagttggcatactttcatattggccctctctttcttgcttcacctgcagctaagcaca

SEQ ID NO: 66764 - DNA, 504 bp, Homo sapiens
gcactaccagtgtttatgctaktgctagcttgttcatcggggtacacgttaggatatagaactttttcacaaattagatcttattttccacaaacagccccatgaaacagattattttaatagctattactattattttaatctggaaatggagactcagaaatatgaaatggctttctcaagatcacatagctcgaaagcaccaggaagcatgcgaaggcggggctccttgcagggagcatgtgaaggcggggctccttgcagggagcatgtgaaggcggggctccttgcagggagcatgtgaaggcggggctccttgcagctcatttcttttcatcgcaccatgctggttaagcaaaagggcaagattactcagttacctcaattcctcctcattatgcccaattttgtcatctcttattcctctttgacttgtctggtatgcttcactcaatttttttttcccccaaaaaagtttttaagtgctacttggtctcagtatat

SEQ ID NO: 66765 - DNA, 504 bp, Homo sapiens
gcactaccagtgtttatgctattkctagcttgttcatcggggtacacgttaggatatagaactttttcacaaattagatcttattttccacaaacagccccatgaaacagattattttaatagctattactattattttaatctggaaatggagactcagaaatatgaaatggctttctcaagatcacatagctcgaaagcaccaggaagcatgcgaaggcggggctccttgcagggagcatgtgaaggcggggctccttgcagggagcatgtgaaggcggggctccttgcagggagcatgtgaaggcggggctccttgcagctcatttcttttcatcgcaccatgctggttaagcaaaagggcaagattactcagttacctcaattcctcctcattatgcccaattttgtcatctcttattcctctttgacttgtctggtatgcttcactcaatttttttttcccccaaaaaagtttttaagtgctacttggtctcagtatat

SEQ ID NO: 66766 - DNA, 504 bp, Homo sapiens
gcactaccagtgtttatgctattgytagcttgttcatcggggtacacgttaggatatagaactttttcacaaattagatcttattttccacaaacagccccatgaaacagattattttaatagctattactattattttaatctggaaatggagactcagaaatatgaaatggctttctcaagatcacatagctcgaaagcaccaggaagcatgcgaaggcggggctccttgcagggagcatgtgaaggcggggctccttgcagggagcatgtgaaggcggggctccttgcagggagcatgtgaaggcggggctccttgcagctcatttcttttcatcgcaccatgctggttaagcaaaagggcaagattactcagttacctcaattcctcctcattatgcccaattttgtcatctcttattcctctttgacttgtctggtatgcttcactcaatttttttttcccccaaaaaagtttttaagtgctacttggtctcagtatat

SEQ ID NO: 66767 - DNA, 505 bp, Homo sapiens
  misc_feature (1)...(505): n = A,T,C or G
gattattctgaacaatgctcaatcacagaacaggggtcattttaaccctgaatgcttctaacaaggttaaggaaaaataactttttataacatttaagaaaataatggatgttccctcagggccatattttaaatgcttctaagcacaatmtgacacagtataagatatggcatttggttgcagtatatcataatagaaaactgaaagaatcagaacatgtggaaaaacattgaaataaatctgttataaaggcctttaggtcttaacaaacttgacatttgtttggcaggagtttccttcttaggtggacattgttttttccatatagccaatgttaatagaaaaacaactaattttaagtttgcctatgataattaaggggtgaggggaaggacgatacaacattggaaataataagagccatttttttgattaccagggtcaactaattactttatatctggccaaggngttacaggaagatgaagtaaattgccatgtgtt

SEQ ID NO: 66768 - DNA, 656 bp, Homo sapiens
gaatatacaagatcatgtcaacatgcacattaaaaaaatagaaaacacattaaaatattaagaggatatagctgttctyctttaaagaaaaaaaaacccagccgagttaagtttttagtaggcactggtcctagtcatcatctaattagaaccatataaaaaacccaaataagaattgtccaggtaagcccagtcgccacagaaacaagagaaataattgttgtcttaaggcaataagtttcctggcagtttgtgttatacaaaaatagatagtagaaacatcttgcattttccagacataagaatgtgtgctataatatttaaagtaacaactaaaggaatagaagaatgactatataaataaaaagccaataggtaggaaaaatataaaataataaaaataatccattcaaactttaatttctaagtataatgtactatttcatagcaggccaatgctcttgaaacaacaactagaaaaaaagataagtaaattaccaaaatcatacttttaaaggtactagaaatgtatggaaacaaaaagagttttttgaaataaaattctaaagagaattttaagaagtatataagaggggaaactttctgagagaagctaatctaataatatccaggggttttatggttttctgattttg

SEQ ID NO: 66769 - DNA, 495 bp, Homo sapiens
gcttcctttccaatgcttggagacaaccaaggctcagctctscactcctggtctgtgtgctctaatccgaggtggctgggactgggtccatggctctgtcttctggtcccccaaggtcaagccccagcagagctggaagggccaaggtactcccagactgctggcaacagcacttcatagggaacaacgggaagggctgtgggcataagtgctccagcagggacaacaggagtgcagcagacaggaggcagtctggcggggtgccacaggcaaacatgctttagatggatggtggtggggttgcaggcaaacatgttccagtgggaggttgtcagcaaatgtgctccagtggggcagtggggaccgctgctgaaagcacaatggcagtggctgctagcaaaagcattccagcagggtagcagagaccacaatggatgtgtgtctgtatgttcaggcagggactctgggaggggctggcacgcacattacactcat

SEQ ID NO: 66770 - DNA, 763 bp, Homo sapiens
tataatatccctgtaccaccaaaacaactttggttcctatggttttagccattgttagttagttcacttagtatttacagccagaagtattgtgagaatttttccagggcctacggaataatatctacttatttctatactatgaaaaagtgttgcctaagcttgccttatttagatattcaagtcattcccagctactcccatatcacacttttttcactaagaaacctgaaatgccaataaaccttacaaagttcactcaagcatcttaccatttgtacttgcttttgtagatgtttcttttgtaggacacgtgagcatctyagatgttcctttttccaaaacttcagttttattaggtattactcctgccacgcattcagtctttacagatgtttatttttcctcccatgtgatcttcctaggtctttcttttgctggccatgcaaatttcttagatgtttcttttgcagtcctcataattttcttaggtgtttcttctgctgactgttcaaactttccagatgttgctttccccaaacattgaattttgtcagctgttccctccaccaagggtgcagcctcatcaggtggtttttccaccaagctttcagccatgtcaggtgttctttccgccaagggtgcagcctcatcaggtgttccttcagatgttccttctgccaaacacacaatctggttaaattttccttctgctaaatatcatcctcctgactcttcacctggcaaacttctactcactctg

SEQ ID NO: 66771 - DNA, 763 bp, Homo sapiens
tataatatccctgtaccaccaaaacaactttggttcctatggttttagccattgttagttagttcacttagtatttacagccagaagtattgtgagaatttttccagggcctacggaataatatctacttatttctatactatgaaaaagtgttgcctaagcttgccttatttagatattcaagtcattcccagctactcccatatcacacttttttcactaagaaacctgaaatgccaataaaccttacaaagttcactcaagcatcttaccatttgtacttgcttttgtagatgtttcttttgtaggacacgtgagcatcttagatgttcctttttccaaaacttcagttttattaggtattactcctgccacgcattcagtctttacagatgtttmtttttcctcccatgtgatcttcctaggtctttcttttgctggccatgcaaatttcttagatgtttcttttgcagtcctcataattttcttaggtgtttcttctgctgactgttcaaactttccagatgttgctttccccaaacattgaattttgtcagctgttccctccaccaagggtgcagcctcatcaggtggtttttccaccaagctttcagccatgtcaggtgttctttccgccaagggtgcagcctcatcaggtgttccttcagatgttccttctgccaaacacacaatctggttaaattttccttctgctaaatatcatcctcctgactcttcacctggcaaacttctactcactctg

SEQ ID NO: 66772 - DNA, 763 bp, Homo sapiens
tataatatccctgtaccaccaaaacaactttggttcctatggttttagccattgttagttagttcacttagtatttacagccagaagtattgtgagaatttttccagggcctacggaataatatctacttatttctatactatgaaaaagtgttgcctaagcttgccttatttagatattcaagtcattcccagctactcccatatcacacttttttcactaagaaacctgaaatgccaataaaccttacaaagttcactcaagcatcttaccatttgtacttgcttttgtagatgtttcttttgtaggacacgtgagcatcttagatgttcctttttccaaaacttcagttttattaggtattactcctgccacgcattcagtctttacagatgtttatttttcctcccatgtgatcttcctaggtctttcttttgctggccatgcaaatttctyagatgtttcttttgcagtcctcataattttcttaggtgtttcttctgctgactgttcaaactttccagatgttgctttccccaaacattgaattttgtcagctgttccctccaccaagggtgcagcctcatcaggtggtttttccaccaagctttcagccatgtcaggtgttctttccgccaagggtgcagcctcatcaggtgttccttcagatgttccttctgccaaacacacaatctggttaaattttccttctgctaaatatcatcctcctgactcttcacctggcaaacttctactcactctg

SEQ ID NO: 66773 - DNA, 1155 bp, Homo sapiens
gcatccctttcatgctgctaaattcttccaaagacacatgccagtaactgggaagaaacacagaccagactacatttcttttcaggctttttatctcagttatttgtattaacagactgcaaaaaatggatattatttatgctggaagagagaatggaagggtatcctaaatatcagtattagagctttttgctcttttaggttcttaggtgaaggtgatgaagtattttattttaggggcttttaatcttttgcttgtgggttttttctttgtctagtattacartcttgaacaattatgaagaagatattacactacttttcctggtcaaattacaataaacctaatagaatggaaattttactgtttaaggattagtgtagttgtttccagctttttcagctgtgcggaattctttttaaagtaacaaataaattaatagaaacattcacattttattacttaatagtatttttcatggtggttgacataacaaaaatgctatgaaaataatactttcacataacttgtaatttgttaatcagtaaaatctgcataaatttgaaatgtaataacaagtatatgtgtaagacacattatttattccactacattcaatgcttagtgctttgtgaatctatggattattatgctaccttttaggattcaatggaaatgatctagaagatacctttgtagagaattggaagagaagctgagcaaaacagttcagggcaggagatatgtccagaggggctgctaattgtcctgtggtttaaagaaatttctaaaactccaaataagagacattcagccataacatcctaaatttttcttaagaaatgtttacattcagtattgtaaactaagtgcgagacattcatggtagactgtggttcttctgaaggtaaacttgtcatttgagcttcctacagtagttggtattattttaaataatatataatttaagacattaaataatagacattctgctcagaaatatttagcctattcttggattaagtgctaattttagggagattcacattcagaacattttggtattcatatagaaactactaaaagtctaaaactaagtgagttcattgttaatgagagatcatattctatagtggtgagcataggttttggtt

SEQ ID NO: 66774 - DNA, 625 bp, Homo sapiens
tgattatacagaaccttgtggttattttaagactgagattttgtttgttctaatctaagaattttagattagaaattttctaattttctaattctttttttttgttagagactgggtctcactctgttgccragcctggagtacagtggcacaatcatagctcactgaagccttgaactcctgggctcaagcaatcctactaccttagcctcccaagtagctaggactacaggtgtgcgccactgtgcctggctaatattttaaatttttctgtggagacaggatctcactatgttgcccaggctggtctcaaactcctggcctcaagcaatcctcttgctttggcctcccaaaggacttaggttttgatatagagaaaaatgggaagccatcgaaggattttgaaagagagacgtaatctgatttacaattaataggaattactctatttttatttgagactcatctcactctgttgcccaagctagagtgcaatggcgtgatctcagctcaccgcaacctccatctgcttcctgcgttcgagtggttctcctacctcagcctcctgagtagctggcacagtaggcacatgccaccatggctggctaatttttgtatttttttg

SEQ ID NO: 66775 - DNA, 625 bp, Homo sapiens
tgattatacagaaccttgtggttattttaagactgagattttgtttgttctaatctaagaattttagattagaaattttctaattttctaattctttttttttgttagagactgggtctcactctgttgccgagcctggagtacagtggcacaatcatagctcactgaagccttgaactcctgggctcaagcaatcctactaccttagcctcccaagtagctaggactacaggtgtgcgccactgtgcctggctaatattttaaatttttctgtggagacaggatctcactatgttgcccaggctggtctcaaactcctggcctcaagcaatcctcttgctttggcctcccaaaggacttaggttttgatatagagaaaaatgggaagccatcgaaggattttgaragagagacgtaatctgatttacaattaataggaattactctatttttatttgagactcatctcactctgttgcccaagctagagtgcaatggcgtgatctcagctcaccgcaacctccatctgcttcctgcgttcgagtggttctcctacctcagcctcctgagtagctggcacagtaggcacatgccaccatggctggctaatttttgtatttttttg

SEQ ID NO: 66776 - DNA, 686 bp, Homo sapiens
tgattcttaactactttattatgaaaaagatgtaaagtacctggtataattaataataggtgtttatatttagtagtcacaatttagtagttagaatttatagaagtcaacagatttccaaaatgaattctgaactatttcttggaaacagacaaagacacagttgtgttaacatcagagaaatcaaagtagagaacatccctagaaaacagacatctgtcattgtccttagagcagttttttttagagaaaaatttgatataaaaaaggaattgtcatccctctgggcatggacattgtctrttaactaacggaattgtttggcttataacagccagcgaatgtgaactataattcagatttatatattcatttgatcatatctgccaaaacaggaggaaaaacagggacaagagtggggaatttattttattttgcaagtcagaagagcagaaaatttcctgtgtgattgccttggtgtagaagggagtcctgaacagtgctctaggtattttggttgagtatacacatgagatttaccatccccttacattttctcattgtgtgcttggctttatcaggtttgtctcatctctaccactgggcgttttcttctttggttttgctggtataaatttactaggcattaatcacatgcaagcactgtagaaaataccagttacata

SEQ ID NO: 66777 - DNA, 686 bp, Homo sapiens
tgattcttaactactttattatgaaaaagatgtaaagtacctggtataattaataataggtgtttatatttagtagtcacaatttagtagttagaatttatagaagtcaacagatttccaaaatgaattctgaactatttcttggaaacagacaaagacacagttgtgttaacatcagagaaatcaaagtagagaacatccctagaaaacagacatctgtcattgtccttagagcagttttttttagagaaaaatttgatataaaaaaggaattgtcatccctctgggcatggacattgtctgttaactaacggaattgtttggcttataacagccagcgaatgtgaactataattcagatttatatattcatttgatcatatctgccaaaacaggagraaaaacagggacaagagtggggaatttattttattttgcaagtcagaagagcagaaaatttcctgtgtgattgccttggtgtagaagggagtcctgaacagtgctctaggtattttggttgagtatacacatgagatttaccatccccttacattttctcattgtgtgcttggctttatcaggtttgtctcatctctaccactgggcgttttcttctttggttttgctggtataaatttactaggcattaatcacatgcaagcactgtagaaaataccagttacata

SEQ ID NO: 66778 - DNA, 581 bp, Homo sapiens
caggaggcttcctggcttttgagtttcaaaagttgagaagagcaggaagaactcacgtcttgcagagagcaaggttcccccacccagaatcagagccagggtcgcaggataggtacagagacggggtgtcaggggtggcccccagcctggggctgagcccagtgaggcccagaacctcaggtagaagcagcttttccaggattctggaaaggcagcctccaaccagcccttgaagtagccaggaagcagccaaatgacccccaggaccaggggcaatggagaaggggcaggcacagaaccacgcagggcctcagsggggggaccagcctgtgtcaggcaatgcctggtgggaagacgacacccaacaccagtgcctctgtcctcattcctatccccaacaccttggcctcatgaaaggccaggggacccagagccttcccaggaaaagtggagtggggtggtggcgagggtgggaatcaccgtcagatgaagcctcctccagcctggcataaccacgacacaagatggaaaatcagttccatttgtgaaaacacaaagaaactccacagtgccagtgtgtg

SEQ ID NO: 66779 - DNA, 617 bp, Homo sapiens
ggagatgttagttttcacaactggggaaggtgctgctggcatccagtggaccaaggccttggacgctgcttagtgtccttcagagcacaggacagcccygcaatggagaatggtccagcccgaggctgagaaaccctggcacaaaggcaggcctttgggggcactaaaagaagctcaggagaggaggctggagggggcgcaggcagcctcagccccatccagggctttggatttggggatggggtgttcagcccaagagaagacttaggcagcagaggacctgctgagatgcagggttcaggaagcttgctctggccacagtgtggactaggatgatacggctgtatgatccagtggcagagaagtcgaggcaaagggcacagagaatgcaaaggtcctgaggtggaaactgtctgagtaggttctggagacagaggggaggccggcaagtgcagagattactgagagacaccatgcaaggccacggaggctgcaacaagacttagggggttagtccaagagcagtggggagccctcaaaagtgtttcaccaagggaggggcactgtcagccttgggtcctagcaggctccccctaatcctgtgtggagaatggatc

SEQ ID NO: 66780 - DNA, 1698 bp, Homo sapiens
tcccacaggcccagccggccccccaacaccagccaagtctcagcccgtcatcgtcccccgggggtggtgctgggccttgtggggcagaaggaaaggtaaaccatgaccctgaggagctcagagactggggttcttgggaagccaattcaggcctagaaccagggccaaagtctgggtggttttagaggaaaaagagactggctctggggttgaaaactgtgtcaccagggaccaggcaggaatttaaaatgagcagagtgggctggggtaagatgataaatagctactattcyttggcctcagcatcagagagacaagagggagtggtggggactggggcacatgccttgtctgaagacagtcacctctcagctccggttgatggtggtccctagagaacagggcccaatatgatcggatgctccgtgccctgattttccagagggaatcaaaacacaggtttttatgtagtacccacagattcttaaatattggcttcattcatttaaaaattctatgtgggctgaggaaagccccacaggcttgggcgccagattgggcccctgaggcctccagtttgcagcctctgttcgctgcagctgaatggagcaggcagagaaggagcaaatctcagcctgaccccgagtcaggagctatgggttgggacggtggccaggacccagctccagcagctccaagggacgtggagaagttttctgtcatctggtcccctcctccactccatggagatgattcccccgcccgccagctccagcaggctggggggtgaaagggagcctgggcgggagccgaggtctcctttctcacatgggacacagctgtggatgtttttcaggcggatcctaatttctctctccccatcccccgtggctctgccacaccaggaagtgggtgactctctgtgtcccaagttgtcccccaaaagtccgctccatgctccaagctacctgcttccacaagcacaactttgaagcttcaccatgtcccttataaccaattttcagatgaaacaggctcagggagggaaaacatctggcccaggcccctgcaatcaacacacagaggagctggacttaaacccaggcctcacgcacttgaccactgggccctcatcctgtctcttcctggtagaacccagcccaccctccaagtcttgctccagcgcttcctcctggcttattgaacaagcagccaggcccttggcccactgccaggtattcagacatgaacagatagtgtgtctcaggctcccctgtgctatttgttgaatgaatatttcactcattttctccaaagtcgtgggtggttgtccatatccaatctgttgtctcagcctctgaccacatgtctgtacacttccccgatgcctcctcctggatggcccccaggcatcctccaaatcagtatgcccaaagcaagttcagcaacttcccccaaactgtccctctgcctgtctcccttcttttggaaggctgcacaactgttcagcgtccaaagccagaaacatgagcatcatccataaagcctcccgccgccatgcctccaacccaattggtcaccaaagcctgggagtctcgtcctcaacctccctcaaatccatccaccctcccctcctctgaggctgccatgccaggtcaatctcatcacctctcactcaggtggctgcaattccttgcc

SEQ ID NO: 66781 - DNA, 535 bp, Homo sapiens
agataccccgacaaagacaaagtggagagaaatatcaggttgacagcgacctagctgaaagacaaaaagggcaggttacaacaggtgacagagacagcaacaggggatgctgaatgttttacttaaacagaagatcagckaagtccaggcgcagtctttctcccagctcggctcgtcaggcctcaggcattggtggctcgaacccgaggtcgtcaagccgcgcccaccctacgccccgaaaggccagcggacggacgggggcgggatctctaagcgctgtggccggcggagctccgccgccgcgagggtgaccttgggcgagaagctgccccaaaggcctcggtatcgcggtctgcgcgccgtgtgggcagaagactgcgggattcggagctggagcgccgggaccccaacctcccgcgcggggctttggtatgccggtccacggaatgggcctggcggggccagcggcgcgagcgtcggggcctgctgaggagcccttaactcccccaccgacttctcctcccctacccttgcc

SEQ ID NO: 66782 - DNA, 535 bp, Homo sapiens
agataccccgacaaagacaaagtggagagaaatatcaggttgacagcgacctagctgaaagacaaaaagggcaggttacaacaggtgacagagacagcaacaggggatgctgaatgttttacttaaacagaagatcagctaagtccaggcgcagtctttctcccagctcggctcgtcaggcctcaggcattggtggctcgaacccgaggtcgtcaagccgcgcccaccctacgccccgaaaggccagcggacggacgggggcgggatctctaagcgctgtggccggcggagctccgccgccgcgagggtgaccttgggcgagaagctgccccaaaggcctcggtatcgcggtctgcrcgccgtgtgggcagaagactgcgggattcggagctggagcgccgggaccccaacctcccgcgcggggctttggtatgccggtccacggaatgggcctggcggggccagcggcgcgagcgtcggggcctgctgaggagcccttaactcccccaccgacttctcctcccctacccttgcc

SEQ ID NO: 66783 - DNA, 2274 bp, Homo sapiens
tgttcttggcaataaatccatgacctatataccacgggagtagttgtttgcaatattaaatatagcttctggcggaaagatgtttagacaagaaaagtagctatctgagaagacagacaagatttagactttctcttgatagctgcagctatgtagaagccaaatcatggctcttgccacttgggatgcatgtacaactttctgtggcagtaacagcaatcagattttgaggagtgaatgaaaggcagacctctgggggccctaactttcacactaaacttgaactcaccctgagacctaaacttataatcccgaagtctaattcttctgtcacaacctttctaatgatgaatagcctctctccattctctgcctctttctcccccttctcacaggagtaaggactcccactccacccccacatacacatgtgtggacgggagaaggccatttgtaaagtaacagtgtcatataaacaacaaactcaagtttcaaaggagaaaagataacaaaatctgcaatagaacatatgcctgtgagaaaggacaattattcctctatgacaagaggggaaactcactcacatggcagggagaggctgaccatgagaacaagtctaggaattggctagtcattcctttaggccaggtcctgtttcactacaattttcccttttttaattccttccttccctcccttcctcccttccctctatccctcccgcccagcctccctcccgtgctycctccttccctcccttccttccttctttcttgctttttctttctttcaccaactacctgtctgtctatccattttaagattgggtatcacttgctcatggtacaaaattcagagctaacaagggcacagagtgaaaagcaagtctcctgctccaccaccgagggcattcctggttccctacccagaagcaggctttgtggtttctcccctttttcattttcccacgcctctcacctcagatcctatggaagcatccacaattgtggggaagaattccagaggagaggcagagtctaggaggaggaggggtggcgaccaccaggattccagacccactaggctggtacctggcccagggttggatcctccagcgtggacaggacagtctgtggttgcctcctgcagccacctgacacctgggcagtagtgggagggaggctggtgcctttttctttagcatggttgtctgtttggttttattatgttgtgtccccactcccgcctccagcttttccttcagctgcaaaccagagtgcctatggatgaatgtttgtttacatatgtcatgttgctgtcccttcagaacaaatgtgtgtatttgaggcaggagactgtgtttggtttttaaactaagtggaactgccaaacacccttcacccagcttgtggacaggtgcactattaagagtttacataagaaaaatctgtgccaattgtaacaggtagagaagagagagcgagacagagacagaacctgaataatcctttggcaattcttagtgtgacacaagattcacttccttcttagcaattctgtgcctcatgcctcattcctgataattttaggatctgctatgtcttttgctatgagaattagcatcagcagctttcaaaatgacttaccagttagcccctccagaaatcttaggacattattcttttcttctccaaattccccatctctaagccttctaattctccttcaaatttccatctgtaaagttaatacaatccaataagaaaataatgtgctcttgagacgttgacatgctcagagccattttatcctgcccttaagcctggaaagtttgaattttccttgggataaaaaagtaagaaataatagaataattcactgtactgtaacaattaaatccagcaatttaacattgcgcattggtaaatataatgcttgcaacaaccaaaagtctcccacgtattgacagacaaaaccaaagttataaatctacacctcctattccgaaccacattcctaaatgtaaataagcatccaagcatgctgctacatatctttacagaagcaattacaaacaagccttatcagttgctaagtcaccaacacacacaatgcttatctgctatgccctctactggatagagtacacaaggcaagtcgcattatttccaattaatttttggcatcatcactctgcatctgctttaggaatgcaaggcgtgaaatttatagtagcaggtttaatattccatccagccaaatcatttcgctaca

SEQ ID NO: 66784 - DNA, 1564 bp, Homo sapiens
cgactaggctggtggcaggcctgtggctttggccttagggattgtgtctctttgatcattggtgcacccaagtcataaagaccactgtcctatctattgtttgtcttgaggcctaaagcagtagttaacaaagaatgacaaggagtaaagggggaaaaggagtgccttgcttttaaaactaaaaaaaaaaaaaaacaaaaaccaaaaaacaaaaaccctcttttattcctaaatagttttagaattacagaaaagttgcaacaatagttcagaaagttcctgtctacccttcatccaacttcactcaccttaatatcttacataatgatcaaaaccaagaagctgggacattagtgcaatacttactattaaccacactatagatttaaattcagatttcaccactatttctaataatagtattttttgttgggcgtgatggctcatgcctgtaatcccagcactttgggaggctgaggtgggcggatcaactgaggtcgggagttcaagaccagcctggccaacatggagaaaccctgtctctactaaaaatacaaaattagctgggcatggtggcacatgcctgtaattccagctacttgggaggctgaggcaggagaatcgcttgaacctgggaggcggaggttgcggtgagctgagatcataccattgcactccagcctgggtggcagagtgagactttgtctaataatagtaatagtatttttctgtcctaggattgaatccaggatcccacactgcacatagctgtcatgtctctttagtttccttaaattcaggacactctcttgtctttccttgtctttcataaccttaacatgtttgaagagtcctggtcaggtattttgtagacagtctctcaatttggatttgtgaaatgttttctcatgattaaattaaggscgggtgcggtggctcagacctgtaatcccagcactttgggaggctgaggcgagtggtcaggagtttgagaccagcctggctaacatggtgaaaccccgtctctacaaaaaatacaaaattagccgggcatggtggcgggcacctgtattcccagctactcaggaggctgaggcacaagaatcacttgaacctgggaggtggagtatgcagtcagctgagattgccccattgcactccagcctgggcaacagagtaagactccatctcaaaaacaaacaaacaaaaaaattaaattgagattatatatttttggcaagaatgctacagaagcaatgattcccttcattgctttgtggaagcagggcctgcttttgtagcaatgaagctaagcaagggtgtgggataagagcctgaatgagatcaacatccctctagaaatttgcgtggtggctttaaggagagttaggcaccaagcttaagagcaggtgacacacttttattacctctcgcctcctttctctgttactatgggtggcagtgggagaggtgggaatatttctttgccacagatagacagcatgaatgtttttttaatccaatgttgctgagaccagcagaaggataaagggtagccaaagaa

SEQ ID NO: 66785 - DNA, 1564 bp, Homo sapiens
cgactaggctggtggcaggcctgtggctttggccttagggattgtgtctctttgatcattggtgcacccaagtcataaagaccactgtcctatctattgtttgtcttgaggcctaaagcagtagttaacaaagaatgacaaggagtaaagggggaaaaggagtgccttgcttttaaaactaaaaaaaaaaaaaaacaaaaaccaaaaaacaaaaaccctcttttattcctaaatagttttagaattacagaaaagttgcaacaatagttcagaaagttcctgtctacccttcatccaacttcactcaccttaatatcttacataatgatcaaaaccaagaagctgggacattagtgcaatacttactattaaccacactatagatttaaattcagatttcaccactatttctaataatagtattttttgttgggcgtgatggctcatgcctgtaatcccagcactttgggaggctgaggtgggcggatcaactgaggtcgggagttcaagaccagcctggccaacatggagaaaccctgtctctactaaaaatacaaaattagctgggcatggtggcacatgcctgtaattccagctacttgggaggctgaggcaggagaatcgcttgaacctgggaggcggaggttgcggtgagctgagatcataccattgcactccagcctgggtggcagagtgagactttgtctaataatagtaatagtatttttctgtcctaggattgaatccaggatcccacactgcacatagctgtcatgtctctttagtttccttaaattcaggacactctcttgtctttccttgtctttcataaccttaacatgtttgaagagtcctggtcaggtattttgtagacagtctctcaatttggatttgtgaaatgttttctcatgattaaattaaggccgggtgcggtggctcagacctgtaatcccagcactttgggaggctgaggcgagtggtcaggagtttgagaccagcctggctaacatggtgaaaccccgtctctacaaaaaatacaaaattagccgggcatggtggcgggcacctgtattcccagctactcaggaggctgaggcacaagaatcacttgaacctgggaggtggagtatgcagtcagctgagattgccccattgcactccagcctgggcaacagagtaagactccrtctcaaaaacaaacaaacaaaaaaattaaattgagattatatatttttggcaagaatgctacagaagcaatgattcccttcattgctttgtggaagcagggcctgcttttgtagcaatgaagctaagcaagggtgtgggataagagcctgaatgagatcaacatccctctagaaatttgcgtggtggctttaaggagagttaggcaccaagcttaagagcaggtgacacacttttattacctctcgcctcctttctctgttactatgggtggcagtgggagaggtgggaatatttctttgccacagatagacagcatgaatgtttttttaatccaatgttgctgagaccagcagaaggataaagggtagccaaagaa

SEQ ID NO: 66786 - DNA, 2515 bp, Homo sapiens
cacagattgagatgtgtttttcttattaatgggactgatttcatttcttcaactgcttagtgctttttggttactctcttctaattcccagatattcacataatttaaataacgtttttatatttataattatcattgtaatttatttgaattatttaaattttccagatgcatatttagtaaagacgtttttaaacatactagagagacaagcaaagtaccaggaggctttgaacatttattttactgagtaggaagtagagaagaactgtttttactgacatattaatgaaaacagccaacatgacttgcagttggtctatataggcactgttcaatacactttataaatattaacctttttcatttttatagctgcaccatgaggtagtctattatatttccattctacagaaaaggaaattaagccacacagagctttatttatttatttatttatttgagataaggtctcactatattgccccaggctggagtgcagtggcacaaacacagctcactgcagcctcaacctcccgggytcaagcgatcctctcgcctcagccttctgagtagctgggaccacaggcacacgacaccatgcttggcaatttttaaaaattttttgtagagatgaggtctcaactgtgttgcccaggctggtctcaaactcctggcctcaagcgatccttccatctcagcctcccaaagtggtgagattacaggtgtgaatcactgtgcttggcccacacagaactttaaaaacttactccaagtcacacagtgaggaagtggcagagctgggagtctaatcactatactatacagtgcttctggtgcaatccagaaaaatcctatcttctggaaagaactctgtttctgctctttgctcttttaggggcaaaatgaaccctccagacccacatccttccaagtgcttctttgtgcaagcaatatgaactagagttgtcccctcttcctgggagggaagtcacagtgacttcccacaggagatagcacatggctatgggagctttaagagatgagatgaaggtgttaaggtgttggcttcatccaggtgcatgataataaaataggaaaatagaatctctattgtatccaaattataagcaggtcacgtttcacatgacaatataagcacaattattaagggatttcatgggatcccataaaataaagttctagtcttgttcacacattttcttggtacaaatgagctcacatatttaccaggtttaggctctttaaatcaactatttatttgttcagcaagggacaagtgaaagagaaaagttttgtcctagtaaaagcgaaccctgtgaaataggtaatctatatatctttatcaaacgcgcaaagtgcatgcagcatggcttatgtggtcacatcagaaggggattttcgtttcttgaggggtgccaaacttatttgcctccgaagatgaagggccaaattactttttttttttttttttgagatggagtcttgctcggttgcccaggctagagtgcagtggcgtgatagctcactgcagcctccgcctcccgggtttaagcaattcttctgcctcagccttcggagtagctgggattacaggcatctgccaccttgcctggctaatttttgtatttttagtagagacggggtttcaccaccttggccaggctggtctcgaactcctgatctcatgatccacccgcctcagcctcccaaagtgctgggattacaggagtgagccaccacgcccggcagggccaaattacttctaattctgagagtaaatgaaggaaatttaggtgaagcaattaagtggctaacaaatgtcaccaagattgttataataacagctattattactatttttactacagtctatattttcacaaatcatacatataaaccaagagtcaaatttgggagaaatcattgtcacctacacactgaatacataaggttcatatttaggatatcagacacttaggtcttcaaagaggtttctgccttgtggacatttaacattttttttttttttttttttttttttttgagatggagtttcgctcttgttgcccaggttggagtgcaatggcgcgatcttggctcactgcaacctctgcctcccgggttcaagcgactctcctgcctcagcctcccaagtagctgagattacagatttgtgccacaacacctggctaactttgtatttttagtagagatggggtttcaccacctcaggctggtctcgaactcctgacctcaggtgatccgcctgcctcggcctaccaaagtgctgggattacaggtgtgagccactgcacccgcctgacattcaatattttttaaaaagtggctgaaccaaatagaagaatcatgaataccagtggtaggtggggtccgtttctgggaggtaaagtctaattccagtggagctgggacatatttctttctctaaaatacagaaatatgattgtgttttgatgtctacttaagaggg

SEQ ID NO: 66787 - DNA, 235 bp, Homo sapiens
ggggagcgtccacctggggcctaggctgggggcaggtagggcgggtttcaaggacaggcttggggcaggtctagagaaagaggggctgggggcggacagtgctgactgggccgggagccagaggcctgcagggctcccacgggagtgaaggacaagagctttctccatcagggagatttggtgccaagtgccagctctcagtggcctrtgaggttcgggggctcaggaaggcata

SEQ ID NO: 66788 - DNA, 1129 bp, Homo sapiens
aaaacctagatgacaggttgataggtccagcaaaccaccatgggacgtgtatacctatgtaacaaacctgcacattctgcacatgtatcccatgtttgtttttaacctaaagtaaaaaataaaaaaaaaaggaaagaaatagcctgtgtttgcagctgattaactttctcagcctgtgttctgccctgagacatttggggcatagagggcttttttcattttggactatatctgtccctttaatccaaactagcaacagtcagcacaactcccctaaaaacttggagggttttctctaaatcttgttgggctttcccacatgtctcaacagctgcatccataattcttttcaggacagaccccttcccactaggtgtgtaggctgctatggaacagagccttgaagtgtcttagaagcccacttcgctacctgggagagaaggtctgctaggtatgaccttaaatctttgtgagatgtttacaaaaggtgttacagccacacctttgaattgttccctaacctgccaccatctgagaatcttgtgccaccacaagaaactggagacatgaagtaattttattttctaccttagcaagtcctggttcttctatattttctctaaattctacctgcaaactaaacagttctctccttagctcatttttctcttcctatacctgatcaatcatacccagttaaaataagttcattggcccttcagcatcctacctagaaatccccttggccacatgttgcatatttatgaggtgcacttcctatcctccatcccactctgtgggtgccacttgtgtcagtgcttcatggtgacagtgtggtttgcactttatccagcctctgatgattccttctgcctttgcaggctcactcatgcttcaccatctctccagtccccaacacaggccctcacagcttttctcagttttgcctgctacgtagtccaaaagacaatgttacatgttttagtttttaarcagcagcacctcacttgtcggtaccaatttttgtttcagagttcacataaaaacttgcacatgaatgttcatggcagcattattcatagtaaccataaaggtgcctggaagcaacccaagtgtccatcaacaatga

SEQ ID NO: 66789 - DNA, 781 bp, Homo sapiens
agttaaaagggccgggaggggttccccccacatttcccgtgggccaggggctctgaggggcttctcgccacagtaagcttggtcctctgccaaagtaacccaggaaggcaggaaggcccttaaaaacttggctttcccaggacaggcatagggggtcctgtgtgttgttgagtaaaaggaaatctccctacccagcagccggcaggggagaggttccaggaaagcccagatgcgttttagacaagatcatcacatttcctctgactctccacagcacttgtcttctttaatgagcatctttcacgctgatcctagtctccccttcccaccgcgctgcctgagtgaagccctagatcctttggatggaagtgctggagagcattgtccaatccatgccccattgggacaccctcctaaaccagagtggctgtatggcttcctccatctcaagtgtcaagactttttttctctttaatttttattttagagacggggtctcgctttgtcacgcaggttggaaggcagtggcgccaccacagctcactgcagcctgaacctcccgggctcaatctatcctcccacttaagcctctggagtagctgggaccacaggcacgtgccaccacacttcgytaatccttaaaaattgtttgcagaaatgggatctcgctatgtttcccaggctggtctcgaactcctggacttaaatcctcctgcctcggcctcccaaagtgctgggattccaggcgtgagggtgaagctctgcactgctgacaaggcgg

SEQ ID NO: 66790 - DNA, 611 bp, Homo sapiens
gggtgcatgaggcttcccaacccaccaggtccttgcaggcagccaggcttgcttctggagagggcagagggtgaagggctgcagctgtgcatgtggtcagccccatcatcctaaggagatattcctgagtgtccaagaaaagcactgctccaccctactttctgaccttgacttatgacccctccaggggtgtagtgaccacctgaaggccactggcccggttactcagaaatgtacctctttgaatgctgcctgcctcgaggtgtacctctcatcatcacagaaggaccacygcttactctttgttaatgaaatctgagatgcttccaccttcctattcttggaaaacattaggagtcccacacctcttgcagccctgatgtcctgggacccagtgtccatcccacatccagcctacttcgtccaagccaggtcctctgagctgtttgctgtgacattcagaggcagctttgctatctgtgaggtgtgttctggtacctacaggctccgtgagcactgtctttcctcactgatctcttctttaattctcttcatgggggcgatttcttgtagcactttttcttctccaaacattttctaacttacctaag

SEQ ID NO: 66791 - DNA, 852 bp, Homo sapiens
gggatccaaaattactagatgcctttcttctatggagtttaaactacttcacatatactatttcactatcctcacaccacgtttttgaaacaagggtgggaaacagatagttgtggcacacactgttcaaagtttccacaagatcctggaagtctgctcccctgtagtgtgctttgcaaaaagaagactctcgtgggcttctgttggcaatgtagactcatccagtctcctgtggatggccacttcattacttctaacccacctttccccccagagctgacatatgtgaaaatgaagactrcaaaaatttgcctctatgtatcttcttggagttttttgatttttaacttttttagtctcggctattttgaactattttctccactgctctaatacattgaagtagagaattgagagtaggccatttcctcttttcctggaaaatattctgatggctctctttgataatttgtctgattgtctcaagcataactgatctttcatgaacacgcagggaatcataatggcgctgcactcggaaagttgagtataatggtgctattcatgaaaatagatgaattcaaaaaaatgggaagcgaatatcaaaatgaagttggacaagtaggtttttataggctccataaaacaaaatgcatcttagaagaggcctgggaggtgggataacaatagcggccgctggaggagggctcctgcgcgctgcccagggctgggctttctttctgatccttacgacgacctggcctagtaggcctcatttcatctgtaaaggactatgttgtggaggaaagagttaaacatactgttgttccctttcctggggaaagggggtcc

SEQ ID NO: 66792 - DNA, 1659 bp, Homo sapiens
aggacactgtaccctgctgtttggaatcataaacgtaagatttaaaatgggctttcctaactaataagtgccagtgagggctcaacagctgatgggcagtggagtccagagtgatggtcccagcaagcgttccagcggcatctgccaaggctggaagctgttgccaggctcgagccagagcagcatgggcaggaagctcctgatgggcagtggaagtgagattggaccagcgtcagagggcggatgtactggtggcaggctcagagagggttgccttgggattcacaaagcatggcccatggtgtccagactgggggcttttgaaggcttaggctgatgttcccccttagccacacccttgctatccaaaaggtcctgctccacatctgaccgcaagcagccctctgacacagtgctggaggctctaagaatctgaagtctgcctgtcccagggaagtccctgcagcaggttctgctgtgtgtgtctgtgtccccaagacatttttcaggacagctttgggaaaagcactttttaactgttaaaaatagagagagcattgatacttgtgaagatatatgtactcactaaaatatatgcagtgagcatatattcactaaatgaacatgcattgaaagtaaacagcatgatgccaagggcttgaagttccttttcttgttgctttgtaggttaatgaggccaggggtgtggattaacagtattctggaatcacacaaaactctccaaaggaaccatttatgccaccgtgataggaactgcgtattgctcacttggatcctaagctgatttttaaattagatctttccgtgatcccttgttgagtctgtttcatgtgcattttattatattctataaatatttcactagttgtttctaataattagagaaaaagtgtctttcatcaatttaagagagaagggaatagtctgttaaggctgagcagttactgcatatgaaggctccaatggtgagcttctaccattagctggcaaaaaagagcaaaaatgcaatggaaaacagtgagggagagagagagagaaagagagagagaggagagaggcacagttactgagccatgtggccaactattaaaactaggagaaaagacacagaaaatgttgtgtgtgggggggggtgggggtaaaatgctccccctgaatagcactgaggctctagggagcccgttaaacccagataattctactagagcaggagggagctggcctgggccttcccagttagcactcactgaaaacaacgggcctctgccgagaagctaaacctgggaccccagggatggtttatctggaagattaggggagaaacgtgcaaggcagccaaggcaatccagccatctctgcagctgggaaaaggagtgattgttttcctgagctgctagcctggatttgcagaaggaaagaatgccttgtttctgtcccctgaagacgcaagctgaaaaaatgtctggctgctcttcgccgccctcccaggttctctcccacagccaagaacgactggctgctgccctgagccrggaggtcacaacgcttgtggagtaaggagctcgggtttttgtttggggctttgttttgttttcttaagtatctgcaggacaatgtttggaagagtcgtatgcccca

SEQ ID NO: 66793 - DNA, 592 bp, Homo sapiens
  misc_feature (1)...(592): n = A,T,C or G
ccgtgcgtccgtgagcagctgtgaacacaagggtctggnacatgggccccagcactggagccnccggtcttgcgtggggaggtgggacaagctcccnccactggacaggaccggggtgagccccagtcagcacacagtcccggcaagccagggtgagcccctggccactttcgacaatggacacgggagaccagaacgctctttcagctcagacccttcttggtgccgcgtgccaggcaacagcccgcccagccaaccgtggggaagtgagggtccctgagggctgaccctggctcggcccttccccacccatgttttctcttgggcctcaatgacgcgtgcctgtcctttcccaccgtgtttgttttcacagcttcctcagttgtgcatgacaaagggcggcagtaggcaaagggaaaacccaaaatccatgcrcggagcccaggctcactccgagcacaagtgggaaaacagacacaatgcaaaatccatgacagagcctgcgctcactccgaccacaagcgggtgaacacgcccaacccaaaatccatggcagagaccgcgctcactccgagcacaagcgggcgaacac

SEQ ID NO: 66794 - DNA, 592 bp, Homo sapiens
  misc_feature (1)...(592): n = A,T,C or G
ccgtgcgtccgtgagcagctgtgaacacaagggtctggnacatgggccccagcactggagccnccggtcttgcgtggggaggtgggacaagctcccnccactggacaggaccggggtgagccccagtcagcacacagtcccggcaagccagggtgagcccctggccactttcgacaatggacacgggagaccagaacgctctttcagctcagacccttcttggtgccgcgtgccaggcaacagcccgcccagccaaccgtggggaagtgagggtccctgagggctgaccctggctcggcccttccccacccatgttttctcttgggcctcaatgacgcgtgcctgtcctttcccaccgtgtttgttttcacagcttcctcagttgtgcatgacaaagggcggcagtaggcaaagggaaaacccaaaatccatgcacggagcccaggctcactccgagcacaagtgggaaaacagacacaatgcaaaatccatgacagagcctgcgctcactccgaccacaagcgggygaacacgcccaacccaaaatccatggcagagaccgcgctcactccgagcacaagcgggcgaacac

SEQ ID NO: 66795 - DNA, 784 bp, Homo sapiens
caggctccacccacctgaggggggctaatgcctcggacacaggctccacccacctgacagggctgctaatgcctcggacacaggctccacccacctgaggggggctaatgcctcggacacaggctccacccacctgacgggggcgccaatgtctcagacacaggctccacccacctggcgggggctaatgcctcaggcacaggctctatccatctgaggggggatctaatgcctcggacacaggctccacctacctgacaggggtgctaatgtctcggacacgggctccaccaacctgaccgggctgctaatgctgcagacaggctccacccacctgacgggggctaatgccttggatacaggctccacccacctgatgggggcggggcctcggacacaggctccacccacctgagagcttagactgcctggcccacaaatgagagcagaagagggctcctgggtgactgcgtggggtagaaccaaagatggaagaatgtccgggcagaaaacgtctcttacaatgaccaggtgcccaggtggcctgccaggctcactagcccaaggcccccaccccgtgacatcgggagccacggcacactttggttgagataattttcatttccacctgctgctgacactgctgggtgtgggtcttagggcgggtcactgaccacttctgtgccggttcccggaaacccgttcctgccacgttccacccccatccccctccgcrtttccccccttgactcctgcgcctttggctccaacacttgcctcctgg

SEQ ID NO: 66796 - DNA, 564 bp, Homo sapiens
gttttccaccaatgccagattcccttccaggaatgacgcccccagggctgcctccggggtccacactctgcccaccagtccagcaccctggctgagtccacctgccaggcaccatttgctcacacacctgaaggctggatgggtggctgtggccctgcttaaaggatcacctctgcatctccaaactgtcttcccagcacaccctgtgtcttgggcctcccaggccactgtccacccacacagaccagcagccccttccttccttccctgcctgaacactgcctgcctcgtgtccctaaggtcaccaacaagtctctctgttctccagccctccatgattccccccattccaatccaagatcacagagaagaaacagctctccaaactgacaggcaggctgcagtrgtgagcacctgtgtcccagctactcaggaagttgaagcaggaagatcccttgagtcctggagttggagagttggagaccagcctgggcaacacagtgaggcccagtctcaaagaaaaaaaaattaatggacaatactaagtggtgaggagaagaactc

SEQ ID NO: 66797 - DNA, 715 bp, Homo sapiens
ctgtggatatccatgtctacagaaacaatgacacaaatgaattcatctaaccctctttaaaaatatatagttttccattttaataccactaactgtggtacaggatttagtttacagtgtttgtaggtctggggaggtattaggactccacactcagataatcaaacagactattcaatttagatgggactttgtataccatctctagattatatacagcccttgctctaaaacatattaggacrgaatgacatgcttatttctattcctagaccagagtttcatttttaaatgcagaaaagaagagggaattcagagtttaaaaatttgagaggtagagggtaagatctaaaccaaagtactcgaataccttaggcagcagatcagtcaataaggcttcttgggtgcacttgtttatttcagagaaaatagaacaggtagtatatatagttaattttgaccatatgtgtaatcataaaggaaataatttactaaaaacttattgtatgccaggcactactctaaataatttctatttatttcatttaaccctttaatcatcctgtgcactaggaattgctgtcatttgctatatgaagaacaatgttggctttaaattcctaatcaccctaacaatatatatattataaactattaagaaaaataataaaatttacactaagaacaatttttgcaaattgatgttgtattcttt

SEQ ID NO: 66798 - DNA, 1227 bp, Homo sapiens
acaaagacttagtagttccaaaatctgtagtcagcaagctggacacccagaaaagccaatggtttaagttccagtccaagagcaaatctaaaggcaggagaagactgatgtccaagctcaaagacartcagacagagagagtcttcctctactcacaggagggcttttttgttctattcagacattcacttgattggatggaatccattcaaataaaggagagcaatttgctttactcagtctactggtacaaatgttaatttcatccagaaacaccttcataaacccagaataatgtttggccaaatatctggatataccatagcccagtgaatttgacacataaaattaaccgccatggatgggataagtagaaaacaaatagcaagatgagatacttaaatttaaccatacaaataattacattaaatgtaaatggtccaaacaccaaaactaaaaggcagatactgacagattagattaaaaaatacctaatgtaaatgacgggttaatgggtgcagcacaccaacatggtgcatgtatacatatgtaacatacctgcacgttgtgcacatgtaccctagaacttaaagtataataattaaaaaaaaagttcttaccctttggagatattcctgtgactccaataataataaattggtaataaatgctcagagtatattgtgaaaaaaaagagctaactacatgctgcctacaagaattgcactttaaatataaagacataaaagtattaaaaataaagtctaaaaaagagatatatcatgctaacactgatcaaaagaaagctagagtgactatattaaaatcagaaaaagtagatttcagagcaaagaaatttgcaagggataaggaaggtcattttgtaataatacagggattgactcatcataaggacataaatgcgtaacataatatagaaagaaaaagtttacatatcaatgacctaacgtgccacattaagaaactagaattttttaaaaggcaaatataaacagaagaaaaaaataaagctaaaaataagaatcaatgaaatagaaaacagaaaaacaatagagaaaaaaaatgacacgattaatggtcattaaaatatttcttgaaaaaaaaagtctatggaaccatgtattcaatggaattctcctcagtaaatgattgaaccacgggaatatgcctgggccccactgaggattttttaattcaagtccagtt

SEQ ID NO: 66799 - DNA, 1227 bp, Homo sapiens
acaaagacttagtagttccaaaatctgtagtcagcaagctggacacccagaaaagccaatggtttaagttccagtccaagagcaaatctaaaggcaggagaagactgatgtccaagctcaaagacagtcagacagagagagtcttcctctactcacaggagggcttttttgttctattcagacattcacttgattggatggaatccattcamataaaggagagcaatttgctttactcagtctactggtacaaatgttaatttcatccagaaacaccttcataaacccagaataatgtttggccaaatatctggatataccatagcccagtgaatttgacacataaaattaaccgccatggatgggataagtagaaaacaaatagcaagatgagatacttaaatttaaccatacaaataattacattaaatgtaaatggtccaaacaccaaaactaaaaggcagatactgacagattagattaaaaaatacctaatgtaaatgacgggttaatgggtgcagcacaccaacatggtgcatgtatacatatgtaacatacctgcacgttgtgcacatgtaccctagaacttaaagtataataattaaaaaaaaagttcttaccctttggagatattcctgtgactccaataataataaattggtaataaatgctcagagtatattgtgaaaaaaaagagctaactacatgctgcctacaagaattgcactttaaatataaagacataaaagtattaaaaataaagtctaaaaaagagatatatcatgctaacactgatcaaaagaaagctagagtgactatattaaaatcagaaaaagtagatttcagagcaaagaaatttgcaagggataaggaaggtcattttgtaataatacagggattgactcatcataaggacataaatgcgtaacataatatagaaagaaaaagtttacatatcaatgacctaacgtgccacattaagaaactagaattttttaaaaggcaaatataaacagaagaaaaaaataaagctaaaaataagaatcaatgaaatagaaaacagaaaaacaatagagaaaaaaaatgacacgattaatggtcattaaaatatttcttgaaaaaaaaagtctatggaaccatgtattcaatggaattctcctcagtaaatgattgaaccacgggaatatgcctgggccccactgaggattttttaattcaagtccagtt

SEQ ID NO: 66800 - DNA, 683 bp, Homo sapiens
actcacacttccacccaaccttgcagctaagatatgactccatgacctgaactcagccaatcagacatgacagtgcataaatgcagatgctggtgtaccagtcaggcaggttgaggtgatctcccaggcagcagtagcagcagctctggcttaagtgtttactgcccgacattggcctggcgagctgtgctatctgtgcccagcaaagtggggaagagcaatggtatctcttgtggagcatttctgtgctgtgcattggtaagtattcctggagtacagcctccaaaactccaagtcaaagagaccctcccaaagataatattgtgagatttaataagttccttttctgcttcaactaatcagagtgggtttctgtagtgatcttgagcaagctgttcactctgagtctcagtttcctcatctgtaaaattgaaaatagtaatacctacaattgttttaagaatcagccctaatgtacataaaacatttattcccataagagcttgcaaactggtcaatatcatttgcattgtaaacagcagtgatccagacttcatacatctgtacaaatgactgamgtgaaagcttttcaataaatagcctttacaagtctttacatggccaggtactgataatacagaaaaagcaacaagaagaatttacattcagtacctttggatcca

SEQ ID NO: 66801 - DNA, 683 bp, Homo sapiens
actcacacttccacccaaccttgcagctaagatatgactccatgacctgaactcagccaatcagacatgacagtgcataaatgcagatgctggtgtaccagtcaggcaggttgaggtgatctcccaggcagcagtagcagcagctctggcttaagtgtttactgcccgacattggcctggcgagctgtgctatctgtgcccagcaaagtggggaagagcaatggtatctcttgtggagcatttctgtgctgtgcattggtaagtattcctggagtacagcctccaaaactccaagtcaaagagaccctcccaaagataatattgtgagatttaataagttccttttctgcttcaactaatcagagtgggtttctgtagtgatcttgagcaagctgttcactctgagtctcagtttcctcatctgtaaaattgaaaatagtaatacctacaattgttttaagaatcagccctaatgtacataaaacatttattcccataagagcttgcaaactggtcaatatcatttgcattgtaaacagcagtgatccagacttcatacatctgtacaaatgactgaagtgaaagcttttcaataaatagcctttacaagyctttacatggccaggtactgataatacagaaaaagcaacaagaagaatttacattcagtacctttggatcca

SEQ ID NO: 66802 - DNA, 683 bp, Homo sapiens
actcacacttccacccaaccttgcagctaagatatgactccatgacctgaactcagccaatcagacatgacagtgcataaatgcagatgctggtgtaccagtcaggcaggttgaggtgatctcccaggcagcagtagcagcagctctggcttaagtgtttactgcccgacattggcctggcgagctgtgctatctgtgcccagcaaagtggggaagagcaatggtatctcttgtggagcatttctgtgctgtgcattggtaagtattcctggagtacagcctccaaaactccaagtcaaagagaccctcccaaagataatattgtgagatttaataagttccttttctgcttcaactaatcagagtgggtttctgtagtgatcttgagcaagctgttcactctgagtctcagtttcctcatctgtaaaattgaaaatagtaatacctacaattgttttaagaatcagccctaatgtacataaaacatttattcccataagagcttgcaaactggtcaatatcatttgcattgtaaacagcagtgatccagacttcatacatctgtacaaatgactgaagtgaaagcttttcaataaatagcctttacaagtctttacatggccakgtactgataatacagaaaaagcaacaagaagaatttacattcagtacctttggatcca

SEQ ID NO: 66803 - DNA, 711 bp, Homo sapiens
ggctcacacctgtaatcccagcactttggaaggccaagatgggtggattagctgagatcaggagtttaagaccagcctggccaacatggcaaaaccccatctcatggtggcgcatttctgtaatcccagttactcaggaggctgaggcagaagaatagcttgaacccaggagacagaggttgtagtgaactgagatcatgccattgcactccagcctgggcaacagagtgagactctgtctcaagaaaaaaaaaacctggaaactttatgaaaagactggaccaagtggaagaaagaatttcaaagcttgaagaccagtcttttgaactcaatcagacaaaaataaagaaaaaaaaagcacttaaaaaatgaacaaagtctttgagagatatgggattatgtaaagtgataaaacctttgaattattgacattcttatgaaagaagagaaaaaataaacaacctggaaaatatatttgaggacatgagtcaagaaaatttccttatcttgccagagaggcagacacccagatagaagaaatccagagaacacctgcaagattctatccaaaatgaatagcaccaagatatatagttaccagactgtccaaggtcaatgctaaagaacaaatcttgaaggcagcaaaaaaaaaaaaaacaaaaaaaagrcgatgggctggggggtgcagactacataagatcacatacaaag

SEQ ID NO: 66804 - DNA, 736 bp, Homo sapiens
ggatccttctgtgatgattcaaatgcacagatcgctgtgggagtgcatgtgttcacattttgagtcctgctattttgtaaattgttagcctgtttttcttctcttggcaaaccttgacagaggccctgacatcatgcatggtacaggggagatagaggagaatcaggcacacagtttcttggtctgttccagaggggctctttgtccagggtggggttctgacatgcacttagaagcctgatgcacctggacaaaattgctgaggggatagcaatgatgatggtaggttttggggaggaggggataactcctgttctttttatggattataagaggctccattgtgttttatgagccccttacttctggctctttgcrggatttccacgacacaaaacaacatgacaggcagctggcctgctctgcagaggaacatcagccaaacccctggtcaggctttggggacccacaggtttcccaacgtagagtacacatataattgggggttcgcaagataaccttaggtagtccatgggggtcacaaaatctaatgccttacatggggccaggcagataaggtaatgagggaagcaggccaggcaaaagacgatggggagaggttgggtccctggcaagctaggcagcacaagtccgattaaaggggcagtgcttcttagctccagccgaatgctgccaggaccatgggtctggtgtttgccagattttttgcattctt

SEQ ID NO: 66805 - DNA, 760 bp, Homo sapiens
atttgggccatttggtctgatgaagagaaggcttgaggttgtgggcaaggaagaagacaggctaaaagaactcactaatagcccaagctttctgacagtggaatgggcctccttgttaagtagtgagcttcccattgctggaggcatgcaagtagaatctatccattttcatacatgtggttttagaagtttaagaatccagagagcttaattatctaaatgccaatgcctttccaacctgaaagaatgattctaagataagaagaatgagaagggtctggtgggaagaggggaaggagtagagaagatcttttacactgaagcaccggaaggggcactgaagggcagttccccygaggaatcctcactagggtggacaaagagggtcagtctgcatcacaggagccatggccctgagcagcaaaggggtggggactgcagggtcttgggaggccattggatgactccagctcctctagtgcagggagcagggctggggttctggtgaagatgccagggccaggatactggtggctgctgtcagccttgctgcctccagacagtatctggcttcctctgcccaggagttcagggccaggtcccatgggggaggagtaggctggtcagcacattagcagaaagtggtatgtggtaagttggtgaggtgcgaggggacttgtgtgctggggtcagggccttggattgtattaccttgagagcaaagagaggcctctgtgagattttaaatcagggaatatca

SEQ ID NO: 66806 - DNA, 664 bp, Homo sapiens
ttaaatgaattattagtaatacattttaacatctagaacagtacctggtacacagtaagcacccagtcaatgcaagttattccgcctcttagtaaaggtatgtgagggtgtagggggagctggtagagtcttctgaatggcaaaccagggagtctgaattcaccatgagaggccttgcctttgcagccttctctttctggtagttsccttgcacagtttttgtttggccctaggaatccttggtgacccagagggcactccctcctgaggctggctgggtatgcctttgcagagcatcacgtgttaggaagttccttctgacagggagcggaagggcagagaggtggtctttggcctgaggagtgtgtgtgtgtgtgtgtgtgtgcatgtgtgtgtgtgtgtgtgcatgtgtgtgtgtgcctgcaggttcccacatggccagaggtggtggtggtggggaggggcatccaggcccacctccctgtccccaccctgccaccctattgatctggccatgtggagtgaagttttctcttttcatttctccatgcctccaacataacctttctgtcttccttgtagctgggaagtcatgccaaaagaatgtgaactatgagagtcttagggtgctccctctcctcccatgctaggtatttgaggatgg

SEQ ID NO: 66807 - DNA, 760 bp, Homo sapiens
tgcctcctgggattcacatccttagttgaccccctcctgttgagtgtgggctgaagctagtgactatctcctagattagattattgagacctgccttctgactctcttgctctcttgctctgatggaagccagctaccatgtgtgagtcatgaagagaccctcatagcaaggtgctgagggaggcttctagcgaacagccagtgagaaacggaggacctcagtgcaacagcccttgaggaacttgatcctgccaatagccacatgagtgagcctaagtggaccctcctccagagactgcagccccagatgacatcttactggaaccctgtgaaagtacacagtgaagctgtgcctggattcttgacccacagaaaatgggagacaatatatgtttgttgtttcaactcactatatctattgctatatcacagcaatagataactaatgcatatgcttatcaataacttatgaaataataatccagattgtaccaaaggggaaattactctctgagtgttttgggaagtggccttccaggtcacacaaacactgggtagcaaatgacagctgctatgcattaaaattggtttgaattctgtccacaggtccattaactcrgcctttggaggaaggcatttaacataatgcctgccaagctccctaacaccatctcccaaggagcaccttgtgaagagtgcagcgtgtgaacatcacacctacatcaccccttcccctagacagttctaccctcatttaaac

SEQ ID NO: 66808 - DNA, 742 bp, Homo sapiens
tgccacctccgcctcccaggttcaagtgatttctggctaatttttgtatttttagtagagacggggttttaccacgttggccaggctggtctcgaactcctaacctcaagtgatctgccctcctcggcctcccagagtgctaggattacaggtgtgaaccaccgcgcccggcctattaaatggcaaattttatgatgtgtgtatgtttccacagtttaaaaaaaaaaaaatggaaagacaaatgctggtttccttccccttttccagagagataatgagctgcccagtggtgatgaggttgaggggacataggtgacaggaaaatcggcccatgtccaagaacccttcaggccctgggactcaaggatgctaaaagacacacagcaaaaagcaaacaagtttgtgcatctggccagggtcccctcctgcctgcctagggatcagattcatccttcactgggatctaccaggaatgctggaagcttccccaggccaaccaccttcccgatggggacaatgaatgatgcagcacatcagatgatggtgccacatccctcctgctgctggcttcaaacaaagcccttctgtgtccccaagcctcccataccaactatggccaagatttcctccttgctgggctctggcaggaagtgtgagcccattgtctggatgtggaaaatcrgggtcaaagtgcctttcttgaaggctagttgagacgattaaatgagaccataaatgtgag

SEQ ID NO: 66809 - DNA, 498 bp, Homo sapiens
cagtcctagcacttacaactgagtgatgctgagcaagggacacaacctctctgagcttcagtgtccacagggatagaatggccatattatctcacggactcaccagaacttgatacaagtacaaatcagttagagaaaaagtccaatgggggccaggtgcagtggctcacacctgtaattccagcactttgggagacggaggcaggtggatcacttgaggccaggagttcgagaccagcctggctaacatggtgaaaccccrtctctactaaaaatacaaaaaattagccgggcatggtggtgggcatctgtggtcccagctactcaggaggctgagacaggagaatggcttgaacccacgagatggaggttgcggtgagccgagatcgcgccactgcactccagcctgggtgacagagcaagactccaactcaaaataaaaaaaaaaaaaaagtccagtggggagacatatcagagaatagttgtccctccctatcc

SEQ ID NO: 66810 - DNA, 498 bp, Homo sapiens
cagtcctagcacttacaactgagtgatgctgagcaagggacacaacctctctgagcttcagtgtccacagggatagaatggccatattatctcacggactcaccagaacttgatacaagtacaaatcagttagagaaaaagtccaatgggggccaggtgcagtggctcacacctgtaattccagcactttgggagacggaggcaggtggatcacttgaggccaggagttcgagaccagcctggctaacatggtgaaaccccatctctactaaaaatacaaaaaattagcygggcatggtggtgggcatctgtggtcccagctactcaggaggctgagacaggagaatggcttgaacccacgagatggaggttgcggtgagccgagatcgcgccactgcactccagcctgggtgacagagcaagactccaactcaaaataaaaaaaaaaaaaaagtccagtggggagacatatcagagaatagttgtccctccctatcc

SEQ ID NO: 66811 - DNA, 665 bp, Homo sapiens
ttagtattcaaaaataagtatctagaagcctgaggaatatattagtaaacagctaattaaattatccctgcagtcacatgaataaggtcactattgatgccaaagacttttggcatgctgtggtttgaatgtgtcccccaaatttcatgtgttggaaatttaatccccaaattcgtgtgttgatggcatttgaaggtggggcctttgggaaaaaatcaggattagataaggccatcagatgaggccctctgatgagaatggtggctttataagaagaaaaagagagatctgagctggcaagctcttgacctcttgccatgtgatgtcctccaccatgttatgatgaggaagaaggccctcaccagatgccagcccctctmccttgggcttcccagcctccagaaccatgagctaaataaaattccactctttacaaattacccagtctgtggtattctgttatagcaacaaaaaaatggactaagggcaattatggttcttgctataaaaatgtgggaaaagcaaagagagatcagatctgatactgagtctgtgtagaaagaagtagacataggagactccattttgttatgtgctaagaaaaattcttctgccttgagattctgttaatctatgaccttacccccaaccccgtgctctctgaa

SEQ ID NO: 66812 - DNA, 708 bp, Homo sapiens
gtgtgtgtgtgtgcagcaagaaatacagtgtgtgtgactgtgtgtccctctggcacaggggatgcacaccaggagctctccctccaatcagtggacagtatttatgaagctcccatttggtgcttggcctgtgtgaggcactaatctgaccacagtgaacaatagcagcaaatgacgagaacagcaagcccctctctctggattagctcgtttaatttttccagctaccctctgaggtagagactgtaagcatcctcatttcagaaatgagaaacctcgcccaaggtcacacaactgagaggtggccagtttctactgttggagctcacagttgagtgggtaagaatttgtaacattacattgcgagctggcaaatgattccgaggttgtttaaatagtcacattgataagtcccagctgaaccgaaactgggttctgggatctcttcatccctgaactagctggttgggaacacacacctcacccccaatacttcatgctgcagtttccagggacagggatgaagagacacacagcacagtggtgtctgtacccacctcatccaaggcagagccctgtttcctgaagactcayttgtggtaggggacagcagcaccactggcatcagcctgggcaaaaggtgggatttcttggctcaaggcaagaactgtgcagtgggcaggggcacagctggcttcaggcacagca

SEQ ID NO: 66813 - DNA, 781 bp, Homo sapiens
tagytaaatggccctctaaaactgtgggatatctcgggagcacccccctggcccagtcctgtggagacggtagaagagacaggcaaaaggaagcgtgtctctgagatcctgaaacttacatgtagttgtggggaggccaggcacagtggctcacatctttaatcccggcactttgggaggccaaggtgggcagatcccttgtggtcaggagtttgagaccagcctggccaacatggtgaaaccccatctctactaaaaatataaaaattagccgggcgtggtggcacatgcctgtaatcccagctactggggaggttaaggcaggagaattgcttgaacccaggaggcggaggttgcagtgagccaagatcacaccactgcactccagcctgggcaacaagagcgaaactccgtctcagaaaaaaaaaaaaaaaaaaaaagcatgtagtttgcggggaaggggtgatttgcacctagagttaccaggcaacaattcaagccaatggcaggaagctggacaggattcacaccggaggtgcgggaaattcctgctggcgcttctgtcagaagccaggtctgggtgttaggcagcgactcataccctgggatcaagaactctgttgccttcaccttcccctccctttcctcttgcttgggggttggacgctcctgagaagacagggtggagggcaaaggtggaactggagatgggcccagacccctctgcccagagagcgggtggtgggagagaggacattgattctggacaggaccaggatta

SEQ ID NO: 66814 - DNA, 781 bp, Homo sapiens
tagctaaatggccctctaaaactgtgggatatctcgggagcrcccccctggcccagtcctgtggagacggtagaagagacaggcaaaaggaagcgtgtctctgagatcctgaaacttacatgtagttgtggggaggccaggcacagtggctcacatctttaatcccggcactttgggaggccaaggtgggcagatcccttgtggtcaggagtttgagaccagcctggccaacatggtgaaaccccatctctactaaaaatataaaaattagccgggcgtggtggcacatgcctgtaatcccagctactggggaggttaaggcaggagaattgcttgaacccaggaggcggaggttgcagtgagccaagatcacaccactgcactccagcctgggcaacaagagcgaaactccgtctcagaaaaaaaaaaaaaaaaaaaaagcatgtagtttgcggggaaggggtgatttgcacctagagttaccaggcaacaattcaagccaatggcaggaagctggacaggattcacaccggaggtgcgggaaattcctgctggcgcttctgtcagaagccaggtctgggtgttaggcagcgactcataccctgggatcaagaactctgttgccttcaccttcccctccctttcctcttgcttgggggttggacgctcctgagaagacagggtggagggcaaaggtggaactggagatgggcccagacccctctgcccagagagcgggtggtgggagagaggacattgattctggacaggaccaggatta

SEQ ID NO: 66815 - DNA, 781 bp, Homo sapiens
tagctaaatggccctctaaaactgtgggatatctcgggagcacccccctggcccagtcctgtggagacggtagaagagacaggcaaaaggaagcgtgtctctgagatcctgaaacttacatgtagttgtggggaggccaggcacrgtggctcacatctttaatcccggcactttgggaggccaaggtgggcagatcccttgtggtcaggagtttgagaccagcctggccaacatggtgaaaccccatctctactaaaaatataaaaattagccgggcgtggtggcacatgcctgtaatcccagctactggggaggttaaggcaggagaattgcttgaacccaggaggcggaggttgcagtgagccaagatcacaccactgcactccagcctgggcaacaagagcgaaactccgtctcagaaaaaaaaaaaaaaaaaaaaagcatgtagtttgcggggaaggggtgatttgcacctagagttaccaggcaacaattcaagccaatggcaggaagctggacaggattcacaccggaggtgcgggaaattcctgctggcgcttctgtcagaagccaggtctgggtgttaggcagcgactcataccctgggatcaagaactctgttgccttcaccttcccctccctttcctcttgcttgggggttggacgctcctgagaagacagggtggagggcaaaggtggaactggagatgggcccagacccctctgcccagagagcgggtggtgggagagaggacattgattctggacaggaccaggatta

SEQ ID NO: 66816 - DNA, 1526 bp, Homo sapiens
cagagccgcccgtccccaactcccaccacccctccaatcagggacagccaagatcaagataacttcctggcccagcctcagggccctcatctttaaaatggggatgctgataaagttggtacctcttaaggctgttgtgggaattgattgataatgttctcataaagcacttagcctatgcctggcacgggacgacctttggggccagccaccattggtgttgctgtcattattattccaccccaagaaccagaaatagagccaaggtcctcgtgcttttccatccaactttatactttacttccccaagcagcccagctggtcttctcaccaccaccaccccccgaccaagtccttragtttagttcaatctgagttcattgagcacctactatgtgaccaatctcatgctgggcactatgaccaaagaggcaagcaaggcacagtgcccaccccagagggctctcagtgacatgaggaggcagcctcaagttcagatctctttgggccaatccagtcagtgaaaagcacatttctgttccaagggagggcaatgaaagggtctggggggtcagggaggcttcctgggggaggcgaataaaggtgggcaggacagttcagagaatgggagccacacaggccaaggccaggaagaaccaaatgccccaggatcttaagagaaccagaagtgatttactattaagggagcacagggttgttaggcggagggtgggagggatcatggatccggaggaaccaatggggtaggacaggttgagggcctgtgtgtgcccaatgagagttaggatgctcccttgcagatgacagtgccatggaagtagcgacatctgcatctttgtcttggagtgggggcccaggggactgtggacagagggaggttagagagatgacaacagtggataggtgctactgaaggcatcttgggaaaatagcgggtaaccagaaagggagtggtgcaggaatggcgaggcggaggtggactgcagagattccagaggtaaaactgtcaggatggcgtggtcggcagaacaatgcctccaaaatgtctgcatcccaatccccggaacatatggatctccttcttatatttcatgacaggggagaattaaggttgcaggtggaattgaggttgctaatcagctgattttgcgatggggagattattctggattatctgggaggaccaatgtaatcacaaggttcttaaatgtggaagagggaggcaggagagtcagcgtcacagcgatgctagggaggaaagactcggagctattgctggctttgaagacggaagggggccaatgtgggcggcctctatacttggaaaaggcaaggaaaccgattctccctcaagagcctccagcaggaacactgtcctgcagacaccttgaatttagccctctgagaccatgtcagatttctgacctatagaactgtaagagagtagatgtgtgttgttttaagccactcaatttgtagtgagttgttacagtagcaatagaaaa

SEQ ID NO: 66817 - DNA, 1526 bp, Homo sapiens
cagagccgcccgtccccaactcccaccacccctccaatcagggacagccaagatcaagataacttcctggcccagcctcagggccctcatctttaaaatggggatgctgataaagttggtacctcttaaggctgttgtgggaattgattgataatgttctcataaagcacttagcctatgcctggcacgggacgacctttggggccagccaccattggtgttgctgtcattattattccaccccaagaaccagaaatagagccaaggtcctcgtgcttttccatccaactttatactttacttccccaagcagcccagctggtcttctcaccaccaccaccccccgaccaagtccttgagtttagttcaatctgagttcrttgagcacctactatgtgaccaatctcatgctgggcactatgaccaaagaggcaagcaaggcacagtgcccaccccagagggctctcagtgacatgaggaggcagcctcaagttcagatctctttgggccaatccagtcagtgaaaagcacatttctgttccaagggagggcaatgaaagggtctggggggtcagggaggcttcctgggggaggcgaataaaggtgggcaggacagttcagagaatgggagccacacaggccaaggccaggaagaaccaaatgccccaggatcttaagagaaccagaagtgatttactattaagggagcacagggttgttaggcggagggtgggagggatcatggatccggaggaaccaatggggtaggacaggttgagggcctgtgtgtgcccaatgagagttaggatgctcccttgcagatgacagtgccatggaagtagcgacatctgcatctttgtcttggagtgggggcccaggggactgtggacagagggaggttagagagatgacaacagtggataggtgctactgaaggcatcttgggaaaatagcgggtaaccagaaagggagtggtgcaggaatggcgaggcggaggtggactgcagagattccagaggtaaaactgtcaggatggcgtggtcggcagaacaatgcctccaaaatgtctgcatcccaatccccggaacatatggatctccttcttatatttcatgacaggggagaattaaggttgcaggtggaattgaggttgctaatcagctgattttgcgatggggagattattctggattatctgggaggaccaatgtaatcacaaggttcttaaatgtggaagagggaggcaggagagtcagcgtcacagcgatgctagggaggaaagactcggagctattgctggctttgaagacggaagggggccaatgtgggcggcctctatacttggaaaaggcaaggaaaccgattctccctcaagagcctccagcaggaacactgtcctgcagacaccttgaatttagccctctgagaccatgtcagatttctgacctatagaactgtaagagagtagatgtgtgttgttttaagccactcaatttgtagtgagttgttacagtagcaatagaaaa

SEQ ID NO: 66818 - DNA, 1526 bp, Homo sapiens
cagagccgcccgtccccaactcccaccacccctccaatcagggacagccaagatcaagataacttcctggcccagcctcagggccctcatctttaaaatggggatgctgataaagttggtacctcttaaggctgttgtgggaattgattgataatgttctcataaagcacttagcctatgcctggcacgggacgacctttggggccagccaccattggtgttgctgtcattattattccaccccaagaaccagaaatagagccaaggtcctcgtgcttttccatccaactttatactttacttccccaagcagcccagctggtcttctcaccaccaccaccccccgaccaagtccttgagtttagttcaatctgagttcattgagcacctactatgtgaccaatctcatgctgggcactatgaccaaagaggcaagcaaggcacagtgcccaccccagagggctctcagtgacatgaggaggcagcctcaagttcagatctctttgggccaatccagtcagtgaaaagcacatttctgttccaagggagggcaatgaaagggtctgggggktcagggaggcttcctgggggaggcgaataaaggtgggcaggacagttcagagaatgggagccacacaggccaaggccaggaagaaccaaatgccccaggatcttaagagaaccagaagtgatttactattaagggagcacagggttgttaggcggagggtgggagggatcatggatccggaggaaccaatggggtaggacaggttgagggcctgtgtgtgcccaatgagagttaggatgctcccttgcagatgacagtgccatggaagtagcgacatctgcatctttgtcttggagtgggggcccaggggactgtggacagagggaggttagagagatgacaacagtggataggtgctactgaaggcatcttgggaaaatagcgggtaaccagaaagggagtggtgcaggaatggcgaggcggaggtggactgcagagattccagaggtaaaactgtcaggatggcgtggtcggcagaacaatgcctccaaaatgtctgcatcccaatccccggaacatatggatctccttcttatatttcatgacaggggagaattaaggttgcaggtggaattgaggttgctaatcagctgattttgcgatggggagattattctggattatctgggaggaccaatgtaatcacaaggttcttaaatgtggaagagggaggcaggagagtcagcgtcacagcgatgctagggaggaaagactcggagctattgctggctttgaagacggaagggggccaatgtgggcggcctctatacttggaaaaggcaaggaaaccgattctccctcaagagcctccagcaggaacactgtcctgcagacaccttgaatttagccctctgagaccatgtcagatttctgacctatagaactgtaagagagtagatgtgtgttgttttaagccactcaatttgtagtgagttgttacagtagcaatagaaaa

SEQ ID NO: 66819 - DNA, 1526 bp, Homo sapiens
cagagccgcccgtccccaactcccaccacccctccaatcagggacagccaagatcaagataacttcctggcccagcctcagggccctcatctttaaaatggggatgctgataaagttggtacctcttaaggctgttgtgggaattgattgataatgttctcataaagcacttagcctatgcctggcacgggacgacctttggggccagccaccattggtgttgctgtcattattattccaccccaagaaccagaaatagagccaaggtcctcgtgcttttccatccaactttatactttacttccccaagcagcccagctggtcttctcaccaccaccaccccccgaccaagtccttgagtttagttcaatctgagttcattgagcacctactatgtgaccaatctcatgctgggcactatgaccaaagaggcaagcaaggcacagtgcccaccccagagggctctcagtgacatgaggaggcagcctcaagttcagatctctttgggccaatccagtcagtgaaaagcacatttctgttccaagggagggcaatgaaagggtctggggggtcagggaggcttcctgggggaggcgaataaaggtgggcaggacagttcagagaatgggagccacacaggccaaggccaggaagaaccaaatgccccrggatcttaagagaaccagaagtgatttactattaagggagcacagggttgttaggcggagggtgggagggatcatggatccggaggaaccaatggggtaggacaggttgagggcctgtgtgtgcccaatgagagttaggatgctcccttgcagatgacagtgccatggaagtagcgacatctgcatctttgtcttggagtgggggcccaggggactgtggacagagggaggttagagagatgacaacagtggataggtgctactgaaggcatcttgggaaaatagcgggtaaccagaaagggagtggtgcaggaatggcgaggcggaggtggactgcagagattccagaggtaaaactgtcaggatggcgtggtcggcagaacaatgcctccaaaatgtctgcatcccaatccccggaacatatggatctccttcttatatttcatgacaggggagaattaaggttgcaggtggaattgaggttgctaatcagctgattttgcgatggggagattattctggattatctgggaggaccaatgtaatcacaaggttcttaaatgtggaagagggaggcaggagagtcagcgtcacagcgatgctagggaggaaagactcggagctattgctggctttgaagacggaagggggccaatgtgggcggcctctatacttggaaaaggcaaggaaaccgattctccctcaagagcctccagcaggaacactgtcctgcagacaccttgaatttagccctctgagaccatgtcagatttctgacctatagaactgtaagagagtagatgtgtgttgttttaagccactcaatttgtagtgagttgttacagtagcaatagaaaa

SEQ ID NO: 66820 - DNA, 524 bp, Homo sapiens
gcccccttcaccaagcacagctgcagtgaccacccgggatatgctatgtgccaggccctgagctgaggacttcacatctgctgtccactgctggcagtcaccctgtgactgtccccattttgtgaattgaggaagctggggctcaggggcttcagtaacttacaaccttgcagctgggactgcagacagctaggatttaaacccaggaaaggctcaacccaaattgaaacagctcgtctcagacactgtggcctgagagaaggggacctgatggaggtcagtcatgcagaaatgggttaaacatgtgacatgaaaagacatacctcacacaagtgacaggtgcaaaacagaggctttaatctgaacagcaatgagggtgcaaggggctgggagcccatagggggatgggggagccaggaagggstgtctggccctgggagagaggtggacgctgggcctcttctgagaaactgtcactgacctttgggactcctgacccagcctctgcccagaccatcaccgga

SEQ ID NO: 66821 - DNA, 730 bp, Homo sapiens
ctgtggtaaaggagagtggatggtggggtgcgaaataagatctctgaactcagcaggaccccagacgagggctcccctcccctctgccgggtgatctgagcctaagccgcacactggaatctagcaatgccaagggawgggatggggcgctctgggagcaccctaaagagaggtgcccttccccttcccttatcttctcggggcccaaggacctgggcagccccacaaagggttagtgccctgagtataattccccttgacccaaaacgcaacccactggcaatctacccgtctcaccaagacattccacacaaaactgtaacaggctgcacagccttgattctacactacaccccacactgagggccacacccagccacacactgtctccaacacttgctcctaagctgcatcttcaccccactcacaatccctggggccactggcgcagcaggaaacataccagcctagaacatccagagagaccgatgttcccgtgcatagcacaagtgagaggctgggtccgggaggcgggtggatggggttgcctggccatgggggtcgtctgaaagggggatggggtcaggcgggcaggcaaaccaggagtccatttcagctccacagacaagcctctctccctccagtaaaaagaccagtggagcccccagacaggacttaggggtgctgcttagggaggtaggggaattagaagagactgggtgcccggggg

SEQ ID NO: 66822 - DNA, 263 bp, Homo sapiens
aattacaagctcttggcatttcaaagtggatttcactttttcccccttctctgctactctggtggtatgctctgtttttagcacttacatggctgagttaatgcttttcagctgttgagttgaattcaattcagtcttccccattccctccctcctatttccacctcccattttccttctcttcttctggtaggagtgtttatctcaacagaacacaatctcacatttagataatgccctgtgtacamgttccaggagccatt

SEQ ID NO: 66823 - DNA, 1036 bp, Homo sapiens
  misc_feature (1)...(1036): n = A,T,C or G
attatgtcacttgtcgtcattcaagggattctttcattttttgaatatgaagaaaytgttctgggcagggttttcaggtgaaagaaggaagaaactgaacatggacgacaaactagcaggcagcgtatctcttctttaactttcttctttttccctgcctccctgtccctttctccctctcttcctcccttcccattcctccttcccttggtccttttcttttccttcccctccctcttccatccttcaagggcaaactctgtctggttagtgaggaaggatggttcagattgcacaagtgcagcagtgggtgtggaaagtccagggaggccaggctgctggagcaaggctggaacagagttggggtggggctggagcagaattggggcaagagcggaagagagttgggatgtgcatccagatagaaataataggacgggccaggctcacgcctgtaatcccagcactttaggaggcgtgaggcaggcggatcaggaggtcaagagattgagaccatcctggccaacatggtaaaaccccgtctttactaaaaatacaaaaattagctgggtgtggtggtggttgcctgtagtcccagctactcaggaggctgaggcaggagaatcgcttgaactcaggaggtagaggttgcagtgagcagagatcatgccactgcattccagcctgggccacagaccaggactccgtttaaaaaaaaaaaaaagtaataagacaggggtcccaggaggctatgtagtatgatatgcaggataatgagaatgagctaaaatgcctgagaaaaaaattgctgattcctagcttttattccttaactacaaaatattgatatttttgtttatatatttgaaaatatttagactattttcagtataacaaatggttctttgactttggttcttattaaataaatnnnnnnnnnnnnnnnnnnnnnnnnnnnnnnnnnnnnnnnnnnnnnnnnnnnnnnnnnnnnnnnnnnnnnnnnnnnnnnnnnnnnnnnnnnnnnnnnnnnnatttt

SEQ ID NO: 66824 - DNA, 1036 bp, Homo sapiens
  misc_feature (1)...(1036): n = A,T,C or G
attatgtcacttgtcgtcattcaagggattctttcattttttgaatatgaagaaattgttctgggcagggttttcaggtgaaagaaggaagaaactgaacatggackacaaactagcaggcagcgtatctcttctttaactttcttctttttccctgcctccctgtccctttctccctctcttcctcccttcccattcctccttcccttggtccttttcttttccttcccctccctcttccatccttcaagggcaaactctgtctggttagtgaggaaggatggttcagattgcacaagtgcagcagtgggtgtggaaagtccagggaggccaggctgctggagcaaggctggaacagagttggggtggggctggagcagaattggggcaagagcggaagagagttgggatgtgcatccagatagaaataataggacgggccaggctcacgcctgtaatcccagcactttaggaggcgtgaggcaggcggatcaggaggtcaagagattgagaccatcctggccaacatggtaaaaccccgtctttactaaaaatacaaaaattagctgggtgtggtggtggttgcctgtagtcccagctactcaggaggctgaggcaggagaatcgcttgaactcaggaggtagaggttgcagtgagcagagatcatgccactgcattccagcctgggccacagaccaggactccgtttaaaaaaaaaaaaaagtaataagacaggggtcccaggaggctatgtagtatgatatgcaggataatgagaatgagctaaaatgcctgagaaaaaaattgctgattcctagcttttattccttaactacaaaatattgatatttttgtttatatatttgaaaatatttagactattttcagtataacaaatggttctttgactttggttcttattaaataaatnnnnnnnnnnnnnnnnnnnnnnnnnnnnnnnnnnnnnnnnnnnnnnnnnnnnnnnnnnnnnnnnnnnnnnnnnnnnnnnnnnnnnnnnnnnnnnnnnnnnatttt

SEQ ID NO: 66825 - DNA, 1036 bp, Homo sapiens
  misc_feature (1)...(1036): n = A,T,C or G
attatgtcacttgtcgtcattcaagggattctttcattttttgaatatgaagaaattgttctgggcagggttttcaggtgaaagaaggaagaaactgaacatggacgacaaactagcaggcagcgtatctcttctttaactttcttctttttccctgcctccctgtccctttctccctctcttcctcccttcccattcctccttcccttggtccttttcttttccttcccctccctcttccatccttcaagggcaaactctgtctggttagtgaggaaggatggttcagattgcacaagtgcagcagtgggtgtggaaagtccagggaggccaggctgctggagcaaggctggaacagagttggggtggggctggagcagaattggggcaagagcggaagagagttgggatgtgcatccagatagaaataataggacrggccaggctcacgcctgtaatcccagcactttaggaggcgtgaggcaggcggatcaggaggtcaagagattgagaccatcctggccaacatggtaaaaccccgtctttactaaaaatacaaaaattagctgggtgtggtggtggttgcctgtagtcccagctactcaggaggctgaggcaggagaatcgcttgaactcaggaggtagaggttgcagtgagcagagatcatgccactgcattccagcctgggccacagaccaggactccgtttaaaaaaaaaaaaaagtaataagacaggggtcccaggaggctatgtagtatgatatgcaggataatgagaatgagctaaaatgcctgagaaaaaaattgctgattcctagcttttattccttaactacaaaatattgatatttttgtttatatatttgaaaatatttagactattttcagtataacaaatggttctttgactttggttcttattaaataaatnnnnnnnnnnnnnnnnnnnnnnnnnnnnnnnnnnnnnnnnnnnnnnnnnnnnnnnnnnnnnnnnnnnnnnnnnnnnnnnnnnnnnnnnnnnnnnnnnnnnatttt

SEQ ID NO: 66826 - DNA, 1036 bp, Homo sapiens
  misc_feature (1)...(1036): n = A,T,C or G
attatgtcacttgtcgtcattcaagggattctttcattttttgaatatgaagaaattgttctgggcagggttttcaggtgaaagaaggaagaaactgaacatggacgacaaactagcaggcagcgtatctcttctttaactttcttctttttccctgcctccctgtccctttctccctctcttcctcccttcccattcctccttcccttggtccttttcttttccttcccctccctcttccatccttcaagggcaaactctgtctggttagtgaggaaggatggttcagattgcacaagtgcagcagtgggtgtggaaagtccagggaggccaggctgctggagcaaggctggaacagagttggggtggggctggagcagaattggggcaagagcggaagagagttgggatgtgcatccagatagaaataataggacgggccaggctcacgcctgtaatcccagcactttaggaggygtgaggcaggcggatcaggaggtcaagagattgagaccatcctggccaacatggtaaaaccccgtctttactaaaaatacaaaaattagctgggtgtggtggtggttgcctgtagtcccagctactcaggaggctgaggcaggagaatcgcttgaactcaggaggtagaggttgcagtgagcagagatcatgccactgcattccagcctgggccacagaccaggactccgtttaaaaaaaaaaaaaagtaataagacaggggtcccaggaggctatgtagtatgatatgcaggataatgagaatgagctaaaatgcctgagaaaaaaattgctgattcctagcttttattccttaactacaaaatattgatatttttgtttatatatttgaaaatatttagactattttcagtataacaaatggttctttgactttggttcttattaaataaatnnnnnnnnnnnnnnnnnnnnnnnnnnnnnnnnnnnnnnnnnnnnnnnnnnnnnnnnnnnnnnnnnnnnnnnnnnnnnnnnnnnnnnnnnnnnnnnnnnnnatttt

SEQ ID NO: 66827 - DNA, 772 bp, Homo sapiens
cttccttacamcttatacaaaaattaattcaagatagattaaagacttaaatgttagacctaaaaccataaaaagcctagaagaaaacctaggcaataccattcaggacataggcatgggcaaggacttcatgtctaaaacaccaaaagcaatggcaacaaaagccaaaattgtcaaatgggatctaattaaactaaagagcttctgcacagcaaaagaaactaccatcagagtgaacaggcagcctacaaaatgggagaaaatttttgcaacctactcatctgacaaagggctaatatccagaatctacaatgaactcaaacaaatttacaagaaaaaaacaaacaaccccatcaaaaagtgggcaaaggacatgaacagacacttctcaaaagaaggcagaataatttgaattaacaataagaaatgcatcaagaatacttttcaaaaattatgaatctagcatggcttttcacaagtaagctgctatgtagttttatgaggctctggtttatcctgtgctccctatagcctttttgccagggagtgtcatgttctcacatggaattcagccaggtttttgggattgtttctgataagaatatgctgaaaggagcaagaagtttcactttgcaggaatctccttagactgaaatgttcagtagctcaacaccattgcccaacaaagtagctaactgaggctatggttatgatttcaggtatcatatccgaggtctgctcattagaaataaaagaggaatggacaccattc

SEQ ID NO: 66828 - DNA, 1062 bp, Homo sapiens
tcaaaaaatcttcagcctctgaaatcctgtaaaattttgtggttctcaaatactagttcctggcgttattccaaattgagctatcctgactggaacctcttgtccttctagttattacrctctcttatcccctcctagacaaattttgggtctccagtttctacattccctctgttttccctatcagcatccctcccatcttccctttcttccttacccattatttcaacaacattcttgtcaatactttcaacctctttgtttttcagtccttctattacaattgtctagcaaggtcgggcacattggcttacgcctgtaatcccagcactttgggaggttgaggcgggcagatcaattgagctcaggagttcaagaccagattggacaacatggaaaaacccccatctctactaaaaatacaaaaattagctgggcatggtagtgcattgcctgtaattccagctactcgggagcctgaggcaggagaatggcttggaccagggaggcggaggctgtagtgagccaagattgcaccactgcactccagcctgggtgacagagtgagaccccattctccactcccccaacaaagaaaaaattgtctagcaaaatctaaccctagattaagccaatcatctaccacctccaggattttatctaggcttgtaaacactgctggagacattcacactatgatgagaacaactatatggtactgttattggaaagggatcctgatccagaccccaaaagagggttcttggacctcatgcaagaaagaattcgggatgagtgcatagattaaagtgaaagcaaatttaagaaagtaaaggaataaaagaatggctactccataggcagagcagcagcatgggctgctggttggctatttttatggttatttcatgattatgtgctaaacaaggggtggattattcatgagtttactgggaaaggggtgggcaattcctggaaccgagagttcctcccgcttttagaccgtatagggtaacttccaaacattgccatgacatctgtaaactgtcatggtgctggtgg

SEQ ID NO: 66829 - DNA, 1062 bp, Homo sapiens
tcaaaaaatcttcagcctctgaaatcctgtaaaattttgtggttctcaaatactagttcctggcgttattccaaattgagctatcctgactggaacctcttgtccttctagttattacactctcttatcccctcctagacaaattttgggtctccagtttctacattccctctgttttccctatcagcatccctcccatcttccctttcttccttacccattatttcaacaacattcttgtcaatactttcaacctctttgtttttcagtccttctattacaattgtctagcaaggtcgggcacattggcttacgcctgtaatcccagcactttgggaggttgaggcgggcagatcaattgagctcaggagttcaagaccagattggacaacatggaaaaacccccatctctactaaaaatacaaaaattagctgggcatggtagtgcattgcctgtaattccagctactcgggagcctgaggcaggagaatggcttggaccagggaggcggaggctgtagtgagccaagattgcaccactgcactccagcctgggtgacagagtgagaccccattctccactcccccaacaaagaaaaaattgtctagcaaaatctaaccctagattaagccaatcatctaccacctcyaggattttatctaggcttgtaaacactgctggagacattcacactatgatgagaacaactatatggtactgttattggaaagggatcctgatccagaccccaaaagagggttcttggacctcatgcaagaaagaattcgggatgagtgcatagattaaagtgaaagcaaatttaagaaagtaaaggaataaaagaatggctactccataggcagagcagcagcatgggctgctggttggctatttttatggttatttcatgattatgtgctaaacaaggggtggattattcatgagtttactgggaaaggggtgggcaattcctggaaccgagagttcctcccgcttttagaccgtatagggtaacttccaaacattgccatgacatctgtaaactgtcatggtgctggtgg

SEQ ID NO: 66830 - DNA, 1291 bp, Homo sapiens
tgcatttaaatatccctattttcacacccactacaaccattatttagtttgcagattcattaaactgtataatgtgtacgtattaactgccaaagaaatcatgtcaaattaggtgtggatttttattgcttaaaaaaaagtacacaataatgcaacatacttaaaaatgtttgaatcacaaaattgttatggtgacaaaaaaaaggtttggataaacatctttcattcaagccttcaaattcatatatttaatattaatgtctccaattacaggaaacactagctgtgatttcagcattggtttgatgaaaccaaaactggattctctaattgctgaaaagtgacagaccacataaatggcaacaacccgaatacaggagtcctgaaattctagccaataggcagaaattcttactcttgcaaatctcggtgtggttagtggaaaagaaaagagaggaagcagagataaaagtaaaaggttaggtgccataacaataaagcatctagtttcttaatgaagtcaacaactgatttcctgcacataagctaatttgaaagcatatataagaatgaggaactttataatgccttatattatatttcctggtacatgtacactgtagattacaggaatgtggatttagggaaacagcatggactttggtgaagacaactctgaacctaccatatatctgtcacttcctggccatacaattgtggccagactatgtatcatctttattctcagctgtctcattattaaaatgtgttggggggtgcacttctgattcaaatgatgaggtgacttcagagtcctatggagtcaagatattctgaaggcccctctaaagagtaagcgactggatcttgtttgtatttatacactttctaaggcattgctggacttataacaataaaataaaaaattagtaaccacccctaagttttttttaatagtgctaaaatcaaaaagtttagttggccctgtacaaattccagtaaaagggctgctatcagaagacaataccttagatcagctatgaagtggggaggctgaaactaagaatcttgtattaggttaagaattttcttttttttttttcctagacaatggctacacctttattgagcatgtatgatatactaaacactttgatattaataattcctcagtaaggagtaaataagctgtgaggaaataagccattattattattattctctctcttttttttattaytgtactttaagttttagagtacatgtgcacaacgtgcaggccagttacata

SEQ ID NO: 66831 - DNA, 716 bp, Homo sapiens
tggctaaatggcatagtttagagtgggaccgaggtctccrggtccccaccagagatggccctatactcctgtcaagatgagaaaaagaaatgaaattaggcttttctggagttcttggatactggagcccacaggacatatttccagttttcctagggaaaagttaaactgatgaccatgggagggtttcaggtgaatgtaatgactcactatgcttattgcttatctgctgtgagtaggatactttgtgtcactttgggtgctggtgaccacagttcccaccactgagtacggatattgatagtttggttgcttgtggtgcagaacatcaccaccacctgaggaggtatgcccctcgtagctaagaatttgagctataccagtggtgcatatccaacccggcctgccacctaagacctcataagttactcaagacttacccaaaacctcttaagttactcagcgaaagcagtactgcataccaagtggagaataagacgctactttcttaattcaaaacccactacagataaaaatgtcacaatgcactcgcctagtctggctagtcagaaaggcctttggggcatgaagactaatggatagtcacaggctgaatgtcaaggtcacttggacagaaagccaaggaagtatcccagatatagtcaaacaaaaattgttggtgctggtggcacttactaatgaaaaagaagccccac

SEQ ID NO: 66832 - DNA, 987 bp, Homo sapiens
taaacagcaaaaacagagtgccaacaaaacatagattccttgcccttctttcttttccagtgtacagaaacatgactgatgtctcatagggatccagtggattcaactgggcaccaaactgcattcattcattttctttctcattctttcttctctttttagattcttcatctcattaaacttatagataaccatctactaattgaagagcttaatgctcaagttcattattttgttcaacaaatgtttatcaaacaactttgaagtgtctgacactcttctaggcaccyaggatatatcagtgaacaaaatatacgaatttcctgccctattggaacttacattatagtggcagtagatggtatagacagaaaacaataaacataacaagtgagtaaattatactgtgtggtagaaattgctatggaaagcaagtagatcacgtaagcagggggaccaaattgtggtaagggggctgggtgtggtggctcatgcctgtaatcccagcactttgggagaccgaggcgggcagatcacttgaagtcagaagtttgagatcagcctggccaccatggcgaaaccccatgtctactaaaaatacaaaaattagcccagcgtggtggtgcgtacctgtagtcctagctactccggagtctgaggtatgagaatcactggaacccaggagatggaggttgcaatgagccaaggtcacgccactgcactccagcctgggcgacagagcaagactctgtctccaaaacaaacaaacaaacaaacaaacaaacaaacaaagaattgtggtaagggatggtgggaagaaagtgttgccattttaaattggattgccaaggtaggctgaaattgagcaaaactcatttccacttccggcctcttattccgtacatgttgtcaaaccttgttgagttcagttctacccacccaaaatgttatctcatctgtgattcctgccctgattccctcacactc

SEQ ID NO: 66833 - DNA, 789 bp, Homo sapiens
catccattcgatagtgctccatgccagactatgcaagaggccttgaggcataggtaccagctagagcttgcccttagagttcagttcctgaacacagaacacagctgctttgactcagcacccccggttctgtttctccactcatccgtccgccccctggcacggctgtataaagcttctacagctgggttattactctgcgtttgtttgtgtgttttctttgacggtgttaagtcattttgcatgtgcatcctgcccacatgaggacagcttggagagcaggaactgaaactgctccctcttatagatctgggattctgctctgggagcaggcctggtcacaaggatgccaataggcagggagaggacacccggagtgcacagggagagggcacccaggccgtgtgtgtgtgtgtgcatgcatgcaaataaattgacattgagggctaggacacaagtctagtgggggctggttttttccaggcattttaattttttacttattccctcatcctgcagggcagctgcactcacatatgaccctagtcgagacttaggaggtcttaggggggcaagttccaggctgtattagaccaatgttagacctgttgcatattagatgaatgagctgcaaagcaatgtaccatttctctttgatatagatgacatttctcacctactggaactatctaggtagyattttgtccaatctaaggagctgtgtgactttaggcaagtcacttaacctctctgagttcagaacttttatcttggaagttaggaaaggga

SEQ ID NO: 66834 - DNA, 1172 bp, Homo sapiens
gcggtaaacaaacctccatgtctcaagctgaccacacttgtatctggacttgccagctgattagctctgttcccaccaggctcgttcaaagacccacagcttgagggggcagaggtgaggaacatgaacaatgctagtgaattatcacactgagtgacctctaacatgccaggtaccgcttaagtcatcctgtccttaggatacttttctgacctgaaaggatggaccaggtcacatctcaccatttatctggcagcccagggcragtagaaggctggtgcttcagacagagaagggggaaggaatcaaatttattattgaatacctattatgcaccagtctatgtgaggaacattacaaaagttattctgttcagtcgtgctgacaaccttctaatgtctgcattaccatcccctgtttcctagccaaggaaattgaggcctggagaggagaaaccacttgctccgggtcatatagatctccattttgaaatcacttgtatctgcagttgatttggccctatgatatctgtgacatctggtaacttgtacacttatactaaggcttacattctaacctaacttttcatggggccttatctcccagttagactattaatatgtataaggatttgctgaacggttgtgtgaataagctttcttaagtgatcaaggaaggcttcctgaaggaactgggaccctgaatgaggaggcagggagggcaatgacttttcctgtgtcatcctacacaggtatgtgacaacttgtaggcaggaagtccctcatcccacaccccacctgcattcaggtagaattgactcagggtcaggatatagaagcttgatctatggcccatctaatgaataaatgtcacttgtgttcttaatctatatggcttggactctttataaaagctccaagataaaggatggggactagaagctttcaagcctacaaggactccagggaaggacaaggaccatagttggaggcttgaatggggcaggaatggggagagtgaccaaggaacagaagagaaggaagacaaaggcagaagataaactgagaaacaaaaaacacttttgacaaaaatgaagtagctaaaaaagacaacaaaacaaaaccgaagacaagagatatgcaaaaaagacagcagcatgtgattagattgct

SEQ ID NO: 66835 - DNA, 489 bp, Homo sapiens
  misc_feature (1)...(489): n = A,T,C or G
gtgtgtgtgcgtgtgtgtgtgtgtgtrtatatncatatatatagacgcatagatatatattttgagatggggtctcactgtgtcacctaggctggagtgcaatggggtgatcttggctcactgcgacctccgcctcccgggttcaagtgattttcctgcttcagcctcccaagtagctgggattacaggtctgcaccgccacacccggctaatttttgtgtttttagtagagacgggggtttcaccgtgttggacaggctggtctctaactcctgacctcagatggtccacccgcctcggttctcaaagtgctgggattacagacgtgagccaccacgcctgtcagatataccatatttttttatccatctatcagttggtagacatttgggtgatttttattttttaaggaagatgcagagaacaagttcttggagacttaaaatatgttgtttccttcaatgaagatgattactttgcagatggcga

SEQ ID NO: 66836 - DNA, 489 bp, Homo sapiens
  misc_feature (1)...(489): n = A,T,C or G
gtgtgtgtgcgtgtgtgtgtgtgtgtatrtatncatatatatagacgcatagatatatattttgagatggggtctcactgtgtcacctaggctggagtgcaatggggtgatcttggctcactgcgacctccgcctcccgggttcaagtgattttcctgcttcagcctcccaagtagctgggattacaggtctgcaccgccacacccggctaatttttgtgtttttagtagagacgggggtttcaccgtgttggacaggctggtctctaactcctgacctcagatggtccacccgcctcggttctcaaagtgctgggattacagacgtgagccaccacgcctgtcagatataccatatttttttatccatctatcagttggtagacatttgggtgatttttattttttaaggaagatgcagagaacaagttcttggagacttaaaatatgttgtttccttcaatgaagatgattactttgcagatggcga

SEQ ID NO: 66837 - DNA, 705 bp, Homo sapiens
atccctgataaatcaaggatgtgttgcttgcattggggatttgaggatgttaagtgtttctcttgaatgaggaacataatctataaacagagattactgaactctgtctgagcatctgctggatattttaggggaatgtggcctgttaagagtctggaaatcagatcacgtgggctaaaccctgtttaattacaggacagggttgattctgggacagaactttgactaaagcctcatcccaacaaaatcccaattctgycatagtccaatctcccagctagtatgtaacctacattccatcaccaagctgaagaaccggctgaacaagtttactcattactgaaaatggaaacacatttgtaccacagaaaacaccaagatttaggccagctagatgcttctcagagtaagatttggcctctaattttgcccagagatcctacatgagaatctctcaatttgtatttcaaagtaaaggctttctatctccagggtgtgtgtgtttacacatcaagtggaaagatcaagcaagcaccagttccagaacgagccaagaaatctgcccacctcatagtgtagccgccggactttgctcatagctggcaggctggactgcttcccactgatgttccgaaacacctgaaataccatgaagcatagaaacaggaagtagaggcagaggcagattccagccacgatgatgaa

SEQ ID NO: 66838 - DNA, 641 bp, Homo sapiens
gcatgctcacctgggccgcctattgataatagagtctactatgttgatggttgctagagtcaccatcccaatactgatggagtaatgacatcttcattattctcgcccatgctctcttcccttcccctccgaaacttctcctaatgaggcaggatggttacgtagtaaatctaaccctgtcacacaaccgaaacgccctgttggaagtttcagacagaaatcacacaggctgctgcatgacggccatttatgatttctcagactttcctccagtgctttcttttccyggtgtgtgcgtgacatttctatcatgtggcattctcagcacatgtgtcaggcttcaccctaaacaagcctgctggtgtatgatgataaatagtgccacgatctgcagcgattcccacccctccacatcctggcaaaggtctcctagcaactgttgttatgggcaacactagcatgtttagttcaattcaggggctacgggccatttctggtctcctgatggaggttcaagtctatgccctggagattcggatcccctcacaaatccacatgcccattataacttcccttgtacctgcataacgtttaaccattattattaaatttgtccgttcagcaagattgaaactgccatt

SEQ ID NO: 66839 - DNA, 641 bp, Homo sapiens
gcatgctcacctgggccgcctattgataatagagtctactatgttgatggttgctagagtcaccatcccaatactgatggagtaatgacatcttcattattctcgcccatgctctcttcccttcccctccgaaacttctcctaatgaggcaggatggttacgtagtaaatctaaccctgtcacacaaccgaaacgccctgttggaagtttcagacagaaatcacacaggctgctgcatgacggccatttatgatttctcagactttcctccagtgctttcttttcccggtgtgtgcgtgacatttctatcatgtggcattctcagcacatgtgtcaggcttcaccctaaacaagcctgctggtgtatgatgataaatagtgccacgatctgcagcgattcccacccctccacatcctggcaaaggtctcctagcaactgttgttatgggcaacactagcatgtttagttcaattcagkggctacgggccatttctggtctcctgatggaggttcaagtctatgccctggagattcggatcccctcacaaatccacatgcccattataacttcccttgtacctgcataacgtttaaccattattattaaatttgtccgttcagcaagattgaaactgccatt

SEQ ID NO: 66840 - DNA, 1540 bp, Homo sapiens
ccatgaaagaacttctgagttcccaagatatcacagcagtgcaacatgtggatcattagaattcttctcatgtatcatggtgctaatttaagatcagaaattgcccttacttattctgatttccaaagtgttgacattctctcatctaagctcctgttcttcttggactccgtaaatggatttgtgtttggctggctgagaaaaggaattgcaaatgcttggtagaactttcttctctcatcctctcaacactgagaaactcaaaagagaaagaaaggatatrgtagcttttgattctattcttgctcaactatttcttagactgtctcttgaatggaagcatgggaaggacgagacgctcccgtgtccctcagcaatattgccaaacctcctggctgagtgaacttctgcaacttgacctcttgcctttccaagtttttgctcaaattgcattttttatattcatgctgctctttcttaagtagtggcttgagaaacaatgtgccaggaaaatcaaaatttttatgatagaaaaagagctacaagaagagaaacaaaaccatctcccacttctcagttaatctcagtatctaataacaccctggaagtcaaacagctgttttttccagcaagatgcaagagtcctggtgtacacctgtctccaatgccagaagtcactttcactattgcagacatgccctttggaggccgtaatctttccccagcatgaggagtatgaaaaccctgcatgtgctctgtgtaaagcaagcctaaacaaatccacccttcaaaaaatccatttggtttgaaggcagggatgagaccaagggaggggatggagggagacagagtccatactgggaagcttcctggatgggacaaacttatcaaacattaggaatctcgttgcccctgctgctgaggccaccaaaagaagtgaaatggcaatggtcacatggcctcctgttaaatgattggaacaacacatttgcattctcacatagactatatttcacatcactcttggcgttctgcactgttaaggtcaatctctaataaaattgcaaagcaggcaaagtctatcttctgacttcacccaccagtgtcccaatatttcttcttgctgccatcttgctctttgacaggccccccctccgtgatgcattcatgctctcaggtggtcatcaggcatggacctgctgaggtgtagactggccgttgtgctcttcctcttctgtgtttctatagaaattctatgtgtgtacaattgcataaagaaactgatcccattgctgagattacagctttcttacatgttctgcactagcctgcaagttccctaagggaagaggctctgtttccttcctttttgtatcctctcatgttagcattgagttttacagttagtagttacagaatgcattttttaaaaaatgaattgaatgaagtgattaggatactagttaataacaccttaagtgtattttctctgagccacataaatgtttcaaaagataacaaaggaccacaaaatctttag

SEQ ID NO: 66841 - DNA, 908 bp, Homo sapiens
  misc_feature (1)...(908): n = A,T,C or G
tnnnnnnnnnnnnnnnnnnnnnnnnnnnnnnnnnnnnnnnnnnnnnnnnnnnnnnnnnnnnnnnnnnnnnnnnnnnnnnnnnnnnnnnnnnnnnnnnnnnngaacttcacctaaaatgatgatttttctgttgcttgtggagacaagtgtttcatctctcacctgctgtgggagcctctatgtttttactctaagacttctttattgccattagtgtccaaaacaatctgtgactcacttcccacatatgtgtaaaagaccttggaggtacaatgtgtgggaattaatggtttgggtcaactttcactagtgggggaaataatgctttagatagagtattcttgcttccctctccctctctgtcctttgccccatggactgttggaagacaaattmttcattttgctcctctaactatacttgaaattcaatataaggtcaagcagtctgcttgtcaaaaggtggctattttagtaatatacatgcttatacttgctctttctatcactcactcattcagtctttctctttctcactcttcagccagggatagcaaactaaatcatgacaaaatttatttttgataacttttgtgagtataagaatcacatttttttcacaatgattgttgttctacaggtaataagaaggtagaagaaaaaaagaaggaagaaaatctggggaaaagaatttaagaagcaaattgaaggaagtaaagaatgttgtaaagaaaatgacactaattgagaaaagatacatatgtttcctataaaagaaaagaaagagaaacctgttgtngttcttatagatgaaaaccaaattggcattaacatggattcagacncacttaaaaataacgaagggcagttggccgaacaggactctttttgcatgagagatgaataata

SEQ ID NO: 66842 - DNA, 908 bp, Homo sapiens
  misc_feature (1)...(908): n = A,T,C or G
tnnnnnnnnnnnnnnnnnnnnnnnnnnnnnnnnnnnnnnnnnnnnnnnnnnnnnnnnnnnnnnnnnnnnnnnnnnnnnnnnnnnnnnnnnnnnnnnnnnnngaacttcacctaaaatgatgatttttctgttgcttgtggagacaagtgtttcatctctcacctgctgtgggagcctctatgtttttactctaagacttctttattgccattagtgtccaaaacaatctgtgactcacttcccacatatgtgtaaaagaccttggaggtacaatgtgtgggaattaatggtttgggtcaactttcactagtgggggaaataatgctttagatagagtattcttgcttccctctccctctctgtcctttgccccatggactgttggaagacaaattattcattttgctcctctaactatacttgaaattcaatataaggtcaagcagtctgcttgtcaaaaggtggctattttagtaatatacatgcttatacttgctctttctatcactcactcattcagtctttctctttctcactcttcagccagggatagcaaactwaatcatgacaaaatttatttttgataacttttgtgagtataagaatcacatttttttcacaatgattgttgttctacaggtaataagaaggtagaagaaaaaaagaaggaagaaaatctggggaaaagaatttaagaagcaaattgaaggaagtaaagaatgttgtaaagaaaatgacactaattgagaaaagatacatatgtttcctataaaagaaaagaaagagaaacctgttgtngttcttatagatgaaaaccaaattggcattaacatggattcagacncacttaaaaataacgaagggcagttggccgaacaggactctttttgcatgagagatgaataata

SEQ ID NO: 66843 - DNA, 2816 bp, Homo sapiens
gatcccagaggtgggccctctaagctccttcgtgttgcagggttagggcacaagcagggtactgacaatgttcaaggaggcccctggagtcgccagaagataactatcaggttctcggttttcactgcgactggcgcccacccttgataaaccaaaggcaaacccaattgaggcattccagcagccaggtcagttgtcagcaaaggcatcacagaggaaggcatttggggtagaytggagctggggaataagcagtcaatgggaatcgaaaggaagtagccagtggaagcagccccaagctcttctccagtgagcgagcattgcaccaaccacaaagagctgctgcattaattacatgtctccttgctaagattcgctcccagagtgtctacgaaaactaatgactgcaatcacagcacctctcaagaacttttcacctgccaagcgctttacaagattacctcattaatccactctgccctcctatgaagctggtaattatcattatgcccagttcagagatggggcaactgggcagacatgaagcaaccgcctgaaatccctgggcacatcacagcccacaaagcagagcacaggtctttgagccgtcttatttctgttttatcttttatcccaggttccccattgatacaagcagcccagaagagggtagaaaatagatgaggtggatcttaattccatgcaaccgctgattaatttccttttaaagccatcattctaaaaacaacaacaacaacaaaagtgactgttttataaatgaggtattgctggactctagccaatgacccatttattgccaaaacaatgcattaattcaatcaacagatacttatcaaatacctcccatatttcaaacactataccatgtactgtatacagtgcttagtgtaaaaaataatatggatgcacgttcgattttgttgtaatattatttaacccaaatatagggaattcctactgactatttaattaaaatatctattgttttaaaattccctttgaccctaacttttgcttcctctagatttcattgatacaagaaagaactaattttttaacactgtaatccattaacattatcccaagtcttggaaaagaaacacttttttttttttagacgaagtcttgctctgttgcccaggcgggagtgcagtggcaagatcgcggctcactgcaatctccgcctcctgggttccagcgattctcctgcttcagcctcctgagtagctgggactacaggtgctcaccaccatgcctggctaatttttgtattttttagtagagacgggggtttcaccatattggccaggctggtctcgaactcctgacctcgtgatccgcaagcctcggcctcccaaagtgctgggattacaggcgtgagccactgagcctggcctaagaaacattacttttgcccattaatggctctgaactttttctgcagtgacttccattaactgatagaataagtaggtgtttctcctcttagtacccaacgtagagcaggcagccttcctcgtgccaaggtgataggacaacctagagtgtcaaagatttaggatgttaattttcattattatcacggtcctttttttaaaacctttccttcaatgccctcagtttaaggttctgtgagatgaaaatgagttgatgtttcatccttggctatgtctctaggatcatagtaacaagatttttgttttggtttgttttgtaacctgaaagtttccataaagatccaaggctgacacctttgtatttatgtgatattaaatacatgctattacttcttggcttaaaattttaaaaagtaaatcatatgaattttgaaacaaggacccatgtacacaatttgtagaggttagaaactataagaatatagctttcaaaaactcagtgcattctgagggtagaaaagcaaaactgatgatttctctagtgatttctgattatcccaactgggattaaaaccaagtggcccatgtatcaacatgagaaggatagaggaatggttctaggtcataggatgcagctatggaattctaggaaatagagatagttcagatctgcatattaaaatcccaaatcagttccttccagaagggtcgggaatgtgactgcccctgtatgtactgttggttgccagagcagctgggaagggagagggaaccatttatcataaatccctcctggggtgcctcatcacaccctctttgtgttgggcaaacgcttcacctctataagcgcaaaggcatggtaaagaccttatcacatagagtcatgaagaatgaatgatcaaggtgtcaattgggccaaaatctgcagtttaaaggaggaagactcaagacttggaagcaacaaacataaatactgctgggccactggaaccagtgaactgaacgggtgtgggtttcgagcagctttcccaacctcggcactgctgactttctggactggtgaattctttgtcctgggggtgggagggggtggggctttccccgtgcattgtaggatgttaagcagcatacctcatctctaccgaataaaagccaatagtgcccccgaattgtgacaaccaaaaatctctccagtcaatgacaaatgtcctggggctgggaagagggaacaaaatagcccccaattaagaaccactgtttatcccccaagtactttttcccaaagttagataaagtttggggagatgctttaagattataaataatattttctgttacagtgccattgaactactagatgaagtaaatctcatttctgcttcatttgatgcttaggat

SEQ ID NO: 66844 - DNA, 2816 bp, Homo sapiens
gatcccagaggtgggccctctaagctccttcgtgttgcagggttagggcacaagcagggtactgacaatgttcaaggaggcccctggagtcgccagaagataactatcaggttctcggttttcactgcgactggcgcccacccttgataaaccaaaggcaaacccaattgaggcattccagcagccaggtcagttgtcagcaaaggcatcacagaggaaggcatttggggtagactggarctggggaataagcagtcaatgggaatcgaaaggaagtagccagtggaagcagccccaagctcttctccagtgagcgagcattgcaccaaccacaaagagctgctgcattaattacatgtctccttgctaagattcgctcccagagtgtctacgaaaactaatgactgcaatcacagcacctctcaagaacttttcacctgccaagcgctttacaagattacctcattaatccactctgccctcctatgaagctggtaattatcattatgcccagttcagagatggggcaactgggcagacatgaagcaaccgcctgaaatccctgggcacatcacagcccacaaagcagagcacaggtctttgagccgtcttatttctgttttatcttttatcccaggttccccattgatacaagcagcccagaagagggtagaaaatagatgaggtggatcttaattccatgcaaccgctgattaatttccttttaaagccatcattctaaaaacaacaacaacaacaaaagtgactgttttataaatgaggtattgctggactctagccaatgacccatttattgccaaaacaatgcattaattcaatcaacagatacttatcaaatacctcccatatttcaaacactataccatgtactgtatacagtgcttagtgtaaaaaataatatggatgcacgttcgattttgttgtaatattatttaacccaaatatagggaattcctactgactatttaattaaaatatctattgttttaaaattccctttgaccctaacttttgcttcctctagatttcattgatacaagaaagaactaattttttaacactgtaatccattaacattatcccaagtcttggaaaagaaacacttttttttttttagacgaagtcttgctctgttgcccaggcgggagtgcagtggcaagatcgcggctcactgcaatctccgcctcctgggttccagcgattctcctgcttcagcctcctgagtagctgggactacaggtgctcaccaccatgcctggctaatttttgtattttttagtagagacgggggtttcaccatattggccaggctggtctcgaactcctgacctcgtgatccgcaagcctcggcctcccaaagtgctgggattacaggcgtgagccactgagcctggcctaagaaacattacttttgcccattaatggctctgaactttttctgcagtgacttccattaactgatagaataagtaggtgtttctcctcttagtacccaacgtagagcaggcagccttcctcgtgccaaggtgataggacaacctagagtgtcaaagatttaggatgttaattttcattattatcacggtcctttttttaaaacctttccttcaatgccctcagtttaaggttctgtgagatgaaaatgagttgatgtttcatccttggctatgtctctaggatcatagtaacaagatttttgttttggtttgttttgtaacctgaaagtttccataaagatccaaggctgacacctttgtatttatgtgatattaaatacatgctattacttcttggcttaaaattttaaaaagtaaatcatatgaattttgaaacaaggacccatgtacacaatttgtagaggttagaaactataagaatatagctttcaaaaactcagtgcattctgagggtagaaaagcaaaactgatgatttctctagtgatttctgattatcccaactgggattaaaaccaagtggcccatgtatcaacatgagaaggatagaggaatggttctaggtcataggatgcagctatggaattctaggaaatagagatagttcagatctgcatattaaaatcccaaatcagttccttccagaagggtcgggaatgtgactgcccctgtatgtactgttggttgccagagcagctgggaagggagagggaaccatttatcataaatccctcctggggtgcctcatcacaccctctttgtgttgggcaaacgcttcacctctataagcgcaaaggcatggtaaagaccttatcacatagagtcatgaagaatgaatgatcaaggtgtcaattgggccaaaatctgcagtttaaaggaggaagactcaagacttggaagcaacaaacataaatactgctgggccactggaaccagtgaactgaacgggtgtgggtttcgagcagctttcccaacctcggcactgctgactttctggactggtgaattctttgtcctgggggtgggagggggtggggctttccccgtgcattgtaggatgttaagcagcatacctcatctctaccgaataaaagccaatagtgcccccgaattgtgacaaccaaaaatctctccagtcaatgacaaatgtcctggggctgggaagagggaacaaaatagcccccaattaagaaccactgtttatcccccaagtactttttcccaaagttagataaagtttggggagatgctttaagattataaataatattttctgttacagtgccattgaactactagatgaagtaaatctcatttctgcttcatttgatgcttaggat

SEQ ID NO: 66845 - DNA, 2816 bp, Homo sapiens
gatcccagaggtgggccctctaagctccttcgtgttgcagggttagggcacaagcagggtactgacaatgttcaaggaggcccctggagtcgccagaagataactatcaggttctcggttttcactgcgactggcgcccacccttgataaaccaaaggcaaacccaattgaggcattccagcagccaggtcagttgtcagcaaaggcatcacagaggaaggcatttggggtagactggagctggggaataagcagtcaatgggaatcgaaaggaagtagccagtggaagcagccccaagctcttctccagtgagcgagcattgcaccaaccacaaagagctgctgcattaattacatgtctccttgctaagattcgctcccagagtgtctacgaaaactaatgactgcaatcacagcayctctcaagaacttttcacctgccaagcgctttacaagattacctcattaatccactctgccctcctatgaagctggtaattatcattatgcccagttcagagatggggcaactgggcagacatgaagcaaccgcctgaaatccctgggcacatcacagcccacaaagcagagcacaggtctttgagccgtcttatttctgttttatcttttatcccaggttccccattgatacaagcagcccagaagagggtagaaaatagatgaggtggatcttaattccatgcaaccgctgattaatttccttttaaagccatcattctaaaaacaacaacaacaacaaaagtgactgttttataaatgaggtattgctggactctagccaatgacccatttattgccaaaacaatgcattaattcaatcaacagatacttatcaaatacctcccatatttcaaacactataccatgtactgtatacagtgcttagtgtaaaaaataatatggatgcacgttcgattttgttgtaatattatttaacccaaatatagggaattcctactgactatttaattaaaatatctattgttttaaaattccctttgaccctaacttttgcttcctctagatttcattgatacaagaaagaactaattttttaacactgtaatccattaacattatcccaagtcttggaaaagaaacacttttttttttttagacgaagtcttgctctgttgcccaggcgggagtgcagtggcaagatcgcggctcactgcaatctccgcctcctgggttccagcgattctcctgcttcagcctcctgagtagctgggactacaggtgctcaccaccatgcctggctaatttttgtattttttagtagagacgggggtttcaccatattggccaggctggtctcgaactcctgacctcgtgatccgcaagcctcggcctcccaaagtgctgggattacaggcgtgagccactgagcctggcctaagaaacattacttttgcccattaatggctctgaactttttctgcagtgacttccattaactgatagaataagtaggtgtttctcctcttagtacccaacgtagagcaggcagccttcctcgtgccaaggtgataggacaacctagagtgtcaaagatttaggatgttaattttcattattatcacggtcctttttttaaaacctttccttcaatgccctcagtttaaggttctgtgagatgaaaatgagttgatgtttcatccttggctatgtctctaggatcatagtaacaagatttttgttttggtttgttttgtaacctgaaagtttccataaagatccaaggctgacacctttgtatttatgtgatattaaatacatgctattacttcttggcttaaaattttaaaaagtaaatcatatgaattttgaaacaaggacccatgtacacaatttgtagaggttagaaactataagaatatagctttcaaaaactcagtgcattctgagggtagaaaagcaaaactgatgatttctctagtgatttctgattatcccaactgggattaaaaccaagtggcccatgtatcaacatgagaaggatagaggaatggttctaggtcataggatgcagctatggaattctaggaaatagagatagttcagatctgcatattaaaatcccaaatcagttccttccagaagggtcgggaatgtgactgcccctgtatgtactgttggttgccagagcagctgggaagggagagggaaccatttatcataaatccctcctggggtgcctcatcacaccctctttgtgttgggcaaacgcttcacctctataagcgcaaaggcatggtaaagaccttatcacatagagtcatgaagaatgaatgatcaaggtgtcaattgggccaaaatctgcagtttaaaggaggaagactcaagacttggaagcaacaaacataaatactgctgggccactggaaccagtgaactgaacgggtgtgggtttcgagcagctttcccaacctcggcactgctgactttctggactggtgaattctttgtcctgggggtgggagggggtggggctttccccgtgcattgtaggatgttaagcagcatacctcatctctaccgaataaaagccaatagtgcccccgaattgtgacaaccaaaaatctctccagtcaatgacaaatgtcctggggctgggaagagggaacaaaatagcccccaattaagaaccactgtttatcccccaagtactttttcccaaagttagataaagtttggggagatgctttaagattataaataatattttctgttacagtgccattgaactactagatgaagtaaatctcatttctgcttcatttgatgcttaggat

SEQ ID NO: 66846 - DNA, 2816 bp, Homo sapiens
gatcccagaggtgggccctctaagctccttcgtgttgcagggttagggcacaagcagggtactgacaatgttcaaggaggcccctggagtcgccagaagataactatcaggttctcggttttcactgcgactggcgcccacccttgataaaccaaaggcaaacccaattgaggcattccagcagccaggtcagttgtcagcaaaggcatcacagaggaaggcatttggggtagactggagctggggaataagcagtcaatgggaatcgaaaggaagtagccagtggaagcagccccaagctcttctccagtgagcgagcattgcaccaaccacaaagagctgctgcattaattacatgtctccttgctaagattcgctcccagagtgtctacgaaaactaatgactgcaatcacagcacctctcaagaacttttcacctgccaagcgctttacaagattacctcattaatccactctgccctcctatgaagctggtaattatcattatgcccagttcagagatggggcaactgggcagacatgaagcaaccgcctgaaatccctgggcacatcacagcccacaaagcagagcacaggtctttgagccgtcttatttctgttttatcttttatcccaggttccccattgatacaagcagcccagaagagggtagaaaatagatgaggtggatcttaattccatgcaaccgctgattaatttccttttaaagccatcattctaaaaacaacaacaacaacaaaagtgactgttttataaatgaggtattgctggactctagccaatgacccatttattgccaaaacaatgcattaattcaatcaacagatacttatcaaatacctcccatatttcaaacactataccatgtactgtatacagtgcttagtgtaaaaaataatatggatgcacgttcgattttgttgtaatattatttaacccaaatatagggaattcctactgactatttaattaaaatatctattgttttaaaattccctttgaccctaacttttgcttcctctagatttcattgatacaagaaagaactaattttttaacactgtaatccattaacattatcccaagtcttggaaaagaaacacttttttttttttagacgaagtcttgctctgttgcccaggcgggagtgcagtggcaagatcgcggctcactgcaatctccgcctcctgggttccagcgattctcctgcttcagcctcctgagtagctgggactacaggtgctcaccaccatgcctggctaatttttgtattttttagtagagacgggggtttcaccatattggccaggctggtctcgaactcctgacctcgtgatccgcaagcctcggcctcccaaagtgctgggattacaggcgtgagccactgagcctggcctaagaaacattacttttgcccattaatggctctgaactttttctgcagtgacttccattaactgatagaataagtaggtgtttctcctcttagtacccaacgtagagcaggcagccttcctcgtgccaaggtgataggacaacctagagtgtcaaagatttaggatgttaattttcattattatcacggtcctttttttaaaacctttccttcaatgccctcagtttaaggttctgtgagatgaaaatgagttgatgtttcatccttggctatgtctctaggatcatagtaacaagatttttgttttggtttgttttgtaacctgaaagtttccataaagatccaaggctgacacctttgtatttatgtgatattaaatacatgctattacttcttggcttaaaattttaaaaagtaaatcatatgaattttgaaacaaggacccatgtacacaatttgtagaggttagaaactataagaatatagctttcaaaaactcagtgcattctgagggtagaaaagcaaaactgatgatttctctagtgatttctgattatcccaactgggattaaaaccaagtggcccatgtatcaacatgagaaggatagaggaatggttctaggtcataggatgcagctatggaattctaggaaatagagatagttcagatctgcatattaaaatcccaaatcagttccttccagaagggtcgggaatgtgactgcccctgtatgtactgttggttgccagagcagctgggaagggagagggaaccatttatcataaatccctcctggggtgcctcatcacaccctctttgtgttgggcaaaygcttcacctctataagcgcaaaggcatggtaaagaccttatcacatagagtcatgaagaatgaatgatcaaggtgtcaattgggccaaaatctgcagtttaaaggaggaagactcaagacttggaagcaacaaacataaatactgctgggccactggaaccagtgaactgaacgggtgtgggtttcgagcagctttcccaacctcggcactgctgactttctggactggtgaattctttgtcctgggggtgggagggggtggggctttccccgtgcattgtaggatgttaagcagcatacctcatctctaccgaataaaagccaatagtgcccccgaattgtgacaaccaaaaatctctccagtcaatgacaaatgtcctggggctgggaagagggaacaaaatagcccccaattaagaaccactgtttatcccccaagtactttttcccaaagttagataaagtttggggagatgctttaagattataaataatattttctgttacagtgccattgaactactagatgaagtaaatctcatttctgcttcatttgatgcttaggat

SEQ ID NO: 66847 - DNA, 660 bp, Homo sapiens
aaggagatgataaaggaattagccaagcaaatactgggggaaaaaaacattccaggtaaagccaatggctagagttaaaagtttcaatatagattcatggctggtgtgttccgagaacctctgaaggcctctagggctagagtgaagtgagattgagggaaagttacagaagagatagcaaggaaccaaattagatagacctttgtaggccattgtaagggctttggtttttaccctaggggatacagggagtcactgtaggactttgagtagaagaggaacatggtctctttacttgtttgaaggatcaccacatactatttcccaggcagggagcaaggacagcattggagtgtctctgtrgatctcccagtgaggaatggccgtggatctacccagggtgtcatcagaggacatggtgagtgtagttggactctgggtacgtttgaagaaacttacaacagaatttatggacagactgtttgcttagtgtaagtgagaggggtcaaaatctttgagaaactacaaggatagggatgtgcaaggctgtgggtagagtaggctagggtgtagaggagatgaggagttcaactgaggatatgaaatattgttatcagagagcagcagccttttcctgtagatcttgcagaaaagcctaag

SEQ ID NO: 66848 - DNA, 1336 bp, Homo sapiens
atgtccttatagcagtgtaagaatggactaatacaggtgtggagaaagatcagcattatgacatgaccttgggtggggacaccacctagaaagctggtgcagaggtccaggctagaaatgtttgccaggctcctcattagaaaactccagaaggagccattcataacctggagggtggtttttaaaatcgctttaacaattaaggaaatagaaatgttagaatgttaagaacatattcaagaatccaatttatacagacaaggacttaaacagccaggactctaaagcaggtgtctgcctccacttctcaggatttcccaatgtttccttgtgcctctttttttttttttcattgttatttttatggtaacaacactttgggaggtgttgattttgtctgttaccttgactgtggtgatcgtatcacaatggcattgccatatggtgatgcatatgtccaagtgcatcaaattttacacacgaaatatacacagttctttgtgtatcaattataattaaaaagagctgtttaaaaaattttttaaatctcagaatttgtcctcccttctggtagaaaccttaaagattcacttaagtacattttattaaaaattaatgaaagcattaacatccccattattctgaaaaggtacttaggcctagaaatgtgatgacctttttacaaagtcacagataagcaagagagacaatgaagcagagctttcatactctgcaggcatctggtaaaaaatccacctgatcattacggttcttctattaactctgaaacacttccagaaatagctaataaaaaaattagcacgcttcaatgagtaggatcttgagagcttaggagggaaatatgtaaaattcgcattattagaggtaaaattattacctgaattagctttcctttccaggatatccagggtccctcctgaataaacttctagaaaataaaaaatgggacaagcccatcctgctgctaaccttggtcatctcacagttactcaattaagagaaatgtttattgagtatctaggaagaattcggctctgtgttggtgctgaaggaacaaagggaggctctggaatatgataaggtagcaatggsggaaagagaagagtgtaatcttggggtcagaaaaatgagggaccttgggaaagtcatcaaacctgtttgtcaacttcttgggcaagttattttctatttatttatttatttttaattatttaattattattattattaagttccagggtacgtgtgcaagatgtgcaggtttgttatacaggaaaacgtgtgccatggtggtttgctgtacctaacaacccat

SEQ ID NO: 66849 - DNA, 580 bp, Homo sapiens
tggattcttttcctcaccacagcacccctactgcctgcatgcagcacaytgtggtactccataaatattcgccatatgaggctaaatgaaagcatgcattaatgaatgatggaagaatgttgctatggtctgaatgtttgtgtccctccaaaatacacatgttaaaatgctaaccctaaggtgatggaattaagaggtgggaggtgaatgtgtcatgagggtggagccttcatgaatgggattagtgtctagaaaaaaggcctcagagagctgccttgtctctttcatcctgcaaggacacagtcggaagatggccatgtgaaccaggaagcaggccctcaccaggcaccaaatctactggtgcttagattttgagcttcccagcctccagaactatgagaaataaatgtttttttttgtttgtttgttacaagtcagtcagttatggtatattgctatggaagcctgaatgttcaataatataagtgaattagaggacagggatctaaatctacctggtggagtagcagggacccactgaagagaaggtggggtctgtgccaaactccaaagcctttcc

SEQ ID NO: 66850 - DNA, 1507 bp, Homo sapiens
  misc_feature (1)...(1507): n = A,T,C or G
tagaaataactgtctccaacgcttgtattatttttatgttgtgcttgtgtgattaatggttgtaagatgaggtgagatagtaagtgtgctcaagcattgaactctggggacagataggagcaacctgggttgaccctgagctgcgagagatgtggggtagagaatggactctggctgtactaataaaaaaggctctcatttattggacagttcctagatttttgggagctcagctaaggatattttcataaaaacaagactcctgaatttaaatccaatagtgggactttgtgagaatcatttaatcttctcaggcctcagccttctcatctgagaaatggggataatgattctactatctcatgaagctgctatgagtattagtgagttaatgaaaaagaaaaacttaaaacaatctgacagatggtgagccctcagtcaatgttattgacttttgttgttattgtttaattctcaccacaattcagtgggtcccattgctattcttactttctctatatagaaattggggaacaagttcatgaggaagttagtgaggccactaggacaggaatctaagcctgtctgaatttggagccttgactctgagctactttactgagttggattgtgtcttccaaatttacggaacctcagattgtgacctcaattggaaacagggtctttgtagatatattgggtaagatgagatcatactggattaagatgggctctaaatcgaatgtgactggtgtaattataaaaaaaagagaggctacacagaggcgctcccaggagaagcccatgtaaagaaagaggtgagattggagtgatgcatcaagaagttaaggtggccgggcgcagtggctcaagcctgtaatcctagcactttgggaggccgaggtgggcagatcacgaggtcaggagttcgagaccatcctrgctaacatggtgaaaccccgtctctactaaaaatacaaaaaattagccaggcgtggtggcggacacctgtagtcccagctactcaggaagctgaggcaggagaatggcgtgaacccagaaggcggagcttgcagtgagccgagatcgcgccactgcactccagcctgggtgacagagcgagactctgtctcaaaaaaaaaaaaaaaaaaaaaaaaaaaatatcaccaaaaaaaaacaaaactcaaagcactgctgggagccaccagaccctggtaggaggcatgggaggatttcttacacttcaatttcaaatttctggcattcagctctaagagagagtatgtttctgttctttgaagccacccagtttgtgctagtactttatgtcatctctaggaaaccacgattgccactatactccttgctggactgctagtccagccctggatggagctactgttttgnnnnnnnnnnnnnnnnnnnnnnnnnnnnnnnnnnnnnnnnnnnnnnnnnnnnnnnnnnnnnnnnnnnnnnnnnnnnnnnnnnnnnnnnnnnnnnnnnnnnt

SEQ ID NO: 66851 - DNA, 1507 bp, Homo sapiens
  misc_feature (1)...(1507): n = A,T,C or G
tagaaataactgtctccaacgcttgtattatttttatgttgtgcttgtgtgattaatggttgtaagatgaggtgagatagtaagtgtgctcaagcattgaactctggggacagataggagcaacctgggttgaccctgagctgcgagagatgtggggtagagaatggactctggctgtactaataaaaaaggctctcatttattggacagttcctagatttttgggagctcagctaaggatattttcataaaaacaagactcctgaatttaaatccaatagtgggactttgtgagaatcatttaatcttctcaggcctcagccttctcatctgagaaatggggataatgattctactatctcatgaagctgctatgagtattagtgagttaatgaaaaagaaaaacttaaaacaatctgacagatggtgagccctcagtcaatgttattgacttttgttgttattgtttaattctcaccacaattcagtgggtcccattgctattcttactttctctatatagaaattggggaacaagttcatgaggaagttagtgaggccactaggacaggaatctaagcctgtctgaatttggagccttgactctgagctactttactgagttggattgtgtcttccaaatttacggaacctcagattgtgacctcaattggaaacagggtctttgtagatatattgggtaagatgagatcatactggattaagatgggctctaaatcgaatgtgactggtgtaattataaaaaaaagagaggctacacagaggcgctcccaggagaagcccatgtaaagaaagaggtgagattggagtgatgcatcaagaagttaaggtggccgggcgcagtggctcaagcctgtaatcctagcactttgggaggccgaggtgggcagatcacgaggtcaggagttcgagaccatcctagctaacatggtgaaaccccgtctctactaaaaatacaaaaaattagccaggcgtggtggcggacacctgtagtcccagctactcaggaagctgaggcaggagaatggcgtgaacccrgaaggcggagcttgcagtgagccgagatcgcgccactgcactccagcctgggtgacagagcgagactctgtctcaaaaaaaaaaaaaaaaaaaaaaaaaaaatatcaccaaaaaaaaacaaaactcaaagcactgctgggagccaccagaccctggtaggaggcatgggaggatttcttacacttcaatttcaaatttctggcattcagctctaagagagagtatgtttctgttctttgaagccacccagtttgtgctagtactttatgtcatctctaggaaaccacgattgccactatactccttgctggactgctagtccagccctggatggagctactgttttgnnnnnnnnnnnnnnnnnnnnnnnnnnnnnnnnnnnnnnnnnnnnnnnnnnnnnnnnnnnnnnnnnnnnnnnnnnnnnnnnnnnnnnnnnnnnnnnnnnnnt

SEQ ID NO: 66852 - DNA, 864 bp, Homo sapiens
actgtccctctggcatctctacatgtatgtctcatagacatctctgagttaacatgcccaaaaatgaactaattttccttagaaatggagttctttcctccagccttccccaaatggcagctctatattccccattgcttttggcagatcaaccctgacagtttcttctccctcactactcaagttccattgattacagctataaaacatctcatagacatcgattcctctccgtctccactgtcacctccttattccacactaccgtgtcctccacctagcccaaaccctaacgcctttctctttttccacacccacccttctccaacccctttcctgttgggcagccagggatcttagcatatcatccctcagctccacactctaatggtgggttattgcacttagaagaaaatccaaatccaaactctgtcctactcagacatgattggactcctgactctttctccagctggcacttccagacacactgacaatcttcatgmtccttaagcctgtcacaccccttctgtccacccacagttcctctgtctggaactttcttctcctcactctttgcctgtctccttcaggttccagcttcggtcactcctaagagagcccttctctaacttccccaaactaagttgagattatgtgtgatactcgatcacagcaattgtacttttctacataaaatgtattataatttttatttttaattttttagtattttataattttttatattacttgtgtgattatttgtgtcccactaaactgtctgctccacaaggacaggtactgtatctggtacttccctgtctccctaggaacatggtgtgtgctcagtaaaaaattatt

SEQ ID NO: 66853 - DNA, 1504 bp, Homo sapiens
ccacgtagctcccaccccctgcttcccagggctcagcgctctctgttctcatagtggcattcctcattcaatgtctgcttcctccacccatggagtggcagctccatgagggcagactccgggtctgcttagtcaccgtggtgtcccctaggacctgacatgcagcaggtactccaccagtgagctactgaccaccaaggaagtggactggacatttcttgcagtgtggactccttctacgttatgaagggaccctactgagccctgggcttcccctgtgcccctcccactgccccagccccagccccagccccataagctcctgcgtcttgagactccaccaggtggccctggctgtgatgtcgcaaggaatcactggccagaatctggttgagattatctcctggctgggcatggcccacgtctccacgcagggctgggaccacaggccgccgcctcagggtccctaagtgtcccactgtgcctcttgtcttcagctgcagataacagcattggtccaaggtggccttgcctcagctgcaagtgcccgtgctagggacgcgctaggtggcctcagggaagtccttgtctctctctgggtctccaggtcacacagagtagggtcccaccccacatgggaaagcaaaaaactgggtagaaatggggtctctggttgggagaccttggaggaaaaataacagtgcttctcaagggggggtgaagtgagaaagtggttggtgacacatgaggggatccccacgtgtccccagctggggggcacagacagtccagggtgactgacctgccccaagttccctgaatgcctgaggtttaccagtgtcctggggcccaatgaggcaggtgtggaagtgtcctcgtagcatggtggaaagagttggcaagtgaggccttgagccgtttctagggcactgatcccatggtgcctcagtttccttcttgtgaagcaggtacaataagagtttctacttcacggggatactgtcctgagctcacagaaggcaattgatyactgccactattattgcctcctaaagtcttgtctcaccctgtctccacctctctgtgcctcctgccccacctggcctgggtgattaacccgagtgagtgcagcagcctccgactgctctcctgctcttagtctcagccctacatctattctccacatgctgccagacagagtctaagaaacacgggctggctgagcgcagtggctcatgcctgtaatcccaacacttcgggaggctgaggcaggcagatcacctgaggccaggagttcgagaccagcctggccaagatggtgaaaccccatctctattaaaactacaagaattagatgggtgtgatggcacacgcctgtaatcccagctacttgggaggctgaggcatgagaattgcttgaacccaggaggcagaggttgcagtgagccgagattgtgccactgcactccagcctgggggacagagcgagaacttatctaaacaa

SEQ ID NO: 66854 - DNA, 729 bp, Homo sapiens
tgaggaaactgaggcccagagaggccaagacatcctaaggagcggaactgggacctgaacacaggctttggtgctccagaggcctcaggagcagccggacatcttatgcaaaatgcccatggcaggtgcctcctggaggccggcccctgccccccagcacacagtaggtgctcagggccttctttctctgtttgtgggatttaaatcatcatcaccacttgagttgggagtgcccgtccactattcaaagggagaaactgaggcccaaggaaggatttgagacacgggtaggaacatattctacagacaggcaggtggtatcactggggtcttcttcagccattgggaattttttttttttttttttttggagaaagagtctcgctctgttgcccaggctagagtgcagtggyatgatctcggctcactgcaacctccgcctcctgggttcaagtgattctcctgtctcagcctcccgagtagctgggactacaggcacacacccccgtgtctggctaatttttgtatttttagtagaggcagggtttcgccatgttggccaggctggtctcaagctcctggcctcaagtgatccacccacctgggcctcccagagtgctgggcagtggcagggttacaggtgtgggccactgtgcctggccatcattgggattttgattcaacgtgtgtgcattgaacggccctgtgtgctgctgtggggagaggatc

SEQ ID NO: 66855 - DNA, 840 bp, Homo sapiens
tttgtcatattccagccagcaggaaggggcaaagaaggcaacacttccctgctttgatcccactggttagaacttggtcttagtcacatggcactctctgctgtacaggaggctggagaatgcagttgtcctctgcggagaccaacttaaaagctggggttctattaataataagaaaggaaaatgatattattaatagttgatactcggaagcttctgccacacacatggcaggcacgagtccttctttttggcctccagtgtatgaactgctttcctaggctctctagccattgtggtgttcctgagagttccccaattatttccctagtagattacttgtttcttgcctgtcatcgtgagccctcatagtgaatggcataggggacaagatcagaaatgcctgatcaacaataacggtgagcatttattgagcacgtactgcaygccaggccatgttataaccttacttcagcctcccgagtagctgggattacaggcatgcgccaccacgcctggctaactttgtatttttagtagagacggggtttctccatgttggtcaggctggtctcgaactcccaacctccggtgacccgctcgcttcggcctcccaaagtgctgggattacaggcctgagagccaccgcacccggccggacctggttcattttaaaattgttgtcttaatcttagttgcttaactgcttgcaattctgtgtgttggctggtggttcctctgtgggcttcccctgggcttgtgcatgcggctgcttctggctttcagctgtgctggctgggctaaggtggcctcattcatggtgacatgggattcagatgg

SEQ ID NO: 66856 - DNA, 840 bp, Homo sapiens
tttgtcatattccagccagcaggaaggggcaaagaaggcaacacttccctgctttgatcccactggttagaacttggtcttagtcacatggcactctctgctgtacaggaggctggagaatgcagttgtcctctgcggagaccaacttaaaagctggggttctattaataataagaaaggaaaatgatattattaatagttgatactcggaagcttctgccacacacatggcaggcacgagtccttctttttggcctccagtgtatgaactgctttcctaggctctctagccattgtggtgttcctgagagttccccaattatttccctagtagattacttgtttcttgcctgtcatcgtgagccctcatagtgaatggcataggggacaagatcagaaatgcctgatcaacaataacggtgagcatttattgagcacgtactgcacgccaggccatgttataaccttacttcagcctcccgagtagctgggattacaggcatgcgccaccacgcctggctaactttgtatttttagtagagacggggtttctccatgttggtcaggctggtctcgaactcccaacctccggtgacccgctcgcttcrgcctcccaaagtgctgggattacaggcctgagagccaccgcacccggccggacctggttcattttaaaattgttgtcttaatcttagttgcttaactgcttgcaattctgtgtgttggctggtggttcctctgtgggcttcccctgggcttgtgcatgcggctgcttctggctttcagctgtgctggctgggctaaggtggcctcattcatggtgacatgggattcagatgg

SEQ ID NO: 66857 - DNA, 840 bp, Homo sapiens
tttgtcatattccagccagcaggaaggggcaaagaaggcaacacttccctgctttgatcccactggttagaacttggtcttagtcacatggcactctctgctgtacaggaggctggagaatgcagttgtcctctgcggagaccaacttaaaagctggggttctattaataataagaaaggaaaatgatattattaatagttgatactcggaagcttctgccacacacatggcaggcacgagtccttctttttggcctccagtgtatgaactgctttcctaggctctctagccattgtggtgttcctgagagttccccaattatttccctagtagattacttgtttcttgcctgtcatcgtgagccctcatagtgaatggcataggggacaagatcagaaatgcctgatcaacaataacggtgagcatttattgagcacgtactgcacgccaggccatgttataaccttacttcagcctcccgagtagctgggattacaggcatgcgccaccacgcctggctaactttgtatttttagtagagacggggtttctccatgttggtcaggctggtctcgaactcccaacctccggtgacccgctcgcttcggcctcccaaagtgctgggattacaggcctgagagccacygcacccggccggacctggttcattttaaaattgttgtcttaatcttagttgcttaactgcttgcaattctgtgtgttggctggtggttcctctgtgggcttcccctgggcttgtgcatgcggctgcttctggctttcagctgtgctggctgggctaaggtggcctcattcatggtgacatgggattcagatgg

SEQ ID NO: 66858 - DNA, 840 bp, Homo sapiens
tttgtcatattccagccagcaggaaggggcaaagaaggcaacacttccctgctttgatcccactggttagaacttggtcttagtcacatggcactctctgctgtacaggaggctggagaatgcagttgtcctctgcggagaccaacttaaaagctggggttctattaataataagaaaggaaaatgatattattaatagttgatactcggaagcttctgccacacacatggcaggcacgagtccttctttttggcctccagtgtatgaactgctttcctaggctctctagccattgtggtgttcctgagagttccccaattatttccctagtagattacttgtttcttgcctgtcatcgtgagccctcatagtgaatggcataggggacaagatcagaaatgcctgatcaacaataacggtgagcatttattgagcacgtactgcacgccaggccatgttataaccttacttcagcctcccgagtagctgggattacaggcatgcgccaccacgcctggctaactttgtatttttagtagagacggggtttctccatgttggtcaggctggtctcgaactcccaacctccggtgacccgctcgcttcggcctcccaaagtgctgggattacaggcctgagagccaccgcacccggccggrcctggttcattttaaaattgttgtcttaatcttagttgcttaactgcttgcaattctgtgtgttggctggtggttcctctgtgggcttcccctgggcttgtgcatgcggctgcttctggctttcagctgtgctggctgggctaaggtggcctcattcatggtgacatgggattcagatgg

SEQ ID NO: 66859 - DNA, 840 bp, Homo sapiens
tttgtcatattccagccagcaggaaggggcaaagaaggcaacacttccctgctttgatcccactggttagaacttggtcttagtcacatggcactctctgctgtacaggaggctggagaatgcagttgtcctctgcggagaccaacttaaaagctggggttctattaataataagaaaggaaaatgatattattaatagttgatactcggaagcttctgccacacacatggcaggcacgagtccttctttttggcctccagtgtatgaactgctttcctaggctctctagccattgtggtgttcctgagagttccccaattatttccctagtagattacttgtttcttgcctgtcatcgtgagccctcatagtgaatggcataggggacaagatcagaaatgcctgatcaacaataacggtgagcatttattgagcacgtactgcacgccaggccatgttataaccttacttcagcctcccgagtagctgggattacaggcatgcgccaccacgcctggctaactttgtatttttagtagagacggggtttctccatgttggtcaggctggtctcgaactcccaacctccggtgacccgctcgcttcggcctcccaaagtgctgggattacaggcctgagagccaccgcacccggccggacctggwtcattttaaaattgttgtcttaatcttagttgcttaactgcttgcaattctgtgtgttggctggtggttcctctgtgggcttcccctgggcttgtgcatgcggctgcttctggctttcagctgtgctggctgggctaaggtggcctcattcatggtgacatgggattcagatgg

SEQ ID NO: 66860 - DNA, 603 bp, Homo sapiens
aatcacacatccattctaaagtctagaaaagctgccagaaaaccattctgctggactttggaagtgttgcttctcatgtgccctcctgagccaacttgtcatagatgttcctgtggctcctatgaaaaagtacttgtctgatgagggccacatgtataaacaggcccaatatggtatgcacgtataccaacccccmaccataggattggtgaatggccatggcaccatgtgggcacattccctctgttttccctctgcctccactcccacattatagccagatgctcactactgccccctgtgcactaggatctttttaaccaaacatttcaagtatatgggctatttctcaaactggttccacagggctctgaggtcccatgaggtgtctgatgggaagtgagggtcgttcaaggggaaatctgagcatgtgagtctccagatgcttcatcatcagttcagacagaattctgtttacctgtcttacttgtgagattccttacaaaattctgatgcaaaaaaagttctcctgctaagtctaaaaacttctgctacccatagaatgatgacccatcagtcttctgcactccaaaactgtccata

SEQ ID NO: 66861 - DNA, 603 bp, Homo sapiens
aatcacacatccattctaaagtctagaaaagctgccagaaaaccattctgctggactttggaagtgttgcttctcatgtgccctcctgagccaacttgtcatagatgttcctgtggctcctatgaaaaagtacttgtctgatgagggccacatgtataaacaggcccaatatggtatgcacgtataccaacccccaaccataggattggtgaatggccatggcaccatgtgggcacattccctctgttttccctctgcctccactcycacattatagccagatgctcactactgccccctgtgcactaggatctttttaaccaaacatttcaagtatatgggctatttctcaaactggttccacagggctctgaggtcccatgaggtgtctgatgggaagtgagggtcgttcaaggggaaatctgagcatgtgagtctccagatgcttcatcatcagttcagacagaattctgtttacctgtcttacttgtgagattccttacaaaattctgatgcaaaaaaagttctcctgctaagtctaaaaacttctgctacccatagaatgatgacccatcagtcttctgcactccaaaactgtccata

SEQ ID NO: 66862 - DNA, 603 bp, Homo sapiens
aatcacacatccattctaaagtctagaaaagctgccagaaaaccattctgctggactttggaagtgttgcttctcatgtgccctcctgagccaacttgtcatagatgttcctgtggctcctatgaaaaagtacttgtctgatgagggccacatgtataaacaggcccaatatggtatgcacgtataccaacccccaaccataggattggtgaatggccatggcaccatgtgggcacattccctctgttttccctctgcctccactcccacattatagccagatgctcactactgccccctgtgcactaggatctttttaaccaaacatttcaagtatatgggctatttctcaaactggttccacagggctctgaggtcccatgaggtgtctgatgggaagtgagggtcgttcaaggggaaatctgagcatgtgagtctccagatgcttcatcatcagttcagacagaattctgtttacctgtcttacttgtgagattccttacaaaattctgatgcaaaaaaagttctcctgctaagtctaaaaacttctgctacccatagaatgatgacccatcagtcttytgcactccaaaactgtccata

SEQ ID NO: 66863 - DNA, 593 bp, Homo sapiens
taaaaaagaaaaaaaaggagctgatgtgaagtgtttattagccagaatgtartaaatcttttttaaattgaggatggggaggtatgcgtgcatgtgtgtgtttatcatggctattaaacttaatttggtgctcactgagttgtaaaataaatgaagaatcactctacactctttatgtcagccaaatgctgggaggctaaaaatcacttgagatctagttgaacaggtgcacatgggggttttctgccaaagagatggagctgccagcaacaaaattctatttctttcccccagttctagctagaggaactgtgtttgttgatccttgacttcagctcaaaaacaaatgtgggtttcttggggactggtctggtgagatggatgagtgagggggctgaatgacatagacacacatcacacatacacacaggtgcagtctcctagggatgaatcaggtgacaccttacaagacctcagttctgctcccttattttatctgtagaagagagggctagaagaaagaaaaaggagtatcatttcctataatttgcttcaaatagagcagcaaattgttagtcatagtggaagggcat

SEQ ID NO: 66864 - DNA, 704 bp, Homo sapiens
gatcctgaagacttctggggyttctatctagagtccaaatgggtctctagagtcagcctgttgacaggctgagttgagtggcagcatctctagtggatctggctctctgcctgtgaccacttgtgtgcatgagcaagtgcctcacagacctgcatgtgtacatggaagatgtatttttacctccatgtttgcgtctgtagcaacaagtatgaaatgcacatacatgttcatgcacatgtcaatgtacgtggctaccacacagtaggtatactgtacagtgtaaccatacagtgtttcaaatatgcatatatgttcatatatgtgcatatatgcaatatctggatagatgtatatggcataatggcatatttatatattaataaatcaatcattttagagtattaactatatatgagttatattatgcctaagatatattaataaaaacaatgtttgtcaagtacttgctatatgccaggtactattctaagcacatatgttctaaattaatatatgtattactttaaggatacataacctagtgtctttttggggtccatggatgaagtgtatcttcactcacctttaattaaattcggttgtttcattcttcatttgtgaatgtagggcattcacaaattcacaaattcattctttcaattgtgaatgtagggcacaagccacagtagtgtcaggagtgcctg

SEQ ID NO: 66865 - DNA, 704 bp, Homo sapiens
gatcctgaagacttctggggtttctatctagagtccaaatgggtctctagagtcagcctgttgacaggctgagttgagtggcagcatctctagtggatctggctctctgcctgtgascacttgtgtgcatgagcaagtgcctcacagacctgcatgtgtacatggaagatgtatttttacctccatgtttgcgtctgtagcaacaagtatgaaatgcacatacatgttcatgcacatgtcaatgtacgtggctaccacacagtaggtatactgtacagtgtaaccatacagtgtttcaaatatgcatatatgttcatatatgtgcatatatgcaatatctggatagatgtatatggcataatggcatatttatatattaataaatcaatcattttagagtattaactatatatgagttatattatgcctaagatatattaataaaaacaatgtttgtcaagtacttgctatatgccaggtactattctaagcacatatgttctaaattaatatatgtattactttaaggatacataacctagtgtctttttggggtccatggatgaagtgtatcttcactcacctttaattaaattcggttgtttcattcttcatttgtgaatgtagggcattcacaaattcacaaattcattctttcaattgtgaatgtagggcacaagccacagtagtgtcaggagtgcctg

SEQ ID NO: 66866 - DNA, 704 bp, Homo sapiens
gatcctgaagacttctggggtttctatctagagtccaaatgggtctctagagtcagcctgttgacaggctgagttgagtggcagcatctctagtggatctggctctctgcctgtgaccacttgtgtgcatgagcaagtgcctcacagacctgcatgtgtacatggaagatgtatttttacctccatgtttgcrtctgtagcaacaagtatgaaatgcacatacatgttcatgcacatgtcaatgtacgtggctaccacacagtaggtatactgtacagtgtaaccatacagtgtttcaaatatgcatatatgttcatatatgtgcatatatgcaatatctggatagatgtatatggcataatggcatatttatatattaataaatcaatcattttagagtattaactatatatgagttatattatgcctaagatatattaataaaaacaatgtttgtcaagtacttgctatatgccaggtactattctaagcacatatgttctaaattaatatatgtattactttaaggatacataacctagtgtctttttggggtccatggatgaagtgtatcttcactcacctttaattaaattcggttgtttcattcttcatttgtgaatgtagggcattcacaaattcacaaattcattctttcaattgtgaatgtagggcacaagccacagtagtgtcaggagtgcctg

SEQ ID NO: 66867 - DNA, 704 bp, Homo sapiens
gatcctgaagacttctggggtttctatctagagtccaaatgggtctctagagtcagcctgttgacaggctgagttgagtggcagcatctctagtggatctggctctctgcctgtgaccacttgtgtgcatgagcaagtgcctcacagacctgcatgtgtacatggaagatgtatttttacctccatgtttgcgtctgtagcaacaagtatgaaatgcacatacatgttcatgcacatgtcaatgtacgtggctaccayacagtaggtatactgtacagtgtaaccatacagtgtttcaaatatgcatatatgttcatatatgtgcatatatgcaatatctggatagatgtatatggcataatggcatatttatatattaataaatcaatcattttagagtattaactatatatgagttatattatgcctaagatatattaataaaaacaatgtttgtcaagtacttgctatatgccaggtactattctaagcacatatgttctaaattaatatatgtattactttaaggatacataacctagtgtctttttggggtccatggatgaagtgtatcttcactcacctttaattaaattcggttgtttcattcttcatttgtgaatgtagggcattcacaaattcacaaattcattctttcaattgtgaatgtagggcacaagccacagtagtgtcaggagtgcctg

SEQ ID NO: 66868 - DNA, 704 bp, Homo sapiens
gatcctgaagacttctggggtttctatctagagtccaaatgggtctctagagtcagcctgttgacaggctgagttgagtggcagcatctctagtggatctggctctctgcctgtgaccacttgtgtgcatgagcaagtgcctcacagacctgcatgtgtacatggaagatgtatttttacctccatgtttgcgtctgtagcaacaagtatgaaatgcacatacatgttcatgcacatgtcaatgtacgtggctaccacacagtaggtatactgtacagtgtaaccatacagtgtttcaaatatgcatatatgttcatatatgtgcatatatgyaatatctggatagatgtatatggcataatggcatatttatatattaataaatcaatcattttagagtattaactatatatgagttatattatgcctaagatatattaataaaaacaatgtttgtcaagtacttgctatatgccaggtactattctaagcacatatgttctaaattaatatatgtattactttaaggatacataacctagtgtctttttggggtccatggatgaagtgtatcttcactcacctttaattaaattcggttgtttcattcttcatttgtgaatgtagggcattcacaaattcacaaattcattctttcaattgtgaatgtagggcacaagccacagtagtgtcaggagtgcctg

SEQ ID NO: 66869 - DNA, 844 bp, Homo sapiens
tgtgtttttaatataatttgtttcattcataatccaatgcatttaattttattttaagcatgtgaagacaccattctgaggaggggtccatggcttcaccagatgccaaagacgcccatgccacagcaaagaaaaattcattgatcaatccttcaatgaccccatgaagcagcagtgttaccagtttgctacagaggggaacctgaggcacagggaggttgtgcaacttgtttaaggtcacatagatatcgagtggttgtgcattattatatctgtcagttgtttttatagcctatgggctgatgtgggcttgtcctttgtgtcacatcagaaagcaagtctggtcaattattttctttctcaaggwtaagtgagatcaagaaaaataatacacatatattgcatggattatttgtggtcatcatttgctaatccttatacctgtgccatgttggattaattattacagctttgtgagctgctttattaaggaggggaagtagagtgaacaaatcatggcaagtcacttcacctcatcttctcatttaaggatgctgatactggtgttgccaaggcgacgctgtcagctttcggaagcatctttaaatgggagaggcgaaggcccacacagatcgaggcggaggaaaactcagaaaaaaggctcaaatccctcggccgcagagacaaaccatcctggtggggaccatccctcaccccccgcacatggccactttctacctcacctgtggtggttgtctctggggtgtactcagggaactctctccccagtgtggaaactgcctttgctgggaacaacgcagagatctcagaaatgatggatcca

SEQ ID NO: 66870 - DNA, 752 bp, Homo sapiens
gagggagaggatgtaacttaggttttgatggggattctttggtctgctgcatggagaayaggaggtgggggccgagtgttagcagggagccaggggggcagccaggacagctatcctgcctggagccagaggtggttgtcaagcttgtctgctgtttaataccttctaaaactccaggaattagttcgcatccttcattcctcagtcatcgcccagactgtctcctgggtccctctccctttccttggtagctctcacttagggactctgaagagtcccatctcagaccccccaggatgtctcctgtgccctcatgccccgccagggccaagcctgctttgcacacctctgtagtcagtgcttctccgagggtacacaataggtgctcacactgctgaaagacgaaagcatgacagggcattctacagcagccctggtcttgggccaaaaccacagtggcatcctcagctccttgcttcctcccactccgcatccaattcaccagcagagctgatgggctctacctccagaacccaccagaatcttactggccacaccccctcctagccccgttctgctccaggcctccggtaccttgcacctgatggctgcagcggccacctctttgggcttcttccttccaccctgcctcctacagtctatgctgttgaaatcgaatcacgggtgtctgtctctgctcacaaccttgcagtggctcccatgacactcagaacaaaagctgaagtccttcc

SEQ ID NO: 66871 - DNA, 1340 bp, Homo sapiens
ctggctttcagcctgggggcctccatgtggaaccctccctgcctctgccagctgggctgacagggaggccagagaggttcccaagcaagcctctgacctcacctcttagcgaagagacgctgggcagcggcttggggcacagaccacccgggggggccgggcccagtgcctgcacccacccccaccactgccacccrccctgcatcagcgctacacatgcaaatgctcctgagaatatccccagagaagaaacttacctccatgtgctggaattgcaggcattttgacttttcgcctgtcatttatcaaattctttgaatttttcgttaaataaggagtgtatatcactttttacaatcagaagagccatgctatttttattgtgaagcaaaaaagaaggattaattaactgtagcaggaggcggggtctccattgctatggcgggtgtagagggtcatgtgcaaacaggtggcaggggcctggagagcaggcgcgcaccccagcctgcgcttctcctgcttgggctctgtcctgggaaacactcggtgcagatgaagatctggcttcttctgagttttgtaagtgacacgcccagccgacccccacctgccggaagtctggggtggagcctggccgtctactcctcacccaccagttggtgaggatccaggagccgggggttctggaacttgcacctcctgggagaaaatgtgtgagcatgcaggttcctgcactcgccccatttcagctcacatccgaggaaagaactactgcgcctgataaacgctgatgcctctacaccccgaggcctggggatcccgcttacaaggctaccagagaagcagggttagagaaagctggtcctggtgcctcctcctcgtccctaccggcccctcggtcttttcctacgggacttctgaaaagctgttctacagtcattggttttctggccgatttccagtctgccacactaggagctggcctgtctttttcacggttgtgtgtgtccaaaacactaggcccaccacacagtaggtgctcaatgaatgtgtcagatgagttcatgaatggcgtgaaatattgagtaaaattacccattagcgaggttcctaattgtgcaaaatggcaaatgccacccagccttctggtgtcccctcccattaacatggcatgaggggagcctccttctccccaactcttccgaaggtccctccagcagaggggctgcgctaggggttcttgtgcaggctctgaaagaggaggaacagaccgaggaccagtcaaggccccagactgactgagagttgaatcacagtctctgggctggtctaggagggcg

SEQ ID NO: 66872 - DNA, 1340 bp, Homo sapiens
ctggctttcagcctgggggcctccatgtggaaccctccctgcctctgccagctgggctgacagggaggccagagaggttcccaagcaagcctctgacctcacctcttagcgaagagacgctgggcagcggcttggggcacagaccacccgggggggccgggcccagtgcctgcacccacccccaccactgccacccgccctgcatcagcgctacacatgcaaatgctcctgagaatatccccagagaagaaacttacctccatgtgctggaattgcaggcattttgacttttcgcctgtcatttatcaaattctttgaatttttcgttaaataaggagtgtatatcactttttacaatcagaagagccatgctatttttattgtgaagcaaaaaagaaggattaattaactgtagcaggaggcggggtctccattgctatggcgggtgtagagggtcatgtgcaaacaggtggcaggggcctggagagcaggcgcgcaccccagcctgcgcttctcctgcttgggctctgtcctgggaaacactcggtgcagatgaagatctggcttcttcygagttttgtaagtgacacgcccagccgacccccacctgccggaagtctggggtggagcctggccgtctactcctcacccaccagttggtgaggatccaggagccgggggttctggaacttgcacctcctgggagaaaatgtgtgagcatgcaggttcctgcactcgccccatttcagctcacatccgaggaaagaactactgcgcctgataaacgctgatgcctctacaccccgaggcctggggatcccgcttacaaggctaccagagaagcagggttagagaaagctggtcctggtgcctcctcctcgtccctaccggcccctcggtcttttcctacgggacttctgaaaagctgttctacagtcattggttttctggccgatttccagtctgccacactaggagctggcctgtctttttcacggttgtgtgtgtccaaaacactaggcccaccacacagtaggtgctcaatgaatgtgtcagatgagttcatgaatggcgtgaaatattgagtaaaattacccattagcgaggttcctaattgtgcaaaatggcaaatgccacccagccttctggtgtcccctcccattaacatggcatgaggggagcctccttctccccaactcttccgaaggtccctccagcagaggggctgcgctaggggttcttgtgcaggctctgaaagaggaggaacagaccgaggaccagtcaaggccccagactgactgagagttgaatcacagtctctgggctggtctaggagggcg

SEQ ID NO: 66873 - DNA, 1340 bp, Homo sapiens
ctggctttcagcctgggggcctccatgtggaaccctccctgcctctgccagctgggctgacagggaggccagagaggttcccaagcaagcctctgacctcacctcttagcgaagagacgctgggcagcggcttggggcacagaccacccgggggggccgggcccagtgcctgcacccacccccaccactgccacccgccctgcatcagcgctacacatgcaaatgctcctgagaatatccccagagaagaaacttacctccatgtgctggaattgcaggcattttgacttttcgcctgtcatttatcaaattctttgaatttttcgttaaataaggagtgtatatcactttttacaatcagaagagccatgctatttttattgtgaagcaaaaaagaaggattaattaactgtagcaggaggcggggtctccattgctatggcgggtgtagagggtcatgtgcaaacaggtggcaggggcctggagagcaggcgcgcaccccagcctgcgcttctcctgcttgggctctgtcctgggaaacactcggtgcagatgaagatctggcttcttctgagttttgtaagtgacacgcccagccgacccccacctgccggaagtctggggtggagcctggccgtctactcctcacccaccagttggtgaggatccaggagccgggggttctggaacttgcacctcctgggagaaaatgtgtgagcatgcaggttcctgcactcgccccatttcagctcacatccgaggaaagaactactgcgcctgataaacgctgatgcctctacaccccgaggcctggggatcccgcttacaaggctaccagagaagcagggttagagaaagctggtcctggtgcctcctcctcgtccctaccggcccctcggtcttttccwacgggacttctgaaaagctgttctacagtcattggttttctggccgatttccagtctgccacactaggagctggcctgtctttttcacggttgtgtgtgtccaaaacactaggcccaccacacagtaggtgctcaatgaatgtgtcagatgagttcatgaatggcgtgaaatattgagtaaaattacccattagcgaggttcctaattgtgcaaaatggcaaatgccacccagccttctggtgtcccctcccattaacatggcatgaggggagcctccttctccccaactcttccgaaggtccctccagcagaggggctgcgctaggggttcttgtgcaggctctgaaagaggaggaacagaccgaggaccagtcaaggccccagactgactgagagttgaatcacagtctctgggctggtctaggagggcg

SEQ ID NO: 66874 - DNA, 635 bp, Homo sapiens
aattcaacatgggatttgggtggggacacagagccaaaccatatcagggaaccagcatctactgcacagaattccttgtgcctagttctgtgcttagaactgggaacagtggtgctaaaacacagatccaggccctgccttccacgagctgcctggttcctgggtccctctgatgcctccctccttccccacaccccccacatctcatccattggcaaatcctggagctctacttctttttaaaaatagctctattgaggcatctttggcgtacaatcaactgtaccatttggtaacttttgatctatgtatgcactgtgaaccctcaacaccatccacatgctgaatatctctgtcactcctggtgagctctctctcccrccccctctcccccaagcaaccactgatcttctcagtcactataaatgactttgtatttcctcgagttttatatataaatggaatcatacagtatgtacttttttgggtctggcttctttccttcacataattattttgagatgtgtgcacgttgttgagtgtatcagcagttcatagctttttatttctgagtagtagtctgtggcatggatataccccggtttgtttatccattcacttgttgataaatctac

SEQ ID NO: 66875 - DNA, 635 bp, Homo sapiens
aattcaacatgggatttgggtggggacacagagccaaaccatatcagggaaccagcatctactgcacagaattccttgtgcctagttctgtgcttagaactgggaacagtggtgctaaaacacagatccaggccctgccttccacgagctgcctggttcctgggtccctctgatgcctccctccttccccacaccccccacatctcatccattggcaaatcctggagctctacttctttttaaaaatagctctattgaggcatctttggcgtacaatcaactgtaccatttggtaacttttgatctatgtatgcactgtgaaccctcaacaccatccacatgctgaatatctctgtcactcctggtgagctctctctcccgccccctctcccccargcaaccactgatcttctcagtcactataaatgactttgtatttcctcgagttttatatataaatggaatcatacagtatgtacttttttgggtctggcttctttccttcacataattattttgagatgtgtgcacgttgttgagtgtatcagcagttcatagctttttatttctgagtagtagtctgtggcatggatataccccggtttgtttatccattcacttgttgataaatctac

SEQ ID NO: 66876 - DNA, 757 bp, Homo sapiens
aggctgttaggtttcaaggttactgtgggctgaagagcaggaatgggttgaggtcaagttaaaatgtcacaaagctcaaggttcttatgaagattcattgttttccttcaataaatgctcctcagattgctgtaagctttgatttgtttctagagttctgaaatagttggttctgacaaattctgccagtgttctcattgcttttatggaagaaagaatttttggaagttctcactttgccattttttgataatgtcacttctttgtagacaagcattgtcttctttgtgacatcttttttttttttttttttttggagacagagtcttgctctgtttcccaggctggagtgcagtgaggtaatctttgttcactgcaacctctgccttctgggttcaagtgactctcctgcctcagtctcctgagtagctgggatcacaggcacacaccaccatgcctggctaatttttgcatttttagtagagacaaggtctcactatgttggccaggctgatytcaaactcctgacctcaaactcctgatctgcccacctcagcctcccaaagtgttgggattacagacatgagccactagtgcccagtccatcccgtggtttttaatgccactgttaatattctccagccaaataccaccatgcatatcctatatttgaacaaagttgagtttattgaccttgcaacaagagagaccacacacctgggggaactgtgaggcacctcatgagaggtatcacgaa

SEQ ID NO: 66877 - DNA, 1478 bp, Homo sapiens
ggaactgtaccttatttggttcttaatgtttattataaattaatatttttaaactctaatatttttaaactctaataactgatatggatactgaagagtttaactgtactgatgcacggaacttactctgaattgcatgaaaaaataagatgggttgtgctggattgagagatgtgacaaagcacatgtacaaaatgtgaacagttgtagatctaggttatatgtggatatttactagtcatttgacatttctatgtgattggaaattttaataatagaacattggggaaaaatcagtaataaggctctatgtgaggaagttaaagcacagtctctcaaataatctttctggcttaaaaatctcaactctgtttcttcctagctgtatgactccaggaaactcccttaacttcaattgggtcatttgctaaatagaaatagtgaatacgctcagcacaaatcttatttttcagtaagctcctagcaaacactgtgattatgatttcatagagtaaaggaagtgatgattgtgaatgaatgaccgtatgctgagggcctgctatgtgcctggtactggtcattttcaggagaatgaggcgattttgttttgcatcatgctgtgtcgtccttcggtagaaactttcatactggaggcggtgtaaggggtgtgattagcaaaactggagagtggcttcattaggtttgacagaatctctccctggcttcatggatcccccttgctgtagcatctcctttgaactccaagggccttcagaggagaggtggcatctgctttgttagacttggtagcattcccaagtcagtgttaatttagttgattcgtgaaaattgttccctttgcataaggctaggacatcttcttttctggagttattctgtttttagctttttggacaggtatcctgggaaattcttctagggtagcaagatctgccccctccccacagtcaaatcatgtttatgcattatgacagactgttccacctcctgctgggaggcaatgagaaagggtcaggaacctggaagaggctgcagctggatttaagggcaccagtgcttgaggacgaaggagagtatttcaggtaattctatagatgtattgtttacttctggatgtccatgttgctgaaaactaaagtagaaaatagagtaaaacactatgtgttcagggagtatcttagttcattctggctgccgtaaggaaataccmgagactgggtggcctataaacaacagaaatttgtttctcatagctttaggggctgggaagtctaagaccaaggctgatgcagtgtctgaggcgagcctgctttctccttaacacatattgccttctagctgtgtcctcacgtggtagaagggatgagggaactctctggggtcccatttagaagggcactaatcccatgcaggaggtctctgcccccacctcccagtactatcacctgggggttagg

SEQ ID NO: 66878 - DNA, 2260 bp, Homo sapiens
tccgctaagctgccttggcattgcgtgctggttgggcttggtgatgtttggggttttaattcactttactaaaattgcctttcattcacttggtgacaggtagttatttgttttcaggattccatttgacatttattgttagcgcaaaacactaataataataattagcgcctttttagagttgtctggggttttcatgccattgcattgttactataaaacatcctgaggcttttctgtgtataagatagtatgatggtatttaaatgtaacaaaggggtttattatactcaggccagattgcagtatctctgagcccccctccctgtgagcaagccaagacttcatatcctcccaacttgtctgcaatgctaatacctattttttttttgagatggagtctccctctgtcacttcacaacatggcaaaaccctgtctctactaaaaatactataaacatatataatatatacacacacatatgtatgtatatactatatacacgtatatgtatacatatacatgtatatactgtatacacacacacacatatatgtgcatactgtattttattttttataggagggaaacctcagcatggtttgacttttttcttagaaacaagcaatccaatctaggatttatgctctaaactatgccgtcacatacagtagccactggtcaattgtaactatttacatttaatgtaattgaaattaaatacagtattcgattcctctgttgcactagcttctttgcaagtgttcaatagccacaagtggtgcagggctaccacactgaacagtgcagctgcagaccacatccagtgttgcagaaaagaaagtcctactgaatggcactgctctagaacctggattctagaaatgtggcccaaagaccagcarcactggcatgaggtgcagttttgttcagaaacacagtctctagttccccacccccagacctagtaacaagctccccaagtaatgcatttgcacacttatgtttgaaataggagtcagagaagtttctgcaaagagcccagcagtaaatgttttgggctttgtgggccatacagtctctgttgcaactactcaactctggcattgttgtgacaaagcagctatagacaatacctaagtgaatgtgcatgattgtgttccaatacagctttatttaaaaaaacaaatggcagaccatatttgtcccacagcccagcattttctgaaccctgctccagaacattctttaaacgtccctgtaaatactatgagtatcatttaattcccactcttggatctcgaagactaagcatctctgatcaagcatcttggtctacgatcctgggagagatacttttctggaatgtctctgttggcttgtgtctctgtctcttgtttctaaagaaaactgacccatctggccaactagaagctaatgataaaaaggccagtcaaagtggttcacacctgtaatcccagcactttgggaggctgaagcaggtggatcacctgaggccaggagatcatgaccagcctggccaaaatggtgaaacctgtctctattaaaattacaaaaaaaattaggtgggcatggtggtgtgcacctgtacttccagctgctcaggaggctgagaggctgaggcatgagaatcacttgagcctgggaggcagaggttgcagtgagctgggatcatgccactgcacttcagcctgggtgacagagggaggctctgtctccaaaaaaaaaaaaaaaaaaaaaaaaagaaaaagaaaaaaaaacttaatgataaaaagaaggagagtggacagagctgaccatgctccacatgctccacaacgggacctaatcaatatgaaaaggagggcgtcaggctgcttttactctctgccacacataccccagttaaacaatatgtgaagaggtccctgagctttgatgtaagactggcagggtcagttccaagttctgatatgtgctttgcccacctgagcaagggttcaaggaaccacgaaagaggtggacaagcgttgaggtctggccctggcccagcccaggtttgcattctacacagaaaacatggccacataaaagagaaaacatctgttaaggtccaaactgacgcagaaggtgtgtgagccatgtgtgtgagtacttctcctaatcacagcaaagcggctccccttgcacatgggatggaggaaaggccaggagttccctcttgacttttctgcaaggcccagagttcctttcccatgc

SEQ ID NO: 66879 - DNA, 634 bp, Homo sapiens
aagtgttcccctctctccaaaatcttgccagcatctgctatttttgactttttactagtagccattctgactgactacaccacacatctaaaccattcattttggtggaatgacattcccctccccccccaaaaaaaacacctttattacatcacacgataattctcccataaggcaactctcagtctattcattttgatgtttgttttcttccatcaaacttccatcacctccctccagtaactcaactgtcycagggtagtgaatggcagttacttgtatgcagtgacaaaagggaaaataccttacactgtctttcttttaccactgagtccatgacatacctccctctcctctgatgcctcagcctcccactgagactcaccagtggccttggtatgttcaatcaccaaggctctgggataccacctcctgccacaccatctccggccatgccacttccagcagagggccaaacctgctgcagatgcctctgtcatccattgccctgtccaaattccaacttggaagagccaccctagggagagccaccatcctccccgcttgcctgcctcctcactggtctcctgcttctgctcttggctccctacaggccaatttcggctcagcgaaa

SEQ ID NO: 66880 - DNA, 2361 bp, Homo sapiens
gtctctcttcatatgaggctttaacagcaatttcataaactataattagtttaactacataatatccttaggaaaaatgtaaatattaccatctctttttttttagggggtggactaggggattttggttgactgagcaatcaatcacatacagatggataatttgatattcactaaaatattcacttctcagcatttcactctcgtgtttccttgcatgacatcaattgtcatttaataagaaagacaaatacacgtgtttaatcactccctgaagaaagtaaacacactatctgtgggaaatggaacacaatgagaggcgtgccgtcagcctcagggtgccctgactccattccagccctctcctcatatgccccatttgcacatcacccatcacttttgcctaattgtttctactcaccaagtgaagataatggcttctttgcctgctcaagtgataatktgagattatatgtctcatcagatactttattggatgaatgaaaaaatgcacaatgatggttttattaaattatgcagttagttaccaagatgaatggaactacacctatgcaaaaatcaagatgtggagataagggaggttataggctgagttatttaacctttagggctctttctgatattttctgtgagggccaaatagagttctcagtggactgcatgtgagtttctgccaatggcctgtggagcaagtgcctgcaagagggaacactcccccaacttctggggtgataaaggatttctcactgtcccaccagcctgcacagtaggtttcaccattttgttaactattccagctgaacttttcttactgacctctggtttcatctatctaaggtgagctcctgctcacatctctccctgcgaggttcatatctctttagattttaggccaggtggtggttctgcaagctcaactctccaatgcatttgtaaaagatcatgaacttgaagtttgttgtaagggtggaaatgaggctccttatagctttctacttcctggggcagaagccagaagttccagcccatagattttgataagttgtattttcattttcattcagcttgaaatacttgctaatttcccttttagtttcttctttgattcattgagtatgaagtatgtgttattagtttcctaatattcctggatttttcagagaagttgctattgctgatttcttattttaatctattgtatatcacaaagatatactttacatgacttaaatgattttaactttgttgaaacttgtttaatgactcgtttaatggtctattttggtaaaagttccaaatgaactcgaaaaagaatacatgttcttctgttaggtgaaacattccataaatatcaatgaatcatataggttgatagtgataattaatacttctgaatccctattttctgtcttcttgtgcaatcagttactgagacggggtgctagaatctcctactgtcattgtggatttatctatttcattcagttttactagatttcatttcgtgtattttgaagctctgttattaagtgtttgcatgtttaggattatgttctctgatgaaagaacatcttaatcattacaaaataattttctttaccttttataataatttttgcactgaaatatactttgtttaatatagccaatccagcttttttaaaaactattattagcataatatatatttttccatgtgtttacacttaggctatttgagccttttttatttaaagtgtgtttcttgtaggcaacatatagttggatcttactttctcatctaatctgaccatcattgccatttaataagagtgtttgcactacttacctttaatatggttgtttatatgattaattttaagtctaacatctactatttgttttttgtttattctttgtccattttcaaagctgctagggagtgtagatgcattttgtaagagaatacattttataaattgttatatacactctgagattttaaccataattgcagttctttttttatgaacacatttttagtaggctgaatattctttctgcttcaacctgctaagattgaaggaaatactgctgaaatagaacatgtacacaaagacagattctgagggagggtttctgtatttttttactttaaagcagcctagttgaaaaagactgtggtacctgattctatatctgtgtagttagcccttttttttctaaatgaaattagatctcaggtaaatgtttaaattcccctcagcaaaaaggcagatctactgacaaaaagcatggctgtttaaagcctataaatctcagaagtggaatgagggagtttatttaaagccagcttcactc

SEQ ID NO: 66881 - DNA, 1327 bp, Homo sapiens
acagaggggaagggatagaggagatgagaggaaggagaggaaagaagagaagagaagagaagagagaaagggtgaggatgaccagctcagtacccagtgttctgcagctctggaaggtaggcctgccttgatctaagatgtgatcctacaggacctctggcaaccagaagctccaaacaatgcccaaagcaggtaacatgaaaaaagatttgggaaggataagaaatgcatattcctgaacctgaactcagaggtagctacagcttactctgcccggtcacagcacacaaatgcagtttcctttcagaaataattttcgcaaaagattttgtgtcatagcttaaggaatttagctcagatgaagaaaaaaaatcttagtattaagattctaaatagaacaataaaagaaacccatagtacaaattaatgagatgtgatagggctaatttctctgtttagagatgttttaactgtgacttgacaatactgacatgcaagctcttcaggagaacctagttttcatttgagcttgcttaattaattaccgaagtaatgaattcattctgattcaagggtagacaattgactgttaatgtaaatttattggccgyttaactttttttattattttggagaagcaaggatggaaaaaataccaccagagtaaatttacattgtgttcttgggatatttttcagtaatttttgtaaacttccttacaataaatagaagccgttcctaaacctgaatttatttttcctttcagtcagaagtttagctaataaaacttttgccagcgtgtagcacaatagctcccttgggaactctttcaactgcgtaattttttctctctcttgtaaaaagaatgacatggtgtctttaaaatgttcaaggctctgaaagaaagacaagccatttgatatgaatgattaataagaacattaaggaatacaaaataagaggagtttaaatataaaaaaattctcattttcagaatgcagatcaaatctgacttctcttctatttttcctgtttcacagacaaaatcctgactgaggttaagtgctaatgtttttaatgcccatcttttattctcatgcttgacaccaatcggctacttcagaactagtgtcttgacacgtgaatcttttccacagcaccaaaggttattccacaaggacatctgcgaaaggaagaatatatttctaacgcaataaacaaaggattttatgcaaagcctatttagacaggaaatggaaacgcggatgagagagaagccatgttgttcaggtcctgctatttatgagggagagttttccttgagaaa

SEQ ID NO: 66882 - DNA, 747 bp, Homo sapiens
cagcctcagtgttcccagcccctacgcaagatggttcaaatgcttctgataaagggactcatatattaggaattcacaatctgaaatgagcaataatattctgaatgtaaagatagcctaaatgacatgttttagccagtggcatataaaattagatttgtcatgaattgatgtcataygtataatttgggggaaaggccagcatagaataattgtaagatagaatggaaaataactgagtttcaaatactggcaggcaaagagtagacaagccattgtatctcatggtaattcagaaaggcatctggatatggagccatctcagaagtcattcacatgacagaagagaaattagtaaatatttctgaggcggagaccagttggcaaacacatggctttactcttggtcaaaggacctaattcagaggtgatgagatgacaaacgtttgggggtgatacctgacaccaaaggaaagcaagaactggagaaatggtcatgagagtaaagatgcaaaactctagtgactgactagtagcagcaacttagaaaccgagtcagcagctgaaatgcaaaaaggaagccatcctagaagaaagccggattaaagtcgcagacagagcgggctgctccaacagcaaagccatatattttgagacagcgatgcgctgcctttcttcacaaggtttacccagcacacccacccaaaccatggcagacttgtattgatgcattttccccttccaaat

SEQ ID NO: 66883 - DNA, 747 bp, Homo sapiens
cagcctcagtgttcccagcccctacgcaagatggttcaaatgcttctgataaagggactcatatattaggaattcacaatctgaaatgagcaataatattctgaatgtaaagatagcctaaatgacatgttttagccagtggcatataaaattagatttgtcatgaattgatgtcatacgtataatttgggggaaaggccagcatagaataattgtaagatagaatggaaaataactgagtttcaaatactggcaggcaaagagtagacaagccattgtatctcatggtaattcagaaaggcatctggatatggagccatctcagaagtcattcacatgacagaagagaaattagtaaatatttctgaggyggagaccagttggcaaacacatggctttactcttggtcaaaggacctaattcagaggtgatgagatgacaaacgtttgggggtgatacctgacaccaaaggaaagcaagaactggagaaatggtcatgagagtaaagatgcaaaactctagtgactgactagtagcagcaacttagaaaccgagtcagcagctgaaatgcaaaaaggaagccatcctagaagaaagccggattaaagtcgcagacagagcgggctgctccaacagcaaagccatatattttgagacagcgatgcgctgcctttcttcacaaggtttacccagcacacccacccaaaccatggcagacttgtattgatgcattttccccttccaaat

SEQ ID NO: 66884 - DNA, 747 bp, Homo sapiens
cagcctcagtgttcccagcccctacgcaagatggttcaaatgcttctgataaagggactcatatattaggaattcacaatctgaaatgagcaataatattctgaatgtaaagatagcctaaatgacatgttttagccagtggcatataaaattagatttgtcatgaattgatgtcatacgtataatttgggggaaaggccagcatagaataattgtaagatagaatggaaaataactgagtttcaaatactggcaggcaaagagtagacaagccattgtatctcatggtaattcagaaaggcatctggatatggagccatctcagaagtcattcacatgacagaagagaaattagtaaatatttctgaggcggagaccagttggcaaacacatggctttactcttggtcaaaggacctaattcagaggtgatgagatgacaaacgtttgggggtgatacctgacaccaaaggaaagcaagaactggagaaatggtcatgagagtaaagatgcaaaactctagtgactgactagtagcagcaacttagaaaccgagtcagcagctgaaatgcaaaaaggaagccatcctagaagaaagccggattaaagtcgcagacagagcrggctgctccaacagcaaagccatatattttgagacagcgatgcgctgcctttcttcacaaggtttacccagcacacccacccaaaccatggcagacttgtattgatgcattttccccttccaaat

SEQ ID NO: 66885 - DNA, 747 bp, Homo sapiens
cagcctcagtgttcccagcccctacgcaagatggttcaaatgcttctgataaagggactcatatattaggaattcacaatctgaaatgagcaataatattctgaatgtaaagatagcctaaatgacatgttttagccagtggcatataaaattagatttgtcatgaattgatgtcatacgtataatttgggggaaaggccagcatagaataattgtaagatagaatggaaaataactgagtttcaaatactggcaggcaaagagtagacaagccattgtatctcatggtaattcagaaaggcatctggatatggagccatctcagaagtcattcacatgacagaagagaaattagtaaatatttctgaggcggagaccagttggcaaacacatggctttactcttggtcaaaggacctaattcagaggtgatgagatgacaaacgtttgggggtgatacctgacaccaaaggaaagcaagaactggagaaatggtcatgagagtaaagatgcaaaactctagtgactgactagtagcagcaacttagaaaccgagtcagcagctgaaatgcaaaaaggaagccatcctagaagaaagccggattaaagtcgcagacagagcgggctgctccaacagcaaagccatatattttgagacagcgatgcgctgcctttcttcacaaggtttacccagcacacccacccaaaccatggcagamttgtattgatgcattttccccttccaaat

SEQ ID NO: 66886 - DNA, 1656 bp, Homo sapiens
agttcaaaccatatctacatccattttatatttttatcccattcccattacccagagggaaaaaatgctatgatttttcttatatgtccttctagaaatatttcatatttacatgagtatatatatatatacatatatatatatatatatacatatattcattgtgggaatttcaaatgggagaatatcttaccttattctttgattttagaaaaatatcttgaagttcattcacagcaagtatgtttacctcattatttctcaaggctgcatgctattccagagtataaatgtaccatgaccactgmaagagaactgtactaacatatttaccattatattcataaaatgttagttaatctcttcatgcacatatgcatatattacactatgactgtgggataaattcctagaagtagcattgctgcttaacgtaaactatacattgagagaaactgaaagcatcactctttttgcattacctccattcactacactgcaagttgatcattttttggaactttaattttatagatagtgccaaatggttcttcaagaaatcatattcataaaaaggcaccagttcctgaaattgaatcatctgagttttaccttttcatgtgcacacatgaaacagacctaaaacattcccagatgtggtgaggggttgtgagtaaagattctgcagccaggccacttgggttcaaattattgtgctaccactaactagctctataattggggcaaataaataaagcctgtctttttgctttccttgttttcatctgggaagaatattagtatctagctcatagagttctgcgaggattttaatatatacaaagcacaaagaatcatgtttggtgcacagtaagcactcaagatacataatgtcttcatacttaaatttattcttaaaactgattatttttaacctgagcattatgctgagcaataatatccataatattgcatgtttgcatactatttaattttaagagactttaaatttaatgcattaactatgaaagtatagttgaaagtaatgtcctaagcaacacagcctcagtaaatgttttagttgttctaataaactgagtagtacctcactgctgttttaatttgcatttctttaacttataaacaaggttgaatattatctcatgaattttattattattattactattattattatttgagacggagtcttgctctgtcgcccaggctggagtgcagtggcgcaatcttggctcactgcaagctccacctcccgggttcacagcattctccttcctcagcttcctgagtagctgggactacaggcgcccgccaccacacctggctaattttttgtatttttagtagagatggggtttcaccgggttagccaggatggtcttgatctcctgacctcgtgatctgcccacctcggccttccaaagtgctgggattacgggtgtgagccaccgcgccaagcattatctcataaatttatgaactattttttcttcatgtggaatgcttatcaatccttctcaattttacattgcttttcttaatctttatccattgatgtgtaagagcactttacaaaaaaactgtgtcatgtatattaaaatattatttcccatttataaattgatatcttctggt

SEQ ID NO: 66887 - DNA, 1656 bp, Homo sapiens
agttcaaaccatatctacatccattttatatttttatcccattcccattacccagagggaaaaaatgctatgatttttcttatatgtccttctagaaatatttcatatttacatgagtatatatatatatacatatatatatatatatatacatatattcattgtgggaatttcaaatgggagaatatcttaccttattctttgattttagaaaaatatcttgaagttcattcacagcaagtatgtttacctcattatttctcaaggctgcatgctattccagagtataaatgtaccatgaccactgcaagagaactgtactaacatatttaccattatattcataaaatgttagttaatctcttcatgcacatatgcatatattacactatgactgtgggataaattcctagaagtagcattgctgcttaacgtaaactatacattgagagaaactgaaagcatcactctttttgcattacctccattcactacactgcaagttgatcattttttggaactttaattttatagatagtgccaaatggttcttcaagaaatcatattcataaaaaggcaccagttcctgaaattgaatcatctgagttttaccttttcatgtgcacacwtgaaacagacctaaaacattcccagatgtggtgaggggttgtgagtaaagattctgcagccaggccacttgggttcaaattattgtgctaccactaactagctctataattggggcaaataaataaagcctgtctttttgctttccttgttttcatctgggaagaatattagtatctagctcatagagttctgcgaggattttaatatatacaaagcacaaagaatcatgtttggtgcacagtaagcactcaagatacataatgtcttcatacttaaatttattcttaaaactgattatttttaacctgagcattatgctgagcaataatatccataatattgcatgtttgcatactatttaattttaagagactttaaatttaatgcattaactatgaaagtatagttgaaagtaatgtcctaagcaacacagcctcagtaaatgttttagttgttctaataaactgagtagtacctcactgctgttttaatttgcatttctttaacttataaacaaggttgaatattatctcatgaattttattattattattactattattattatttgagacggagtcttgctctgtcgcccaggctggagtgcagtggcgcaatcttggctcactgcaagctccacctcccgggttcacagcattctccttcctcagcttcctgagtagctgggactacaggcgcccgccaccacacctggctaattttttgtatttttagtagagatggggtttcaccgggttagccaggatggtcttgatctcctgacctcgtgatctgcccacctcggccttccaaagtgctgggattacgggtgtgagccaccgcgccaagcattatctcataaatttatgaactattttttcttcatgtggaatgcttatcaatccttctcaattttacattgcttttcttaatctttatccattgatgtgtaagagcactttacaaaaaaactgtgtcatgtatattaaaatattatttcccatttataaattgatatcttctggt

SEQ ID NO: 66888 - DNA, 661 bp, Homo sapiens
attggagctggttgatatggctgtttgtgtgacttgcactcagcaatagtttaaaacygtttctgctctggtgatatgtaaggtgtgtgtgtggctggggacagtcaataaggaaacattggctgtaaggattagttaggtcattaacatgaggacctacagtgagatgatgatcatgataatggaaaagctgccatatacacacaaaaagtacataatccttgtcaatttattggctgtaaagggaagataagggtgggggctcaggacagtgtacttattgagcatttttcagtttcaggtgaccaaaatctaagatcaaataggcttgaataataaagggaaccaaagtgtcttgattgaagccaggctgaatttaggcaatcagattctttcatcagcagtctgcctctttccttcttgcagttttattttcatctacaactggcctcattcttgggcagctctgtctatgccttagcttcaggcataccgtttaccagcttaggagcgtgactattttcctttatttctgttcttagcaatgttgagttctacagatattatgcctttatttgtttattctactcagtaggataagcttcacaggagcagagactttttctgttgtttatggttatatccccagaacataggggca

SEQ ID NO: 66889 - DNA, 1282 bp, Homo sapiens
gttttgaaaagtatatcatctctgtcttaggtaagggcaattcctcaaattgattttttaatcatttcatattcatgtggtaaaaattgtcataaactagcacatctgtgaatgcaatgttgatttgtatacaggaagcccttaggctaattttaatcttctgctgtctttcatgaacataatactaagaaatggtttctgtcccaaaccgttcataggcaccatgctgggaatcacaaagcatgctgggaatacttgtcaaggagaagtggraagctaagagtgatgccaggcaggggtcaggggacaaaccaagaccatagagtggggagagaggaacctaggcagagctaatcgccgagactaaatcaacaagcctagggaagtgcagcaagccaaaaaccctctggtctagcgtgcatcttcaaagttgtcacttgaggtggctgcatggaaggtggcaggtgggatcctctatgggtttatctctacttctctctcaaccgttgttgagccttcagctaagtcaccaacccatactgtgtttattctctgcattttccaaatgcttctcttcttcaaacctgcaagttttaatatgaatccagctgttacccagttcagcacaggtgatttttaaggaagtccaccatttttgaacagatataaaataaccctgaataaaacattttatatcattttcaaccatgatcttctaggagaacaataatataaaatatacctatgtagcaatgaatctctgcctttagatggtgagaataaatgtgaaataatcaatacttgtaacattaagaccctagaaccctctatattgagccaagcacatggaaatatagtgaatcttaaccagatttccaaataagctgaggaagagggagatccagcccctgtaacacttgtggggtgcccactgtattttcccctctgactcagtagtgtacaattctttctagaaagaaagtgtttacagaattcaaaatgatagggaaaaaacaataaacttaggtaccagatatgttcttatgttcttttattttataaaatttagtgcctttctttctttcttttttttttttaagacggagtctttctctgtcacccagcctggagtgtactggcaccatctgggctcactgcaacctcctcctcccaggttcaagcgattctcctgcttcagcctcctgggaagctgggactatgggcacgtgccaccatgcccagctaattttttgtatttttagtagagacggggtttcaccgt

SEQ ID NO: 66890 - DNA, 858 bp, Homo sapiens
taaatatgttctggcatttgttataggcagtatggctatgaaacatraacaatttaacttttcgtttttctgtttatttttcttaagtctgtgatttcatttgttgcagagatatgggctctgtttcgttactttagattctattgctgcagagcctcagtggatggtcattatcactgaaacagtgactaagcctgggcacagggggtaaaggaaaacaagagcaatctcaagccatagctcttcttgatgtcaaatcatattttgtactaaagtacatgattatgaggattctttatcttagggatcatttttattcttagttcatgttcctgtaactcatcgtgcaaaaaagcatgatatcaatcttaataaaatttattttcatgttaatgaagttagaaaaacaggcttactttagttagctatcaactaagtttattacaaattcattgttgttgcttttttaaattggttttgacttttttcttctccctcgtggtagcctggagtattcatcaaaggagttccaaattgggagtgatttattgaaggctatagattatctctagtgttttcatatcctttattagattcagaatggtctatggaagagtgactgaacaaatgttctgatcataaataattaaactaacaaataatgaccccctgtctcagacattaaagcctttctccagtggagtgtaaagatctcagagctaaaaattaacaggcagaaaacaagtagtttccctgttgtgcagcccagtgccttcttcccatgtgatgggaagacgccatggaaacagctgcgatagttactcaagccttagcctgaggggtgagaggggaacaagg

SEQ ID NO: 66891 - DNA, 858 bp, Homo sapiens
taaatatgttctggcatttgttataggcagtatggctatgaaacataaacaatttaacttttcrtttttctgtttatttttcttaagtctgtgatttcatttgttgcagagatatgggctctgtttcgttactttagattctattgctgcagagcctcagtggatggtcattatcactgaaacagtgactaagcctgggcacagggggtaaaggaaaacaagagcaatctcaagccatagctcttcttgatgtcaaatcatattttgtactaaagtacatgattatgaggattctttatcttagggatcatttttattcttagttcatgttcctgtaactcatcgtgcaaaaaagcatgatatcaatcttaataaaatttattttcatgttaatgaagttagaaaaacaggcttactttagttagctatcaactaagtttattacaaattcattgttgttgcttttttaaattggttttgacttttttcttctccctcgtggtagcctggagtattcatcaaaggagttccaaattgggagtgatttattgaaggctatagattatctctagtgttttcatatcctttattagattcagaatggtctatggaagagtgactgaacaaatgttctgatcataaataattaaactaacaaataatgaccccctgtctcagacattaaagcctttctccagtggagtgtaaagatctcagagctaaaaattaacaggcagaaaacaagtagtttccctgttgtgcagcccagtgccttcttcccatgtgatgggaagacgccatggaaacagctgcgatagttactcaagccttagcctgaggggtgagaggggaacaagg

SEQ ID NO: 66892 - DNA, 858 bp, Homo sapiens
taaatatgttctggcatttgttataggcagtatggctatgaaacataaacaatttaacttttcgtttttctgtttatttttcttaagtctgtgatttcatttgttgcagagatatgggctctgtttcgttactttagattctattgctgcagagcctcagtggatggtcattatcactgaaacagtgactaagcctgggcacagggggtaaaggaaaacaagagcaatctcaagccatagctcttcttgatgtcaaatcatattttgtactaaagtacatgattatgaggattctttatcttagggatcatttttattcttagttcatgttcctgtaactcatcgtgcaaaaaagcatgatatcaatcttaataaaatttattttcatgttaatgaagttagaaaaacaggcttactttagttagctatcaactaagtttattacaaattcattgttgttgcttttttaaattggttttgacttttttcttctccctcgtggtagcctggagtattcatcaaaggagttccaaattgggagtgatttattgarggctatagattatctctagtgttttcatatcctttattagattcagaatggtctatggaagagtgactgaacaaatgttctgatcataaataattaaactaacaaataatgaccccctgtctcagacattaaagcctttctccagtggagtgtaaagatctcagagctaaaaattaacaggcagaaaacaagtagtttccctgttgtgcagcccagtgccttcttcccatgtgatgggaagacgccatggaaacagctgcgatagttactcaagccttagcctgaggggtgagaggggaacaagg

SEQ ID NO: 66893 - DNA, 858 bp, Homo sapiens
taaatatgttctggcatttgttataggcagtatggctatgaaacataaacaatttaacttttcgtttttctgtttatttttcttaagtctgtgatttcatttgttgcagagatatgggctctgtttcgttactttagattctattgctgcagagcctcagtggatggtcattatcactgaaacagtgactaagcctgggcacagggggtaaaggaaaacaagagcaatctcaagccatagctcttcttgatgtcaaatcatattttgtactaaagtacatgattatgaggattctttatcttagggatcatttttattcttagttcatgttcctgtaactcatcgtgcaaaaaagcatgatatcaatcttaataaaatttattttcatgttaatgaagttagaaaaacaggcttactttagttagctatcaactaagtttattacaaattcattgttgttgcttttttaaattggttttgacttttttcttctccctcgtggtagcctggagtattcatcaaaggagttccaaattgggagtgatttattgaaggctatagattatctctagtgttttcatatcctttattagattcagaatggtctatggaagagtgactgaacaaatgttctgatcataaataattaaactaacaaataatgaccccctgtctcagacattaaagcctttctccagtggagtgtaaagatctcagagctaaaaattaacagscagaaaacaagtagtttccctgttgtgcagcccagtgccttcttcccatgtgatgggaagacgccatggaaacagctgcgatagttactcaagccttagcctgaggggtgagaggggaacaagg

SEQ ID NO: 66894 - DNA, 706 bp, Homo sapiens
ataggtacagcaaatcatcgtgggacacgtttacctgtgtaacaaacctgtatatcctggatatgtaycccagagcttaaaataaaatttaaaaagaagttgcccagtctgtggtactcagttatagcagcacaaaatggactaagacacaatcttaaactaattgagttcaaccacctaaacgacacttggaatatcccagccctggaagacatccaaccaaagctgcaagatgtccagggaaaagacaactcccaatgcacataccccaggcctatgaaatcactttttgggcccaggaatctatgtatacatgtttcaacaagccctctgggtcaatcttaagaatgctcaagttcaagaaacactgccttacatcacttcttctcaaacttaaatatgcgaatggatcaacctgggacttctgttaagatgcagattatggctcagtcgtttaggggtagaagctattataaagtaagtttgcatttcttacaaatttccaaaagacatcaatgctgctgatccatgggccataattagaacaacaagaccttgagaacagagtccaggtcttattctatgtactataataatttattagcaatctactttggcaaccaagattatgtcatgttgaaggtgatatggtggtaagtagttggaacactgtgtgaaatactgcacattttatttcaggcaagtc

SEQ ID NO: 66895 - DNA, 706 bp, Homo sapiens
ataggtacagcaaatcatcgtgggacacgtttacctgtgtaacaaacctgtatatcctggatatgtatcccagagcttaaaataaaatttaaaaagaagttgcccagtctgtggtactcagttatagcagcacaaaatggactaagacacaatcttaaactaattgagttcaaccacctaaacgacacttggaatatcccagccctggaagmcatccaaccaaagctgcaagatgtccagggaaaagacaactcccaatgcacataccccaggcctatgaaatcactttttgggcccaggaatctatgtatacatgtttcaacaagccctctgggtcaatcttaagaatgctcaagttcaagaaacactgccttacatcacttcttctcaaacttaaatatgcgaatggatcaacctgggacttctgttaagatgcagattatggctcagtcgtttaggggtagaagctattataaagtaagtttgcatttcttacaaatttccaaaagacatcaatgctgctgatccatgggccataattagaacaacaagaccttgagaacagagtccaggtcttattctatgtactataataatttattagcaatctactttggcaaccaagattatgtcatgttgaaggtgatatggtggtaagtagttggaacactgtgtgaaatactgcacattttatttcaggcaagtc

SEQ ID NO: 66896 - DNA, 706 bp, Homo sapiens
ataggtacagcaaatcatcgtgggacacgtttacctgtgtaacaaacctgtatatcctggatatgtatcccagagcttaaaataaaatttaaaaagaagttgcccagtctgtggtactcagttatagcagcacaaaatggactaagacacaatcttaaactaattgagttcaaccacctaaacgacacttggaatatcccagccctggaagacatccaaccaaagctgcaagatgtccagggaaaagacaactcccaatgcacataccccaggcctatgaaatcactttttgggcccaggaatctatgtatmcatgtttcaacaagccctctgggtcaatcttaagaatgctcaagttcaagaaacactgccttacatcacttcttctcaaacttaaatatgcgaatggatcaacctgggacttctgttaagatgcagattatggctcagtcgtttaggggtagaagctattataaagtaagtttgcatttcttacaaatttccaaaagacatcaatgctgctgatccatgggccataattagaacaacaagaccttgagaacagagtccaggtcttattctatgtactataataatttattagcaatctactttggcaaccaagattatgtcatgttgaaggtgatatggtggtaagtagttggaacactgtgtgaaatactgcacattttatttcaggcaagtc

SEQ ID NO: 66897 - DNA, 753 bp, Homo sapiens
aagtcagttatcttagtcaccactaaaggcacctggtgagaaaagctgaactaaattttaaatattaaaaaattaaagagacatctagtgcagagttcaaacctttatgttgaattgtttgagtcgttactgatttcatgatgctgataagtgtttgagttgaaatgattttttaaaatgcagagaaaatgctaacagaatattatatagttcccctaaagatgcttcttctaacctccaagtattaaataagactgatctaaatgttaagtacatataaagtatatatttgctagtcatctataaattttaagtacaattccagtgatatacctgtatcttttggaagagaagaactaaacctgccgtttcttaggctaaatagatgattcataaggtccttccctccccatttattctgattgccaagcttttgttcagtaagctcttggcatctagtgattaaccagtgacagcagacagtagtgaccaagagagatggagagaacgatggtgtaagacmgtatataaggacagtaagccactgtatttgtggaaccactgcatgtcaaaactccttaacactctaacaaagcatttttggtcttttaagattaaggacagtccttacataagggactcagtttcaaactaaagtgcatcaaaaagcaaattataccccacaaacaactttaaagaggtagccacaaacccagttgttttagattggccttctaaatgaagtcagcacat

SEQ ID NO: 66898 - DNA, 753 bp, Homo sapiens
aagtcagttatcttagtcaccactaaaggcacctggtgagaaaagctgaactaaattttaaatattaaaaaattaaagagacatctagtgcagagttcaaacctttatgttgaattgtttgagtcgttactgatttcatgatgctgataagtgtttgagttgaaatgattttttaaaatgcagagaaaatgctaacagaatattatatagttcccctaaagatgcttcttctaacctccaagtattaaataagactgatctaaatgttaagtacatataaagtatatatttgctagtcatctataaattttaagtacaattccagtgatatacctgtatcttttggaagagaagaactaaacctgccgtttcttaggctaaatagatgattcataaggtccttccctccccatttattctgattgccaagcttttgttcagtaagctcttggcatctagtgattaaccagtgacagcagacagtagtgaccaagagagatggagagaacgatggtgtaagacagtatataaggacagtaagccactgtatttgtggaaccactgcatgtcaaaactccttaacactctaacaaagcatttttggtcttttaagattaakgacagtccttacataagggactcagtttcaaactaaagtgcatcaaaaagcaaattataccccacaaacaactttaaagaggtagccacaaacccagttgttttagattggccttctaaatgaagtcagcacat

SEQ ID NO: 66899 - DNA, 753 bp, Homo sapiens
aagtcagttatcttagtcaccactaaaggcacctggtgagaaaagctgaactaaattttaaatattaaaaaattaaagagacatctagtgcagagttcaaacctttatgttgaattgtttgagtcgttactgatttcatgatgctgataagtgtttgagttgaaatgattttttaaaatgcagagaaaatgctaacagaatattatatagttcccctaaagatgcttcttctaacctccaagtattaaataagactgatctaaatgttaagtacatataaagtatatatttgctagtcatctataaattttaagtacaattccagtgatatacctgtatcttttggaagagaagaactaaacctgccgtttcttaggctaaatagatgattcataaggtccttccctccccatttattctgattgccaagcttttgttcagtaagctcttggcatctagtgattaaccagtgacagcagacagtagtgaccaagagagatggagagaacgatggtgtaagacagtatataaggacagtaagccactgtatttgtggaaccactgcatgtcaaaactccttaacactctaacaaagcatttttggtcttttaagattaaggacagtccttacataagggactcagtttcaaactaaagtgcatcaaaaagcaaattataccycacaaacaactttaaagaggtagccacaaacccagttgttttagattggccttctaaatgaagtcagcacat

SEQ ID NO: 66900 - DNA, 753 bp, Homo sapiens
aagtcagttatcttagtcaccactaaaggcacctggtgagaaaagctgaactaaattttaaatattaaaaaattaaagagacatctagtgcagagttcaaacctttatgttgaattgtttgagtcgttactgatttcatgatgctgataagtgtttgagttgaaatgattttttaaaatgcagagaaaatgctaacagaatattatatagttcccctaaagatgcttcttctaacctccaagtattaaataagactgatctaaatgttaagtacatataaagtatatatttgctagtcatctataaattttaagtacaattccagtgatatacctgtatcttttggaagagaagaactaaacctgccgtttcttaggctaaatagatgattcataaggtccttccctccccatttattctgattgccaagcttttgttcagtaagctcttggcatctagtgattaaccagtgacagcagacagtagtgaccaagagagatggagagaacgatggtgtaagacagtatataaggacagtaagccactgtatttgtggaaccactgcatgtcaaaactccttaacactctaacaaagcatttttggtcttttaagattaaggacagtccttacataagggactcagtttcaaactaaagtgcatcaaaaagcaaattataccccacaaacaactttaaagaggtagccacaaacccagttgytttagattggccttctaaatgaagtcagcacat

SEQ ID NO: 66901 - DNA, 712 bp, Homo sapiens
tacaggggcctaatgttaccctgcagattgagtagccacctggggacmaggtatcaacctggggactgtggttgacctgtgggttaatgtccacctggggactggttattcagctgaggcctgatgcgtacctggggccgaatgtccccctcagggtgaattccacccagatccacctggggcctaatgtctgccttagatctgtgtcccactggggccttgtgttcaccagggactggtatccagctgtggcctgatgacctactgcatcctgttgctcacctacggcctggtgtctacctggggcttggtgatcacctggaaactggatattaacctggggcctgggtgaccacttaaggcctgatgtgtgcctggggcctgactgtccacctggggactgggtgtccaccttgggtctgatgtctacctgaagttaggtatctacctaaggcttggtgtctacctgtggcctgatgtccacatgagtctggggttcggttggggcctgctgtacatctgggaccttggtgtctatctgaggcctgatgtctacctggtgactgccatcctcttgaggcctgctatccacctgggaatggtttatccatggaaatggttatgtccacctggggctggatgttgcccaggggctagatgtccacctgtggccccgtgtccacctagggcctgatgtccacctgggacatgg

SEQ ID NO: 66902 - DNA, 712 bp, Homo sapiens
tacaggggcctaatgttaccctgcagattgagtagccacctggggaccaggtatcaacctggggactgtggttgacctgtgggttaatgtccacctggggactggttattcagctgaggcctgatgcgtacctggggccgaatgtccccctcagggtgaattccacccagatccacctggggcctaatgtctgccttagatctgtgtcccactggggccttgtgttcaccagggactggtatccagctgtggcctgatgacctactgcatcctgttgctcacctacggcctggtgtctacctggggcttggtgatcacctggraactggatattaacctggggcctgggtgaccacttaaggcctgatgtgtgcctggggcctgactgtccacctggggactgggtgtccaccttgggtctgatgtctacctgaagttaggtatctacctaaggcttggtgtctacctgtggcctgatgtccacatgagtctggggttcggttggggcctgctgtacatctgggaccttggtgtctatctgaggcctgatgtctacctggtgactgccatcctcttgaggcctgctatccacctgggaatggtttatccatggaaatggttatgtccacctggggctggatgttgcccaggggctagatgtccacctgtggccccgtgtccacctagggcctgatgtccacctgggacatgg

SEQ ID NO: 66903 - DNA, 1469 bp, Homo sapiens
ttgtttttgagacgttgtcttactatgtcacccaggctagagtgcagtggtgtgatctcgactcactgcaacctccacctccaccttctgggttcaagcaattatcttcctcagcctgggattacaggaacccaccaccatgcccacctaattttgtatttttagtaaagacggggtttcactatcttggtcaggctagtcttgaaggcctgacctcgtgatccacctgcctcgacctcccaaagtgctggaattacaggcatgagccaccttgcctggcctcaatattgtttttaataatttctgctttacttgcagttaatcctatcaggccttctaccatacccagttgtgtcagcaagatctgtacaatgataagtaacacatggctcccagggctaaacatattcctaacacttatataaacactttttcagaaatttgacaatattttataattaaacaatatcttattttacaagaaaagatatggtatcacaatactctgagcaaagagttaatttgcttctcaaatttcctagataatgaagtagtcctaaaatatttaactcagtattggtaatagtttcaatttgaggaagtgttctgaatagcctttttaatgctgatgtcataagattgtgttacaaacacactttcatttaaagacactttatttttaattttgttctaaaaamtaaaattatatataaatacacatgcatcctaaactatatatgtataatatacatatatgtatatatatacacacagagagagagagagagaaggagagagaaacagagacaaagagagccataaatcctgaatttgttgttgtcagtggtgtttgatagcatcactttgtaactcaataggatgtatctgcacaaagctaaaattaatttatttttgccatacaaggcaagtgtatcttgttgatgtctatagagaaaataaatcaccctctaaagaacggtttataaataaataattgatatctgaaaattcagaaaaaaataccactatcattttacttaccatattgcattgaaattatatgtttatgcttctcttgcttctacctctctgtgaattcaaggttagaaaaggagaaatttttatcttagcattcccaggaccaatcacaatatctaatacttagagcatgcaataaatgttggttgaactaaaataaatctgatataaaaacaaataatgctttagggaagtgattttttgttttgacccacaaaaaattatatttttggggaaaagagaaatattttaaattttttttcctccagagaaaattaacatgacgaggttgtcatcctatgcaaacattagtatgccttattgatttttcactaagttatatagcttatattataagacttttttatgggtgtctctacctatagattccaggcactaacaaacatgtagaaactcataaatttaatgca

SEQ ID NO: 66904 - DNA, 2415 bp, Homo sapiens
  misc_feature (1)...(2415): n = A,T,C or G
aggtccatgctgttgggggtgacagagcagccctggaggccctctgctcttaccctggcaggaggtggccaaaaagaagcaggcagaggaagcttctccaacacgcttggaaagaaatttccacatatcactcacgtcactcttgccactagaaggaaaatttctacagtggagtggaagaaaatgactatgctgtgagagagaatggatgcatccagaagagcaaggcaggagggaaatgtgcccattgccataattttgtgtcttttgaagacatttgccagaattctacttttgaaggctgccccttttgacagtcacttactgaggaagctgtgggacattttcaaagccttttatatagaaaaaaaaaccacaaaatatactgctgtgggtctgtgttcagagactacgaagagcacagatgccactgttctgtgtcgcagatgctgtgggaagtgccttaacacacagaggtttgcttcatgcaaccgggtgaggaacatctctaaaacattttacagtcaaggaaattcagtgttcaggaggttgaatgcgttatccaagatcacacatatgtcctgacagattcggggttcaatgaagaattatgtattttaattaagaattatgtattttgattaataattatatattttaatttcacattttaaatttctgcagttttcttccatcacttttcaccatgctttctacacttggaattactttttttgacttcttgatcttctttacttgtatgttattgattttctacaagttttaacatatatgattaaagagtatttcttaatgttttaataattatcctagaataaaatatatttactttgatgtatgcattggatattacagtgtattgtgtacattttcaaacactatgtgttataccagaagcattattcaacagtggtcatttttttacctgaactatgttcagaaaatctttccaccacagtacaaaaagatcgacttcattttgttaacagatggatgtgccatagtgcaattaactgtttaattatcctgttatcctggtgaggatatttaagttcaaacaatgcagtaataaatatctaagagtgcttttagacattaaacaatgttgctctaaattaggaactagagcctgtaatccagcactttactaggcatcggtgggtggatcaccttaggtcacaagtttttagaccagtctgggcaacatggcaagtcccgtttctacaaannnnnnnnnnnnnnnnnnnnnnnnnnnnnnnnnnnnnnnnnnnnnnnnnnnnnnnnnnnnnnnnnnnnnnnnnnnnnnnnnnnnnnnnnnnnnnnnnnnntgcccaataataaataaataaataaataatctagaagtacaattgcttagccaaatttcttatgcattttgaatgataagagttactgcctaatttctgttacaaaggctatggtaatttacactcaaaacacagaataggttggttgttgtcacatatggagtcttactgttgccgagactggagtgcagtggtgtaatcctagctcgttgtagcctccaacgcctaggctcaagcaatcctcccacctcagcctccctcccaattaactaggattacaggtgcatgccaccacacccggctaattttattcttagatatgagatcttgctatgttgcccaggctggtcttgaaatcctggcctcaaggtgacctcagcctccagtgtagctgacattacaggygtgagacactgtacctggctgaatgagtgcctctatcctgacacttgtgtccccacgggatcctgcagaattcaggaccctgtccacacaggggaaaactctctgttgcagtcctgatgactgagaagggagcttacccatggctctcttggtcatttttatttaatagtgagcacagaacctcacattttctggaatgttcccatatgattttgtgagagaaaagagaatagagaccccaactccaagctcactgtgtcaaagggaaaattaagcttgggaactgagttacgcaatactgccttccttgttctcaaacacatagccataacttcacaaccctgtgtcatagcctcatccataagccaggttcccacagtgacagaaggccacatgtctcctcagatgtcctccctcacaatttgctgtgaacccctaaatctttcagaatgcacatcccacctgtaaactatccctaaaagtgagtcggctcaatttcaccctgacaatctcaattaccagcttattttcatagttctgggacaaggtcaggaccagaaatcatccctctgcctaccctgagatgaatgaatcattgagttttcctctactccactccctctattcacatgcttactttatcttatgtaaaatggagatt

SEQ ID NO: 66905 - DNA, 2415 bp, Homo sapiens
  misc_feature (1)...(2415): n = A,T,C or G
aggtccatgctgttgggggtgacagagcagccctggaggccctctgctcttaccctggcaggaggtggccaaaaagaagcaggcagaggaagcttctccaacacgcttggaaagaaatttccacatatcactcacgtcactcttgccactagaaggaaaatttctacagtggagtggaagaaaatgactatgctgtgagagagaatggatgcatccagaagagcaaggcaggagggaaatgtgcccattgccataattttgtgtcttttgaagacatttgccagaattctacttttgaaggctgccccttttgacagtcacttactgaggaagctgtgggacattttcaaagccttttatatagaaaaaaaaaccacaaaatatactgctgtgggtctgtgttcagagactacgaagagcacagatgccactgttctgtgtcgcagatgctgtgggaagtgccttaacacacagaggtttgcttcatgcaaccgggtgaggaacatctctaaaacattttacagtcaaggaaattcagtgttcaggaggttgaatgcgttatccaagatcacacatatgtcctgacagattcggggttcaatgaagaattatgtattttaattaagaattatgtattttgattaataattatatattttaatttcacattttaaatttctgcagttttcttccatcacttttcaccatgctttctacacttggaattactttttttgacttcttgatcttctttacttgtatgttattgattttctacaagttttaacatatatgattaaagagtatttcttaatgttttaataattatcctagaataaaatatatttactttgatgtatgcattggatattacagtgtattgtgtacattttcaaacactatgtgttataccagaagcattattcaacagtggtcatttttttacctgaactatgttcagaaaatctttccaccacagtacaaaaagatcgacttcattttgttaacagatggatgtgccatagtgcaattaactgtttaattatcctgttatcctggtgaggatatttaagttcaaacaatgcagtaataaatatctaagagtgcttttagacattaaacaatgttgctctaaattaggaactagagcctgtaatccagcactttactaggcatcggtgggtggatcaccttaggtcacaagtttttagaccagtctgggcaacatggcaagtcccgtttctacaaannnnnnnnnnnnnnnnnnnnnnnnnnnnnnnnnnnnnnnnnnnnnnnnnnnnnnnnnnnnnnnnnnnnnnnnnnnnnnnnnnnnnnnnnnnnnnnnnnnntgcccaataataaataaataaataaataatctagaagtacaattgcttagccaaatttcttatgcattttgaatgataagagttactgcctaatttctgttacaaaggctatggtaatttacactcaaaacacagaataggttggttgttgtcacatatggagtcttactgttgccgagactggagtgcagtggtgtaatcctagctcgttgtagcctccaacgcctaggctcaagcaatcctcccacctcagcctccctcccaattaactaggattacaggtgcatgccaccacacccggctaattttattcttagatatgagatcttgctatgttgcccaggctggtcttgaaatcctggcctcaaggtgacctcagcctccagtgtagctgacattacaggcgtgagacactgtacctggctgaatgagtgcctctatcctgacacttgtgtccccacgggatcctgcagaattcaggaccctgtccacacaggggaaaactctctgttgcagtcctgatgactgagaagggagcttacccatggctctcttggtcatttttatttaatagtgagcacagaacytcacattttctggaatgttcccatatgattttgtgagagaaaagagaatagagaccccaactccaagctcactgtgtcaaagggaaaattaagcttgggaactgagttacgcaatactgccttccttgttctcaaacacatagccataacttcacaaccctgtgtcatagcctcatccataagccaggttcccacagtgacagaaggccacatgtctcctcagatgtcctccctcacaatttgctgtgaacccctaaatctttcagaatgcacatcccacctgtaaactatccctaaaagtgagtcggctcaatttcaccctgacaatctcaattaccagcttattttcatagttctgggacaaggtcaggaccagaaatcatccctctgcctaccctgagatgaatgaatcattgagttttcctctactccactccctctattcacatgcttactttatcttatgtaaaatggagatt

SEQ ID NO: 66906 - DNA, 2415 bp, Homo sapiens
  misc_feature (1)...(2415): n = A,T,C or G
aggtccatgctgttgggggtgacagagcagccctggaggccctctgctcttaccctggcaggaggtggccaaaaagaagcaggcagaggaagcttctccaacacgcttggaaagaaatttccacatatcactcacgtcactcttgccactagaaggaaaatttctacagtggagtggaagaaaatgactatgctgtgagagagaatggatgcatccagaagagcaaggcaggagggaaatgtgcccattgccataattttgtgtcttttgaagacatttgccagaattctacttttgaaggctgccccttttgacagtcacttactgaggaagctgtgggacattttcaaagccttttatatagaaaaaaaaaccacaaaatatactgctgtgggtctgtgttcagagactacgaagagcacagatgccactgttctgtgtcgcagatgctgtgggaagtgccttaacacacagaggtttgcttcatgcaaccgggtgaggaacatctctaaaacattttacagtcaaggaaattcagtgttcaggaggttgaatgcgttatccaagatcacacatatgtcctgacagattcggggttcaatgaagaattatgtattttaattaagaattatgtattttgattaataattatatattttaatttcacattttaaatttctgcagttttcttccatcacttttcaccatgctttctacacttggaattactttttttgacttcttgatcttctttacttgtatgttattgattttctacaagttttaacatatatgattaaagagtatttcttaatgttttaataattatcctagaataaaatatatttactttgatgtatgcattggatattacagtgtattgtgtacattttcaaacactatgtgttataccagaagcattattcaacagtggtcatttttttacctgaactatgttcagaaaatctttccaccacagtacaaaaagatcgacttcattttgttaacagatggatgtgccatagtgcaattaactgtttaattatcctgttatcctggtgaggatatttaagttcaaacaatgcagtaataaatatctaagagtgcttttagacattaaacaatgttgctctaaattaggaactagagcctgtaatccagcactttactaggcatcggtgggtggatcaccttaggtcacaagtttttagaccagtctgggcaacatggcaagtcccgtttctacaaannnnnnnnnnnnnnnnnnnnnnnnnnnnnnnnnnnnnnnnnnnnnnnnnnnnnnnnnnnnnnnnnnnnnnnnnnnnnnnnnnnnnnnnnnnnnnnnnnnntgcccaataataaataaataaataaataatctagaagtacaattgcttagccaaatttcttatgcattttgaatgataagagttactgcctaatttctgttacaaaggctatggtaatttacactcaaaacacagaataggttggttgttgtcacatatggagtcttactgttgccgagactggagtgcagtggtgtaatcctagctcgttgtagcctccaacgcctaggctcaagcaatcctcccacctcagcctccctcccaattaactaggattacaggtgcatgccaccacacccggctaattttattcttagatatgagatcttgctatgttgcccaggctggtcttgaaatcctggcctcaaggtgacctcagcctccagtgtagctgacattacaggcgtgagacactgtacctggctgaatgagtgcctctatcctgacacttgtgtccccacgggatcctgcagaattcaggaccctgtccacacaggggaaaactctctgttgcagtcctgatgactgagaagggagcttacccatggctctcttggtcatttttatttaatagtgagcacagaacctcacattttctggaatgttcccatatgattttgtgagagaaaagagaatagagaccccaacyccaagctcactgtgtcaaagggaaaattaagcttgggaactgagttacgcaatactgccttccttgttctcaaacacatagccataacttcacaaccctgtgtcatagcctcatccataagccaggttcccacagtgacagaaggccacatgtctcctcagatgtcctccctcacaatttgctgtgaacccctaaatctttcagaatgcacatcccacctgtaaactatccctaaaagtgagtcggctcaatttcaccctgacaatctcaattaccagcttattttcatagttctgggacaaggtcaggaccagaaatcatccctctgcctaccctgagatgaatgaatcattgagttttcctctactccactccctctattcacatgcttactttatcttatgtaaaatggagatt

SEQ ID NO: 66907 - DNA, 632 bp, Homo sapiens
attgtcagcacctctaagacaacatgtagatattgctcattattaacacatttcatcttttcatgataaattacaaaaatttattttcatttttaaaatgcaaaccattatgccttgtattatggcattcttgcrttactataaaggaatacctaagcactacataatttatactgaaaaaaaagattgacttggctcacagttctgcaggctgtacaggaagctttgcattggcagttgcttgacttcaagaagggtcctcagggagcttttacacatggcagaaggtgaagcaaaagaaggtatgtcacatggccagagcagcagcaagcagggagaggtgtcacacacttttaacagccagatgtaatgagaactcactcactcttgcaaggacagtgccaagaggatggtgttaaacatgagaaatcagccttcatgaccccatcacctcccaccagaccccgactccaacactggaaattacaattcgacatgagacttaaagggtacaacatccaaactatttcattccatccctggcccttcaaatctcatgttcttctcacattgcaaaatacaatcatcccttctcaatagtcccccaaaagtctcaacctgtttcggcatca

SEQ ID NO: 66908 - DNA, 632 bp, Homo sapiens
attgtcagcacctctaagacaacatgtagatattgctcattattaacacatttcatcttttcatgataaattacaaaaatttattttcatttttaaaatgcaaaccattatgccttgtattatggcattcttgcgttactataaaggaatacctaagcactacataatttatactgaaaaaaaagattgacttggctcacagttctgcaggctgtacaggaagctttgcattggcagttgcttgrcttcaagaagggtcctcagggagcttttacacatggcagaaggtgaagcaaaagaaggtatgtcacatggccagagcagcagcaagcagggagaggtgtcacacacttttaacagccagatgtaatgagaactcactcactcttgcaaggacagtgccaagaggatggtgttaaacatgagaaatcagccttcatgaccccatcacctcccaccagaccccgactccaacactggaaattacaattcgacatgagacttaaagggtacaacatccaaactatttcattccatccctggcccttcaaatctcatgttcttctcacattgcaaaatacaatcatcccttctcaatagtcccccaaaagtctcaacctgtttcggcatca

SEQ ID NO: 66909 - DNA, 632 bp, Homo sapiens
attgtcagcacctctaagacaacatgtagatattgctcattattaacacatttcatcttttcatgataaattacaaaaatttattttcatttttaaaatgcaaaccattatgccttgtattatggcattcttgcgttactataaaggaatacctaagcactacataatttatactgaaaaaaaagattgacttggctcacagttctgcaggctgtacaggaagctttgcattggcagttgcttgacttcaagaagggtcctcagggagcttttacacatsgcagaaggtgaagcaaaagaaggtatgtcacatggccagagcagcagcaagcagggagaggtgtcacacacttttaacagccagatgtaatgagaactcactcactcttgcaaggacagtgccaagaggatggtgttaaacatgagaaatcagccttcatgaccccatcacctcccaccagaccccgactccaacactggaaattacaattcgacatgagacttaaagggtacaacatccaaactatttcattccatccctggcccttcaaatctcatgttcttctcacattgcaaaatacaatcatcccttctcaatagtcccccaaaagtctcaacctgtttcggcatca

SEQ ID NO: 66910 - DNA, 632 bp, Homo sapiens
attgtcagcacctctaagacaacatgtagatattgctcattattaacacatttcatcttttcatgataaattacaaaaatttattttcatttttaaaatgcaaaccattatgccttgtattatggcattcttgcgttactataaaggaatacctaagcactacataatttatactgaaaaaaaagattgacttggctcacagttctgcaggctgtacaggaagctttgcattggcagttgcttgacttcaagaagggtcctcagggagcttttacacatggcagaaggtgaagcaaaagaaggtatgtcacatggccagagcagcagcaagcagggagaggtgycacacacttttaacagccagatgtaatgagaactcactcactcttgcaaggacagtgccaagaggatggtgttaaacatgagaaatcagccttcatgaccccatcacctcccaccagaccccgactccaacactggaaattacaattcgacatgagacttaaagggtacaacatccaaactatttcattccatccctggcccttcaaatctcatgttcttctcacattgcaaaatacaatcatcccttctcaatagtcccccaaaagtctcaacctgtttcggcatca

SEQ ID NO: 66911 - DNA, 632 bp, Homo sapiens
attgtcagcacctctaagacaacatgtagatattgctcattattaacacatttcatcttttcatgataaattacaaaaatttattttcatttttaaaatgcaaaccattatgccttgtattatggcattcttgcgttactataaaggaatacctaagcactacataatttatactgaaaaaaaagattgacttggctcacagttctgcaggctgtacaggaagctttgcattggcagttgcttgacttcaagaagggtcctcagggagcttttacacatggcagaaggtgaagcaaaagaaggtatgtcacatggccagagcagcagcaagcagggagaggtgtcacacacttttaacagccagatgtaatgagaactcactcactcttgcaaggacagtgccaagaggatggtgttaaacatgagaaatcagccytcatgaccccatcacctcccaccagaccccgactccaacactggaaattacaattcgacatgagacttaaagggtacaacatccaaactatttcattccatccctggcccttcaaatctcatgttcttctcacattgcaaaatacaatcatcccttctcaatagtcccccaaaagtctcaacctgtttcggcatca

SEQ ID NO: 66912 - DNA, 579 bp, Homo sapiens
caattcaatgtacacttttcttgctaggataccagtaccaatatggtgttgtccagatactcagttataaccaattctgataggtcttccatcaaatctatatactcctcttcctcctgggaagctaccctacatttwccagtctcccttgggattaggttatggtcatgtgactaaattctaactaatggaatgtgaaaggaaattatgcgcatcattcctaaatctagcgcataaaaatctcccactgagattctgtatgcccttctagtctatttaactgtatggagacctccagggaaaatttgaagaccacatgttgaagatggcagagccgttgtctatctgaatccttgaatgattacatggagcagactgcctgcctaagtgaatattcactctgtttttttgtttacatgaattttactccatgcctaagacgcaacatatatatatatccttttaccaactcatatatgctgttaacaatgtgataggccctatttttaaatttttgcacatattaattcacataattatcctaacaactctctgggtcagatacgtagatgaagaaat

SEQ ID NO: 66913 - DNA, 579 bp, Homo sapiens
caattcaatgtacacttttcttgctaggataccagtaccaatatggtgttgtccagatactcagttataaccaattctgataggtcttccatcaaatctatatactcctcttcctcctgggaagctaccctacattttccagtctcccttgggattaggttatggtcatgtgactaaattctaactaatggaatgtgaaaggaaattatgcgcatcattcctaaatctagcgcataaaaatctcccactgagattctgtatgcccttctagtctatttaactgtatggagacctccagggaaaatttgaagaccacatgttgaagatggcagagccgttgtctatctgaatccttgaatgattacatggagcagactgcctgcctaagtgaatattcactctgtttttttgtttayatgaattttactccatgcctaagacgcaacatatatatatatccttttaccaactcatatatgctgttaacaatgtgataggccctatttttaaatttttgcacatattaattcacataattatcctaacaactctctgggtcagatacgtagatgaagaaat

SEQ ID NO: 66914 - DNA, 1221 bp, Homo sapiens
tttggggttacagatacacttgtcattgctgtcatggctctggatcgctatgtggccatctgtgaccccctgcactatgctttggtaatgaatcaccaacggtgtgcctgcttactagccttgagctgggtggtgtccatactgcacaccatgttgcgtgtgggactcgtcctgcctctttgctggactggggatgctgggggcaacgttaaccttcctcacttcttttgtgaccaccggccacttctgcgagcctcttgttctgacatacattctaatgagctggccatattctttgagggtggcttccttatgctgggcccctgtgccctcattgtactctcttatgtccgaattggggccgctattctacgtttgccttcagctgctggtcgccgccgagcagtctccacctgtggatcccacctcaccatggttggtttcctctacggcaccatcatttgkgtctacttccagcctcccttccagaactctcagtatcaggacatggtggcttcagtaatgtatactgccattacacctttggccaacccatttgtgtatagcctccacaataaggatgtcaagggtgcactctgcaggctgcttgaatgggtgaaggtagacccctgattagcctgctgtgggccatattgaataggtgagaaaagtcatgggcatattctgagcagagttggttttggggagatcagaggggtggagggcctagataacttaaggaactccagatttggctcttgtcaatgttgtgctttgatggagccatgaacattccacattcatagacacataagatcagggctcccttatcagcatacctctgggcaccctccatcaggccttttattttatcaaagtggatgaaaaagaattaccaagtctgggtagttttaattttagagttctgagggaatatgaggataggattgtgaaactatgaactaaacgaagagcagtagagttaatcatcatcatcacatttaggttggtgtgtgttcttgtgggagtgtgtttgtgtatatcagaaagtaagggaagatgacagtttagacaaatagggctaagttcgctacctgttccattcaatgagcaaaaatatgtcccagagtgagtatgaaatgataatcatgattctactgttccatgagttaggattaagttccatgggtttcttatagtgtgagcatctaactctgatgc

SEQ ID NO: 66915 - DNA, 1221 bp, Homo sapiens
tttggggttacagatacacttgtcattgctgtcatggctctggatcgctatgtggccatctgtgaccccctgcactatgctttggtaatgaatcaccaacggtgtgcctgcttactagccttgagctgggtggtgtccatactgcacaccatgttgcgtgtgggactcgtcctgcctctttgctggactggggatgctgggggcaacgttaaccttcctcacttcttttgtgaccaccggccacttctgcgagcctcttgttctgacatacattctaatgagctggccatattctttgagggtggcttccttatgctgggcccctgtgccctcattgtactctcttatgtccgaattggggccgctattctacgtttgccttcagctgctggtcgccgccgagcagtctccacctgtggatcccacctcaccatggttggtttcctctacggcaccatcatttgtgtctacttccagcctcccttccagaactctcagtatcaggacatggtggcttcagtaatgtatactgccattacacctttggccaacccatttgtgtatagcctccacaataaggatgtcaagggtgcactctgcaggctgcttgaatgggkgaaggtagacccctgattagcctgctgtgggccatattgaataggtgagaaaagtcatgggcatattctgagcagagttggttttggggagatcagaggggtggagggcctagataacttaaggaactccagatttggctcttgtcaatgttgtgctttgatggagccatgaacattccacattcatagacacataagatcagggctcccttatcagcatacctctgggcaccctccatcaggccttttattttatcaaagtggatgaaaaagaattaccaagtctgggtagttttaattttagagttctgagggaatatgaggataggattgtgaaactatgaactaaacgaagagcagtagagttaatcatcatcatcacatttaggttggtgtgtgttcttgtgggagtgtgtttgtgtatatcagaaagtaagggaagatgacagtttagacaaatagggctaagttcgctacctgttccattcaatgagcaaaaatatgtcccagagtgagtatgaaatgataatcatgattctactgttccatgagttaggattaagttccatgggtttcttatagtgtgagcatctaactctgatgc

SEQ ID NO: 66916 - DNA, 1221 bp, Homo sapiens
tttggggttacagatacacttgtcattgctgtcatggctctggatcgctatgtggccatctgtgaccccctgcactatgctttggtaatgaatcaccaacggtgtgcctgcttactagccttgagctgggtggtgtccatactgcacaccatgttgcgtgtgggactcgtcctgcctctttgctggactggggatgctgggggcaacgttaaccttcctcacttcttttgtgaccaccggccacttctgcgagcctcttgttctgacatacattctaatgagctggccatattctttgagggtggcttccttatgctgggcccctgtgccctcattgtactctcttatgtccgaattggggccgctattctacgtttgccttcagctgctggtcgccgccgagcagtctccacctgtggatcccacctcaccatggttggtttcctctacggcaccatcatttgtgtctacttccagcctcccttccagaactctcagtatcaggacatggtggcttcagtaatgtatactgccattacacctttggccaacccatttgtgtatagcctccacaataaggatgtcaagggtgcactctgcaggctgcttgaatgggtgaaggtagacccctgattagcctgctgtgggccatattgaataggtgagaaaagtcatgggcatattctgagcagagttggttttggggagatcagaggggtggagggcctagataacttaaggaactccagatttggctcttgtcaatgttgtgctttgatggagccatgaacattccacattcatagacacataagatcagggctcccttatcagcatacctctgggcaccctccatcaggccttttattttatcaaagtggatgaaaaagaattaccaagtctgggtagttttaattttagagttctgagggaatatgaggataggattgtgaaactatgaactaaacgaagagcagtagagttaatcatcatcatcacatttaggttggtgtgtgttcttgtgggagtgtgtttgtgtatatcagaaagtaagggaagatgacagtttagacaaatagggctaagttcgctacctgttccattcaatgagcaaaaatatgtcccagagtgagtatgaaatgataatcaygattctactgttccatgagttaggattaagttccatgggtttcttatagtgtgagcatctaactctgatgc

SEQ ID NO: 66917 - DNA, 484 bp, Homo sapiens
gcagaaaaatattcctccagtatgtcagtctctctcttcgttcatctttttctccttttgcccctttctctcatcctgtctatgtctgccactcaatatctctctgttccttccttctctctcttcctctgtctctctgtgtgtgtctttttacattctatctcttctccccatgccaactgctgccttctgtttcttcctcgtctatatgcacttataaactcatctattgctgagagggaaaaaatacccattccatctccagtgcytaccttccctgcatttatgatccaatgtttggtggataagtgttcctaaggttctcattatgggatctaaaaaccagcttccaagattctagacatttctcagacaccaagaataaaagctacaagtacaaactcattcctgtttacagccccagagctgtgaatcgaagagcttaactaaggagaaaactctagggagtaggagattgaactgg

SEQ ID NO: 66918 - DNA, 801 bp, Homo sapiens
gtaaactgccctttgtaaatagaggagacactgggataacatgacttaataaagtttctgagtttctctgattcttaatccccagaaatgggaagaaaatctgggtcagttgttaagagaagacacacagtgaaaaaccattccagcggatgatttctgggccacctaactctgattattcttaatacctccctgacrgattgaaaatctctggaatctattagctattttctctgattcagggaaaattttactcttcactatgtattagtgaataattttcaattatttccattgaaaataatggcaaaaactgcaattacttttgcaccaacctataaatcattcatactcttttgtggataggttttgataaggggaaatgggagagtccataaagacacagaatgtctgaggatggtgtgaggaggaggcatgacgaggggaggaaaaacacaagacgattaggaagtcaaagacaaacttcacaatactcaatagtattgtacaaaggatcagttttgagaaagatggtcctccctccagaaattactgaaagcctatacaggaattgtcggaggtgtccagaaacttctgtgctctggtgtgcaggctcctaagagcagatatttacctttcagctgtactggccctggctctcccaatccgcctcaggcagcatctgtcatcatgtcttgttttgacagcagcgtggagctgaccactcagcgaagacagaggaaatttccaagaatagaagaaagaaaagcatcagggaggggctgtaggggtagagccacc

SEQ ID NO: 66919 - DNA, 1341 bp, Homo sapiens
ggtcaaatatttttaattccttcacatctacagcctgatgcatcggccgtttcaatgcaccattgttggtggcaactccattcttccctatactcaagccaaaaaamcaggttctccttgaggctagtctttttctcacagcacacatccaatttgtcagaaaacttatgtttcctgtttggttaattacagattttgatctgcccaatctttctctttcttggtctctgaattttggcaaaggagtctcctgatacaggcaggatagattctactgacgattctcaaaaccgtcagacacttaagagccttaatctcggggtaggggtttgggccgccctcgaaccttttctttgggcctccccatcaaaatcagtctggccaggcctgtcttcaaggcccaggggcagggccaggtcctcccgatgcttcttgaagcttctcctgccgggtcagcagccaccctccccttccctctgacctgcagagaagcttcagggggcatttattcaatttgctaggagctcacggatgcaggtgcgcggtgactctgtggttcccaccgcacccaccgccctccttggtcctctcactgtctgaagcgggcagtaatgttcagggtgagcttgggctccgaagacacccagtcaaggagggaccagtagggaagggcactggccccttaggtccttcccagctagggatccgaaaaagttcttgaagaaatagaaagggagagttggaagtagatcaaagggaaagaaagaaaatcctagatttcctatctgaaggcaccatgaagagaaagtccgcctcctctgggccgcgtcctcacgtcgctggtgaaccgagttctgttctccattggagaccaaatcagttgactttggcttgactcctagtgaaggagccccgctttgtcctcccctgtttagctcttgatcctgaagcacttgattgtctctcccgggcttttgatggatttcagggatgcaactgagaaatttgtttttaatgcacttaattgaagtaagaatattttaaagtattttggcaaagaaaaacgtttccttttgcaatgaagacattcagatgtaaggaaaatcactaggctctcacaaacacaaattccatgtcagcaagtaggtttgaccctcaggttgggcacactttaagtgtactgttggaacttaagatgaatctaggacattcatgattaatatttttagttttttagtacaatttaatattttaaatttaaatacacattctgaaaattgtataaccagcacaagaaaccggctttacgccatatttacaaacataggaaagaaaggtgat

SEQ ID NO: 66920 - DNA, 607 bp, Homo sapiens
catcctcccccaccctactcacgggatggagggcccctgcctggagacccctgggagttcatggtggctcttgggcatatattcctgcccagccactgactgcccagccccaaaacactacctggaatcagccaccggacctttgtcccaggtttcctggctcagcccggctgggtggagcctccctctggccctctccctacatcagcaaagcctcagtgacccttgagctgagtcaattggggcctccatggacatgcagagtccagaccccrgagtgccagtaccacctgctcccctccctcgccaccacacccacagacagacgcacaagcagacacattggttgcaagccgggagcacatttatggcaaagcacggctcagctctaggggaaagcagagcccttactaaggccacaggaggcacccaggaagaagggcaggcaggtaatatgcaaacacccagggcagagggtgcattttctggcttagccggaggaggcgaatggagatttggagagataggtctcttgagccccgatgaaggggtcaggtctgggagggaggaataaaatgggccgacagctcttggattcccaggctgg

SEQ ID NO: 66921 - DNA, 607 bp, Homo sapiens
catcctcccccaccctactcacgggatggagggcccctgcctggagacccctgggagttcatggtggctcttgggcatatattcctgcccagccactgactgcccagccccaaaacactacctggaatcagccaccggacctttgtcccaggtttcctggctcagcccggctgggtggagcctccctctggccctctccctacatcagcaaagcctcagtgacccttgagctgagtcaattggggcctccatggacatgcagagtccagaccccggrgtgccagtaccacctgctcccctccctcgccaccacacccacagacagacgcacaagcagacacattggttgcaagccgggagcacatttatggcaaagcacggctcagctctaggggaaagcagagcccttactaaggccacaggaggcacccaggaagaagggcaggcaggtaatatgcaaacacccagggcagagggtgcattttctggcttagccggaggaggcgaatggagatttggagagataggtctcttgagccccgatgaaggggtcaggtctgggagggaggaataaaatgggccgacagctcttggattcccaggctgg

SEQ ID NO: 66922 - DNA, 2347 bp, Homo sapiens
cgcacacggcgcttagttctggaactggatacccgggggaggatgcgggatcccgaagcccgggtgtgggtccccgtggtcttcgtgttgggggtaggtgcggaacgctaagcctgggcctactgggagccatagtcttcttgatggctggtgcttattgggcttttttcartcgaatttcaaaatgcagttgaatttcttactttggaaacgataatagaaatggctgacctcagattttcatgattatgttttgccttttccagtgtatgtgcagtttctgtagtatagtggttatcatgtttgcctcacatgtgaaagacccttggctgcagactggagggaaacatggttttttggtttttctttttgtccctaaatttagtgagtttaatcgaggttgggaaaccaaacagaaaagtagttgaacctgtggctacactttagacctcctcaatctagacagattgttgaccaggctacagtttccactggtctgccagcaagaggcctgcttaatgttagctttggttccagaaattccttaagattctcttcattctcttctgtcgcctgaattttcataggctgacactgaaagtggatgacatcttaatgcatttcctaagtgtcccgctgggcttcgctttactctgataagttgcagatctggctgatttgcgagacaaaaacaaaatatttttttaaaaggttctaaatctgcatctggaactcgtagagtcaataatctgaaaccacacgaattatctacatacaaaagattttgaatgcataccccttccccaaataatcctcagaaaaccggttaagttttagcatctatgactctgagatgcatatgaggcctttgtaaatttagaagttgagagtagaaagtacaggtttgtattttagaaggagatttgggaataaatatagctctggtggatatagatcatatgttaaggtttgttggccagagctggtgtgtgtcttgggtgttgggcaaagaacagagaacagccaaagctctgcgaggtcaatgtgaagggtgatttccttggtgggctcaagtttatgacgcagcctggacctagcttggcttctcagctagagaagaagcatgattccatgtcacagctcctgtctttgaaaaagtcataatgactcccagacccaacatgtggggaaaactctggatttgtctcttcagttgaatgtctccgttgaaaattgaggaaagaaatctctctactatttgaacttcatcaaaagactaatatgttaatattttgaccgtcaatatttccttaaactagtctactcctttcatagctaatacatcaaagcatattaacttaggaaatgggattctcccaaacaaggaaacattgacggcaagggttcttaatcttttcacatcacatttccttcaaatgctttatacatcttcaagcagacaaataatagtattataatgattacgagaccgatcattactcttttgccaaaaaaaccagcgacaaaagactaacttagtggaccaacctttgtttcttcattatctgtacattgattctgtccttttatttcgtctttcttctaattctgcttctgcttcttgtttcctccctggatttgaactttatttacctaaactaccagttaggttaccttctcagaacctctaaggcagcagtttgagattgacaatggaagatttaagattagaaaaaagaaacatgaatgaatttctgatgttttattataggggtttataatgcaggtagaaagacctttttcagagttaagagtttgatccaccaaatgagctattttgatatttataactttgtctagtaaaagtttcctataaaaacatttggtttggatgtgtttgttagcttttagtcgacacttgaaaaaggcggttggaagtttctaagtctttttggatactcttttctcttatcctccaggacatgggtgtgtagaggtgttggtggtgcagtggtagaattctcgcctcccacgtgggagactcgggttcaattcccggccaatgcagcaggtacttcttcatttcattatggccctttacccatcttttacgctgcaaaattatactgcataacctaatagtgcatttaggggcttggccaccacaaggtaaagtgacaacattactcacgagagtagcggcaagagacattcaggacactaacccaggacccatgcaattgttggactcaaacagcttagcaaagtggcaagcacaaagtctttccggtgagtcactgcagttttgatattggtacctgttactttcatctattcacggggcgga

SEQ ID NO: 66923 - DNA, 2347 bp, Homo sapiens
cgcacacggcgcttagttctggaactggatacccgggggaggatgcgggatcccgaagcccgggtgtgggtccccgtggtcttcgtgttgggggtaggtgcggaacgctaagcctgggcctactgggagccatagtcttcttgatggctggtgcttattgggcttttttcaatcgaatttcaaaatgcagttgaatttcttactttggaaacgataatagaaatggctgacctcagattttcatgattatgttttgccttttccagtgtatgtgcagtttctgtagtatastggttatcatgtttgcctcacatgtgaaagacccttggctgcagactggagggaaacatggttttttggtttttctttttgtccctaaatttagtgagtttaatcgaggttgggaaaccaaacagaaaagtagttgaacctgtggctacactttagacctcctcaatctagacagattgttgaccaggctacagtttccactggtctgccagcaagaggcctgcttaatgttagctttggttccagaaattccttaagattctcttcattctcttctgtcgcctgaattttcataggctgacactgaaagtggatgacatcttaatgcatttcctaagtgtcccgctgggcttcgctttactctgataagttgcagatctggctgatttgcgagacaaaaacaaaatatttttttaaaaggttctaaatctgcatctggaactcgtagagtcaataatctgaaaccacacgaattatctacatacaaaagattttgaatgcataccccttccccaaataatcctcagaaaaccggttaagttttagcatctatgactctgagatgcatatgaggcctttgtaaatttagaagttgagagtagaaagtacaggtttgtattttagaaggagatttgggaataaatatagctctggtggatatagatcatatgttaaggtttgttggccagagctggtgtgtgtcttgggtgttgggcaaagaacagagaacagccaaagctctgcgaggtcaatgtgaagggtgatttccttggtgggctcaagtttatgacgcagcctggacctagcttggcttctcagctagagaagaagcatgattccatgtcacagctcctgtctttgaaaaagtcataatgactcccagacccaacatgtggggaaaactctggatttgtctcttcagttgaatgtctccgttgaaaattgaggaaagaaatctctctactatttgaacttcatcaaaagactaatatgttaatattttgaccgtcaatatttccttaaactagtctactcctttcatagctaatacatcaaagcatattaacttaggaaatgggattctcccaaacaaggaaacattgacggcaagggttcttaatcttttcacatcacatttccttcaaatgctttatacatcttcaagcagacaaataatagtattataatgattacgagaccgatcattactcttttgccaaaaaaaccagcgacaaaagactaacttagtggaccaacctttgtttcttcattatctgtacattgattctgtccttttatttcgtctttcttctaattctgcttctgcttcttgtttcctccctggatttgaactttatttacctaaactaccagttaggttaccttctcagaacctctaaggcagcagtttgagattgacaatggaagatttaagattagaaaaaagaaacatgaatgaatttctgatgttttattataggggtttataatgcaggtagaaagacctttttcagagttaagagtttgatccaccaaatgagctattttgatatttataactttgtctagtaaaagtttcctataaaaacatttggtttggatgtgtttgttagcttttagtcgacacttgaaaaaggcggttggaagtttctaagtctttttggatactcttttctcttatcctccaggacatgggtgtgtagaggtgttggtggtgcagtggtagaattctcgcctcccacgtgggagactcgggttcaattcccggccaatgcagcaggtacttcttcatttcattatggccctttacccatcttttacgctgcaaaattatactgcataacctaatagtgcatttaggggcttggccaccacaaggtaaagtgacaacattactcacgagagtagcggcaagagacattcaggacactaacccaggacccatgcaattgttggactcaaacagcttagcaaagtggcaagcacaaagtctttccggtgagtcactgcagttttgatattggtacctgttactttcatctattcacggggcgga

SEQ ID NO: 66924 - DNA, 2347 bp, Homo sapiens
cgcacacggcgcttagttctggaactggatacccgggggaggatgcgggatcccgaagcccgggtgtgggtccccgtggtcttcgtgttgggggtaggtgcggaacgctaagcctgggcctactgggagccatagtcttcttgatggctggtgcttattgggcttttttcaatcgaatttcaaaatgcagttgaatttcttactttggaaacgataatagaaatggctgacctcagattttcatgattatgttttgccttttccagtgtatgtgcagtttctgtagtatagtggttatcatgtttgcctcacatgtgaaagacccttggctscagactggagggaaacatggttttttggtttttctttttgtccctaaatttagtgagtttaatcgaggttgggaaaccaaacagaaaagtagttgaacctgtggctacactttagacctcctcaatctagacagattgttgaccaggctacagtttccactggtctgccagcaagaggcctgcttaatgttagctttggttccagaaattccttaagattctcttcattctcttctgtcgcctgaattttcataggctgacactgaaagtggatgacatcttaatgcatttcctaagtgtcccgctgggcttcgctttactctgataagttgcagatctggctgatttgcgagacaaaaacaaaatatttttttaaaaggttctaaatctgcatctggaactcgtagagtcaataatctgaaaccacacgaattatctacatacaaaagattttgaatgcataccccttccccaaataatcctcagaaaaccggttaagttttagcatctatgactctgagatgcatatgaggcctttgtaaatttagaagttgagagtagaaagtacaggtttgtattttagaaggagatttgggaataaatatagctctggtggatatagatcatatgttaaggtttgttggccagagctggtgtgtgtcttgggtgttgggcaaagaacagagaacagccaaagctctgcgaggtcaatgtgaagggtgatttccttggtgggctcaagtttatgacgcagcctggacctagcttggcttctcagctagagaagaagcatgattccatgtcacagctcctgtctttgaaaaagtcataatgactcccagacccaacatgtggggaaaactctggatttgtctcttcagttgaatgtctccgttgaaaattgaggaaagaaatctctctactatttgaacttcatcaaaagactaatatgttaatattttgaccgtcaatatttccttaaactagtctactcctttcatagctaatacatcaaagcatattaacttaggaaatgggattctcccaaacaaggaaacattgacggcaagggttcttaatcttttcacatcacatttccttcaaatgctttatacatcttcaagcagacaaataatagtattataatgattacgagaccgatcattactcttttgccaaaaaaaccagcgacaaaagactaacttagtggaccaacctttgtttcttcattatctgtacattgattctgtccttttatttcgtctttcttctaattctgcttctgcttcttgtttcctccctggatttgaactttatttacctaaactaccagttaggttaccttctcagaacctctaaggcagcagtttgagattgacaatggaagatttaagattagaaaaaagaaacatgaatgaatttctgatgttttattataggggtttataatgcaggtagaaagacctttttcagagttaagagtttgatccaccaaatgagctattttgatatttataactttgtctagtaaaagtttcctataaaaacatttggtttggatgtgtttgttagcttttagtcgacacttgaaaaaggcggttggaagtttctaagtctttttggatactcttttctcttatcctccaggacatgggtgtgtagaggtgttggtggtgcagtggtagaattctcgcctcccacgtgggagactcgggttcaattcccggccaatgcagcaggtacttcttcatttcattatggccctttacccatcttttacgctgcaaaattatactgcataacctaatagtgcatttaggggcttggccaccacaaggtaaagtgacaacattactcacgagagtagcggcaagagacattcaggacactaacccaggacccatgcaattgttggactcaaacagcttagcaaagtggcaagcacaaagtctttccggtgagtcactgcagttttgatattggtacctgttactttcatctattcacggggcgga

SEQ ID NO: 66925 - DNA, 2347 bp, Homo sapiens
cgcacacggcgcttagttctggaactggatacccgggggaggatgcgggatcccgaagcccgggtgtgggtccccgtggtcttcgtgttgggggtaggtgcggaacgctaagcctgggcctactgggagccatagtcttcttgatggctggtgcttattgggcttttttcaatcgaatttcaaaatgcagttgaatttcttactttggaaacgataatagaaatggctgacctcagattttcatgattatgttttgccttttccagtgtatgtgcagtttctgtagtatagtggttatcatgtttgcctcacatgtgaaagacccttggctgsagactggagggaaacatggttttttggtttttctttttgtccctaaatttagtgagtttaatcgaggttgggaaaccaaacagaaaagtagttgaacctgtggctacactttagacctcctcaatctagacagattgttgaccaggctacagtttccactggtctgccagcaagaggcctgcttaatgttagctttggttccagaaattccttaagattctcttcattctcttctgtcgcctgaattttcataggctgacactgaaagtggatgacatcttaatgcatttcctaagtgtcccgctgggcttcgctttactctgataagttgcagatctggctgatttgcgagacaaaaacaaaatatttttttaaaaggttctaaatctgcatctggaactcgtagagtcaataatctgaaaccacacgaattatctacatacaaaagattttgaatgcataccccttccccaaataatcctcagaaaaccggttaagttttagcatctatgactctgagatgcatatgaggcctttgtaaatttagaagttgagagtagaaagtacaggtttgtattttagaaggagatttgggaataaatatagctctggtggatatagatcatatgttaaggtttgttggccagagctggtgtgtgtcttgggtgttgggcaaagaacagagaacagccaaagctctgcgaggtcaatgtgaagggtgatttccttggtgggctcaagtttatgacgcagcctggacctagcttggcttctcagctagagaagaagcatgattccatgtcacagctcctgtctttgaaaaagtcataatgactcccagacccaacatgtggggaaaactctggatttgtctcttcagttgaatgtctccgttgaaaattgaggaaagaaatctctctactatttgaacttcatcaaaagactaatatgttaatattttgaccgtcaatatttccttaaactagtctactcctttcatagctaatacatcaaagcatattaacttaggaaatgggattctcccaaacaaggaaacattgacggcaagggttcttaatcttttcacatcacatttccttcaaatgctttatacatcttcaagcagacaaataatagtattataatgattacgagaccgatcattactcttttgccaaaaaaaccagcgacaaaagactaacttagtggaccaacctttgtttcttcattatctgtacattgattctgtccttttatttcgtctttcttctaattctgcttctgcttcttgtttcctccctggatttgaactttatttacctaaactaccagttaggttaccttctcagaacctctaaggcagcagtttgagattgacaatggaagatttaagattagaaaaaagaaacatgaatgaatttctgatgttttattataggggtttataatgcaggtagaaagacctttttcagagttaagagtttgatccaccaaatgagctattttgatatttataactttgtctagtaaaagtttcctataaaaacatttggtttggatgtgtttgttagcttttagtcgacacttgaaaaaggcggttggaagtttctaagtctttttggatactcttttctcttatcctccaggacatgggtgtgtagaggtgttggtggtgcagtggtagaattctcgcctcccacgtgggagactcgggttcaattcccggccaatgcagcaggtacttcttcatttcattatggccctttacccatcttttacgctgcaaaattatactgcataacctaatagtgcatttaggggcttggccaccacaaggtaaagtgacaacattactcacgagagtagcggcaagagacattcaggacactaacccaggacccatgcaattgttggactcaaacagcttagcaaagtggcaagcacaaagtctttccggtgagtcactgcagttttgatattggtacctgttactttcatctattcacggggcgga

SEQ ID NO: 66926 - DNA, 2347 bp, Homo sapiens
cgcacacggcgcttagttctggaactggatacccgggggaggatgcgggatcccgaagcccgggtgtgggtccccgtggtcttcgtgttgggggtaggtgcggaacgctaagcctgggcctactgggagccatagtcttcttgatggctggtgcttattgggcttttttcaatcgaatttcaaaatgcagttgaatttcttactttggaaacgataatagaaatggctgacctcagattttcatgattatgttttgccttttccagtgtatgtgcagtttctgtagtatagtggttatcatgtttgcctcacatgtgaaagacccttggctgcagactggagggaaacatggttttttggtttttctttttgtccctaaatttagtgagtttaatcgaggttgggaaaccaaacagaaaagtagttgaacctgtggctacactttagacctcctcaatctagacagattgttgaccaggctacagtttccactggtctgccagcaagaggcctgcttaatgttagctttggttccagaaattccttaagattctcttcattctcttctgtcgcctgaattttcataggctgacactgaaagtggatgacatcttaatgcatttcctaagtgtcccgctgggcttcgctttactctgataagttgcagatctggctgatttgcgagacaaaaacaaaatatttttttaaaaggttctaaatctgcatctggaactcgtagagtcaataatctgaaaccacacgaattatctacatacaaaagattttgaatgcataccccttccccaaataatcctcagaaaaccggttaagttttagcatctatgactctgagatgcatatgaggcctttgtaaatttagaagttgagagtagaaagtacaggtttgtattttagaaggagatttgggaataaatatagctctggtggatatagatcatatgttaaggtttgttggccagagctggtgtgtgtcttgggtgttgggcaaagaacagagaacagccaaagctctgcgaggtcaatgtgaagggtgatttccttggtgggctcaagtttatgacgcagcctggacctagcttggcttctcagctagagaagaagcatgattccatgtcacagctcctgtctttgaaaaagtcataatgactcccagacccaacatgtggggaaaactctggatttgtctcttcagttgaatgtctccgttgaaaattgaggaaagaaatctctctactatttgaacttcatcaaaagactaatatgttaatattttgaccgtcaatatttccttaaactagtctactcctttcatagctaatacatcaaagcatattaacttaggaaatgggattctcccaaacaaggaaacattgacggcaagggttcttaatcttttcacatcacatttccttcaaatgctttatacatcttcaagcagacaaataatagtattataatgattacgagaccgatcattactcttttgccaaaaaaaccagcgacaaaagactaacttagtggaccaacctttgtttcttcattatctgtacattgattctgtccttttatttcgtctttcttctaattctgcttctgcttcttgtttcctccctggatttgaactttatttacctaaactaccagttaggttaccttctcagaacctctaaggcagcagtttgagattgacaatggaagatttaagattagaaaaaagaaacatgaatgaatttctgatgttttattataggggtttataatgcaggtagaaagacctttttcagagttaagagtttgatccaccaaatgagctattttgatatttataactttgtctagtaaaagtttcctataaaaacatttggtttggatgtgtttgttagcttttagtcgacacttgaaaaaggcggttggaagtttctaagtctttttggatactcttttctcttatcctccaggmcatgggtgtgtagaggtgttggtggtgcagtggtagaattctcgcctcccacgtgggagactcgggttcaattcccggccaatgcagcaggtacttcttcatttcattatggccctttacccatcttttacgctgcaaaattatactgcataacctaatagtgcatttaggggcttggccaccacaaggtaaagtgacaacattactcacgagagtagcggcaagagacattcaggacactaacccaggacccatgcaattgttggactcaaacagcttagcaaagtggcaagcacaaagtctttccggtgagtcactgcagttttgatattggtacctgttactttcatctattcacggggcgga

SEQ ID NO: 66927 - DNA, 2347 bp, Homo sapiens
cgcacacggcgcttagttctggaactggatacccgggggaggatgcgggatcccgaagcccgggtgtgggtccccgtggtcttcgtgttgggggtaggtgcggaacgctaagcctgggcctactgggagccatagtcttcttgatggctggtgcttattgggcttttttcaatcgaatttcaaaatgcagttgaatttcttactttggaaacgataatagaaatggctgacctcagattttcatgattatgttttgccttttccagtgtatgtgcagtttctgtagtatagtggttatcatgtttgcctcacatgtgaaagacccttggctgcagactggagggaaacatggttttttggtttttctttttgtccctaaatttagtgagtttaatcgaggttgggaaaccaaacagaaaagtagttgaacctgtggctacactttagacctcctcaatctagacagattgttgaccaggctacagtttccactggtctgccagcaagaggcctgcttaatgttagctttggttccagaaattccttaagattctcttcattctcttctgtcgcctgaattttcataggctgacactgaaagtggatgacatcttaatgcatttcctaagtgtcccgctgggcttcgctttactctgataagttgcagatctggctgatttgcgagacaaaaacaaaatatttttttaaaaggttctaaatctgcatctggaactcgtagagtcaataatctgaaaccacacgaattatctacatacaaaagattttgaatgcataccccttccccaaataatcctcagaaaaccggttaagttttagcatctatgactctgagatgcatatgaggcctttgtaaatttagaagttgagagtagaaagtacaggtttgtattttagaaggagatttgggaataaatatagctctggtggatatagatcatatgttaaggtttgttggccagagctggtgtgtgtcttgggtgttgggcaaagaacagagaacagccaaagctctgcgaggtcaatgtgaagggtgatttccttggtgggctcaagtttatgacgcagcctggacctagcttggcttctcagctagagaagaagcatgattccatgtcacagctcctgtctttgaaaaagtcataatgactcccagacccaacatgtggggaaaactctggatttgtctcttcagttgaatgtctccgttgaaaattgaggaaagaaatctctctactatttgaacttcatcaaaagactaatatgttaatattttgaccgtcaatatttccttaaactagtctactcctttcatagctaatacatcaaagcatattaacttaggaaatgggattctcccaaacaaggaaacattgacggcaagggttcttaatcttttcacatcacatttccttcaaatgctttatacatcttcaagcagacaaataatagtattataatgattacgagaccgatcattactcttttgccaaaaaaaccagcgacaaaagactaacttagtggaccaacctttgtttcttcattatctgtacattgattctgtccttttatttcgtctttcttctaattctgcttctgcttcttgtttcctccctggatttgaactttatttacctaaactaccagttaggttaccttctcagaacctctaaggcagcagtttgagattgacaatggaagatttaagattagaaaaaagaaacatgaatgaatttctgatgttttattataggggtttataatgcaggtagaaagacctttttcagagttaagagtttgatccaccaaatgagctattttgatatttataactttgtctagtaaaagtttcctataaaaacatttggtttggatgtgtttgttagcttttagtcgacacttgaaaaaggcggttggaagtttctaagtctttttggatactcttttctcttatcctccaggacatgggtgtgtagaggygttggtggtgcagtggtagaattctcgcctcccacgtgggagactcgggttcaattcccggccaatgcagcaggtacttcttcatttcattatggccctttacccatcttttacgctgcaaaattatactgcataacctaatagtgcatttaggggcttggccaccacaaggtaaagtgacaacattactcacgagagtagcggcaagagacattcaggacactaacccaggacccatgcaattgttggactcaaacagcttagcaaagtggcaagcacaaagtctttccggtgagtcactgcagttttgatattggtacctgttactttcatctattcacggggcgga

SEQ ID NO: 66928 - DNA, 2347 bp, Homo sapiens
cgcacacggcgcttagttctggaactggatacccgggggaggatgcgggatcccgaagcccgggtgtgggtccccgtggtcttcgtgttgggggtaggtgcggaacgctaagcctgggcctactgggagccatagtcttcttgatggctggtgcttattgggcttttttcaatcgaatttcaaaatgcagttgaatttcttactttggaaacgataatagaaatggctgacctcagattttcatgattatgttttgccttttccagtgtatgtgcagtttctgtagtatagtggttatcatgtttgcctcacatgtgaaagacccttggctgcagactggagggaaacatggttttttggtttttctttttgtccctaaatttagtgagtttaatcgaggttgggaaaccaaacagaaaagtagttgaacctgtggctacactttagacctcctcaatctagacagattgttgaccaggctacagtttccactggtctgccagcaagaggcctgcttaatgttagctttggttccagaaattccttaagattctcttcattctcttctgtcgcctgaattttcataggctgacactgaaagtggatgacatcttaatgcatttcctaagtgtcccgctgggcttcgctttactctgataagttgcagatctggctgatttgcgagacaaaaacaaaatatttttttaaaaggttctaaatctgcatctggaactcgtagagtcaataatctgaaaccacacgaattatctacatacaaaagattttgaatgcataccccttccccaaataatcctcagaaaaccggttaagttttagcatctatgactctgagatgcatatgaggcctttgtaaatttagaagttgagagtagaaagtacaggtttgtattttagaaggagatttgggaataaatatagctctggtggatatagatcatatgttaaggtttgttggccagagctggtgtgtgtcttgggtgttgggcaaagaacagagaacagccaaagctctgcgaggtcaatgtgaagggtgatttccttggtgggctcaagtttatgacgcagcctggacctagcttggcttctcagctagagaagaagcatgattccatgtcacagctcctgtctttgaaaaagtcataatgactcccagacccaacatgtggggaaaactctggatttgtctcttcagttgaatgtctccgttgaaaattgaggaaagaaatctctctactatttgaacttcatcaaaagactaatatgttaatattttgaccgtcaatatttccttaaactagtctactcctttcatagctaatacatcaaagcatattaacttaggaaatgggattctcccaaacaaggaaacattgacggcaagggttcttaatcttttcacatcacatttccttcaaatgctttatacatcttcaagcagacaaataatagtattataatgattacgagaccgatcattactcttttgccaaaaaaaccagcgacaaaagactaacttagtggaccaacctttgtttcttcattatctgtacattgattctgtccttttatttcgtctttcttctaattctgcttctgcttcttgtttcctccctggatttgaactttatttacctaaactaccagttaggttaccttctcagaacctctaaggcagcagtttgagattgacaatggaagatttaagattagaaaaaagaaacatgaatgaatttctgatgttttattataggggtttataatgcaggtagaaagacctttttcagagttaagagtttgatccaccaaatgagctattttgatatttataactttgtctagtaaaagtttcctataaaaacatttggtttggatgtgtttgttagcttttagtcgacacttgaaaaaggcggttggaagtttctaagtctttttggatactcttttctcttatcctccaggacatgggtgtgtagaggtgttggtggtgcagtggtagaattctcgcctcccacgtgggagacycgggttcaattcccggccaatgcagcaggtacttcttcatttcattatggccctttacccatcttttacgctgcaaaattatactgcataacctaatagtgcatttaggggcttggccaccacaaggtaaagtgacaacattactcacgagagtagcggcaagagacattcaggacactaacccaggacccatgcaattgttggactcaaacagcttagcaaagtggcaagcacaaagtctttccggtgagtcactgcagttttgatattggtacctgttactttcatctattcacggggcgga

SEQ ID NO: 66929 - DNA, 2347 bp, Homo sapiens
cgcacacggcgcttagttctggaactggatacccgggggaggatgcgggatcccgaagcccgggtgtgggtccccgtggtcttcgtgttgggggtaggtgcggaacgctaagcctgggcctactgggagccatagtcttcttgatggctggtgcttattgggcttttttcaatcgaatttcaaaatgcagttgaatttcttactttggaaacgataatagaaatggctgacctcagattttcatgattatgttttgccttttccagtgtatgtgcagtttctgtagtatagtggttatcatgtttgcctcacatgtgaaagacccttggctgcagactggagggaaacatggttttttggtttttctttttgtccctaaatttagtgagtttaatcgaggttgggaaaccaaacagaaaagtagttgaacctgtggctacactttagacctcctcaatctagacagattgttgaccaggctacagtttccactggtctgccagcaagaggcctgcttaatgttagctttggttccagaaattccttaagattctcttcattctcttctgtcgcctgaattttcataggctgacactgaaagtggatgacatcttaatgcatttcctaagtgtcccgctgggcttcgctttactctgataagttgcagatctggctgatttgcgagacaaaaacaaaatatttttttaaaaggttctaaatctgcatctggaactcgtagagtcaataatctgaaaccacacgaattatctacatacaaaagattttgaatgcataccccttccccaaataatcctcagaaaaccggttaagttttagcatctatgactctgagatgcatatgaggcctttgtaaatttagaagttgagagtagaaagtacaggtttgtattttagaaggagatttgggaataaatatagctctggtggatatagatcatatgttaaggtttgttggccagagctggtgtgtgtcttgggtgttgggcaaagaacagagaacagccaaagctctgcgaggtcaatgtgaagggtgatttccttggtgggctcaagtttatgacgcagcctggacctagcttggcttctcagctagagaagaagcatgattccatgtcacagctcctgtctttgaaaaagtcataatgactcccagacccaacatgtggggaaaactctggatttgtctcttcagttgaatgtctccgttgaaaattgaggaaagaaatctctctactatttgaacttcatcaaaagactaatatgttaatattttgaccgtcaatatttccttaaactagtctactcctttcatagctaatacatcaaagcatattaacttaggaaatgggattctcccaaacaaggaaacattgacggcaagggttcttaatcttttcacatcacatttccttcaaatgctttatacatcttcaagcagacaaataatagtattataatgattacgagaccgatcattactcttttgccaaaaaaaccagcgacaaaagactaacttagtggaccaacctttgtttcttcattatctgtacattgattctgtccttttatttcgtctttcttctaattctgcttctgcttcttgtttcctccctggatttgaactttatttacctaaactaccagttaggttaccttctcagaacctctaaggcagcagtttgagattgacaatggaagatttaagattagaaaaaagaaacatgaatgaatttctgatgttttattataggggtttataatgcaggtagaaagacctttttcagagttaagagtttgatccaccaaatgagctattttgatatttataactttgtctagtaaaagtttcctataaaaacatttggtttggatgtgtttgttagcttttagtcgacacttgaaaaaggcggttggaagtttctaagtctttttggatactcttttctcttatcctccaggacatgggtgtgtagaggtgttggtggtgcagtggtagaattctcgcctcccacgtgggagactcgggttcaattcccggccaatgcagcaggtacttyttcatttcattatggccctttacccatcttttacgctgcaaaattatactgcataacctaatagtgcatttaggggcttggccaccacaaggtaaagtgacaacattactcacgagagtagcggcaagagacattcaggacactaacccaggacccatgcaattgttggactcaaacagcttagcaaagtggcaagcacaaagtctttccggtgagtcactgcagttttgatattggtacctgttactttcatctattcacggggcgga

SEQ ID NO: 66930 - DNA, 2347 bp, Homo sapiens
cgcacacggcgcttagttctggaactggatacccgggggaggatgcgggatcccgaagcccgggtgtgggtccccgtggtcttcgtgttgggggtaggtgcggaacgctaagcctgggcctactgggagccatagtcttcttgatggctggtgcttattgggcttttttcaatcgaatttcaaaatgcagttgaatttcttactttggaaacgataatagaaatggctgacctcagattttcatgattatgttttgccttttccagtgtatgtgcagtttctgtagtatagtggttatcatgtttgcctcacatgtgaaagacccttggctgcagactggagggaaacatggttttttggtttttctttttgtccctaaatttagtgagtttaatcgaggttgggaaaccaaacagaaaagtagttgaacctgtggctacactttagacctcctcaatctagacagattgttgaccaggctacagtttccactggtctgccagcaagaggcctgcttaatgttagctttggttccagaaattccttaagattctcttcattctcttctgtcgcctgaattttcataggctgacactgaaagtggatgacatcttaatgcatttcctaagtgtcccgctgggcttcgctttactctgataagttgcagatctggctgatttgcgagacaaaaacaaaatatttttttaaaaggttctaaatctgcatctggaactcgtagagtcaataatctgaaaccacacgaattatctacatacaaaagattttgaatgcataccccttccccaaataatcctcagaaaaccggttaagttttagcatctatgactctgagatgcatatgaggcctttgtaaatttagaagttgagagtagaaagtacaggtttgtattttagaaggagatttgggaataaatatagctctggtggatatagatcatatgttaaggtttgttggccagagctggtgtgtgtcttgggtgttgggcaaagaacagagaacagccaaagctctgcgaggtcaatgtgaagggtgatttccttggtgggctcaagtttatgacgcagcctggacctagcttggcttctcagctagagaagaagcatgattccatgtcacagctcctgtctttgaaaaagtcataatgactcccagacccaacatgtggggaaaactctggatttgtctcttcagttgaatgtctccgttgaaaattgaggaaagaaatctctctactatttgaacttcatcaaaagactaatatgttaatattttgaccgtcaatatttccttaaactagtctactcctttcatagctaatacatcaaagcatattaacttaggaaatgggattctcccaaacaaggaaacattgacggcaagggttcttaatcttttcacatcacatttccttcaaatgctttatacatcttcaagcagacaaataatagtattataatgattacgagaccgatcattactcttttgccaaaaaaaccagcgacaaaagactaacttagtggaccaacctttgtttcttcattatctgtacattgattctgtccttttatttcgtctttcttctaattctgcttctgcttcttgtttcctccctggatttgaactttatttacctaaactaccagttaggttaccttctcagaacctctaaggcagcagtttgagattgacaatggaagatttaagattagaaaaaagaaacatgaatgaatttctgatgttttattataggggtttataatgcaggtagaaagacctttttcagagttaagagtttgatccaccaaatgagctattttgatatttataactttgtctagtaaaagtttcctataaaaacatttggtttggatgtgtttgttagcttttagtcgacacttgaaaaaggcggttggaagtttctaagtctttttggatactcttttctcttatcctccaggacatgggtgtgtagaggtgttggtggtgcagtggtagaattctcgcctcccacgtgggagactcgggttcaattcccggccaatgcagcaggtacttcttcatttcattatggccctttacccatcttttacgctgcaaaattatactgcataacctaatagtgcatttaggggcttggccaccacaaggtaaagtgacaacattactcacgagagtagcggcaagagacattcaggacactaacccaggacccatgcaattgttggactcaaacagcttagcaaagtggcaagcacraagtctttccggtgagtcactgcagttttgatattggtacctgttactttcatctattcacggggcgga

SEQ ID NO: 66931 - DNA, 894 bp, Homo sapiens
gaagttactgaaatcagtcccttgtccaatcaaagctgtagttatggcttgtgtagggagggctcagtcagtttatggtaatgggtgagctgcaagtgcttcagcattgcttatctcaaggccagtgcttgtttagctagagaaaaaagggaagaagaaaaaaacctgtggcaattagaacatagtttattctttaagttgaggggtgcatgacttaaccttgcctgacatggccttaggtcttgtttataatatggtatcttactactgtaaggactctgttctgtcagtcttaggttctctattttaacaataatgctggtcagttgtgtctaaaccacaaagggagagagtataaggagaggtgtctgagcttccaagtactggccaggaactcagtatttaagacttctctggggtctccttggcaaagaagccatctgtccagctagttgggtggcttcagattttaattttagttctgaaagcatttaatttgatgaaattttgccatattttttctttatttttaaagcccgtcatgttctataaaaatctttctactcaggatgtgaatgkattctcttaattttatctctctatgagttccagagtttcagttttaatttttaaattgatgacatctaaaattctactcctaaccaaaacatttttgggggtgactaaggacaactccaaaaatcttccataaatggaagtaagacttactccttaaagaactttctgggatcctgagctgcggggcacagtggctttagtgcacctctgctcttaagactattcagaaattgtctttgtgaacccatcaggctgtttcaaaatcagcaatttagggcttgcttgcaacacgcagttaagcagcagctgtttttt

SEQ ID NO: 66932 - DNA, 894 bp, Homo sapiens
gaagttactgaaatcagtcccttgtccaatcaaagctgtagttatggcttgtgtagggagggctcagtcagtttatggtaatgggtgagctgcaagtgcttcagcattgcttatctcaaggccagtgcttgtttagctagagaaaaaagggaagaagaaaaaaacctgtggcaattagaacatagtttattctttaagttgaggggtgcatgacttaaccttgcctgacatggccttaggtcttgtttataatatggtatcttactactgtaaggactctgttctgtcagtcttaggttctctattttaacaataatgctggtcagttgtgtctaaaccacaaagggagagagtataaggagaggtgtctgagcttccaagtactggccaggaactcagtatttaagacttctctggggtctccttggcaaagaagccatctgtccagctagttgggtggcttcagattttaattttagttctgaaagcatttaatttgatgaaattttgccatattttttctttatttttaaagcccgtcatgttctataaaaatctttctactcaggatgtgaatgtattctcttaattttatctctctatgagttccagagtttcagttttaatttttaaattgatgacatctaaaattctactcctaaccaaaacatttttgggggtgactaaggacaactccaaaaatcttccataaatggaagtaagacttactccttaaagaactttctgggatcctgagctgcrgggcacagtggctttagtgcacctctgctcttaagactattcagaaattgtctttgtgaacccatcaggctgtttcaaaatcagcaatttagggcttgcttgcaacacgcagttaagcagcagctgtttttt

SEQ ID NO: 66933 - DNA, 544 bp, Homo sapiens
cggccgcccttctggcttcagagtcacgcaatgcacgcgtttctaacgtgcagcaagacgattagtcgactcagcctctccggttttctgaagctttgtagtctgcacagttgtcccgcagaaagcgaatggcaactcctagggtttagtgattgcttaatctatatagagatgaaagcaagcgattgaggttgtctctgtggtgcaatcggttagcgcgttcggctgttaaccataaggttggtggttagagaccacccagggacgtgattttaaatgttggttgtgaccaggcgcagtgcctcacgtctattaatcccaacgctttgataggctgaagtaggggaagcctccacggagctcagaagttcaagaccartgagaatcccacctcattttaaaaaaaaaaatgcagttgtatctatctcctcagacccttcaatgtatttaaaagtgaaagactgttcccttgtgtcttgtgcatcccatgaggacagacagcagaaggtccccctccaagcctcctagaaaatgagatctctgc

SEQ ID NO: 66934 - DNA, 544 bp, Homo sapiens
cggccgcccttctggcttcagagtcacgcaatgcacgcgtttctaacgtgcagcaagacgattagtcgactcagcctctccggttttctgaagctttgtagtctgcacagttgtcccgcagaaagcgaatggcaactcctagggtttagtgattgcttaatctatatagagatgaaagcaagcgattgaggttgtctctgtggtgcaatcggttagcgcgttcggctgttaaccataaggttggtggttagagaccacccagggacgtgattttaaatgttggttgtgaccaggcgcagtgcctcacgtctattaatcccaacgctttgataggctgaagtaggggaagcctccacggagctcagaagttcaagaccaatgagaatcccacctcatttwaaaaaaaaaaatgcagttgtatctatctcctcagacccttcaatgtatttaaaagtgaaagactgttcccttgtgtcttgtgcatcccatgaggacagacagcagaaggtccccctccaagcctcctagaaaatgagatctctgc

SEQ ID NO: 66935 - DNA, 864 bp, Homo sapiens
gtaaaaaactccagccaagacagagggagatgtgaattatcaagtatattgactttttttttttttttctgttatcagtagcatccttcagaaagtactgattaaaaaggaaggccattcccagttcttggtttatttgcctcatagcgcaccaagtcaaggttgagctggggccttattccagaaagcacaggcttcctttctgattggaaataatatgtattttgtttgaccttcagaatactcatggctttactggaatacatgggccaacatttgtcctggcaaggccagggcagtttaagataggtatccacagggattgctttatagagcaattaaaagcagtgggagggaggtgactgcagaaattcagacgtttgcatcctttctggcctaaaaatcaagtgagtaatttcaaaaagcagaatttgaaaacaaacaarcaagcacttctagaagtttctgtctgaacacttgagaattttgccaaggtcatagtgttctttattttttctttttccttacatgttactttctgaaatatgatcatagtgttcttttgcaactgatcttggtgtgaagagggggttacatcttatatattacacagtgctaatatgtgtaatattaacatttttttgaaagattgtcaaatatggaccgtggaaaacagtttccatgccgtttgaacgttatgttctttatgatgctttgtttataaaaatattgttagatagccagggatgtttactactgccagctggagttaggcctcatggtagctttttaaagtcaggctggaggtgaattcaaagcctaacacagagtttcaagttattgttcttatttgaagtaaatgca

SEQ ID NO: 66936 - DNA, 864 bp, Homo sapiens
gtaaaaaactccagccaagacagagggagatgtgaattatcaagtatattgactttttttttttttttctgttatcagtagcatccttcagaaagtactgattaaaaaggaaggccattcccagttcttggtttatttgcctcatagcgcaccaagtcaaggttgagctggggccttattccagaaagcacaggcttcctttctgattggaaataatatgtattttgtttgaccttcagaatactcatggctttactggaatacatgggccaacatttgtcctggcaaggccagggcagtttaagataggtatccacagggattgctttatagagcaattaaaagcagtgggagggaggtgactgcagaaattcagacgtttgcatcctttctggcctaaaaatcaagtgagtaatttcaaaaagcagaatttgaaaacaaacaaacaagcacttctagaagtttctgtctgaacacttgagaattttgccaaggtcatagtgttctttattttttctttttccttacatgttactttctgaaatatgatcatagtgttcttttgcaactgatcttggtgtgaagagggggttacatcttatatattacacagtgctaatatgtgtaatattaacatttttttgaaagattgtcaaatatggaccgtggaaaacagtttccatgccgtttgaacgttatgttctttatgatgctttgtttataaaaatattgttagatagcyagggatgtttactactgccagctggagttaggcctcatggtagctttttaaagtcaggctggaggtgaattcaaagcctaacacagagtttcaagttattgttcttatttgaagtaaatgca

SEQ ID NO: 66937 - DNA, 760 bp, Homo sapiens
aaaatagattattccgattcagagcagaaatatttacaggtaatagaaatcatacaactggaatgtaagtttactcaggtatatgagtgcttagaaaagtaaaattaaagcttataaatttttctttttatgaatagctyaaggtagatttggaactcccttgaaaaaaaatcagaatggtggcaactagcctttggttaatggcttagatttatttaagagatggtgtctttctctcttgcccaggctggagtacagtgggacaatcacatctcagtacagccttgaactcatgtgctcaagtgatcttcccacctcagcctactgagtagctgggactccaagtttgcaccaccaaatctttagattatttttaaaaggggaagaatgtatgtacatcttcccatataagtaaagttgaattatgagactaactgtgtacctgtgctgccagagattctcaaatagagcctaatggtgtccttggataaaactaacgttacagccaaagttatgatgaggcccatctaatcttctgccatttgttgtcatcaactcactcatgcacctctgcaaatctctgtccaaatatcacctgattggagaagctatttctgcttcctcaccttacatggtgagtgcaaaagtaattgtggtttttgcaatgttgaaatttgccatttgatagtggaatgctttcttagacaaacgtggctgtgttacacatcattttaaggggatttctcactttatgtttttt

SEQ ID NO: 66938 - DNA, 1194 bp, Homo sapiens
cccagccacagccaactgcacatggctggggcctggtacaggtggggccaggggagggcctggctcacacctgctgccccatagaccctgctagtgaggagcagcgctgggattgcattcggcttctgactaactgagctcaagggcctctgtcttagtcagggttctgcagagaaacagaatgggatttgtgtatttacttgtctggctcacatgacgatggaggtgaagtctcacaaccggccatctgcacgctggagacccagggaagttggtggcgcagttggaaggcctgagagctgaagagctgatggtgtcgattccagccgcggtccgagggccagaggaccaggagcattgagggcagaaaacaacatcttgccccagtggtcaggcagagagggcggattcctccttcctctctgccttctgttccattcagaccctcgctgggcaggatgaggcccacccaccctggggagtgccatctgtgtgaccctgcccaccaacttaaatgcgactctcacctggaaaccctgacagacaccctatttccacgtagggttccttatgaggcactgggggttcagatgtaaacatgtttgagggacacagttcaacccataacaggaagggacagatgccttaaatggctgcaggaaagatggcatgagagttgtggagggcacaaaaccctgtgcctgcacacagtaggtgctcactccagacaagcgagtgtggttcaaaatcacactgggctggaagagggagggatgccctattctgagtgtgggttttggtaccaggcaactgtgggtttgaacccaagctgtgtgaccctgggcagcttccccaacctttctcagctggttttctcgcctgtgaatctaacctaacctgtaagacggcagtgagggcgagatctgtatcgggtgaaagctcgtcgaaggcactgaattcttaaaccatcctaggcctcagtttccacaactgtcaaagaaggatggggattttgaagtctggacagatgctgcaagagcccagaaggagatcaatgatgaggagctctgaacccasaagccatggcagtctgggctgcactgactaagctgtgtactccctagggagggcggatggccggctcccaccaccccagcccagctgaggagcagctggccttgcagtgggctcctt

SEQ ID NO: 66939 - DNA, 713 bp, Homo sapiens
tgccccaggtcaaggtggttggaaaccctccctggcctgaaagccgttaaagctagtgaatgagcaggagggtggtgggagatgaggtcaaagagacaccttcttaaatagaggaaggaacctgttgatggcatgttctacaacccagacatccgactgccattggttaaggcaagtgaaccacgtgccacatacagtgtccatgccacacttgtgacgacgggagggtgtgtgcaatctcattatccccagttagcaggaaaggccagaggctccaggaggtgaccaggcagaggaagccactgctgctgaggctgtccccactggggcttgtgagctgagggaggtgggctcggctaaacatgaaaactaggagaggaaacctgcccgcagcttggcttttgctggatgacaatgtggctccactttccctatttccagccaggcrtttcagagactcttggcagtatcagtccataccgcctccggaggcaccagctacagtgtctgcttgtgcatagctggcgggagttgcctctactgaactttcctcccatgggctctgtggagctgctcctgagagctggacctgagagcggacgggcccagatacccccgtgcgggagctcatagctgctggtaagccagggcggcatgtgaaagtgtctgttcactcattcacacaaaagtcctccttgacacccacaatcctg

SEQ ID NO: 66940 - DNA, 579 bp, Homo sapiens
cctcctgtactgggtgaggcgtagaaagggagggagaggggcctgtctgcgttttattaaccctttcaatgtgtgactagaagatcacgtgctctcggagcatggattgagggggcaggccctgagtctggatctgcagtgcctgatctgggtgcaggttgcctggtgggatctcctggttcatgccaagggtctctgcacttttctgaatgtctgttatactgcagtcaaaggaaaagacggcaatacttcatgctccaagagcttttccactaccgagctttytcctctcatagaaagtgcaagggaaagagggaagtaaagaggccagtctcagttgctcgggcaaaggctccaatgaggtaaccgaagctgcaggttgcctggcacgctgctgccctgagcctcttgttggctgatgattactttatctgaagaagataagatgtcgtgcatttgattacagcataacttcatgcactctgacagagcttgcagcactgggcgaatcgtcatcggaatggttttgttatttctgtaccgtgtgcctctgagttaaggataaagcaggaataaata

SEQ ID NO: 66941 - DNA, 1093 bp, Homo sapiens
atatcagcaagggagcaaggtgtcatcagtgccctcctcagctgaagaacttggagaagttgaccaagcatggtggctcatgcctataatcccaacactttgggaggtygaggcgggcagatcacctgaggtcaggagttcaagaccagcctggccaatatggtgaaaccccatctctactaaaaatacaaaactagctgggcatggtggcacatgcctgtagtcccagttactcagaaggctgaggcaggagaattgcttgaacccgggaggcataggttgcagtgagctgagatcatgccactggccactaactccagcttgagtgacaagagtgaaactccatcttgggggaaaattaaaaaaaaaaaagaacttggagaaggagaagttgatctgattgctcaggtcatgtaccaatcatggctgagctggaacctatcactcccttccttccccctttccacctcccgatgccagcagagcctgcctctggctctcacgcatcattctgtgctggtcattgttaaattagagtagaacttaagtaccataaaatctcaagtgcacagtttggtggatttttgcttaggtatacactcacagaacacccacctagatcaggatgtagaacctttctagcatcttagaagggatccttcataatggaccccttctagtcaataccatccccctcccaagggaaacaattattctcatttctatgaccatagtttaaagttgcctagttttgaacttcatattcatggactcgttcagaatgacctcttgtgtctggcttctctcactcaacacaaaatctggagtcatcatgttgctgcatggagcagtagcttgttttttaaatgccacatagtattccagtgtatgaatatatcacaatttgtttatatccattctgttgatgggcacttgagccgtttccaggttttgtcaattatgaataaagcttctgtgaacattcttttggtagacataggcacgtatttctcttgggcatatacccaggactgaagtggttgggtcattcagtgggcatgtggttagctttcctaaatactgccagacagtt

SEQ ID NO: 66942 - DNA, 2439 bp, Homo sapiens
cactgtcccctttctcctttctattttttttttcctgtgtgtgacagtgtgacagttttgctcttgtcacccacgctggagtgcaatggtgcaatctcagctcactgcaacctctgcctcctaggctcaagtaattctcctgcctcagcctcccaagtagccgggattacaggcgcctgccaccatacctggctaatctttgcatttttagtagagatggggtttcaccatgtggccaggctggtctggaactcttgtcctcaggcgatctgccctcctcagcctctcagaatgctgggattacaggcatgagccactgcacttggcctctcctttctaatagagccaccattttgggggaggtggtaatctatccttctacaaagagccatgggctttaccaagccattcatgaggttctaattcccttgtgagtggctggtttggaaacaggaatgagaacaattctgctgaatgaaataagaggaatgtttgctcaggggcttctggaaaagactttttgtttgtttgttttctttttttttaaacaggatctcactctgtcacccagtgctgcagaggcacaatcactgttcactgcagcctcaactcccggatgcaggtgatgctcccccctcagcctcctgagtagctgggactaaaggtgtgcacctccacacccagcaaatttattgtatttttttttgtggggggtggggtttgtcatattgcccaggctggtctcaaaatcctagtctgaagcaatctgcctacctcagcctcccgaagtgctgggattacaggcatgagcaattgtgcccagcttttttggtttgttttctgaaagagaaagcccctcctcttttgcaggacatggtcacatgcatgcacgatgcctggaagtgtggcagccgtcttgtgactacatgatggaactaatacatgggtgatgactcagtgggaagataggaaggacatcattaaacctctgaatgaatgactgctacagccaccataccacagaacttaatctttgagttgatacatttttctcactgttaaccagctggattggtggtttcatttttgcagcctaaagtattctggctgatagaagaaataaagagggtgtcaagcctcctaaaggcccccacctcttaataccatcacactggggataaggtttcaacatatgaatttcaggggacacaaacatttggaccacagcggagggcatgtgtatcggtcacattgccttggtccgaaatctgactacacctggctgtgtgacccagacaagttacttaactcctctgagccttggctccatcatctgtaaaatggaaatagagaggatgttaggattaaataagtgctgagmgtagcactagcatgtggaacaaccacaaaaaattgagatttgaggccaggcgtggtggctcacacctgtaatcccagcactttgggaggccaaggcaagtggatcacaagttcaggagttcaaggccagcatggccaagatggtgaaaccccacctctactataaatacaaaaaattaggcgggtatggtggcaggcacctgtaatcccagctacttgggaggctgaggcagataattgcttgaacctgggaggcagagtttgcagtgagctgagatcaggccactgcactccagcctgggtgacagagtgagactccatctcaaaaaaataaaataataaaataattaattaattaattaattaagattcgagtgtctaaggagttagtcaaggtcacagagtcaaccagtgtggtggaagcaggctgcatctcaggcctgagctcagagctgtgtgtgtaaccgttgcatcctcctgcctctggaaggcagattcacggagccagcaccaaggccagggcccagagctcagggttggatttctggttgctgaattcatgctgtactccctggcattggctcagccaactgtggctaagagttgactttgcttccctgctctgtgtacctgtcttccaccccctctcctgaacagtatttccctggggctcccattaccaatttgcagagcaaaggcatgcacaggcagttcaggggtggcgcaagctcagcgactctggtattgtttttaattcaatattttgtccctgtgcgccagcctcctttattggatgagaacactgttattggatcctgccctgcaggagaaaatgcaggcttccccagatgatggcagctacgttgttctagagtctgatgagtcaaggcagggcgagaagacagaagagagttccagaaaatctggtggttacaagctgttctgtgacacgcacaaaaaaattaacatatgtattattgacccttcttcttcccctctcttctagggaggacaaaagcccaggaggcagctgtcgcatcatcctcttcctttccctgc

SEQ ID NO: 66943 - DNA, 2439 bp, Homo sapiens
cactgtcccctttctcctttctattttttttttcctgtgtgtgacagtgtgacagttttgctcttgtcacccacgctggagtgcaatggtgcaatctcagctcactgcaacctctgcctcctaggctcaagtaattctcctgcctcagcctcccaagtagccgggattacaggcgcctgccaccatacctggctaatctttgcatttttagtagagatggggtttcaccatgtggccaggctggtctggaactcttgtcctcaggcgatctgccctcctcagcctctcagaatgctgggattacaggcatgagccactgcacttggcctctcctttctaatagagccaccattttgggggaggtggtaatctatccttctacaaagagccatgggctttaccaagccattcatgaggttctaattcccttgtgagtggctggtttggaaacaggaatgagaacaattctgctgaatgaaataagaggaatgtttgctcaggggcttctggaaaagactttttgtttgtttgttttctttttttttaaacaggatctcactctgtcacccagtgctgcagaggcacaatcactgttcactgcagcctcaactcccggatgcaggtgatgctcccccctcagcctcctgagtagctgggactaaaggtgtgcacctccacacccagcaaatttattgtatttttttttgtggggggtggggtttgtcatattgcccaggctggtctcaaaatcctagtctgaagcaatctgcctacctcagcctcccgaagtgctgggattacaggcatgagcaattgtgcccagcttttttggtttgttttctgaaagagaaagcccctcctcttttgcaggacatggtcacatgcatgcacgatgcctggaagtgtggcagccgtcttgtgactacatgatggaactaatacatgggtgatgactcagtgggaagataggaaggacatcattaaacctctgaatgaatgactgctacagccaccataccacagaacttaatctttgagttgatacatttttctcactgttaaccagctggattggtggtttcatttttgcagcctaaagtattctggctgatagaagaaataaagagggtgtcaagcctcctaaaggcccccacctcttaataccatcacactggggataaggtttcaacatatgaatttcaggggacacaaacatttggaccacagcggagggcatgtgtatcggtcacattgccttggtccgaaatctgactacacctggctgtgtgacccagacaagttacttaactcctctgagccttggctccatcatctgtaaaatggaaatagagaggatgttaggattaaataagtgctgagagtagcrctagcatgtggaacaaccacaaaaaattgagatttgaggccaggcgtggtggctcacacctgtaatcccagcactttgggaggccaaggcaagtggatcacaagttcaggagttcaaggccagcatggccaagatggtgaaaccccacctctactataaatacaaaaaattaggcgggtatggtggcaggcacctgtaatcccagctacttgggaggctgaggcagataattgcttgaacctgggaggcagagtttgcagtgagctgagatcaggccactgcactccagcctgggtgacagagtgagactccatctcaaaaaaataaaataataaaataattaattaattaattaattaagattcgagtgtctaaggagttagtcaaggtcacagagtcaaccagtgtggtggaagcaggctgcatctcaggcctgagctcagagctgtgtgtgtaaccgttgcatcctcctgcctctggaaggcagattcacggagccagcaccaaggccagggcccagagctcagggttggatttctggttgctgaattcatgctgtactccctggcattggctcagccaactgtggctaagagttgactttgcttccctgctctgtgtacctgtcttccaccccctctcctgaacagtatttccctggggctcccattaccaatttgcagagcaaaggcatgcacaggcagttcaggggtggcgcaagctcagcgactctggtattgtttttaattcaatattttgtccctgtgcgccagcctcctttattggatgagaacactgttattggatcctgccctgcaggagaaaatgcaggcttccccagatgatggcagctacgttgttctagagtctgatgagtcaaggcagggcgagaagacagaagagagttccagaaaatctggtggttacaagctgttctgtgacacgcacaaaaaaattaacatatgtattattgacccttcttcttcccctctcttctagggaggacaaaagcccaggaggcagctgtcgcatcatcctcttcctttccctgc

SEQ ID NO: 66944 - DNA, 2439 bp, Homo sapiens
cactgtcccctttctcctttctattttttttttcctgtgtgtgacagtgtgacagttttgctcttgtcacccacgctggagtgcaatggtgcaatctcagctcactgcaacctctgcctcctaggctcaagtaattctcctgcctcagcctcccaagtagccgggattacaggcgcctgccaccatacctggctaatctttgcatttttagtagagatggggtttcaccatgtggccaggctggtctggaactcttgtcctcaggcgatctgccctcctcagcctctcagaatgctgggattacaggcatgagccactgcacttggcctctcctttctaatagagccaccattttgggggaggtggtaatctatccttctacaaagagccatgggctttaccaagccattcatgaggttctaattcccttgtgagtggctggtttggaaacaggaatgagaacaattctgctgaatgaaataagaggaatgtttgctcaggggcttctggaaaagactttttgtttgtttgttttctttttttttaaacaggatctcactctgtcacccagtgctgcagaggcacaatcactgttcactgcagcctcaactcccggatgcaggtgatgctcccccctcagcctcctgagtagctgggactaaaggtgtgcacctccacacccagcaaatttattgtatttttttttgtggggggtggggtttgtcatattgcccaggctggtctcaaaatcctagtctgaagcaatctgcctacctcagcctcccgaagtgctgggattacaggcatgagcaattgtgcccagcttttttggtttgttttctgaaagagaaagcccctcctcttttgcaggacatggtcacatgcatgcacgatgcctggaagtgtggcagccgtcttgtgactacatgatggaactaatacatgggtgatgactcagtgggaagataggaaggacatcattaaacctctgaatgaatgactgctacagccaccataccacagaacttaatctttgagttgatacatttttctcactgttaaccagctggattggtggtttcatttttgcagcctaaagtattctggctgatagaagaaataaagagggtgtcaagcctcctaaaggcccccacctcttaataccatcacactggggataaggtttcaacatatgaatttcaggggacacaaacatttggaccacagcggagggcatgtgtatcggtcacattgccttggtccgaaatctgactacacctggctgtgtgacccagacaagttacttaactcctctgagccttggctccatcatctgtaaaatggaaatagagaggatgttaggattaaataagtgctgagagtagcactagcatgtggaacaaccacaaaaaattgagatttgaggccaggcrtggtggctcacacctgtaatcccagcactttgggaggccaaggcaagtggatcacaagttcaggagttcaaggccagcatggccaagatggtgaaaccccacctctactataaatacaaaaaattaggcgggtatggtggcaggcacctgtaatcccagctacttgggaggctgaggcagataattgcttgaacctgggaggcagagtttgcagtgagctgagatcaggccactgcactccagcctgggtgacagagtgagactccatctcaaaaaaataaaataataaaataattaattaattaattaattaagattcgagtgtctaaggagttagtcaaggtcacagagtcaaccagtgtggtggaagcaggctgcatctcaggcctgagctcagagctgtgtgtgtaaccgttgcatcctcctgcctctggaaggcagattcacggagccagcaccaaggccagggcccagagctcagggttggatttctggttgctgaattcatgctgtactccctggcattggctcagccaactgtggctaagagttgactttgcttccctgctctgtgtacctgtcttccaccccctctcctgaacagtatttccctggggctcccattaccaatttgcagagcaaaggcatgcacaggcagttcaggggtggcgcaagctcagcgactctggtattgtttttaattcaatattttgtccctgtgcgccagcctcctttattggatgagaacactgttattggatcctgccctgcaggagaaaatgcaggcttccccagatgatggcagctacgttgttctagagtctgatgagtcaaggcagggcgagaagacagaagagagttccagaaaatctggtggttacaagctgttctgtgacacgcacaaaaaaattaacatatgtattattgacccttcttcttcccctctcttctagggaggacaaaagcccaggaggcagctgtcgcatcatcctcttcctttccctgc

SEQ ID NO: 66945 - DNA, 1058 bp, Homo sapiens
ctactaaatgtgcttgctaggaaattgagtatcttaaaatgttcttgacgtgagcaagtattaattaaaaatcactttgaaatcaactttataggttccttgagagaatgttgtgatggtgtggatagagcttgcagggagaatttgtaggtggccaagacgcatttgcccaggctgccagaggatttcttttgatcatccacatggccaggaggtcagagttctctgttttttttccaggtggggaagtatttctgacactgaattgtcttatctaagaataactcattcaccatccttgtctttattggaaatggaggtattttgctagctttagtggtttgtaaagcttccagaaatattttactatttcctttgagttgaggaaataaagtgcatcttacacaaaagcagacatgaaaccatatcttttcattgtctttgatggacccatcaacaggcatgttttgaggccataacaccagacacttcattcaagctgagagggataggtaaatcagcagtcaagtgctggaaagtatgttatataatcttgctacattttcagactctaaagtattgcccataatgttgaaaaatattcttctttaacaagatactcaagggaaagttccacgtgcattctatcttccttgaaataaatgtggcagctattgaataacagacttatatggatacattttaagcttttgaagaaacaatggcaatgtctaaggtcctaagccttctgagaccaaaatcatataagaagtcttaaggaatgaatgagcaggtgtttgtaagtgaataaaatggttagtttctcacacatgatccggttctcactcattcagtcctggatcattcattccccccttcccatttttccaaaacatcttttctctttttttcctgtctctattcctggtagtatacactcttttcccccagccactcctattggaaaagggaatgcagttttaygtttttagtcttggcagtgacctgagagataacttgtagaaaaaataattaaatatttctttgcccactttggt

SEQ ID NO: 66946 - DNA, 677 bp, Homo sapiens
tccagaaaactcctcctccttccttaagatccagaaaactactcctcctcctccttccttaagatccaggttgcatgcatctttctgccttcagggaaagtccatcaatccctccaacatactcttatggccctttcagcattggttatcgtctctccttgagcaagtcctttaccttacccatccttagctgtaaaatggtattaataacagtacctacttcatagagccttgtgaggagtattaagttmataacatagaaagggcttaaaaccgagtgtggcattgtcataagcacctaacaaatatcagctacgattgctcttacataatctcaaatatagtatttgtgccataatcactattcacatatttgccccacccctcagacgataagattctcgatggcagggagtatgcctgtttgctttgcatcctctctgctggacgtactacttgtccttctagtaggtacccaataaaagtttgctgtagtgatgaatgcatgcatgcaaaatgtttctagtgctgcctgggttaatgagatattttgttcgccttatggtttcatatcccttctctttaaaacaaacttttcacacctagtaaactttcttcgtgaggcttttggttttaggatgctccctaatacaagtgttcttttctccaccttctgc

SEQ ID NO: 66947 - DNA, 1008 bp, Homo sapiens
cacaaatctcaatttggactagtcccatttcaagggttcggtaaccatatgtggctgtggctaccgtatcagacaacactttttcagaaacttttgctggggattctatgaagagcatggcagatgtagtcctcagtcacatgtagtttatactttgacaaggagaacaacctttatgtaagtgattgttaatacaacaaatacaataaaagtaaacaacaagcaaaagccaggcaaaggaaagtgcaagtccagtctgttacatgcccaaactattctgaaggggcaggaggacaagagacacaagttgtctttatttcttcctctcactggctttgagattaactaattgtgtgatctcttctttctagactcagatctgaattattacccactgctcctagactctgcagaacctacattgaaacaaaacaaaacaatctacatttagcccctctgccccactgcctcccataattattatctgaaggtctgtatcccctgctggattgtaaataatgtgaggctagagactctgtcccattaatctgtttctgtctcttcagcaccatcacagtataataagccttcacttcatacttttagaataaatgaatgaattgaagatgtgaatgaagaatgaatgaagacttcccacttaaatctcttgttgggattacagttcatctgacattttacattgtcctgtatggtaaacttctccctgactccccttttctgtttcctcctttccttcttttctgtaatttcataactatttagctaaggtctgatttttttttaaactcagctgcccaactatcactagtcaggcctgattcttttgtcccargaattgtgcgaggcagtgtgtatgcaagatgaaaaaagacacagtcgctgccctcaaagagcttagaggcttttaatgtgttactataaataataccagctaacatttactgggtgctttctttgtgccaggcattgtttcatactttattatgc

SEQ ID NO: 66948 - DNA, 632 bp, Homo sapiens
atgctaaaactcagtaatttactgcagtgggtgcttgtgtttttgcttatgtaaagtcaaaacgtatgtccttgatcaatagtttcctgcaagcagggatttagagacccaggctccttttaccttgtggctctgcaatctgaatacatggtttccaaatgtgctgggraaaaagcctatgaagaattgcacttgggagatttgtatgagctaagtttacacccatattcatttgctgaactcagtgacatggctgtatttagctacaggagacctggaaattttcgttttgctacgtacccgagaggaagaggaattgagtttagtgaacagttaaccatgttctgccacactttgtatttgtctctacaaaatgttaacttgtattcaaatgaatatccatgctgtcattttcaaaccattgaaaaattgtggtttggtttttaaattgtcctacctaacttgatgttattagcattttggttatatttactaacatttgtatagcatgttacagcttttaaaacatttttgcatacattatcttttctgatcctcgtgagaactgtttagggtgaaaaggaaatgacacttactgtgcacttctaacttgcactcaagatctatccatg

SEQ ID NO: 66949 - DNA, 1656 bp, Homo sapiens
ttataataatatataatatatattattataaatatacaatattatacacattatcaactgtagtcaccatgatgtgcaatagagctcttgaacttattctttctttctaacttaaattgtatgtctttggttattggtatcttttatttatttatctttttgagacggacttgctctgtcgccaggctggagtgcagtggcacgatctcggctcactgtaacctctgactccctggttcaagcgattatcctgcctcagcctcctgagtagctgggatgacaggcatgtgccaccatccccggctaatttttgtatttttagtagggayggggtttcaccacgttggccaggatggtctccatctcctgacctcatgatctgcttgccttggcctcccaaggttattggtatcttttaaatgctccctttataattctgatgcagagtgagagctcaaaaatgctgacgtggggaactggctgcaactgacttgaatcccctctctgttttgagctttctaccaaaagtcaacatcacagcaatttccaccttcccaactacatagtttctgtggctctcagtgacagtcattagcccatgatggcaatgttggcccccttctaacagtttctatggggtcctggagcctttggtttttccgaactactgagtcctcttagcaccaccacctttaggaagaaacaagcagaagcaaatctgttacaccgcaaatcacccttaattaacaacagatctctattgtgccaggaactgtacaaggtgcttaccatacattgtcattagtcttcatatctggggttttggaaagtcagatcaataggatccctcctctccctgagttctaagccagttgagaaaggcaaaagagtcaggcaggtggagattaaaatgctagctttattacagatcaaagttattaaagaatgcagggtaggtgtgaggcatcagtgagcctctgtatactacaccccagaattagatgagcataactttagccagtggacagacatatgggaacctggaagagagatgctgctggtgctctaatgcatgttcataaacactgtataatgtaaggtattattaccattcagtgccagcaccacgcctgattattattaaggctaccacactgcaactaactatgtgcaaagtcatttacaaatttctctcaatttacgtgtatccagtctttgcaagatatccccacaccaatcccccagaaaagtgaaagtgaagagattttattgtatttccatcttttatactgtacttacgggcgccatatgcaagacacatgtgaaaggcatagctatagcacaccccacatgggcattgcaagccatttacattaggttttcccattactgtagctgcaggcacataaaatgtttattactgttatattgccattgcttaccttctacatatacctgccactgagcatctggtcttctgctgaaaagaataggaacatgttgatgttttccctggaactccagtttttttactttaatagtccctggttgtccttggccttctaccctagccagttccagagtctagacagagtaaccttggtattagctgaacaaaaattcgtggcaaagactgccctttgcttaaacaatcaa

SEQ ID NO: 66950 - DNA, 1656 bp, Homo sapiens
ttataataatatataatatatattattataaatatacaatattatacacattatcaactgtagtcaccatgatgtgcaatagagctcttgaacttattctttctttctaacttaaattgtatgtctttggttattggtatcttttatttatttatctttttgagacggacttgctctgtcgccaggctggagtgcagtggcacgatctcggctcactgtaacctctgactccctggttcaagcgattatcctgcctcagcctcctgagtagctgggatgacaggcatgtgccaccatccccggctaatttttgtatttttagtagggatggggtttcaccacgttggccaggatggtctccatctcctgacctcatgatctgcttgccttggcctcccaaggttattggtatcttttaaatgctccctttataattctgatgcagagtgagagctcaaaaatgctgacgtggggaactggctgcaactgacttgaatcccctctctgttttgagctttctaccaaaagtcaacatcacagcaatttccaccttcccaactacatagtttctgtggctctcagtgacagtcattagcccatgatggcaatgttggcccccttctaacagtttctatggggtcctggagcctttggtttttccgaactactgagtcctcttagcaccaccacctttaggaagaaacaagcagaagcaaatctgttacaccgcaaatcacccttaattaacaacagatctctattgtgccaggaactgtacaaggtgcttaccatacattgtcattagtcttcatatctggggttttggaaagtcagatcaataggatccctcctctccctgagttctaagccagttgagaaaggcaaaagagtcaggcaggtggagattaaaatgctagctttattacagatcaaagttattaaagaatgcagggtaggtgtgaggcatcagtgagcctctgtatactacaccccagaattagatgagcataactttagccagtggacagacatatgggaacctggaagagagatgctgctggtgctctaatgcatgttcataaacactgtataatgtaaggtattattaccattcagtgccagcaccacgmctgattattattaaggctaccacactgcaactaactatgtgcaaagtcatttacaaatttctctcaatttacgtgtatccagtctttgcaagatatccccacaccaatcccccagaaaagtgaaagtgaagagattttattgtatttccatcttttatactgtacttacgggcgccatatgcaagacacatgtgaaaggcatagctatagcacaccccacatgggcattgcaagccatttacattaggttttcccattactgtagctgcaggcacataaaatgtttattactgttatattgccattgcttaccttctacatatacctgccactgagcatctggtcttctgctgaaaagaataggaacatgttgatgttttccctggaactccagtttttttactttaatagtccctggttgtccttggccttctaccctagccagttccagagtctagacagagtaaccttggtattagctgaacaaaaattcgtggcaaagactgccctttgcttaaacaatcaa

SEQ ID NO: 66951 - DNA, 1656 bp, Homo sapiens
ttataataatatataatatatattattataaatatacaatattatacacattatcaactgtagtcaccatgatgtgcaatagagctcttgaacttattctttctttctaacttaaattgtatgtctttggttattggtatcttttatttatttatctttttgagacggacttgctctgtcgccaggctggagtgcagtggcacgatctcggctcactgtaacctctgactccctggttcaagcgattatcctgcctcagcctcctgagtagctgggatgacaggcatgtgccaccatccccggctaatttttgtatttttagtagggatggggtttcaccacgttggccaggatggtctccatctcctgacctcatgatctgcttgccttggcctcccaaggttattggtatcttttaaatgctccctttataattctgatgcagagtgagagctcaaaaatgctgacgtggggaactggctgcaactgacttgaatcccctctctgttttgagctttctaccaaaagtcaacatcacagcaatttccaccttcccaactacatagtttctgtggctctcagtgacagtcattagcccatgatggcaatgttggcccccttctaacagtttctatggggtcctggagcctttggtttttccgaactactgagtcctcttagcaccaccacctttaggaagaaacaagcagaagcaaatctgttacaccgcaaatcacccttaattaacaacagatctctattgtgccaggaactgtacaaggtgcttaccatacattgtcattagtcttcatatctggggttttggaaagtcagatcaataggatccctcctctccctgagttctaagccagttgagaaaggcaaaagagtcaggcaggtggagattaaaatgctagctttattacagatcaaagttattaaagaatgcagggtaggtgtgaggcatcagtgagcctctgtatactacaccccagaattagatgagcataactttagccagtggacagacatatgggaacctggaagagagatgctgctggtgctctaatgcatgttcataaacactgtataatgtaaggtattattaccattcagtgccagcaccacgcctgattattattaaggctaccacactgcaactaactatgtgcaaagtcatttacaaatttctctcaatttacgtgtatccagtctttgcaasatatccccacaccaatcccccagaaaagtgaaagtgaagagattttattgtatttccatcttttatactgtacttacgggcgccatatgcaagacacatgtgaaaggcatagctatagcacaccccacatgggcattgcaagccatttacattaggttttcccattactgtagctgcaggcacataaaatgtttattactgttatattgccattgcttaccttctacatatacctgccactgagcatctggtcttctgctgaaaagaataggaacatgttgatgttttccctggaactccagtttttttactttaatagtccctggttgtccttggccttctaccctagccagttccagagtctagacagagtaaccttggtattagctgaacaaaaattcgtggcaaagactgccctttgcttaaacaatcaa

SEQ ID NO: 66952 - DNA, 1656 bp, Homo sapiens
ttataataatatataatatatattattataaatatacaatattatacacattatcaactgtagtcaccatgatgtgcaatagagctcttgaacttattctttctttctaacttaaattgtatgtctttggttattggtatcttttatttatttatctttttgagacggacttgctctgtcgccaggctggagtgcagtggcacgatctcggctcactgtaacctctgactccctggttcaagcgattatcctgcctcagcctcctgagtagctgggatgacaggcatgtgccaccatccccggctaatttttgtatttttagtagggatggggtttcaccacgttggccaggatggtctccatctcctgacctcatgatctgcttgccttggcctcccaaggttattggtatcttttaaatgctccctttataattctgatgcagagtgagagctcaaaaatgctgacgtggggaactggctgcaactgacttgaatcccctctctgttttgagctttctaccaaaagtcaacatcacagcaatttccaccttcccaactacatagtttctgtggctctcagtgacagtcattagcccatgatggcaatgttggcccccttctaacagtttctatggggtcctggagcctttggtttttccgaactactgagtcctcttagcaccaccacctttaggaagaaacaagcagaagcaaatctgttacaccgcaaatcacccttaattaacaacagatctctattgtgccaggaactgtacaaggtgcttaccatacattgtcattagtcttcatatctggggttttggaaagtcagatcaataggatccctcctctccctgagttctaagccagttgagaaaggcaaaagagtcaggcaggtggagattaaaatgctagctttattacagatcaaagttattaaagaatgcagggtaggtgtgaggcatcagtgagcctctgtatactacaccccagaattagatgagcataactttagccagtggacagacatatgggaacctggaagagagatgctgctggtgctctaatgcatgttcataaacactgtataatgtaaggtattattaccattcagtgccagcaccacgcctgattattattaaggctaccacactgcaactaactatgtgcaaagtcatttacaaatttctctcaatttacgtgtatccagtctttgcaagatatccccacaccaatcccccagaaaagtgaaagtgaagagattttattgtatttccatcttttatactgtacttacgggcgccatatgcaagacacatgtgaaaggcatagctatagcacaccccacatgggcattgcaagccatttacattaggttttcccrttactgtagctgcaggcacataaaatgtttattactgttatattgccattgcttaccttctacatatacctgccactgagcatctggtcttctgctgaaaagaataggaacatgttgatgttttccctggaactccagtttttttactttaatagtccctggttgtccttggccttctaccctagccagttccagagtctagacagagtaaccttggtattagctgaacaaaaattcgtggcaaagactgccctttgcttaaacaatcaa

SEQ ID NO: 66953 - DNA, 661 bp, Homo sapiens
  misc_feature (1)...(661): n = A,T,C or G
aggccttctgggacgtcttttgaaatctggatggaggctgctaagaattcgtaaggcccttggaacaascaagaaaccctatgttggaatttggggaaaagagacctaagtgagtagtggtcagcaagcctgtggagggctcaggcccatctctcaaaatcattctggcttcataggcctctgtacttcaataggaggaacagcctagaagatctgcaaaatacctttaagatctcccttccattgtctctaggaatatcacctggcttccttcaatccatatgaacatctttggcaaacagtatctaagctacagccttggttttccttcctgaacctgctttttcattctttacattaccaagctgagagtttttgctatctttccaaattgcttcttttgattatgaatggaattgtcaagttattttatccctctcatgggttaatgtgagcagttaaaagttaaaaatgcagcagcttgattactttcctgcttggatgtttttccacttgataccctatttcgtcactctcaaggtgggacttcatgaaaccctnnnnnnnnnnnnnnnnnnnnnnnnnnnnnnnnnnnnnnnnnnnnnnnnnnnnnnnnnnnnnnnnnnnnnnnnnnnnnnnnnnnnnnnnnnnnnnnnnnnnt

SEQ ID NO: 66954 - DNA, 673 bp, Homo sapiens
ggatccactgycaatttttagttccgtgtgtattaagggtttgtgtcaaaaagccctctggggaatacagttacaaaattagaaaaatcaattgggacatgaccagttcaagaataatcacttcacactgcttctcaagactgtaactagtgtgtaagacaagctcatgctgtactcagcacttcttccaccatgctaggactgctttttccccttttggttgctttaaagtggtggaaacttctccatcagaagacatattttgtcacagagtattttgtgacaagctcaacgcatctaatttaatcctttcaaagttctagaggcaccctgctaaaatgaagaaccacactaaacaaaacaggaagaataggtgttaaaaaggaaagaagaggttgggtgtggtgtctcacatctgtaatcccagcactttgggaggccagagcagggggatcacttgaggccaggagtcctgaagccaggctgggcaacaaagcaaggcactgtctctacaaaaataaaatgaaattagctggctgtggtggcacacacctgcagtcccaccttctagggagggctgaggcaggaggaacgcttgagcacaggagtctgaggatacaatggtctacaatcgcaccagtgagctgcagcctgtggggcagagcaagactca

SEQ ID NO: 66955 - DNA, 673 bp, Homo sapiens
ggatccactgccaatttttagttccgtgtgtattaagggtttgtgtcaaaaagccctctggggaatacagttacaaaattagaaaaatcaattggsacatgaccagttcaagaataatcacttcacactgcttctcaagactgtaactagtgtgtaagacaagctcatgctgtactcagcacttcttccaccatgctaggactgctttttccccttttggttgctttaaagtggtggaaacttctccatcagaagacatattttgtcacagagtattttgtgacaagctcaacgcatctaatttaatcctttcaaagttctagaggcaccctgctaaaatgaagaaccacactaaacaaaacaggaagaataggtgttaaaaaggaaagaagaggttgggtgtggtgtctcacatctgtaatcccagcactttgggaggccagagcagggggatcacttgaggccaggagtcctgaagccaggctgggcaacaaagcaaggcactgtctctacaaaaataaaatgaaattagctggctgtggtggcacacacctgcagtcccaccttctagggagggctgaggcaggaggaacgcttgagcacaggagtctgaggatacaatggtctacaatcgcaccagtgagctgcagcctgtggggcagagcaagactca

SEQ ID NO: 66956 - DNA, 766 bp, Homo sapiens
agtttctaccattgtgctgaggcatttggagtgttacaacacaaacctgtgcctccagattccctgatcttccatttgtggtaaataaaactaataatgtttttacttttttttttttttgagacaaggtcaagaacttgatatctgccgacctgcatttaaattccaattaagctactttcttatcagctgtgtgactcaatccaacctgtattattttaatgtaaactacacttttcccrtccatatattgggtataaataaaagagctggctgggcgcggtggttcatgcctgtaatcccagcactttgggaagcagtggcaggtggatcacctgaggtcaggagttcaagaccagcctggccaacatggcgaaaccccatctctactaaaaatacaaaaattagcccagcatggtggcacatgcctgtaatcccagctacttgggaggttgaggcaggagaatcacttgaacctgggaggcggaggttgcagtgagctgagattgtgccactgcactccaggctgggcaacagagtgagactctatctcaaaataaataaataaataagatattacacagatgaatggagagattacaatttaaggcagccagtactgagcttagcacattgcaatcagttaagaggtaggtgctattatcacaaccttatcattcagattggactataagtacctctagtgtcaaacagggtttgccggcagtagcagaaaacatttctggaagcaggatgaataacggtg

SEQ ID NO: 66957 - DNA, 766 bp, Homo sapiens
agtttctaccattgtgctgaggcatttggagtgttacaacacaaacctgtgcctccagattccctgatcttccatttgtggtaaataaaactaataatgtttttacttttttttttttttgagacaaggtcaagaacttgatatctgccgacctgcatttaaattccaattaagctactttcttatcagctgtgtgactcaatccaacctgtattattttaatgtaaactacacttttcccatccatatattgggtataaataaaagagctggctgggcgyggtggttcatgcctgtaatcccagcactttgggaagcagtggcaggtggatcacctgaggtcaggagttcaagaccagcctggccaacatggcgaaaccccatctctactaaaaatacaaaaattagcccagcatggtggcacatgcctgtaatcccagctacttgggaggttgaggcaggagaatcacttgaacctgggaggcggaggttgcagtgagctgagattgtgccactgcactccaggctgggcaacagagtgagactctatctcaaaataaataaataaataagatattacacagatgaatggagagattacaatttaaggcagccagtactgagcttagcacattgcaatcagttaagaggtaggtgctattatcacaaccttatcattcagattggactataagtacctctagtgtcaaacagggtttgccggcagtagcagaaaacatttctggaagcaggatgaataacggtg

SEQ ID NO: 66958 - DNA, 766 bp, Homo sapiens
agtttctaccattgtgctgaggcatttggagtgttacaacacaaacctgtgcctccagattccctgatcttccatttgtggtaaataaaactaataatgtttttacttttttttttttttgagacaaggtcaagaacttgatatctgccgacctgcatttaaattccaattaagctactttcttatcagctgtgtgactcaatccaacctgtattattttaatgtaaactacacttttcccatccatatattgggtataaataaaagagctggctgggcgcggtggytcatgcctgtaatcccagcactttgggaagcagtggcaggtggatcacctgaggtcaggagttcaagaccagcctggccaacatggcgaaaccccatctctactaaaaatacaaaaattagcccagcatggtggcacatgcctgtaatcccagctacttgggaggttgaggcaggagaatcacttgaacctgggaggcggaggttgcagtgagctgagattgtgccactgcactccaggctgggcaacagagtgagactctatctcaaaataaataaataaataagatattacacagatgaatggagagattacaatttaaggcagccagtactgagcttagcacattgcaatcagttaagaggtaggtgctattatcacaaccttatcattcagattggactataagtacctctagtgtcaaacagggtttgccggcagtagcagaaaacatttctggaagcaggatgaataacggtg

SEQ ID NO: 66959 - DNA, 562 bp, Homo sapiens
ccaggggtggagtcccacccaaagcacttggaccgggaatagggaggggcgacccccaaatgtcagaaggaggactggataaggaccaggaggcaaactaccaatatccactacagtgttctaaggtttctttttcttcttgttttgttttgtttttgagacagagtctcgctctctcgccaggctggagcgtagtagggcgatctcagctcactgcaacctccgcctcccgggttcgagtgattcccgcacctcagcctctcsagtagctgggactacaggctcccgccaccatgcccggctaatttttgtacttttagtagagacggggtttcgccatgttggccaggatggtcttgaactcctgacttcaagtaatctgctcgcctcggcctcccaaagtgctgggattactgtgagccaccgtgagtagccaagtgttctaagttttaaaggcaagcagggtagggattatcaaccccattttgcagctaaggctgagaaaggagatatgcccaataaaaattatagaggaaggaattgagtcagggtttgagccaat

SEQ ID NO: 66960 - DNA, 544 bp, Homo sapiens
tggggcattatattaatgcttctgtatgagtgtaggtagcttatcagcggtggcttctattaaaggataattaaggaggcattacaaaataagctataaaaaaggaaatgttggggtgagagccaatggagggcattagtaaaaggatgctgagtagaagatctaagcccttcttgaatcacaggaaaaggaaacagttgtttttgttctatttaattgttttctgtacccccatctttaccctaggacttattgtgattttyttttttttttttttttaaagacagagtctcattctgtcacccaggctggagcccagtggcaggatctcagctcagtgcaatctccacctcctgggttcaagcgattctcatgtctcagcctcctgagtagctgggattacaggtgcccaccatcacgcctggctaatttttgtatttttagtagactgggttttgtcacgttggccaggctggtctcaaactcctgacctcaggtgatccatctgccttggcctcccaaagtgctgggactgcaggtgtga

SEQ ID NO: 66961 - DNA, 746 bp, Homo sapiens
gcagagtctcatgtataagcagatatatggctcactccaagtgaggataagtatcctgcagtaggaaatgacaaggacagtagttcaattcagcaaacattgttgatgtcttcttggggtcttagctaaaagagactgtaacagagaggagctcccaattccaaagataaatgtcattgtgctgggcatttgaccattgtcaatgtgagctatagtcatggacgcagggagtggagaaaatctgagaagccacagtaatcaaggttttaaaggtgtagacttgccatgggttatggagagaaataggctggtgtgctggagccagctgttaaatgctcaagaaaattgctagaattttgagagccagttgttaaaccattgaaattgacttaacttgaaattggctgttgataaagtatttgcaccatggaaatcggctattactacaaatcagagctcctccccaacctcatcccacccacatagctggtttgccagaccactgctagcctccaaccatctgtgctcaggcaagggtaacttttgaccaaaagcttccagctgactgtgaccttaaatggycttattacacaaagcaatggtctctgccaacaactgcctatggttcaaggagcaaaagttgaactttacctggagctaagtgtgctgagaatctttgatcacttcttgcccccctcagctaatctgcccacagacattgcttatagtcgcagcttttcttataa

SEQ ID NO: 66962 - DNA, 635 bp, Homo sapiens
ctgcacctggggggtgacctgccatggcatcatcatcaacaggttctgtgttttgtttttctctgcaaactcattcaaactcactttctcccccataaccctttctatgacagacttccccagtgcttggtcctggactctctgtcactgcactgaccacctcttgggacatatgaccatgctgggctagacccctgatatggtttggctgtgtccccacccaactctcaacttgaattgtaataatccccacatgtcaaaggcagagctacgtggagataattgaatcatggggggtggttcccccatactgttcttgtggtagtgaataagtctcatgaratctgatggttttataaaggggagttcccctgcacaatctctcttgcgtgccaccatgtaagacgtgcctttgcttctcctttgccttcggccatgattgtgaggcctccccagccatgtggagctgtgagtccattaaacctctttcctttagaaattacccagtcttgggtatgtctttattagcagcatgagaacggactaatacacccctccagtgctgaaagctcacctggccttggctggggtgaagtacctggtggttctgattctacatgtctgtatacattcaa

SEQ ID NO: 66963 - DNA, 714 bp, Homo sapiens
tctgacatctatttattcagcttagagatattaggaaaaagtaacttcacctcattccatttacagctaatcattacacaccaaggggctgtttcacacacactatctgaaggacaacaaactctgaccattttgctcaaaggcagcttctttctccatctacaagaggtatcttgaagtcaatagattgtttcctaccatggatgaagcaagcaggccataaagcatggcttactcacagacagcatggacttcatgccaagagctcaaagaatgtggttttcaacttaaatttggaaatgtgaaacactgactccagagatctgtaatctgaaaatcatagcatttttagaactggaagggatctcagagctcatctaagtaatctcctcattttacagatcagagacttgagagccacagaagaggagtgatttacatagttactctctaytcagagcaaagtaggatctggagccatttttatgtctcctaaggactcagttactgccctgcagggccacctagcacagtgcctcacccaggccagccatcagtacgtttctgttgaacagctgagtgatctggaaatatagaacaactagcgggaagagagtttggagatagatatcagcacctgggcaggtcatacagctcatccttatcactgcaacgaaacaaagttcaaccgttggctgcaactgagtggactct

SEQ ID NO: 66964 - DNA, 627 bp, Homo sapiens
aattgggactgttttaaacattgcttgaatacatgtttatttaaacacacaaagatcatagggatgataaaatagaaaagtaaagtttcccataattccacacctagattatacttttaaaaaagatttatagctatcctagtggatgtgaagtggttatctccatgtggctttgatttgcatttcctaatgactaatggtgttgaacaacttttcatatgcttactggacatttttatatcttctgtggagaagtgtctgttcaaatcctttgcctatctttacattgggtcatttgcttttaatcgtttagttgtaaaagttattcataaattttggagactagtcccttatcagatatataatttgcaaatattttcttctgtggggtcgctttccactttctagatagtgtccctttaggtatgaaatattttaatattgaacaaatcgaattattgattttttctcttgtacttgtgcttttggtgtcataactagaaaacttttgcctaaaataaaggccataaagatttacacctgttttcttctgagttttatggttttaacacttacattgaggtttttatcctttttgaattacttttcatatttaatgtraagtaa

SEQ ID NO: 66965 - DNA, 998 bp, Homo sapiens
tttgtaagtgccttataatttgggcttttaaaaattgcctgcgctttcttcccttaatttagcccatttactcccaaaataaagaggctgtgtttcttttttttttttwaaggcattgtttatctgtaacgtttgtatctaactttactgtatctaattacactttcagtattatacaaaaatttttttgtttttcttgtccaaacttaagatcggttgtaattttattggccaacatctacttcattaaatacattgactttgtttatgtagaaatatttagccagaaggagttgaggatgcagtggtgagatgtggattttgttactgtatgatgtgaataggtaccttctctcagcctcagtttcctcttgatcttgtgaggctgatgaaaacaggaaaatcacctcacacagtggtacttagttgccactcaataaatattagaccttccctgaatctctgtgttcctcaccaaaaatatattggacaaatgattggtgaatatgaagcactttataaacctggataatactatataaatgctgtttgtatggttgagtattagataatcatattggattctctaaaactgaaaacttgacctagggatagtctttaacttagtgtatggaccctgtgctaatgtagaagacaacagtttataatgtaaacagtcacgttaaaattaatcttatccagcaagttattgttttttctattaaatattgaactcactgtttatgaagtgttgtgggtaccatctttactgtgtgaaatagaagtttaaaatacagttcttgaacccaaggcactaacagaaatttctgtaatggtggaaattttctgtgtctgtgctgttccatatggtagccactagccatagtagctattgagcaattgaagtgtccctaatatgaacagggaccacattttaaattttatttaatttaaatggatttgtacgtagtggctccatgtgcctagtgactactgtg

SEQ ID NO: 66966 - DNA, 732 bp, Homo sapiens
agaaactcagagaagtgtgttcaacaatactagttctagtgccacaaaacaccctgagccccaagtctgggcttctcagtgtgaacttctccttatcaaaatgtcacgaagccccacattcttctaacttcctctcccaaccacaacactcttacctagaaagagatagtcagtaaggtaaaagaaaacaagcttggtgaaaaagtaccttagactatctgtgagaggaaagactacagcagcattacaacaaggagaggactctaatggcttccacagcccagttatgagatggtcataagggtagaggtttggtttgaggcagaggtacttctgtatagcaaggatctttcctatccaagtttgcccgtgtggtgaaatgcctmttctgtatactttgccttaccagggcttatcttgcatgtaaaacgattttatttttgtaaatgccagttaagttgagcaaactttcacacaaaggtcatggcacaatcattctataacgatcagttttcagaaaaagaatttgactggaatttcataaaagaaaacagcactggaagaaaaatgtagtcagggcaaaaggaggctgagtctcctggatttcatcttgaaaaataaaaaatatagtgctttccccaaaaaactactatatccagaagcatttgtaggtaatgtgcgtatgttgaggaatgagaatgtaggactagattaaaaataaccgtggcgtag

SEQ ID NO: 66967 - DNA, 732 bp, Homo sapiens
agaaactcagagaagtgtgttcaacaatactagttctagtgccacaaaacaccctgagccccaagtctgggcttctcagtgtgaacttctccttatcaaaatgtcacgaagccccacattcttctaacttcctctcccaaccacaacactcttacctagaaagagatagtcagtaaggtaaaagaaaacaagcttggtgaaaaagtaccttagactatctgtgagaggaaagactacagcagcattacaacaaggagaggactctaatggcttccacagcccagttatgagatggtcataagggtagaggtttggtttgaggcagaggtacttctgtatagcaaggatctttcctatccaagtttgcccgtgtggtgaaatgcctcttctgtatactttgccttaccagggcttatcttgcatgtaaaacgattttatttttgtaaatgccagttaagttgagcaaactttcacacaaaggtcatggcacaatcattctataacgatcagttttcagaaaaagaatttgactggaatttcataaaagaaaacrgcactggaagaaaaatgtagtcagggcaaaaggaggctgagtctcctggatttcatcttgaaaaataaaaaatatagtgctttccccaaaaaactactatatccagaagcatttgtaggtaatgtgcgtatgttgaggaatgagaatgtaggactagattaaaaataaccgtggcgtag

SEQ ID NO: 66968 - DNA, 2109 bp, Homo sapiens
  misc_feature (1)...(2109): n = A,T,C or G
cccaatattttattataagaagcttcaaacatacagaaagtttaacaactgtatggtgaacacaggaattaaaaataaatttgccaggcctggtgtggtggctcatgcctataatcccagcgctttgggagatagagaagggaggattgctcgagcccaggagttggagaccagcctggggaagatagtgagaccttgtctctcccaataaacaaacaaacaaaccacctagatgttacaattaacattttgctatccttgctttatcactaaatttcaaaaagcaagatgatgaattattttaaaaatatacctagcggccaggcacagtggctcacacctgtaatcccagcactttgggaggccgaggcaggtggatcacctgaggtcaggggtttgagaccagtctggccaacatagtgcaacgctgtgtctactaaaaatacacaaaattagctgggcgtggtggcgggtgcctgtaatcccagctactagggaggctgaggctggagaatcacttgaacccaggaggcagaggtggcagttagccaagatcaagccattgcactccagcctgggcaacaagagcgaaactccatctcaaaaaataaataaatatatgtgtgtgtgtgtgtgtgtgtgtgtnncaaacttncatgnnctctgtttcccttttaaaactgaatgcttttaatagtgcccaagtcacatctcgaatgcttnnnnnnnnnnnnnnnnnnnnnnnnnnnnnnnnnnnnnnnnnnnnnnnnnnnnnnnnnnnnnnnnnnnnnnnnnnnnnnnnnnnnnnnnnnnnnnnnnnnnccccnnccnttttntcaaagcattagcaagagcatagaataatgaaacaataaaataaagtacataaatctgctgaaagagaaaattaaataggataatgtgataaatgtcagcagctgttagaagtacaagcccagtgtgcaggtctatgcaagagcaaagaaaaggaggctctgaagcatataggaggagtttctgtcctgcagtttctcaggcctgtggtcaagggaggatgttcccagaacaggaaacctcagaacaggtagcttttggccccatgagaggtttgtggctgatacatgcagtgtggtctctggacctctaagcctctgcttcatcaggaagatttgctgaaatgcgtttgacccccaggagcccttaccttagctctcataaaagtgttgcaaatcagtttggatttggataatgcctaaaacaggagagttgttttgttttgtttgtttgtttttaaaaaaattcctagttatttaacactgagctattcctttgtatgtaaaccttcaattaaaagaaaatagttgggatccagaaatctaaatttctgaattctgaaatctgaatttttaacaagcacccaaggtgatttcattgcaggcaggtgttgcaaatacggtcattttctaagaatgtggtctatttgggcctcatgaagatccacctgctccaggagtctacaaccttgctttgccaggaatgcctttcttctcagacagctagtacttatcttctaaatgagcttaattactaaatycctaagggtgttgaacatcaaggactttatctcttggtgtagataaattagctcactgaagtgttgtacaccagtttggacctgggaggggtctagagagaggaaattattattatttgatacataacatttgtacatatttagggcatacagatgatgtttcattacatgtgtagaatgagtaatgattaagtcacgatattcagagtatccatcacttgaagtatttatcatttctatatgttggaaacatctcaaatcctctcatctagctgttttgaaaaacacagtatattgttggtagctatgattatttttaacttctttgttatttaacattgctgctatgcccctttgtgtaaaccttcatatgggcatttaataccatcttctttaacccctggttcactggggtcttccagatacatgcggtttaattcttcacttttctaagggagaaaagtctgcaaatcttttttcctagtgttttcctttggaagcttcgtcccactgtt

SEQ ID NO: 66969 - DNA, 544 bp, Homo sapiens
gaataagtgaataagaaaaaataaaacgagttttgttttgggggttaggggaagaaaaatatcagaataagttgtctcatgcagtaagataaattaaaaacgaagaaaggaagaaagaaaggattgcctccccttaaataggtgtcaaactgtgaacatgttctgttattggttcatgaaattttccctaaatcgtgcattacattttctttaaatttggggcagaacaatataagtcacagtaatggaagcaagatgtgaaaagtctacacatctgttaggaaaaatcctactccccccatgcccctgttgcctctatggtaatccaagggaaggtaagtctaagtaaaataaaaaagggagaagggaaaaggaactttgagcccwtgtggccagttcacaacaaaagtctgttacgccatggtttgtagcctgttattcagcaggaaaaaatcttggaaaaacaagcatcttgttctgggaatgtcagggagaaggaaaacaattcaaaatccaatcagtgtctttgagcgaaacacagatt

SEQ ID NO: 66970 - DNA, 665 bp, Homo sapiens
aatttctactacgcactgccatgccaatgcgggtatcatttcaccatcatgatatgtgacgcaggttttgcaggtgagtttgaggatgaagctcagagatggcacaaagctcatccaaagccacacagcagagcagggcttccaatcctgtctgactctcaggtttgcgctcccagtcactccttcctgcaaactcctagcaggaagactctttatgacttttcataaagagtcaaaggtgattttatcctcacggtgcccttctaagttcagggtgcaagtatctcaatgacctccagttcacaggagggcycctgtgtgtggtggggaggcagagccgcagaatgacttgtggaaggctacacaccccagtggggaggacctttcccctgctccaggctagggagacccggggactcccaggagcagcagagccacaggacacacctgccaaggcatgtggaaggtgggccaccctggagtggggagagaaaggcaaagaggggctgtgcttattttggcagttggggcttggcaccaccccaggcaggacagtaattcagcaactggctgattcacccaccgcagggctcccctgcactggctgcctgcccgccggcccctattaccagcccactgagtcacgcaggttgccaagaagctga

SEQ ID NO: 66971 - DNA, 2065 bp, Homo sapiens
ttcaaccttatacaatgtaatattatactgcattatattattcagcaaaatatgatatatatgtataataaaatattattcacctgtattctgacacatactacaacatgaatgaactttgaggacattatgctaagtgaataaaccagtcacaaaataacaaatattatattattccacttgtatgaggtatctagagaaatcaaattaatagaaacagaaagtagaatagtggttgccaggtgctgaggtgtggagggagccagaaggaatgtgaaggtgctgttaaaagagcatagaatttcagttttgcaggttggaaaagtatggagattagttccacaatggcgggaatacatttaacactattgaactgtatacctaaaaatggttaatatggtaaatattatgttaactgtattttattttaattttaaaaatatgtaacaaaacaacattattccactgggaaaaaaatgacaaatataacttggctaaattctgcctaaccaagaggtgattatgagatgaggtagagaggaattgaaattggacaaggatgtaggtcaaaagcagtagatgggcatatgcccaaggaaaagtcatcattcctggtctaggggctggccttcagatttgrgaaatccagccttcacatagttgaggacatatcaaccaagtcaacagagtttacacacaaatggtaaatttttgagagtacagtattctctctggataacgggtgttaattgcactaagttctttcttagtggattaataaactcagaacagtaatcattttcttgtcatcactgtcacaagaagcaaggaaatgaataatttcaaaggatgcttccctcaactcaatagttaaataatgaggagagtgtcaataagaagaataaaatcgctaaattctagaaggtgtttattgtaagccatgcattgttgtaacacttacaaatcagtcctcattttaccccatttcaaacacccacatttttcatatttattgaaaacttaccagtgctcagttccatttaatcactgtagatatcattgtgtctgatggttaattttaggtgtcaacatgactgcattaggaatacctagcaacctggtcaagcattattttggggtgtatcccaaggtgtttccaggggagattatcagtgctctaggtgggtaagatccgacctccatgtaagcaggcaccatgcaatctgctctacagtccaaagaaaacaaaaactctatctgtgggtctatctgctggaactgggatgaactctttctcccctgtccttggacaacaactccaagctcccctacctgtgtactctagggcttaaaccagaagccaccaggttctcaggactttggtctgggactgagagttacattatcagcttctctggttctgtggggagcttcagactttgagtgagccacactaccagcatcccagggtctccagcttacagatggcatgtggcatgggaggggcttttcagacttcataactgcatgagctaatccctctaatgatgtatttgaaggattagctcgtgcagttacgaagtctgaaaagctttttaacttaaaaagatttgagggatcacaataaatgataaaatgtaattccactgattttgtctcactggaaaacacctgagtaatggaaaacacctgagtcatacagtgaccaaagcagacagtgaagtttctattattatatccatttatagaaaaaaaagacagaagtgcagggagctattgaattgtggagccactgtctgaatccagaaaatctgactgaatcgtcaggtcttacatgctccctgggaatattttggccataaaaaccagatgtgatttctagactgatcagtgcttttccagtagagtcttgcctaagtaatgacaggctctttctcttcagccattattctttttcttcactgtaaagtctcatttgcttatgccagtcatgttacatcatgaataaattgggtcctattttacttacacttgttatatcctactttttgttttcctaagtatt

SEQ ID NO: 66972 - DNA, 1334 bp, Homo sapiens
ctgttcaacaacagttcagtgcctaatatatgctaacatggtgctgggtacaatggtgtccacaaaggcagagtcactgtccctacaatttgtgaagttgtgataaaattgcaattgttaaaatgcagacatactattgttgcagacagattttgtgtgctaagctagactgttaagactagaaggagaacagcagagatggcaccagttggtggccaggggagggggctccccactcctgtaaaatctgccacatcttccctggccacccttctacataatgacattcccaaagatagatcatttatttctcaatctttgtaaagtatgaataaaattgttttgagaaaccgtgattttttaatttaaagtctgtaaaacattgtttttaagtggcaaccagattgccacctcaaagccccttttatccagaaattcagggtggtatttagagaggagaaatgagtgaaggtgagaagacccagagaacccccagcagaggatgttctgcaagttgagcctcaaaagatgattgaaatcttgaccctagatgccctggccttcccatacctatcagcgcatgctcacaaagaaaaccaccatgtggccagctgtgctgtggcttggagaggcagggtctgtggggacatagaagcagctttagcagttggatccgtgctccagtgtaaagggctggcttcccagtgagcacagaaaaggcctggagtctgcttctcatgctgtgttgggctttgccaagggctcccttgccactacagctgggatgtcctaatttggcttggttgatttaacttctcactttagaggaagaaagtaagatcgatgttttctaatttgcctctaggctccttttacacttaccttcaacacagccaatcyagggtccttcattttaggtgagctgagaggtacagaagaaagtgtttgcagggtcccttgggatgataggctttctccagttgggccagtgctggtgattgcctgggttgctgccacactgggagcattgtggtggtgaagtccagacaggtgaattccagctgtgctaccttagataagtcccttcacctctctgggccttgtttttatcatctaaaatatgaagctcttaaaaaaaggttttctcagactggttagccagatgattttaagtggctaaaggatgagcattctttatatactaatatatgtatttatttttcattgtcatattccatttatatgaagtgataccagatttttatagtgatgattgcatttcttttgaagtaattttatttgagtaacatttccctcctgtggtttcttcactc

SEQ ID NO: 66973 - DNA, 1779 bp, Homo sapiens
tatggcccatatgtggccctggaacatgttgtcgcttcctcttctgatttttagctgacaaatgtgacctctgggatgattttgaggaatgattatatgcaccactaacaagttgttctttaaagcaaacacatattgaatacctactatgcgccaggtcccctacttgtattatctcatttaaccacacggctactgtattgttttaaagcattattataaccattttttatatgatgccaaagccacattcttttttttttttagacagagtttcactctgtcacccaggctggagtacagtggtgaaatcttggctcactgcaacctccacctcccatgttcaagcaattctcatgcctctgcctcccaagtagctgggaatacagacgcatgccaccatgcccggctaatttttgcatttttagtagagatggggtttcaccatgtcggccaggctggtctcgaactcctggcctcatgtgatctgccggcctcggcctcccaaagtgctgggattataggcgtgagccatcacacccagcctccaaagccacattctttctatggcaccatgctgattctgtgcttaggatgtgaggttcaaatgggggagctggcaagagggaaagacaggcctgagtaatcattcttgggcctaacaagcttgtccaacccaccttattttgttgttgttgtttttstgttctgttttgttttaggctttcagcagcctgaagccatggtttttagtttctgtctctagtgataagcagaaaagagggatgaggaaggggcttcactggcccaaccagaaacagaaactaagaacccatgactgctgcaggactgggcacagtgatcaggtcctactgccctctgagaccaagcaagtcactctgtctctctgaacctcagattccccatctgcaaaagccttccccttgcaaggctgttgtgaggagcagagataatgcacacgcactacctgcgccggttagtgctcaattacatctatctattattataaagagatggttctcaaacgttcagatgcatgagaaatgctgggaatgcaaattactaggccccattcccagagattctgattgggaggtctagggtggggcctgggaatatctatagctcacaattttgtccaggttaaatgatgcccactgaggaacaatcttttaaggaaaatacacctggggccactgaccgcagaaagtctttattcctgagttaaaatcaggttctagaactacagcccgtcccccagggcagccaatgctagtagggcagatggaaacctctggtggaggcagccacagagttcacggctcgggcctgtgacccacgatctcatcctagccctttcgacaggtacgggtgatccactcatgctcgtcatcatctgcaaggaaagaggaagagctggtcatgcttggtgctcgctgggacctttcctggcctggggggttccccaggtggggcgttgggactgggatggtccgtcgatggccagtctgtgtagttttgtgtggggaggaacagacctttcatttacactgaattcctcggagtggctggtcttggggaaattgaacacagaagggtttctaactgtgggtgctgctggcggaggcaagcatgaggagtctggccaccctaagctggactcatcctgacaggcagagagcagctgcttcacagtcgggcacttgcctggtctgacagcccacgcacgacagccccaggacagtgggtctaggcctt

SEQ ID NO: 66974 - DNA, 663 bp, Homo sapiens
gcattgtgctagattcggggaggtggatactataagacacttgaggggatatttagcagctactgaaaataattgttaggaagtttgtatagcaacatgggggaaatgtttttgatgtgataataagcaaaagaaaaaaggcaagaagagacaagaaataaaagtacacatagtatatcctatgtcataactgtgcacagaagaaaaattaaagataaattgaaatgtgaataatagccctgcayagtgggatgagagagtttctctttccgcttttatttcccaaatcttctttcactaatgggtattgacaatagaaaaataattaaaataattattggcttttgccgggcgcggtggcttacgcctgtaatcccagcactttgggaggctgaggtgggtggatcacgaggtcaagagatcaaggccatcctggccaacatggtgaaaccctgtctctacaaaaatacaaaaattagctgggcgtggtggtgggtgcctatagtcccagctacatgggagactgagtcaggagaatcacttgaacccaggaggcagaggttgcagtgagccgagattgcgccactgccctccagcatggtgacagagcaagactctgtctcaaaaaaaaaaaaaaaaattattggcttttttcctaccctc

SEQ ID NO: 66975 - DNA, 689 bp, Homo sapiens
ctctcacctcagcctcccgagtagctgggaccacaggcacgtgctaccatgcccagctaattttttcatttctggagaggtggggtttcaccatgttgcccaggctggtcttgagctcctggggtcaagtgaccctcccaccttggccttccgaagtgctgggattacaggtgtgagccaccatgcccggcctagccctgggttttaattctgcttctgccagagataaaatacacatagtccctgccttgagaagctcaagtcaagaaagggaggtaaatagaacagtaaacaaataatcgccatgtaatttgacatacaagacagctgtacctcatagaaatttcccatgtcaatagagtcactttcgtccttttcacagctgttcgggatcacattgtgtggctctattgcaacttatttactgttcactactaatgaacagaagctttttctctctctttctctctctctcttcactttttacaagcaatgccaaatgaacatccttgtacacagcttaacgtacttgaatcagtgcttctgtggtatgaatgtttacaggtcaggaatggtacacacattatrttttgatagatgtaccaaattaccttccaaacataatgtatcaatacaacaatttatactcctccctgtagcataggagagtatgcactttcccacttctg

SEQ ID NO: 66976 - DNA, 1309 bp, Homo sapiens
agagcttgggctgcagtgcagtgcagacaatagtccttgcctggcactcgatcggctttttctttccctttttgtgggttttattatttttgttacaggtggggctgccagggatgggttatgcctgcagggggagaaatgatcagaagagccacaattctaccctcaacccagggaatgtgagcttttactgcctccattttcttaaccagaaatctggtttagttttgctttcagggctcttgtcattggaaaaagattagtgctcagaacctgcagcccagaaatggcccagtcccatccctccaggcaggctctgctcctcaagctgcgtggggaaatgccatcatgggcttgtgcccagcatccaccctgccaatgatgacaacagtgataatcgaggcattcataccaaccaccatttagggagcctttatagagacttccccccaacagtggcctctttggcagctctgggagacagccttggaaagggcgaactaarggccgagagaagcagcaacttgcgaaggtcactactggccagactgggcccagtctcctgcctcttcccacagtggctgcacaccctactctctaccccattgcagtaggaagagaactccagaataaggggaggctctgaacagtggagtcaggatccgtgttttgactagtttcaaggtctagtaaagcacagtatccaaggaggctcagtccagcatgggcatgggctagggctggagaagtagaaaagaaatttgggcaagtagtgaataagactgccaaatctattgttaggagagccaggagaggtgtcctagtggtgccttagtctatgggagagacccagacaccattctgctgggttcccaagctggcaccttaaatttagtagctgatgaatccaaggagcccccaagcatcatctggcatgtttttttgtatgtttgtttgtttgttttttgagacagagtctctctctgttacccaggctggagtgtagtgacgtgatcttggctcaccacaatgtccgcctcccaggttcaagtgattctcttgcctcagcctcctgagtagctgggactacaggcacgtgccaccacacctggctaagttttgtatttttagtagagatgggtttcaccatgttggccaggatggtctcgatctcctgaccttgtgatctaccagccttggcctcccaaagtgctgcgattataggtgtgagccaccacacccggcccatctggcatgttttataccaactggagtcaggcctagagcagggaggtggctagacagtgac

SEQ ID NO: 66977 - DNA, 2224 bp, Homo sapiens
ttcccactaactgctttccaattgttctgtgaccttttacctactgaaattgagacaggcacttgttgtgagagacttaagaaattattatatttaattacttagactcttctgtcctagaaggctatgatgtcgtgtaatcccatcgcgagtacaggaaagccaaaagtcagtttctttgttcaaggaattcaaagcaaggtggggaggggggaggcaagaactgctgtccaacttgggcaaaagttacatcctagaattgaatttgaaaccattaacagttcaagacgcgttgctctggttctaaagaggtgaattaacatttggggagtgaacagtgctagaagttgcagcaggtaaattagtcatagatccttctcagaaagacggtatggtttattccctcattacctgtgtgatctatggaccagtgcccttagcaccaagaaacagcttattagaaatctcaggacctaccgcagacctactgaatcaaaatcattttactaggatctccatatacacccatttattttgagagtaggggctttggaatcagatgtatctgggtttaaatctcagcttagccacttactacttactagcaggtagcctcctgtacttgcttcctcatgtctaaaatcagtatgtsgttctacaccttggcttcacatcggaataggctgggagtgctttcaaaaattccaagcccaggccacactacacaccaattacaacagaatctctgcgggtaggatccaaacatcaggatttaaaggcctctcaggtgattccaatgtgcactcaaagctgagaaccacgcatggctttgaagaataggagtgtggccattggaaccagacaatctttacttgtatcctgtatctaccacttcttatatatgagactggggcttcttaacctctcgctaaactttaacttccttcatctgtaaaatgaatatgacctgtagtacctcgttcaaaggactctgggcattgaaggaggtgaaacatgtaaagcacttagcacagtgcacaatattattatttatgcaaggcccagcttcctttgcagaaggaacctaggaagcaacatgtgggttgaagtatcatataaacaccaatctgcagccatgctcataccttacccaccagaggggaattccaattacttggccaccaaaacgttagtgggttttgcctcagctattgaaaaaaatgcaaaaaaaagtcttatttttcattagagaatctgaggcaaaagttggttggcaagtaacttttgcagaacacgtgggggttctgctggaagcatccaaaatgcttccggatgtggggtcagcaccaggtgcagaagcggccatggcagatcacacagtgctttttctttgaactgtcctagcacgtcaggcaacagaccctgcacctcatctgcctggtgcctcacagcaatctccccacttagaaaatctagaatgagctcgaagggcctttacaaagactcttgtccaactgctttgctttttagagtgccgcaaagaggtaaccaaggcccagggagctgagaagacttatgcggggtcatacgcaatttaaagccataaccagaaggcataaaatgacccagtcagatgtggaggaaacagcctagtagtgaaaaaagaattgaatgaaaggggaaaaaagacataatagtgctttgaaccaaagagctttataaacacttgtggctttaacctgcccaggaggtagataagcatgtgccctttagtttgtcctcaaactcaacctcttgcaagaggttaaggaacacacccaaggttggaattgacactcagacctccagacttcctggctttggagctggaagttcagcctccacctcccttgtctatcaggaaaaacatctgggttataatgcttgaggatgggatatcaaggggaagtggtggaagttcggttcttcaagaaactttgagcaagactgcatgagaccctgctaggggcccctcccattccgagtcatgcctcaaagaagtttctgcacttctatcctggaggctccccttgtatgacctttagagaaatctatttgcctaagacgttggatggaaggaaagagagctgagacttcaaaatgtgtgaacacagacacaccccaaggagctgcctaaagtaacaaagcctttccttcacatggccacttctgcctgttctaacag

SEQ ID NO: 66978 - DNA, 2224 bp, Homo sapiens
ttcccactaactgctttccaattgttctgtgaccttttacctactgaaattgagacaggcacttgttgtgagagacttaagaaattattatatttaattacttagactcttctgtcctagaaggctatgatgtcgtgtaatcccatcgcgagtacaggaaagccaaaagtcagtttctttgttcaaggaattcaaagcaaggtggggaggggggaggcaagaactgctgtccaacttgggcaaaagttacatcctagaattgaatttgaaaccattaacagttcaagacgcgttgctctggttctaaagaggtgaattaacatttggggagtgaacagtgctagaagttgcagcaggtaaattagtcatagatccttctcagaaagacggtatggtttattccctcattacctgtgtgatctatggaccagtgcccttagcaccaagaaacagcttattagaaatctcaggacctaccgcagacctactgaatcaaaatcattttactaggatctccatatacacccatttattttgagagtaggggctttggaatcagatgtatctgggtttaaatctcagcttagccacttactacttactagcaggtagcctcctgtacttgcttcctcatgtctaaaatcagtatgtcgttctacaccttggcttcacatcggaataggctgggagtgctttcaaaaattccaagcccaggccacactacayaccaattacaacagaatctctgcgggtaggatccaaacatcaggatttaaaggcctctcaggtgattccaatgtgcactcaaagctgagaaccacgcatggctttgaagaataggagtgtggccattggaaccagacaatctttacttgtatcctgtatctaccacttcttatatatgagactggggcttcttaacctctcgctaaactttaacttccttcatctgtaaaatgaatatgacctgtagtacctcgttcaaaggactctgggcattgaaggaggtgaaacatgtaaagcacttagcacagtgcacaatattattatttatgcaaggcccagcttcctttgcagaaggaacctaggaagcaacatgtgggttgaagtatcatataaacaccaatctgcagccatgctcataccttacccaccagaggggaattccaattacttggccaccaaaacgttagtgggttttgcctcagctattgaaaaaaatgcaaaaaaaagtcttatttttcattagagaatctgaggcaaaagttggttggcaagtaacttttgcagaacacgtgggggttctgctggaagcatccaaaatgcttccggatgtggggtcagcaccaggtgcagaagcggccatggcagatcacacagtgctttttctttgaactgtcctagcacgtcaggcaacagaccctgcacctcatctgcctggtgcctcacagcaatctccccacttagaaaatctagaatgagctcgaagggcctttacaaagactcttgtccaactgctttgctttttagagtgccgcaaagaggtaaccaaggcccagggagctgagaagacttatgcggggtcatacgcaatttaaagccataaccagaaggcataaaatgacccagtcagatgtggaggaaacagcctagtagtgaaaaaagaattgaatgaaaggggaaaaaagacataatagtgctttgaaccaaagagctttataaacacttgtggctttaacctgcccaggaggtagataagcatgtgccctttagtttgtcctcaaactcaacctcttgcaagaggttaaggaacacacccaaggttggaattgacactcagacctccagacttcctggctttggagctggaagttcagcctccacctcccttgtctatcaggaaaaacatctgggttataatgcttgaggatgggatatcaaggggaagtggtggaagttcggttcttcaagaaactttgagcaagactgcatgagaccctgctaggggcccctcccattccgagtcatgcctcaaagaagtttctgcacttctatcctggaggctccccttgtatgacctttagagaaatctatttgcctaagacgttggatggaaggaaagagagctgagacttcaaaatgtgtgaacacagacacaccccaaggagctgcctaaagtaacaaagcctttccttcacatggccacttctgcctgttctaacag

SEQ ID NO: 66979 - DNA, 2224 bp, Homo sapiens
ttcccactaactgctttccaattgttctgtgaccttttacctactgaaattgagacaggcacttgttgtgagagacttaagaaattattatatttaattacttagactcttctgtcctagaaggctatgatgtcgtgtaatcccatcgcgagtacaggaaagccaaaagtcagtttctttgttcaaggaattcaaagcaaggtggggaggggggaggcaagaactgctgtccaacttgggcaaaagttacatcctagaattgaatttgaaaccattaacagttcaagacgcgttgctctggttctaaagaggtgaattaacatttggggagtgaacagtgctagaagttgcagcaggtaaattagtcatagatccttctcagaaagacggtatggtttattccctcattacctgtgtgatctatggaccagtgcccttagcaccaagaaacagcttattagaaatctcaggacctaccgcagacctactgaatcaaaatcattttactaggatctccatatacacccatttattttgagagtaggggctttggaatcagatgtatctgggtttaaatctcagcttagccacttactacttactagcaggtagcctcctgtacttgcttcctcatgtctaaaatcagtatgtcgttctacaccttggcttcacatcggaataggctgggagtgctttcaaaaattccaagcccaggccacactacacaccaattacaacagaatctctgygggtaggatccaaacatcaggatttaaaggcctctcaggtgattccaatgtgcactcaaagctgagaaccacgcatggctttgaagaataggagtgtggccattggaaccagacaatctttacttgtatcctgtatctaccacttcttatatatgagactggggcttcttaacctctcgctaaactttaacttccttcatctgtaaaatgaatatgacctgtagtacctcgttcaaaggactctgggcattgaaggaggtgaaacatgtaaagcacttagcacagtgcacaatattattatttatgcaaggcccagcttcctttgcagaaggaacctaggaagcaacatgtgggttgaagtatcatataaacaccaatctgcagccatgctcataccttacccaccagaggggaattccaattacttggccaccaaaacgttagtgggttttgcctcagctattgaaaaaaatgcaaaaaaaagtcttatttttcattagagaatctgaggcaaaagttggttggcaagtaacttttgcagaacacgtgggggttctgctggaagcatccaaaatgcttccggatgtggggtcagcaccaggtgcagaagcggccatggcagatcacacagtgctttttctttgaactgtcctagcacgtcaggcaacagaccctgcacctcatctgcctggtgcctcacagcaatctccccacttagaaaatctagaatgagctcgaagggcctttacaaagactcttgtccaactgctttgctttttagagtgccgcaaagaggtaaccaaggcccagggagctgagaagacttatgcggggtcatacgcaatttaaagccataaccagaaggcataaaatgacccagtcagatgtggaggaaacagcctagtagtgaaaaaagaattgaatgaaaggggaaaaaagacataatagtgctttgaaccaaagagctttataaacacttgtggctttaacctgcccaggaggtagataagcatgtgccctttagtttgtcctcaaactcaacctcttgcaagaggttaaggaacacacccaaggttggaattgacactcagacctccagacttcctggctttggagctggaagttcagcctccacctcccttgtctatcaggaaaaacatctgggttataatgcttgaggatgggatatcaaggggaagtggtggaagttcggttcttcaagaaactttgagcaagactgcatgagaccctgctaggggcccctcccattccgagtcatgcctcaaagaagtttctgcacttctatcctggaggctccccttgtatgacctttagagaaatctatttgcctaagacgttggatggaaggaaagagagctgagacttcaaaatgtgtgaacacagacacaccccaaggagctgcctaaagtaacaaagcctttccttcacatggccacttctgcctgttctaacag

SEQ ID NO: 66980 - DNA, 650 bp, Homo sapiens
tctggggcccatgaatcatccagccatgttcctggacctcctgaatggaaaattccagggcatcttcaaccttagttcctcacacgcttggatgagatcctaagtgtcgctcttgactttgtgctcataattccagcagaacccatggttctcctgggctgtggcagtccagtataatcycaagaaatgaccttggacgaatgtcttgagttctgtagtcctcagtctctttctctgtgaaatggatcatgtaatagttatcaacctcacagtgctgttgtaaggattaggtgaaataatgagtattaacttcctggaataaagcacaagaaaagacttctttttaaaaaatcttttaaagtgcagggaccaaatttctggatcacattctggcccatcaccatctgatgcccaccaagcactggctatcctaagaaagcgagtactctgggccatccagaattttctgggttttgcaaattttccaactccacttccctgttgataaaagttctcaaaaatgggtggagaatcctagaaatcccatctaaggatttatctatgaatgctaaaggacaagagagcaagagtggtgtttattatggtgaaaatggaaaattccatggccaatagcaaaggtatcattaaat

SEQ ID NO: 66981 - DNA, 842 bp, Homo sapiens
catcttctcacttataagtgggagctaaatgatgagaacacatggacacatagrggggaaattaaacaaaatggggcttttcagacgatggaggatggaaagagggaaaggatcaggaaaaataactaatgggtactaggcttaataactgggtgatgaaatagtctgtacaccaaacccccatgacacaagtttacctgtgtaataaacctgcacttgtacccctgaacttaaaataaaaggtttacagaaaagttttctattattattcaaataataagaaatatataaaaataaagtctctagttcacctcaattttattgaattatgaaattttattgaaaaactttaaaatgtaatatgaaaaactggaaaatagataccatatttttggagggaaaggcttaatataaaatgtcaattctcccaacagtaatgtataaatgtaatgaattatattatagtaccattataactcattataatgagttacattataataccatctgattatagaaccatttttaattggatgaaatgataataaagttcatgtaaaagaataatgtctaagaatggccaaaaaaaatttaaagggaaatatcttgccttgccttatagatattaaaatatactataaagccactagaatccaacaacatggtattggcatagaattagtggattcacagaaagctttggaacagaataaagaacccagaaatatgtcctagtatgaaaatttaatacataataaatactttacctcattaagaaaaaaattaataaataatgctagcaaaaagcagctgtttgattgtaagaaaatgaagttggatcc

SEQ ID NO: 66982 - DNA, 1136 bp, Homo sapiens
aggataccacaggcacttctgggagccttgtctcatagattaaatagagttggtgaaatttaactgcctagcatccagtaggaattttatacatgctaggttctttctgctgtctcccaacattattaggaaagtggctttcttaaaaataaccaataaggctagatagaacaatagacctatgcaatcatgaactccctctcgtttttaagagaactttggatgtgttttaatgtaagattaaaaaatgagtattttttcctatccagttacctaatgtgaattaaatcattcagatgagtcttcaaatgcagaacrtggtaatttcttaagggactgagacaaggaggaacgagatgagattctcactcctcaggaggggagaaatggccacagatcccatcaggccattgcttgtagcggcttgcaggacctcccacataacagaagaaaaggaagctgagagacccagtcttgggaatcctagatccagttacagcattgtctcagctaatccatgatgtgaaaagattgcgttttaaaagaagcatattaaaaaagaaaaaaacaaaacaggagggactcttaaataacaagcccttgattgcctaattagcctgaatgccctcactttcattggaattcactgctttgatggtgtggaggtgcaaagaggccagctatcaaagagagatgccacttatctaaacaaaatccaggaacagaattcgagacccttgtctctcagatgaagattgtttgcccagtataagagatttcatcctcgcttttgatagaattatgattcttgggaaatctttacgtggaaaaaactgcctcagaataaacaccaagtgtttcaaaataactacaggaagtccaagccacagcaaaatttaaatctctatttacaaaatgaaggtattcattcccttattcattcagtcaccaaacacttctttttaaaacatttttctttatgtctcatggattagaccctaggcattagtgaattaatgcaagagcatttatctctttgtaagtttccatttagctgtaatggaaaagaagtgtctaaactagatgcagctaatttgaaattcctgtctcctttttttcttctgattaaaaaaaaa

SEQ ID NO: 66983 - DNA, 668 bp, Homo sapiens
ggatcccattaaaggaacatcccgggggatgtcagcaattttcagtcgtgatttatgcactgctctgcttcatccagtaacgccattcctcacccaaattcttcaacttcctgtaccagcctcacagctccttcctctggatctgattgccttgccaatttggcttaagtcacattttcttcacttacttatcaataaattcagtgtgttttcagactgttgtagctgaaatgcatgtgtgtgattggtgagtactcatgatcttcttaaatggaggaccctccagctggcctacaggaccttaacaggcagggccaagaagtgaaatgattaccgcatcctgcttgcctctgtatacacaatacccaccatcctccctgtgcttaggacrgtttgaaaatgcctttgaaaattaaaactgcaatttagtgtgaaaaaatgagcataactctatttctctttaccaatccacagtccttcttgcctgccaggatagaccaatgttgtgtccccagtttttagcacagagcccagatggcacatgttgggatctcagtacatgtttatccttgaatggatgagtttttttttttttttccccacagcctaatcgcttaactttacagaatgctaggccatctacctctttttttttttttaattatact

SEQ ID NO: 66984 - DNA, 1490 bp, Homo sapiens
tattcctctttacctctattgcttttacacctcattatagtttcaaactacccatggataattagtccagaaatggatcactcatcaactttgatcttcttatctccaaaaacagtttcctcctagcacctcagccttcatcctcatggtcatacctcaaaacctttatgcttggcaattgcaatggctcagaaatctgaactgtctcattttaaaagcatacgtcctatatttttgtctcatttccctacttggccaagtcatatagaaattcaacttgatagctctgccagcacaatttcattactatcaccccttatatttttatttgtctcattattcggcttagattctggttcactgtaatacccttgaaattgttctttacrttttttactcacccttcattgcattgacctgaaaaaatgtccgacgctgattctctctaacaatgtacttttcctcgcctatgccagaacagctgaacatggccagtggtattgctattattaacacagatagcagtatatgttagagctatctaaatatgtacttatattaactcactttgtctctacacagaacccaagcactgctaatattttcattttacagctgataaaggagaaacaaaagaacatttaactttccccaaataacgaagattttttttttcaaacatgggatctaaactcatgtggtctgactcgggactctgtcccctcagtttaccattattctgcctctacacaaaattttgggtaatatcactatacaattacccaaagtgtagataaagactcaaactttccagcaatcctacattttcctgatttccatcataactagattttaacttctccttgctctgctacctacaattgccctcacgtctcctactgctagaagaaaaatctttatagatctcaaagaaaatatatattttcaagagctctgacattatcgccttatcacaaatacaattgtacctagtctatgcacataatgcctgccttctttcctattaaaaaatatgtttatgaaagattaaattatccatatctgctcagaatttcatcctgttttttcctatcaaggaatttattctgatctccattctctaagctttaacgctttcaaaaatgagagcccatcttttaattttagctattctagtgggtgtaaagtggtatctcgctgttgtttgagtcaatgtttccctgatgacaaatgatattgagtttattttatgtgcatattggtcattaacatacctttccttgcaaaatatcagtgaattattttgttcattttttattggaagtttgttttgttgtagtttatttagtttttaaagttttcttaaatatattctgcatataggccgtttgatagttatgtgttttgcaaatattctctccaatttgcagcctaacttttcatttcccagcagtgagatgtgaagaacagaaggttttgaatataccatt

SEQ ID NO: 66985 - DNA, 634 bp, Homo sapiens
gagaaaagtgtgttcacctgtgtgggactcagcaaacatttgacctctcggggcctcactttccttctacctgaatcatctcacaggtgactgaawtagattaatgcagcaaatatctatactgatcacctaccttctatcagtgcccctatgccccaaggcatgggtccttcatacaattcttttaaaataaattattacaaattgatatcaaattattatttggagacagggtcttgctctgttgcccatgctggagtgcagtggcatgatcataccttattgcagccttgacctcctgggctcaagcgatccttccacctcagcctcccaggtagctgggactacaggcacatggcaccacgcctggctaattttttggattttttttttagtagagatgaggtcttgctatgttgctcatgctggtctcaagatcctgggttcaagcaatctgctctcacaaagtgctgagattacaggtttgagccaccatgcccagccaattagataaaattattataaaataaattaattttataataaatgacaaccattcaaaataaaccctgaagatcctttacccaattcactaagttacattgtatatgacagattatagtatcaaacggca

SEQ ID NO: 66986 - DNA, 634 bp, Homo sapiens
gagaaaagtgtgttcacctgtgtgggactcagcaaacatttgacctctcggggcctcactttccttctacctgaatcatctcacaggtgactgaaatagattaatgcagcaaatatctatactgatcacctaccttctatcagtgcccctrtgccccaaggcatgggtccttcatacaattcttttaaaataaattattacaaattgatatcaaattattatttggagacagggtcttgctctgttgcccatgctggagtgcagtggcatgatcataccttattgcagccttgacctcctgggctcaagcgatccttccacctcagcctcccaggtagctgggactacaggcacatggcaccacgcctggctaattttttggattttttttttagtagagatgaggtcttgctatgttgctcatgctggtctcaagatcctgggttcaagcaatctgctctcacaaagtgctgagattacaggtttgagccaccatgcccagccaattagataaaattattataaaataaattaattttataataaatgacaaccattcaaaataaaccctgaagatcctttacccaattcactaagttacattgtatatgacagattatagtatcaaacggca

SEQ ID NO: 66987 - DNA, 618 bp, Homo sapiens
ggaagtagaaatgctaaaaagctctgtgactgcctcctgctgtattcaattagccttccagaggatgccagaaggaaggctcaattaccagagcggctccaggacttaagagaaggctggagggcaaaccaaaggggctgccatcttgcagacctggtgtgagaccaaggcggggcagctgtgtgattggattatacacgggaaccttactttagtttctattgcatggccagagctatgcatgccaccttttgcatggagtcttgaaaagtcacctaattttaataaagcagaaggggaaagcgataagaagagggagagtgcatctctctgaaatgcctaagcatcggccttgcgggaaccggcctcatcgaggagcagggccaccaccgttggagcatcggaggagcatcggaggagccctagctctggcctcttggctggacgtcactgtttcaggccgagcagataaaagcagaaggcattgaccgtgagccaagagctcagtgttttcagaaaatggacyggacgggaggaaagagtgtgagtgtgctttgagagcaataaacaaactattggctgccggccagggaggagtgtgctgacatcttcaagcgg

SEQ ID NO: 66988 - DNA, 581 bp, Homo sapiens
taactacttatacacagaactgttaagaagttgctctggcctagggccactgtaaaaaaattactgaaacaatgatagagacttgaaccaagaaagcgaggaagtctctgtgctgtagttatcggctctcaggaaagaaaaaccctcctggcttggcagctggcccaggaggggcgtgggcaggaggaggtccccaggctgctggatagttcttcctgctgttggagcctcatccacagacacaggcctgtagttagccaggcagggaggaggctgagcaggaaacagatgtgcctggctgcaaaggaaacccacaagcaatcaaccccatcttcattcataaaaaagaaccaaatcaagtgccacccaatacaggaggcaaataccagsgtggaggataatgtgaacaaataaaacagctcacctgagaggaaatagaagtaataataataataaaaatccaacttgatactgagagattagagaggaaattgcacccataaaattagaattagctacaattaggaggaggaggaggtagggagggtaaggaacagggaataagaagataacagcactta

SEQ ID NO: 66989 - DNA, 972 bp, Homo sapiens
aattcattacataagaattctgaaatagattggattaaaacttatgggttacatgtttacaaatgataaaatagtcaatttggtggttctgattaattttctattagactaggaaaatactaagtttgtatagagtcacttttatgtgtccaaagacactgtaaaacttgaatgggtaaaggygaagccttggaaactctgtccagttttcttatgtcatatatgatatctatatacacaaggtttataaaatattccttgcttactgtgtttttactgaaatttggaatatttgatcaaatattttgacccacgatatattttttaaagataactgatcacacgcattgcaccctgtaaatgctgggtttttttctttttttttttttgagacggagtctcactctatcactcagtctggagtgcagtggtgtgatctcggctcactgcaacgtccacctcccgggttcaagcgattctcctgcctccgcctcctgagtagctgggactagaggtgcatgccaccatgccctgctaattttttgtatttttagtagagatgggatttcaccgtgttagccaggctggtctcgatctcctgaccccgtgatcttcccgcctcagcctctcaaagtgctgggattgcaggcataagccactgcgcccggcctaatgctggatcttttaatattcattttaaagagtatcaggttttccagcaacaaatatttggggctggtgtgtgtgtgtgtgtgtgtgtgtgtgtgtgtgtgtgtgtgtgtgtttccataatatctcatccagttttgctccaggaggctggatatgatatttttctccataactgaaattcaaggattaatgatgtgttctttgttcatgttgaaactttataacttaagcatagtctactgctactttatccctatacagttagtacaaatacttgagtcagttattacggtgtggtat

SEQ ID NO: 66990 - DNA, 666 bp, Homo sapiens
tagaatccagaatttgggagtctccactgtagaccaaatgctctggagtacgtgaaatttgtctatcagcaaatcaacagactagttaacctttctccaggcagtgtctcccctccagccctcaggcattttgcctaaatcccatttctttttctctgccggctgtctgctaatccctcggaaagtgttagctgataacttaaggtgtgaccactctcaggagtattgcatttcaaaagaggcctccaagatagaaaatacttcacttaaaggagctagacaaggaaggaaggttgttattttttaacctgcttgtaagttgagttccaggccatttaactcagtctttagcgagatcctctgtgagcttccccactgcatgaatttccctccaattctgagagccagtgactctggacggcacttcctcacttgaaagcatcacatcacaatcatttmggcctaaaacttattactcatctgtgttagctagagattgtagctgcgtaaatgtggcttatttcatccagaacagaaacattaaaacgattcgactcctgcaggacatcttaatagtgtgtgaaaggaagaattcatatttccagaactctgtacctgttacagctcaggcggtctatgctttcataaacatagtgacatatttta

SEQ ID NO: 66991 - DNA, 666 bp, Homo sapiens
tagaatccagaatttgggagtctccactgtagaccaaatgctctggagtacgtgaaatttgtctatcagcaaatcaacagactagttaacctttctccaggcagtgtctcccctccagccctcaggcattttgcctaaatcccatttctttttctctgccggctgtctgctaatccctcggaaagtgttagctgataacttaaggtgtgaccactctcaggagtattgcatttcaaaagaggcctccaagatagaaaatacttcacttaaaggagctagacaaggaaggaaggttgttattttttaacctgcttgtaagttgagttccaggccatttaactcagtctttagcgagatcctctgtgagcttccccactgcatgaatttccctccaattctgagagccagtgactctggacggcacttcctcacttgaaagcatcacatcacaatcatttcggcctaaaacttattactcatctgtgttagctagagattgtagctgcgtaaatgtggcttatttcatccagaacagaaacattaaaackattcgactcctgcaggacatcttaatagtgtgtgaaaggaagaattcatatttccagaactctgtacctgttacagctcaggcggtctatgctttcataaacatagtgacatatttta

SEQ ID NO: 66992 - DNA, 666 bp, Homo sapiens
tagaatccagaatttgggagtctccactgtagaccaaatgctctggagtacgtgaaatttgtctatcagcaaatcaacagactagttaacctttctccaggcagtgtctcccctccagccctcaggcattttgcctaaatcccatttctttttctctgccggctgtctgctaatccctcggaaagtgttagctgataacttaaggtgtgaccactctcaggagtattgcatttcaaaagaggcctccaagatagaaaatacttcacttaaaggagctagacaaggaaggaaggttgttattttttaacctgcttgtaagttgagttccaggccatttaactcagtctttagcgagatcctctgtgagcttccccactgcatgaatttccctccaattctgagagccagtgactctggacggcacttcctcacttgaaagcatcacatcacaatcatttcggcctaaaacttattactcatctgtgttagctagagattgtagctgcgtaaatgtggcttatttcatccagaacagaaacattaaaacgattcgactcctgcaggacatcttaatagtgtgtgaaagraagaattcatatttccagaactctgtacctgttacagctcaggcggtctatgctttcataaacatagtgacatatttta

SEQ ID NO: 66993 - DNA, 664 bp, Homo sapiens
tgttcacgagggaggagcccgcatcactcagcctcctctcagaaggccccacctgttaacatcacacggggcttaggtttcactgtacgtatttgagaggcacctacattcagactatagcacaggccagccccccactgcttcccatactgccagaggctggggcagctccccggccaccatgttccgccagcaggatggctcctgtcagccaggtgtgcgggacctgggcacactggcaagaagcagggagggcagcccagacccagccgccccatggctgctccgggagactgtgtccctgttggagactgtgatagatccacgatccgtcccagccattgctccatctgtcttgtccatcaacccctctgccagtatcatatggtaaatagtaccatgaatactacagttccaggcacccaggtcacatcagagaactgacgagttagagtttaacgacacagtttgtagctgggggggctgcttcagagctgatgactgggtggcattgctgcctggagctggtgactgggtggcattgctgtctggagctggtgactgggtgrcattgctgtctggagctgatgactgggtggcattgctgcctggagctggtgactgggtggcattgctgcctggagctggtgactagggtggcatt

SEQ ID NO: 66994 - DNA, 664 bp, Homo sapiens
tgttcacgagggaggagcccgcatcactcagcctcctctcagaaggccccacctgttaacatcacacggggcttaggtttcactgtacgtatttgagaggcacctacattcagactatagcacaggccagccccccactgcttcccatactgccagaggctggggcagctccccggccaccatgttccgccagcaggatggctcctgtcagccaggtgtgcgggacctgggcacactggcaagaagcagggagggcagcccagacccagccgccccatggctgctccgggagactgtgtccctgttggagactgtgatagatccacgatccgtcccagccattgctccatctgtcttgtccatcaacccctctgccagtatcatatggtaaatagtaccatgaatactacagttccaggcacccaggtcacatcagagaactgacgagttagagtttaacgacacagtttgtagctgggggggctgcttcagagctgatgactgggtggcattgctgcctggagctggtgactgggtggcattgctgtctggagctggtgactgggtggcattgctgtctggagctgrtgactgggtggcattgctgcctggagctggtgactgggtggcattgctgcctggagctggtgactagggtggcatt

SEQ ID NO: 66995 - DNA, 664 bp, Homo sapiens
tgttcacgagggaggagcccgcatcactcagcctcctctcagaaggccccacctgttaacatcacacggggcttaggtttcactgtacgtatttgagaggcacctacattcagactatagcacaggccagccccccactgcttcccatactgccagaggctggggcagctccccggccaccatgttccgccagcaggatggctcctgtcagccaggtgtgcgggacctgggcacactggcaagaagcagggagggcagcccagacccagccgccccatggctgctccgggagactgtgtccctgttggagactgtgatagatccacgatccgtcccagccattgctccatctgtcttgtccatcaacccctctgccagtatcatatggtaaatagtaccatgaatactacagttccaggcacccaggtcacatcagagaactgacgagttagagtttaacgacacagtttgtagctgggggggctgcttcagagctgatgactgggtggcattgctgcctggagctggtgactgggtggcattgctgtctggagctggtgactgggtggcattgctgtctggagctgatgactgggtggcattgctgyctggagctggtgactgggtggcattgctgcctggagctggtgactagggtggcatt

SEQ ID NO: 66996 - DNA, 664 bp, Homo sapiens
tgttcacgagggaggagcccgcatcactcagcctcctctcagaaggccccacctgttaacatcacacggggcttaggtttcactgtacgtatttgagaggcacctacattcagactatagcacaggccagccccccactgcttcccatactgccagaggctggggcagctccccggccaccatgttccgccagcaggatggctcctgtcagccaggtgtgcgggacctgggcacactggcaagaagcagggagggcagcccagacccagccgccccatggctgctccgggagactgtgtccctgttggagactgtgatagatccacgatccgtcccagccattgctccatctgtcttgtccatcaacccctctgccagtatcatatggtaaatagtaccatgaatactacagttccaggcacccaggtcacatcagagaactgacgagttagagtttaacgacacagtttgtagctgggggggctgcttcagagctgatgactgggtggcattgctgcctggagctggtgactgggtggcattgctgtctggagctggtgactgggtggcattgctgtctggagctgatgactgggtggcattgctgcctggagctggtgactgggtggcattgctgcctggagctgrtgactagggtggcatt

SEQ ID NO: 66997 - DNA, 610 bp, Homo sapiens
gtttccttctcttggcagcagaacaacacaaagttcagaggccctcctctgccagtggtgtgggcaaacccctcaacccattcagggcaaccccatagcagcactgtcttctcccaccaaaagtggattccttttcaccctgctgggtccctgtttctccgtttaaaatttacagaaccctctgttaattgaactagttgccaaagagaagcaaagtgctcgttctggagcaaacgcctcatgggacatggatgttgccagccaggccctggcacctccatcatcttcacagacagcggagcaggagaaagtcctttcccgagaggcaccaagttcacttcatgttcccaaggacgactgctcagagagtggccacatggagccagaataagaaaatgtggaaagtcttttgtatgacttgaaagagaaactgtcacccaaactggaaaagttaaaaataagaaggataaaggatgatagaaagaaaaaagagagaggagaggagaggaaggaaggaagggagggagggagagagggaaagagaagaaagaaagaaagagagagagagagaaagaaaaagaaagaaagaaagaaagaaaraaagaaagaa

SEQ ID NO: 66998 - DNA, 805 bp, Homo sapiens
gatcctcagttgctcccagctcacaatgcaccctcgtgctgcttccagtgggcctgggaatcatcacctccaggaagatttctagcagctgctgatgttttctaagctcgccgtcccatccacctgtcactgaaggccttgtttccttgctacccttgccattctttcctgtccccctcattcttaatcctgctgcccactgatttgacatctgaaagcgttttaagatgtttatctcctgagactcagcagtctrccttgtttccccgtgaggctccgatcgctgggccaggtcctccagctcctcctgagtgtctgggagggacgaagtcaatggaagttaggaggtgaagtgtgctccagagatgaggctgaaaaaaatttctgaaataacttttgttatcctttggctgaaaataatgaatgttttgggggttaagcaacaagattgaggtctcctttcaaaaagcaagtcgtcctcgtgctgtgatcatgagcgtctggcgggcgcatagccccaaggacgagagcggccgggggtgctgggcttccaggccttcaagagctccttgttcttcaaatgctgcagcttcgattaaaagtcaaagttgtcgctattcactgcctttgtggggtcagaatgcgaaaactttgatggctttattaagctagcagcttttcagtggcagagtgagaaagctgtagagagacttcctgctttatcaaagggattatttatttatttatcccagaacacacgtgtgttttccactgcgtgcacagagagctgcctcattgaacacat

SEQ ID NO: 66999 - DNA, 805 bp, Homo sapiens
gatcctcagttgctcccagctcacaatgcaccctcgtgctgcttccagtgggcctgggaatcatcacctccaggaagatttctagcagctgctgatgttttctaagctcgccgtcccatccacctgtcactgaaggccttgtttccttgctacccttgccattctttcctgtccccctcattcttaatcctgctgcccactgatttgacatctgaaagcgttttaagatgtttatctcctgagactcagcagtctaccttgtttccccgtgaggctccgatcgctgggccaggtcctccagctcctcctgagtgtctgggagggacgaagtcaatggaagttaggaggtgaagtgtgctccagagatgaggctgaaaaaaatttctgaaataacttttgttatcctttggctgaaaataatgaatgttttgggggttaagcaacaagattgaggtctcctttcaaaaagcaagtcgtcctcgtgctgtgatcatgagcgtctggcgggcgcatagccccaaggaygagagcggccgggggtgctgggcttccaggccttcaagagctccttgttcttcaaatgctgcagcttcgattaaaagtcaaagttgtcgctattcactgcctttgtggggtcagaatgcgaaaactttgatggctttattaagctagcagcttttcagtggcagagtgagaaagctgtagagagacttcctgctttatcaaagggattatttatttatttatcccagaacacacgtgtgttttccactgcgtgcacagagagctgcctcattgaacacat

SEQ ID NO: 67000 - DNA, 805 bp, Homo sapiens
gatcctcagttgctcccagctcacaatgcaccctcgtgctgcttccagtgggcctgggaatcatcacctccaggaagatttctagcagctgctgatgttttctaagctcgccgtcccatccacctgtcactgaaggccttgtttccttgctacccttgccattctttcctgtccccctcattcttaatcctgctgcccactgatttgacatctgaaagcgttttaagatgtttatctcctgagactcagcagtctaccttgtttccccgtgaggctccgatcgctgggccaggtcctccagctcctcctgagtgtctgggagggacgaagtcaatggaagttaggaggtgaagtgtgctccagagatgaggctgaaaaaaatttctgaaataacttttgttatcctttggctgaaaataatgaatgttttgggggttaagcaacaagattgaggtctcctttcaaaaagcaagtcgtcctcgtgctgtgatcatgagcgtctggcgggcgcatagccccaaggacgagagyggccgggggtgctgggcttccaggccttcaagagctccttgttcttcaaatgctgcagcttcgattaaaagtcaaagttgtcgctattcactgcctttgtggggtcagaatgcgaaaactttgatggctttattaagctagcagcttttcagtggcagagtgagaaagctgtagagagacttcctgctttatcaaagggattatttatttatttatcccagaacacacgtgtgttttccactgcgtgcacagagagctgcctcattgaacacat

SEQ ID NO: 67001 - DNA, 805 bp, Homo sapiens
gatcctcagttgctcccagctcacaatgcaccctcgtgctgcttccagtgggcctgggaatcatcacctccaggaagatttctagcagctgctgatgttttctaagctcgccgtcccatccacctgtcactgaaggccttgtttccttgctacccttgccattctttcctgtccccctcattcttaatcctgctgcccactgatttgacatctgaaagcgttttaagatgtttatctcctgagactcagcagtctaccttgtttccccgtgaggctccgatcgctgggccaggtcctccagctcctcctgagtgtctgggagggacgaagtcaatggaagttaggaggtgaagtgtgctccagagatgaggctgaaaaaaatttctgaaataacttttgttatcctttggctgaaaataatgaatgttttgggggttaagcaacaagattgaggtctcctttcaaaaagcaagtcgtcctcgtgctgtgatcatgagcgtctggcgggcgcatagccccaaggacgagagcggccgggggtgctgggcytccaggccttcaagagctccttgttcttcaaatgctgcagcttcgattaaaagtcaaagttgtcgctattcactgcctttgtggggtcagaatgcgaaaactttgatggctttattaagctagcagcttttcagtggcagagtgagaaagctgtagagagacttcctgctttatcaaagggattatttatttatttatcccagaacacacgtgtgttttccactgcgtgcacagagagctgcctcattgaacacat

SEQ ID NO: 67002 - DNA, 1185 bp, Homo sapiens
atgtttatcttttccagaagcacttttatacgcatctctccctagtagtgtttgctctttcagaggctggttttgttcctaagcaattaagatgcttccctgtgttttggaataaatagtagtatctaaatattttgctcttctgtttatttcctataacagatatttacacatctccctcccatgttagattctggacttcttgaacctagaaccatgtctctctttatgccccataatgctttgmacatggtaggtgctcaatacacttttattaaataagtgcaagaattaacatactcaaatgaaatgctgttttgaaaagtatatcatctctgtcttaggtaagggcaattcctcaaattgattttttaatcatttcatattcatgtggtaaaaattgtcgtaaactagcacatctgtgaatgcaatgttgatttgtatacaggaagcccttaggctaattttaatcttctgctgtctttcatgaacataatactaagaaatggtttctgtcccaaacccttcataggcaccatgctgggaatcacaaagcatgctgggaatacttgtcaaggagaagtgggaagctaagagtgatgccaggcaggggtcaggggacaaatcaagaccatagagtggggagagaggaacctaggcagagctaatcgccgagactaaatcaacaagcctagggaagtgcagcaagccagaaaccctctggtctagcgtgatttggaaaggcagagcaagttcctgcaatgctcaagttatcaggcaaaaaggaggagcctccatctcctgtaggcaagtagcccgcagtgattccctctggaggggtctacagagtgggctttttccagttcatcactacaggtgttgcctttcatgggtcctggcttcacgcaggtaactctgacctgaacacctggtgcatttcacttttcccatcccccacaggttctgtgctggggcactgtgagaatttctagccgctattgaggtttgggcacacaattcacactacctctgtgtgtgtgtacctaaagaacctaagcatcaaattgagtttaaaccagtgttggatgggtgatgtacccagacatcttgcagaattgagaaaatgtgggacattagggaactttgagggctaatgaacctgtttatgtcttcattatggaggag

SEQ ID NO: 67003 - DNA, 1185 bp, Homo sapiens
atgtttatcttttccagaagcacttttatacgcatctctccctagtagtgtttgctctttcagaggctggttttgttcctaagcaattaagatgcttccctgtgttttggaataaatagtagtatctaaatattttgctcttctgtttatttcctataacagatatttacacatctccctcccatgttagattctggacttcttgaacctagaaccatgtctctctttatgccccataatgctttgcacatggtaggtgctcaatacacttttattaaataagtgcaagaattaacatactcaaatgaaatgctgttttgaaaagtatatcatctctgtcttaggtaagggcaattcctcaaattgattttttaatcatttcatattcatgtggtaaaaattgtcgtaaactagcacatctgtgaatgcaatgttgatttgtatacaggaagcccttaggctaattttaatcttctgctgtctttcatgaacataatactaagaaatggtttctgtcccaaaccsttcataggcaccatgctgggaatcacaaagcatgctgggaatacttgtcaaggagaagtgggaagctaagagtgatgccaggcaggggtcaggggacaaatcaagaccatagagtggggagagaggaacctaggcagagctaatcgccgagactaaatcaacaagcctagggaagtgcagcaagccagaaaccctctggtctagcgtgatttggaaaggcagagcaagttcctgcaatgctcaagttatcaggcaaaaaggaggagcctccatctcctgtaggcaagtagcccgcagtgattccctctggaggggtctacagagtgggctttttccagttcatcactacaggtgttgcctttcatgggtcctggcttcacgcaggtaactctgacctgaacacctggtgcatttcacttttcccatcccccacaggttctgtgctggggcactgtgagaatttctagccgctattgaggtttgggcacacaattcacactacctctgtgtgtgtgtacctaaagaacctaagcatcaaattgagtttaaaccagtgttggatgggtgatgtacccagacatcttgcagaattgagaaaatgtgggacattagggaactttgagggctaatgaacctgtttatgtcttcattatggaggag

SEQ ID NO: 67004 - DNA, 1185 bp, Homo sapiens
atgtttatcttttccagaagcacttttatacgcatctctccctagtagtgtttgctctttcagaggctggttttgttcctaagcaattaagatgcttccctgtgttttggaataaatagtagtatctaaatattttgctcttctgtttatttcctataacagatatttacacatctccctcccatgttagattctggacttcttgaacctagaaccatgtctctctttatgccccataatgctttgcacatggtaggtgctcaatacacttttattaaataagtgcaagaattaacatactcaaatgaaatgctgttttgaaaagtatatcatctctgtcttaggtaagggcaattcctcaaattgattttttaatcatttcatattcatgtggtaaaaattgtcgtaaactagcacatctgtgaatgcaatgttgatttgtatacaggaagcccttaggctaattttaatcttctgctgtctttcatgaacataatactaagaaatggtttctgtcccaaacccttcataggcaccatgctgggaatcacaaagcatgctgggaatacttgtcaaggagaagtgggaagctaagagtgatgccaggcaggggtcaggggacaaatcaagaccatagagtggggagagaggaacctaggcagagctaatcrccgagactaaatcaacaagcctagggaagtgcagcaagccagaaaccctctggtctagcgtgatttggaaaggcagagcaagttcctgcaatgctcaagttatcaggcaaaaaggaggagcctccatctcctgtaggcaagtagcccgcagtgattccctctggaggggtctacagagtgggctttttccagttcatcactacaggtgttgcctttcatgggtcctggcttcacgcaggtaactctgacctgaacacctggtgcatttcacttttcccatcccccacaggttctgtgctggggcactgtgagaatttctagccgctattgaggtttgggcacacaattcacactacctctgtgtgtgtgtacctaaagaacctaagcatcaaattgagtttaaaccagtgttggatgggtgatgtacccagacatcttgcagaattgagaaaatgtgggacattagggaactttgagggctaatgaacctgtttatgtcttcattatggaggag

SEQ ID NO: 67005 - DNA, 1185 bp, Homo sapiens
atgtttatcttttccagaagcacttttatacgcatctctccctagtagtgtttgctctttcagaggctggttttgttcctaagcaattaagatgcttccctgtgttttggaataaatagtagtatctaaatattttgctcttctgtttatttcctataacagatatttacacatctccctcccatgttagattctggacttcttgaacctagaaccatgtctctctttatgccccataatgctttgcacatggtaggtgctcaatacacttttattaaataagtgcaagaattaacatactcaaatgaaatgctgttttgaaaagtatatcatctctgtcttaggtaagggcaattcctcaaattgattttttaatcatttcatattcatgtggtaaaaattgtcgtaaactagcacatctgtgaatgcaatgttgatttgtatacaggaagcccttaggctaattttaatcttctgctgtctttcatgaacataatactaagaaatggtttctgtcccaaacccttcataggcaccatgctgggaatcacaaagcatgctgggaatacttgtcaaggagaagtgggaagctaagagtgatgccaggcaggggtcaggggacaaatcaagaccatagagtggggagagaggaacctaggcagagctaatcgccgagactaaatcaacaagcctagggaagtgcagcaagccaraaaccctctggtctagcgtgatttggaaaggcagagcaagttcctgcaatgctcaagttatcaggcaaaaaggaggagcctccatctcctgtaggcaagtagcccgcagtgattccctctggaggggtctacagagtgggctttttccagttcatcactacaggtgttgcctttcatgggtcctggcttcacgcaggtaactctgacctgaacacctggtgcatttcacttttcccatcccccacaggttctgtgctggggcactgtgagaatttctagccgctattgaggtttgggcacacaattcacactacctctgtgtgtgtgtacctaaagaacctaagcatcaaattgagtttaaaccagtgttggatgggtgatgtacccagacatcttgcagaattgagaaaatgtgggacattagggaactttgagggctaatgaacctgtttatgtcttcattatggaggag

SEQ ID NO: 67006 - DNA, 859 bp, Homo sapiens
cctgtgagtaataaaaaatgattttcacttgggacattataaaagaaatcttcgtgaaaagaacattttagaattctgtaaattatctgggctgtgctccaagtattaaaattttaaagaagaatccaccactcccagaccccctcccccaccaaattttccaccattaagggaccaaaaaagtggcgaaccaagctcttcttggttatttatgaagtcaaccttgaatactaaccattttctttttccttcatgaattattgcccrtgacttacaaaggaatagaagcccaatctcagtttaacagaaacatgaaccagacaaaagccatgtttgagtgttatctaatgaaaatactaaaacactagcatggagtggaatgtaagcccttaaaatctgcactagcggactgggaattaaagagatggaaaggatactaaccacttgagaaaacaacaagaagaggactgttctattttttgcattaatatcaaagaaagtggagtgatttaaagaactctgaaattgaggataattaaagctggcatgataaaaaggaggaaggcacagaatcaaaaactaaatgtttatatacaatacaatgcagcttgatgctgtctctctgaaagtagaaaagaagcctgccgccatcaatcaatatagcaatatatcaaaacaagtatcaatataatgatcctttatgaaacctcggcagttattatccatcaagaacatggaattggtagtcagaggactggagtcctctccctgtctctggtgactatttgtagctcctgcactgccggcccttggtgtggcttctcagattgcgtacttggaacatctgggtgttaataac

SEQ ID NO: 67007 - DNA, 859 bp, Homo sapiens
cctgtgagtaataaaaaatgattttcacttgggacattataaaagaaatcttcgtgaaaagaacattttagaattctgtaaattatctgggctgtgctccaagtattaaaattttaaagaagaatccaccactcccagaccccctcccccaccaaattttccaccattaagggaccaaaaaagtggcgaaccaagctcttcttggttatttatgaagtcaaccttgaatactaaccattttctttttccttcatgaattattgcccgtgacttacaaaggaatagaagcccaatctcagtttaacagaaacatgaaycagacaaaagccatgtttgagtgttatctaatgaaaatactaaaacactagcatggagtggaatgtaagcccttaaaatctgcactagcggactgggaattaaagagatggaaaggatactaaccacttgagaaaacaacaagaagaggactgttctattttttgcattaatatcaaagaaagtggagtgatttaaagaactctgaaattgaggataattaaagctggcatgataaaaaggaggaaggcacagaatcaaaaactaaatgtttatatacaatacaatgcagcttgatgctgtctctctgaaagtagaaaagaagcctgccgccatcaatcaatatagcaatatatcaaaacaagtatcaatataatgatcctttatgaaacctcggcagttattatccatcaagaacatggaattggtagtcagaggactggagtcctctccctgtctctggtgactatttgtagctcctgcactgccggcccttggtgtggcttctcagattgcgtacttggaacatctgggtgttaataac

SEQ ID NO: 67008 - DNA, 1283 bp, Homo sapiens
tgcatttttagtttctgaagtatgtaattttttttttagatttgtacttagctattcttactaaatttcggaaagttcctgctttatggacatgaatcagtgactctaaatggttctttgaggtataaaaacaaagatagtaacaaatacaaatttcacaatctgaactagaaaacattactagtgaccacaactcaaatactaatataaaaagcatctttattaacctggggtaaaagcttctctgcgtggggcaattttacccaggcaactgaacaggcggtgcgggatgaatgtttgaaaattggaactaacttggacgcactcatccccattttccatgcctgctgtgcactcctgccagatgggaacatgatgtcatattttcagtcagttttcaaacaaaatggggataatctaatattttctggaataaccatagaataatgttttccaatgtgaacttggtgaattttatgaatgaaagagaagcagatattggatccacacagccatcattgaaggtggtacacctaacatcaaaaacttctgtgcrggaccgggcacggtggttcacgcctgtaatcccagcactttgggaggctgaggcggttggatcaccttgagcccaggagttggagaccagcctgggcaacatcaaaaccctgtctctattaaaaaaagaaaaaaagtttcatgccgctgttacggactaggaatgtctaaaatccatcacaaagttagtattttgcttggaggggcaagtagaatgagcttttgaaaagtttctttaacaattctttgatctagtaattcctgaaaacctttgaggctggtgaaaatactttttcatgtagggatgaatcattctgtgagtcctggcgtaagtcagccagaaactcatgatgggagcttttgatgaggggatatgaggtttaaaaatggaaatcaaaactttcttcacgacactgataattcctataaaggccatttctgtgtgggatgacatgtacaattaacataaatgaccctgcttccaagctcactgaattttttcgccagtgccctcagacctccgtctttgctcctaactcagattgtcttgagtcttctgtagagagaaaaggggatcattgcagagactgtgaaccaaggcattaatcttcacttctgaagtccaaaagcatcttttggtctgaggtagaaaaagtttgaaagggaattgagcaggctaaaggtgttttaatttttctgctatctcgcagactaggaaccctcagcag

SEQ ID NO: 67009 - DNA, 1283 bp, Homo sapiens
tgcatttttagtttctgaagtatgtaattttttttttagatttgtacttagctattcttactaaatttcggaaagttcctgctttatggacatgaatcagtgactctaaatggttctttgaggtataaaaacaaagatagtaacaaatacaaatttcacaatctgaactagaaaacattactagtgaccacaactcaaatactaatataaaaagcatctttattaacctggggtaaaagcttctctgcgtggggcaattttacccaggcaactgaacaggcggtgcgggatgaatgtttgaaaattggaactaacttggacgcactcatccccattttccatgcctgctgtgcactcctgccagatgggaacatgatgtcatattttcagtcagttttcaaacaaaatggggataatctaatattttctggaataaccatagaataatgttttccaatgtgaacttggtgaattttatgaatgaaagagaagcagatattggatccacacagccatcattgaaggtggtacacctaacatcaaaaacttctgtgcaggaccgggcasggtggttcacgcctgtaatcccagcactttgggaggctgaggcggttggatcaccttgagcccaggagttggagaccagcctgggcaacatcaaaaccctgtctctattaaaaaaagaaaaaaagtttcatgccgctgttacggactaggaatgtctaaaatccatcacaaagttagtattttgcttggaggggcaagtagaatgagcttttgaaaagtttctttaacaattctttgatctagtaattcctgaaaacctttgaggctggtgaaaatactttttcatgtagggatgaatcattctgtgagtcctggcgtaagtcagccagaaactcatgatgggagcttttgatgaggggatatgaggtttaaaaatggaaatcaaaactttcttcacgacactgataattcctataaaggccatttctgtgtgggatgacatgtacaattaacataaatgaccctgcttccaagctcactgaattttttcgccagtgccctcagacctccgtctttgctcctaactcagattgtcttgagtcttctgtagagagaaaaggggatcattgcagagactgtgaaccaaggcattaatcttcacttctgaagtccaaaagcatcttttggtctgaggtagaaaaagtttgaaagggaattgagcaggctaaaggtgttttaatttttctgctatctcgcagactaggaaccctcagcag

SEQ ID NO: 67010 - DNA, 604 bp, Homo sapiens
tggcgtattattttagccgctccgtgctgaaacgtgaaataaattatctgggcattttccaaataggaataatgggctggtcagagctacttctcttcattctcctgcctactcactctaggggatttatgaagttcagaggcctcgttgtgaataaggaacacttgaaagtgagcaaagggggttaaaagggccagaaagtctaccgggaatatatacatgtctcggggacgtccctgacagcctctgggttcactacagcctcttctgagaatcagaatgtctgttcttttaagacacagtcaggtccaacagcatagcctagagaactcagattccagagagtgaacatcaatttgtcccagaccccggggtgtcagtaactctgctgctgcttcctcaaattcagacgtgtctgttagggagagaatttccattgctttgaatcagctttttaaaagaacccttgactctgttttccatgatttggggctttctcgttcgcacagggstttgttcctttcctcgtgagtgccacagctggaaccaccgtgtacggagcatttgaccccctcttagctgtcgctgacatttgcaaaaagta

SEQ ID NO: 67011 - DNA, 2045 bp, Homo sapiens
tgcatacattctgttttccatattttttttcacaaactaattttactattaataactttttatttcttgtttcctcatccttttctgaaacatgtatttcacaattgactatgccagttgacgcttatgtgtatcatagtaatttttaaacatgactttaaaaagtccctctctcaaacaagtaattataccccagagagaggagtctaactatgcttagactccaagggttagagaagcgccaactctctgacttcaccaagaggcagtgtgtgagctgagttagacacaaggcagggaagggcagaggacctctcctgggagtgcaaaggtgaatgtcttctggcctgagaacacatgttcacaaatgtctattattgtgctgagcagctgatcagagctggggttagggacattgatgcctggaaatcgtagttgagctgcactatacttcagaagtagtcaagagaagagcactttgctggccacagttgtcagcaaaagattcttcaatcagatgtcaccatctgggagtgaaggaaagggtttttatcctgccttccttacggaagtgcatttgattcattgctgccacatcagcagatgagtcagctctcctgggtatctcatggctatgcagatcttcttgttaagtaaacccgttgatgcttcagacacaaatggcagagttaaagtcaccaataaaatgttaagtgagcgttttagaaaattatttgactgtctctatcggatcatggtgtgagcatttggggcaatagagtgtaacaaattattggagaaaaaagtatctatctatatatctatttataaatttcttttcaacataacccatatccatggactctacttcaacttcctagttcacgtgaacataaaccgatatggcatcaatgcagttggtgggcttgtggttcccttttctaacggtatggtgatttccattgtctttccccctgtcattagagaaggaccactcccatttaaatgctggtggacagattcatacatattagcttctggacaccacaataattaagrcaccatctgtctctgtttaaatatggtgcagtttgtacacagaaaaccctggaattatctgttcttctttgaacaaaaagagtgggtagcacacaatcatgccaaaacaaaatgaacaagcattttgggcaaatatgagccgtcctatatccagtgcagtttcaactcatgcccattatatattttaaggtaggggaaaggagcctatttaatgttggatatcttctttttttttttttttaatccatgcataatagatgtacgtagttatggagtacatgtgatattttaatacattcatataatttgtaaagatcaaatcaatgtacttcagatattcatcattgcaaacatttttctttatgctagaaccattagaattattctggctattgtgaaacatacaaaacagattattataaactatagttaccctactaatgctggaatatctttaacttagggtactggctaaagtggaaacagtgaggtgctaacacaagaacagaggtatcaggagaaaagcttctacatctcgttgtatttctagccttggctctcaagccagtactaagataaaaaaaattcggtagatgttacatcaagcacgattttcaacataaaaggaatttaagggataattgtcattctctttaccacagatgcaagcagacattgacacatgcacagacatgtatacatttcacaggaactttggaacacgaagaccagaatgaggactgaagagataaaatgagaatttcctagattcagcacattcttatgtagaggatttctagccaaattctgcagctccgaaagggtcagaatgtttggagaagatcccaataaacacgtcaacgtgaggtcttttattctgttcattacctccaaacctcccaacgctcacaggtcccctccatcactaatcagaacaaggattgctttttgtcccacaatcttcccattacaagctaaccaattaa

SEQ ID NO: 67012 - DNA, 2045 bp, Homo sapiens
tgcatacattctgttttccatattttttttcacaaactaattttactattaataactttttatttcttgtttcctcatccttttctgaaacatgtatttcacaattgactatgccagttgacgcttatgtgtatcatagtaatttttaaacatgactttaaaaagtccctctctcaaacaagtaattataccccagagagaggagtctaactatgcttagactccaagggttagagaagcgccaactctctgacttcaccaagaggcagtgtgtgagctgagttagacacaaggcagggaagggcagaggacctctcctgggagtgcaaaggtgaatgtcttctggcctgagaacacatgttcacaaatgtctattattgtgctgagcagctgatcagagctggggttagggacattgatgcctggaaatcgtagttgagctgcactatacttcagaagtagtcaagagaagagcactttgctggccacagttgtcagcaaaagattcttcaatcagatgtcaccatctgggagtgaaggaaagggtttttatcctgccttccttacggaagtgcatttgattcattgctgccacatcagcagatgagtcagctctcctgggtatctcatggctatgcagatcttcttgttaagtaaacccgttgatgcttcagacacaaatggcagagttaaagtcaccaataaaatgttaagtgagcgttttagaaaattatttgactgtctctatcggatcatggtgtgagcatttggggcaatagagtgtaacaaattattggagaaaaaagtatctatctatatatctatttataaatttcttttcaacataacccatatccatggactctacttcaacttcctagttcacgtgaacataaaccgatatggcatcaatgcagttggtgggcttgtggttcccttttctaacggtatggtgatttccattgtctttccccctgtcattagagaaggaccactcccatttaaatgctggtggacagattcatacatattagcttctggacaccacaataattaagacmccatctgtctctgtttaaatatggtgcagtttgtacacagaaaaccctggaattatctgttcttctttgaacaaaaagagtgggtagcacacaatcatgccaaaacaaaatgaacaagcattttgggcaaatatgagccgtcctatatccagtgcagtttcaactcatgcccattatatattttaaggtaggggaaaggagcctatttaatgttggatatcttctttttttttttttttaatccatgcataatagatgtacgtagttatggagtacatgtgatattttaatacattcatataatttgtaaagatcaaatcaatgtacttcagatattcatcattgcaaacatttttctttatgctagaaccattagaattattctggctattgtgaaacatacaaaacagattattataaactatagttaccctactaatgctggaatatctttaacttagggtactggctaaagtggaaacagtgaggtgctaacacaagaacagaggtatcaggagaaaagcttctacatctcgttgtatttctagccttggctctcaagccagtactaagataaaaaaaattcggtagatgttacatcaagcacgattttcaacataaaaggaatttaagggataattgtcattctctttaccacagatgcaagcagacattgacacatgcacagacatgtatacatttcacaggaactttggaacacgaagaccagaatgaggactgaagagataaaatgagaatttcctagattcagcacattcttatgtagaggatttctagccaaattctgcagctccgaaagggtcagaatgtttggagaagatcccaataaacacgtcaacgtgaggtcttttattctgttcattacctccaaacctcccaacgctcacaggtcccctccatcactaatcagaacaaggattgctttttgtcccacaatcttcccattacaagctaaccaattaa

SEQ ID NO: 67013 - DNA, 674 bp, Homo sapiens
tcctctctgtgtccttgcattgtctgcagtgacctacgcacatctctaaagcaatgttgtcttcctttcttcccctagccctggtgagcccctctgtgccctctggcacctttggccattcgctttaattgtacttcatcttccttatgacttgctctctattgttttgagacccatgtctccaatgtcatctggtatcccttgatgatatattctggaaccaactctgcgtatctggaatgtgygtctctttgtcagaataacctgtgctcatcacctatgctgtcatactaatagcacttggggatatttataggtccttgtaaataccacaatggcttctgctgcatcgcctgattgtttttctgatactaatgtttggatgttggctaattttcttaagcataatgctgataaaatagggctattatagaaaagtcctctccacagagatatctattgactccttcatcctgcatggtttcttcagtctgccttttttttcagacttcctaatctttgaatcacttttgaccttgaatttccttgtgagacatatttgaaacaaatcattattttcatgattatctatgtcaatgtcttaaatttaaatcactgattccattggatgagacttccaatgaaacaaaaataccatgggcatacattaccat

SEQ ID NO: 67014 - DNA, 1137 bp, Homo sapiens
tagatttaatatcattataaattttcattttactacagatttataacaaatcctctgttagctgtgttgcaatagcttgcaataatttttaaaacaaaaatactctacaaaaaagacattgaatgcaaacaaccaagttcttttagatttgtattaattaactcatttatcttatttttcttcaatttgagaatttcaataaataaaataataagtatatgaggcagcaatgtttgttacaaaaagtaaatatatttttattggaaattccttttgtacgagaggcatctgagctaagagactaagatcatttaacccccaaaacttttcatttataactgatatgtagcaatggaggaaacatctcttactagtcatattttatttcttatttctcttttttaaagaaaggaacttcatgagataaaagtaacactatttatttttaagaagcctccataagtgcaataattttaccatcagtataaatagcacaattttcgattcatttccaaatctgaagaaggttcatgtgttttggggaatggacttgatctccagcatgagaaatgcctgtaacattaataaaaagatgtatttcctgaataacttcttgtggcaggatttcctttacaaaaacatctcattcacattaaaaacattaatagcraggaaagctaaactaaattaaactaaaagataaaagcccctttttactgacaccttgtgctagaaaagttgccaaaatgtatgctaatcatgccaatgttgttaggtcagctggcccaaaaataaatgttccattcattaaaacccctaatatccatttaacagtttgtgaaccaatgagttctctttgcccaatttaatgaagaaaagaatgctgtgatctttgcactgccaaattcactcttaccctacagagaaaattgttcattaatttaaattgggaagtttaaaaccaacatagcaatttcagctacagggaaaaaaacaatttacgttatttgactacttagggtagatttcctgaccctattaaaaaaaaaaaaaaaaaaaaaaaagccctcctggcagttaggctttcatcaatggtagttggaaaagaagagaaaaataaattctttttaaacagtt

SEQ ID NO: 67015 - DNA, 1137 bp, Homo sapiens
tagatttaatatcattataaattttcattttactacagatttataacaaatcctctgttagctgtgttgcaatagcttgcaataatttttaaaacaaaaatactctacaaaaaagacattgaatgcaaacaaccaagttcttttagatttgtattaattaactcatttatcttatttttcttcaatttgagaatttcaataaataaaataataagtatatgaggcagcaatgtttgttacaaaaagtaaatatatttttattggaaattccttttgtacgagaggcatctgagctaagagactaagatcatttaacccccaaaacttttcatttataactgatatgtagcaatggaggaaacatctcttactagtcatattttatttcttatttctcttttttaaagaaaggaacttcatgagataaaagtaacactatttatttttaagaagcctccataagtgcaataattttaccatcagtataaatagcacaattttcgattcatttccaaatctgaagaaggttcatgtgttttggggaatggacttgatctccagcatgagaaatgcctgtaacattaataaaaagatgtatttcctgaataacttcttgtggcaggatttcctttacaaaaacatctcattcacattaaaaacattaatagcgaggaaagctaaactaaattaaactaaaagataaaagcccctttttactgacaccttgtgctagaaaagttgccaaaatgtatgctaatcatgccaatgttgttaggtcagctggcccaaaaataaatgttccattcattaaaacccctaatatccatttaacagtttgtgaaccaatgagttctctttgcccaatttaatgaagaaaagawtgctgtgatctttgcactgccaaattcactcttaccctacagagaaaattgttcattaatttaaattgggaagtttaaaaccaacatagcaatttcagctacagggaaaaaaacaatttacgttatttgactacttagggtagatttcctgaccctattaaaaaaaaaaaaaaaaaaaaaaaagccctcctggcagttaggctttcatcaatggtagttggaaaagaagagaaaaataaattctttttaaacagtt

SEQ ID NO: 67016 - DNA, 781 bp, Homo sapiens
aggagtgtgatgtgtggatgtgcatgagaggtaatttataaagattggtgcaaatattaaggcaatattattatagacaatgctttaagagaagatagttttaggtcaacttgattatatatctttcgatgcttttgctttttaacttactctaatttgtcatacagaaataaagatattgaccttcakgtttatttgttttatggaagaaataaagagattatatcactaaatcaaatatttttcttacttaaggaagacctaacgtgcattcagctgcctgttagcttttccttctcaattaactgctattattgaaaagttattattaggcaagcagatgatagctttaaactcatctatgctaaacataaatgcaatctaattacaaatcaatagcatcctacagcaaatatggaagtagtttgtgcatattttagaaaatttggaaaatacatacactcatgatcctcagtggacaaggctcccccggcctctcatgaaaccataaccaaagcatagtgttcttactcagctggaggagggctctcattggtcagacaaattggaaatgaggatcagagtggtccctggaaatgcctgaagaaggggtgacatcagtaatcaaactccacctttttatcatatgagaaatggcttgccatgcctcagctacctgctttgacaagctatttcttacggttccatcagacctgctcaagtttctaaacattaggccttgcttgctctaacatgctataagaaaaaagtatcaaaagaa

SEQ ID NO: 67017 - DNA, 647 bp, Homo sapiens
gtattatatgtgatttccatgtgttctccatgacctcttagcagatggggctgtagattgttaaaaattatgctcaatccccatcatagtctcaagagagggaaatcatccaattagcaggagctcttgtagaaaggcagggatgacatcagtacccaggtggaggggctggctttggacagcaagagtgttgacaagggcagttcatgtatctttctcctmtaatgccatccctgaaccattttcaaggatggtgccactcgccacactttggaaaggagtccttacagcccattccaaggcaaacactcccgtgtttaggcagcaagatatttgctttcatacccctggttagaggtgactacaccagggaagggtgtcggattcaagaagactggtggtagccagttcactcatgacatggtctctcaggactttgaacagaaaaagacagagagagccaggctatgggtcctgggagtagaaacagaaatgtgagcaagaatagagaaagcagtgagcgaactgaaatggtgaataagctgcagttgcaataagtgaaagatttgtcatttgaagtaagtgatttgacgtgacagttatggaagaatcacggattgaaaggaatttagtgaccatgatgggca

SEQ ID NO: 67018 - DNA, 532 bp, Homo sapiens
tatatcaatgctcttattttctcaataataaacagttatataatcacatacttctatatgtgcatataatatgaaatataagtggttatagttttcttaattaaccaaatgacaccatacacaatttggaatacactaaaaataatacttttactttattttgagaaaagttaagcatctttagcactacttaagcacatttgctctgataagttatttgctaaaaaattagattaaaaattagataaagatttgagtgtattgtttcattacagaagttaacttttacctatgtgcttgatatattatatatatgtgtgtgtgtatatacatatatatatatatatatatatakagagagagagagagagagagagagagggagagagagatcctcgttgtaaatgccttttttactttctttcaaatgtttggcattatttttatcaaggcaattttttttaaagagactatactaggtaatatttagatatattaaatctcttgttcaaaatttagcaaatggttcatt

SEQ ID NO: 67019 - DNA, 532 bp, Homo sapiens
tatatcaatgctcttattttctcaataataaacagttatataatcacatacttctatatgtgcatataatatgaaatataagtggttatagttttcttaattaaccaaatgacaccatacacaatttggaatacactaaaaataatacttttactttattttgagaaaagttaagcatctttagcactacttaagcacatttgctctgataagttatttgctaaaaaattagattaaaaattagataaagatttgagtgtattgtttcattacagaagttaacttttacctatgtgcttgatatattatatatatgtgtgtgtgtatatacatatatatatatatatatatatagakagagagagagagagagagagagagggagagagagatcctcgttgtaaatgccttttttactttctttcaaatgtttggcattatttttatcaaggcaattttttttaaagagactatactaggtaatatttagatatattaaatctcttgttcaaaatttagcaaatggttcatt

SEQ ID NO: 67020 - DNA, 532 bp, Homo sapiens
tatatcaatgctcttattttctcaataataaacagttatataatcacatacttctatatgtgcatataatatgaaatataagtggttatagttttcttaattaaccaaatgacaccatacacaatttggaatacactaaaaataatacttttactttattttgagaaaagttaagcatctttagcactacttaagcacatttgctctgataagttatttgctaaaaaattagattaaaaattagataaagatttgagtgtattgtttcattacagaagttaacttttacctatgtgcttgatatattatatatatgtgtgtgtgtatatacatatatatatatatatatatatagagagagagagagagagagagagagagggagagagagatcctcgttgtaaatgycttttttactttctttcaaatgtttggcattatttttatcaaggcaattttttttaaagagactatactaggtaatatttagatatattaaatctcttgttcaaaatttagcaaatggttcatt

SEQ ID NO: 67021 - DNA, 619 bp, Homo sapiens
tttggtttgataatagaagtcacaccagatacctttgatgaaatagtttagcattcaagatcaagccttaaatatttttcaagatcagtcttttaagtgagtactattattccatctggaaaacaaaggttataaaagctatttgagagcatagaaaattgaatacaatcatagaaaattatttttaccctaaagtcaatcattgacaagtgtctcatgaaaaaggaaaattatcatctgaacttatgagagaactaaaataattttttataacttcaaaaaatcaaagtgtattaacagactatacataacgacaatcattttctctttaattcaaggaattttcctattttgagatcttttmaaataaagtcataattattgaaaaaggataacatatgctcattctaatatttcaagtgaaaggaattcataactttgccaaaacttgttcaaaagtctttgtaaataaatataagctgcttttacgcgtacagaacttcttccatagcatttattaacaatggaacatgttaccgtgtttttgatagtgttctcataagtactggaagcagaatgctaactatctagccttatatcttcaattatattaataaac

SEQ ID NO: 67022 - DNA, 619 bp, Homo sapiens
tttggtttgataatagaagtcacaccagatacctttgatgaaatagtttagcattcaagatcaagccttaaatatttttcaagatcagtcttttaagtgagtactattattccatctggaaaacaaaggttataaaagctatttgagagcatagaaaattgaatacaatcatagaaaattatttttaccctaaagtcaatcattgacaagtgtctcatgaaaaaggaaaattatcatctgaacttatgagagaactaaaataattttttataacttcaaaaaatcaaagtgtattaacagactatacataacgacaatcattttctctttaattcaaggaattttcctattttgagatcttttcaaataaagtcataattattgaaaaaggataacatatgctcattctaatatttcaagtgaaaggaattcataactttgccaaaacttgttcaaaagtctttgtaaakaaatataagctgcttttacgcgtacagaacttcttccatagcatttattaacaatggaacatgttaccgtgtttttgatagtgttctcataagtactggaagcagaatgctaactatctagccttatatcttcaattatattaataaac

SEQ ID NO: 67023 - DNA, 688 bp, Homo sapiens
tttctggtaatcccaatcagagaagccaggtagactttcttagaccatttatattttattcccaaatacttcattattctaactcaagcctcatgtttcagagatgcagatataacttgtcacttaaatgttgaaagaaaaaaaaggtgaactttttaattgaaaaaagtttattgaagtttattgtagtttattgaagactactatgtgccagccaccatgttaactgctttttatgtttgtagtgtttacagatgtttaaatatgttgaaagaacttcttccatatgctttttaatcccctttgcaagctacgaagtaggtgttggattaccccattttataagtgtggaaggaagcacaggttcagaaaggttaaataatctacctgcagtcacagagcaagtgctttgcttttcattagtatcaacgactrtggttgagactttcactgacacaaatacctgattccatgatgtagagctagccacccagtgtgaattactggctttaaccatgtccttgaagaatgaagataatgggaaatattctgccacagtatagggacattgcagagtttatataaagatatcaaacaagttttttatttttaaataacattcaggaagaatgcgcttttttttttttgtcagaagaaatgatttggttgtgagttctggtgctttaaa

SEQ ID NO: 67024 - DNA, 1044 bp, Homo sapiens
tatccactgccgtgtgtgtgcatgtgtgcacatgcccctggccttgtgtgtatgaacttgtggggcttgtgcatgtgtatgtgcaagygtccacgtgtgtgcgtgtgtggggtgccccatcctggggaaggtgtatctgcaggatgctcgtgctaggaagctcagggccatcattttccaggcctgctctttccagccaggctcctcatgacccctggaaggagactgatgtccctttatggcatttgcagcctccagccaggctggaacctcccttgttgtcctgcccacatattctgttctccccacactggccttgcctttccagccctgccagtgctgttccctgcccctctgtgtgtttatagggagccaaggcccacactggaagggcacatcctctccagtccccacactgtcccttaaggcagctgtgacctggtcctcccactccctgcattttgcagatgggaaaactgaggttcaggaggcagaatgactggcccaagatctcaagccgttgagctggaatctgagcccaggtttggcaactgcccctcctggcgcttccccttctacacattttcttctacacttccagaaagtcttcctggttttcctcctcacccacactccatgaatcagcctctgctcagaactctgacctgcatcacagcccccgcaggcccgcccatggggatgggagtcttatcctgccccagcccaccaggatccccacttgggtcagtgccttacccgtcgctcaaactcttctccttgctgcacctcccgcgggtagccatcaatcaggaagcctttggaagtattgactttggccaccatggcatcccggagcatgtccaacactgtctcctggggcacagcaaaggaggaaggggccatgagcctctcctccccatcccttctcccagcctctgctcacgctgctcctgccacctgaaatgccctctccccaacacaaatgtcccaaacaagcctccccctccaggaagcttcctcggaattgtggagacctggactgag

SEQ ID NO: 67025 - DNA, 1044 bp, Homo sapiens
tatccactgccgtgtgtgtgcatgtgtgcacatgcccctggccttgtgtgtatgaacttgtggggcttgtgcatgtgtatgtgcaagcgtccacgtgtgtgcgtgtgtggggtgccccatcctggggaaggtgtatctgcaggatgctcgtgctaggaagctcagggccatcattttccaggcctgctctttccagccaggctcctcatgacccctggaaggagactgatgtccctttatggcatttgcagcctccagccaggctggaacctcccttgttgtcctgcccacatattctgttctccccacactggccttgcctttccagccctgccagtgctgttccctgcccctctgtgtgtttatagggagccaaggcccacactggaagggcacatcctctccagtccccacactgtcccttaaggcagctgtgacctggtcctcccactccctgcattttgcagatgggaaaactgaggttcaggaggcagaatgactggcccaagatctcaagccgttgagctggaatctgagcccaggtttggcaactscccctcctggcgcttccccttctacacattttcttctacacttccagaaagtcttcctggttttcctcctcacccacactccatgaatcagcctctgctcagaactctgacctgcatcacagcccccgcaggcccgcccatggggatgggagtcttatcctgccccagcccaccaggatccccacttgggtcagtgccttacccgtcgctcaaactcttctccttgctgcacctcccgcgggtagccatcaatcaggaagcctttggaagtattgactttggccaccatggcatcccggagcatgtccaacactgtctcctggggcacagcaaaggaggaaggggccatgagcctctcctccccatcccttctcccagcctctgctcacgctgctcctgccacctgaaatgccctctccccaacacaaatgtcccaaacaagcctccccctccaggaagcttcctcggaattgtggagacctggactgag

SEQ ID NO: 67026 - DNA, 1044 bp, Homo sapiens
tatccactgccgtgtgtgtgcatgtgtgcacatgcccctggccttgtgtgtatgaacttgtggggcttgtgcatgtgtatgtgcaagcgtccacgtgtgtgcgtgtgtggggtgccccatcctggggaaggtgtatctgcaggatgctcgtgctaggaagctcagggccatcattttccaggcctgctctttccagccaggctcctcatgacccctggaaggagactgatgtccctttatggcatttgcagcctccagccaggctggaacctcccttgttgtcctgcccacatattctgttctccccacactggccttgcctttccagccctgccagtgctgttccctgcccctctgtgtgtttatagggagccaaggcccacactggaagggcacatcctctccagtccccacactgtcccttaaggcagctgtgacctggtcctcccactccctgcattttgcagatgggaaaactgaggttcaggaggcagaatgactggcccaagatctcaagccgttgagctggaatctgagcccaggtttggcaactgcccckcctggcgcttccccttctacacattttcttctacacttccagaaagtcttcctggttttcctcctcacccacactccatgaatcagcctctgctcagaactctgacctgcatcacagcccccgcaggcccgcccatggggatgggagtcttatcctgccccagcccaccaggatccccacttgggtcagtgccttacccgtcgctcaaactcttctccttgctgcacctcccgcgggtagccatcaatcaggaagcctttggaagtattgactttggccaccatggcatcccggagcatgtccaacactgtctcctggggcacagcaaaggaggaaggggccatgagcctctcctccccatcccttctcccagcctctgctcacgctgctcctgccacctgaaatgccctctccccaacacaaatgtcccaaacaagcctccccctccaggaagcttcctcggaattgtggagacctggactgag

SEQ ID NO: 67027 - DNA, 623 bp, Homo sapiens
acacccaatttctctgtgaccccaggagagtcccttcccctctctgagtctcagtctcctcactggcaaaatggagcaagtagaggctcccacctcacaccccagtctagtgttgagctagacaacacctgtcaggtgcttgctggttgtcagctggtgatcatgcctggtgggaccctcgcctgacaattccagtgtgggtaggcgtggggtagggagtgctggggcttcctgtccctctctaggcctctgcttcctcctctgtaggatggattgaggagggagggtgcctctctgggacctgcagaagactgaaggtccttgggaggtagggggcaggctaggctggtgctttccttttttagccrggggagctaaaggtccctcctccctccttcctcttcatccccatgatctcagcagggaacaggacaccaggaaacccctgcagcctcacctcttccccttccttcctcctgctccaggtgcaccctgtctccccggggtgggggagggacactgtctccccagcttaggcctgggatggcctcctctagacactcaggaacagggcccccgaacttgctcactggcatttcccaaatgtcctccccaaactgaat

SEQ ID NO: 67028 - DNA, 888 bp, Homo sapiens
tcttcctaactccaagtgttgcttttcctgagacctgggctctgatttgaggcctcctgtcttacaacagtgtccccttgatcaagtctttccccttcagcttccatctgaaaattgaggggatgggaatggggataccccaaatcccttcagctcagacgctgcctagagttataggcctgacctaggaggcctgggtcctttccctgagccraggagagggtcaggctcctggacacgcaggtgggcacacgagttcatgtttcagccatcagctgcctgggcacactgccagggtattaaatgagataatgagataacacgtgcaaagtgactagcacttgatcgagtgctgctattattatttttactaccactattattcttcaggaagcagaagtgagttcaagtacaagctctttttcttactagctatgtgattggaaagggtctgtcttgggagatgccctatgcacccctgcatcatccagtgagcctggtgtgagtctcatgtcctggaggccaggtgtaaccatttctccatctcagtcccacccccgcccccacctccaccgcttcatattctttgcttcccattccctgtgacgtgaccagaatcaccttgacttgtgggtccaccaagtttgcctccccaggggcattgccttgaggtgggtacaggccaaggggggagcccaggcaaagagggggagtctgaggtctccagatcctccccagtgcctacctggctggctcctagcatctcacaggtggtggctccaatctgttttccgttctttcctatccctcatttcaaatggttgtgcttgacctccagggcatgagctggagccaggacaggagattcacgcccggcatactgggtga

SEQ ID NO: 67029 - DNA, 688 bp, Homo sapiens
aataatcacttgggtgctaatgcgaaggttggattcttagcaggtttttatggtgagcgatgagatcagaaatgatgaggcctaaatagaagaaatggagagggagaaaaataaacacaaatataaaaacatgtaaagtcttcaggtagagtcatgatgacttgatgcagaggtagggaggaggaatgacttccagctttctggctttagcaacaggatggttggagatsccccttcctggggtagggagcccagaaggaggaagaagccagggtaggagcaaaattgggtgaaggaaaaggtgagtccaggtttgaatgagtacaactacagctatacttttttctttagtttacaaagaaaaggagtcggagccagggcggttatgtgggacgtggatgcagacgcaggcggaggcgccaactgcggggatggctagggtgatcacagctgccccgggggcgcggacaccccggcagctccggccagcggagctcccccaccgcacgtgtcaggtcctagcagaaacgcagcgtctgtggccaagggccaggaatgcggccgcacatattcaccctcagcgtgcctttcccgacccccttagaggtggaaattgcccatgggtccctggctccagatgccgaaccccaccaaagggtggttgggaaggatctcacagtgagcggca

SEQ ID NO: 67030 - DNA, 688 bp, Homo sapiens
aataatcacttgggtgctaatgcgaaggttggattcttagcaggtttttatggtgagcgatgagatcagaaatgatgaggcctaaatagaagaaatggagagggagaaaaataaacacaaatataaaaacatgtaaagtcttcaggtagagtcatgatgacttgatgcagaggtagggaggaggaatgacttccagctttctggctttagcaacaggatggttggagatcccccttcctggggtagggagcccagaaggaggaagaagccagggtaggagcaaaattgggtgaargaaaaggtgagtccaggtttgaatgagtacaactacagctatacttttttctttagtttacaaagaaaaggagtcggagccagggcggttatgtgggacgtggatgcagacgcaggcggaggcgccaactgcggggatggctagggtgatcacagctgccccgggggcgcggacaccccggcagctccggccagcggagctcccccaccgcacgtgtcaggtcctagcagaaacgcagcgtctgtggccaagggccaggaatgcggccgcacatattcaccctcagcgtgcctttcccgacccccttagaggtggaaattgcccatgggtccctggctccagatgccgaaccccaccaaagggtggttgggaaggatctcacagtgagcggca

SEQ ID NO: 67031 - DNA, 688 bp, Homo sapiens
aataatcacttgggtgctaatgcgaaggttggattcttagcaggtttttatggtgagcgatgagatcagaaatgatgaggcctaaatagaagaaatggagagggagaaaaataaacacaaatataaaaacatgtaaagtcttcaggtagagtcatgatgacttgatgcagaggtagggaggaggaatgacttccagctttctggctttagcaacaggatggttggagatcccccttcctggggtagggagcccagaaggaggaagaagccagggtaggagcaaaattgggtgaaggaaaaggtgagtccaggtttgaatgagtacaactacagctatacttttttctttagtttacaaagaaarggagtcggagccagggcggttatgtgggacgtggatgcagacgcaggcggaggcgccaactgcggggatggctagggtgatcacagctgccccgggggcgcggacaccccggcagctccggccagcggagctcccccaccgcacgtgtcaggtcctagcagaaacgcagcgtctgtggccaagggccaggaatgcggccgcacatattcaccctcagcgtgcctttcccgacccccttagaggtggaaattgcccatgggtccctggctccagatgccgaaccccaccaaagggtggttgggaaggatctcacagtgagcggca

SEQ ID NO: 67032 - DNA, 688 bp, Homo sapiens
aataatcacttgggtgctaatgcgaaggttggattcttagcaggtttttatggtgagcgatgagatcagaaatgatgaggcctaaatagaagaaatggagagggagaaaaataaacacaaatataaaaacatgtaaagtcttcaggtagagtcatgatgacttgatgcagaggtagggaggaggaatgacttccagctttctggctttagcaacaggatggttggagatcccccttcctggggtagggagcccagaaggaggaagaagccagggtaggagcaaaattgggtgaaggaaaaggtgagtccaggtttgaatgagtacaactacagctatacttttttctttagtttacaaagaaaaggagtcggagccagggcggttatgtgggacgtggatgcagacgcaggyggaggcgccaactgcggggatggctagggtgatcacagctgccccgggggcgcggacaccccggcagctccggccagcggagctcccccaccgcacgtgtcaggtcctagcagaaacgcagcgtctgtggccaagggccaggaatgcggccgcacatattcaccctcagcgtgcctttcccgacccccttagaggtggaaattgcccatgggtccctggctccagatgccgaaccccaccaaagggtggttgggaaggatctcacagtgagcggca

SEQ ID NO: 67033 - DNA, 688 bp, Homo sapiens
aataatcacttgggtgctaatgcgaaggttggattcttagcaggtttttatggtgagcgatgagatcagaaatgatgaggcctaaatagaagaaatggagagggagaaaaataaacacaaatataaaaacatgtaaagtcttcaggtagagtcatgatgacttgatgcagaggtagggaggaggaatgacttccagctttctggctttagcaacaggatggttggagatcccccttcctggggtagggagcccagaaggaggaagaagccagggtaggagcaaaattgggtgaaggaaaaggtgagtccaggtttgaatgagtacaactacagctatacttttttctttagtttacaaagaaaaggagtcggagccagggcggttatgtgggacgtggatgcagacgcaggcggaggcgccaactgcggggatggctagggtgatcacarctgccccgggggcgcggacaccccggcagctccggccagcggagctcccccaccgcacgtgtcaggtcctagcagaaacgcagcgtctgtggccaagggccaggaatgcggccgcacatattcaccctcagcgtgcctttcccgacccccttagaggtggaaattgcccatgggtccctggctccagatgccgaaccccaccaaagggtggttgggaaggatctcacagtgagcggca

SEQ ID NO: 67034 - DNA, 908 bp, Homo sapiens
acgtgctggctgtgtgggctgtgccacctgaggaggattggccagtcataaggactcagcctggttgctgaatccagctggggaccttgaccccagtgactggcttttcagcggctacctgttctcgagacaaatgctgtcctcccctaaggagtctgggctgtggcaaagctatgacataggtacaaccgtccttttgccaggtggggcttaggtggagaagttgaagcctggactcagtcaagatctcaggactgggagcaaggagcctcttactcccagggtgcccacttggttcccactgactgttggtggaaactaggggctgagctggaggctttttagaggaagaaatgacaagctgggggctggattatccctgggggtgaaaatggagtcagctagataggttatgtcttgaaggagaggagggtcccctggtgtcaggaagcagarcctgaactccatgttagaccctggattggagagtgggcaggacacttgggagagacaggacttggtactggcgagggtactaccacacccattctgggagtggactatagagaaataaatcctaaaagtggacctatcttttgacctcacaagtcaacttctaggaattcatcctaagaaaacaaagtcacaccccaagatgtatgtgcgtcagtgttcgccctagtgctgtttgtagccctggaaaatgagaagccaccgtcaacgggggactgtgctaagtaaaatgaagtacatccaaacaatcaagtactatgcaaccattgagaatgatgaagtggatctatatttatcgattggaaagaggcctaaggaaacaaaggaaactacagaatggtctttccatatgaggcagggaaatgtatgaataatttagtgcagaaattactctg

SEQ ID NO: 67035 - DNA, 908 bp, Homo sapiens
acgtgctggctgtgtgggctgtgccacctgaggaggattggccagtcataaggactcagcctggttgctgaatccagctggggaccttgaccccagtgactggcttttcagcggctacctgttctcgagacaaatgctgtcctcccctaaggagtctgggctgtggcaaagctatgacataggtacaaccgtccttttgccaggtggggcttaggtggagaagttgaagcctggactcagtcaagatctcaggactgggagcaaggagcctcttactcccagggtgcccacttggttcccactgactgttggtggaaactaggggctgagctggaggctttttagaggaagaaatgacaagctgggggctggattatccctgggggtgaaaatggagtcagctagataggttatgtcttgaaggagaggagggtcccctggtgtcaggaagcagagcctgaactccatgttagaccctggattggagagtgggcaggacacttgggagagacaggacttggtactggcgagggtactaccacacccattctgggagtggactatagagaaataaatcctaaaagtggacctatcttttgacctcacaagtcaacttctaggaattcatcctaagaaaacaaagtcacaccccaagatgtatgtgcgtcagtgttcgccctagtgctgtttgtagccctggaaaatgagaagccaccgtcaacgggggactgtgctaagtaaaatgaagtacatccaaacaatcaagtactatgcaaccattgagaatgatgaagyggatctatatttatcgattggaaagaggcctaaggaaacaaaggaaactacagaatggtctttccatatgaggcagggaaatgtatgaataatttagtgcagaaattactctg

SEQ ID NO: 67036 - DNA, 624 bp, Homo sapiens
ggatccaaaccacttagagagggatctttttggctgggcatggtggctcacacctgcaatcccagcactttgggaggccgagcaggtggatcacctgaggtcaggagttcaagatcagcctggccaacatggtgaaacccctgtctctactaaaaatacaaaaaaaaaatagctgggcatggtggaaggcacctgtaattccagctactcaggaggctgaggcaggagaatagcttgaacctcggagatggaggttgcaatgagctgaggtcgtgccattgcactccagccggggagacaagagtgaaacttaaagaaagaaaggaagaaagaaagaaagaragaaagagagaaagagaaagaaagaagaaagaaagaaggaaagaaagaaagagagagagaaagggagagagagaaagagaaagaaagaaagaaggaaagaaaaaagaaaaagagagagataaagtaagaaagggaaagaaagagaaataaagaaagaaaggaaggaaaggaaaggaagggtgggctccttttggcttttacccaatcaagaactcctagtgccggcagcgtgtgtgcctggcccctgagtcctccgtgactccagcctgctgagcaggcttc

SEQ ID NO: 67037 - DNA, 1626 bp, Homo sapiens
aaatatgctattttgaattgagtaacactttaaaaataagttgcactttattgagcataagagcactgagagaccctaaatcctagcagcaccctgctcagtccacaccggctaggttggggtgggggacagctttcctggacacactgaaataactctgtggtccctggggcacccacagggtggcgccactgaagtatcccagtaccagagctctacggatggaggatggtaaggcagcgagttgccaagttcacaaaagctattaagtggcataaccaaaattcagctgccatcttcgtggaccccaattctgagctctctctaccaagtcagtgcaccgcagatgatgtaggatggggtagcacagagtccagtgcacattgttcctgagaacttggttacaagctctggggagtaagcaggggcattgctgggtcactgattcctgcttcttgcactcttctcaatcaggaggctgtaggagtgcaattggaacctgagcgcttggtcaagatcctagaggtgcttcgggaactccctgtcccaaactacaggtatgtgacactccatatctgcccagcaacctgagacaactcattcactcgctgcctggagccttaactgggtcctactgctcccaggtcccagccctaatgcctgccctgggcattccctgtgtgatccctgcccccgctttctgcaggaccctggagttcctcatgaggcacttggtacacatggcctcattcagtgcccagaccaacatgcatgctcgcaacctggccatcgtgtgggctcccaacctgctgaggtaggtgcctgtgtgagcagtgtatggggatcctgtgagacactggcctttgggaggctgctcccaggatgaggtgtgactgtgtgggtacactggagaagggtgtagggctcacaaagcccagtgagaaaagaaggttcaagatcatggtgggtcggatgggccccatctattttagtcccttctctgtgatcaaataaagtccctaaaaggcaggacttttgtgttttcctacagtgtgtcactgagctcagggactggaacataacagttccatatcaattttttgtttgtttttgagacagagtcttgctctgttgcccaggctggagagcagcggtgygatctcaactcactgcaaactccgcttcctgggttcaagggattctcgtgcctcagcctcctgagtagctgggattacaggcatgagccaccatgcctggctaatttttgtatttttagtagagagaaggggtttcaccatgttggtcaggctgatcttgaactcctgacctcaggtgatccacccacctcctccctgtgcaagtgctaggattacaggtgtgagccactctgtccggcctcacgccaaatgtttgttgagcaaaacgtcttgcagtctgttggctgtgctcactgtgcatatcactcactgtggtccaagacagactatgagaagtcctgtaattcattataaaattcattataaactagacaccctggtgtgcaaaggaaatagagattaatcctgaggcgggtgtccaagaaggcttccttcctagaagtcttcaagtggcatttgagaattggaa

SEQ ID NO: 67038 - DNA, 1626 bp, Homo sapiens
aaatatgctattttgaattgagtaacactttaaaaataagttgcactttattgagcataagagcactgagagaccctaaatcctagcagcaccctgctcagtccacaccggctaggttggggtgggggacagctttcctggacacactgaaataactctgtggtccctggggcacccacagggtggcgccactgaagtatcccagtaccagagctctacggatggaggatggtaaggcagcgagttgccaagttcacaaaagctattaagtggcataaccaaaattcagctgccatcttcgtggaccccaattctgagctctctctaccaagtcagtgcaccgcagatgatgtaggatggggtagcacagagtccagtgcacattgttcctgagaacttggttacaagctctggggagtaagcaggggcattgctgggtcactgattcctgcttcttgcactcttctcaatcaggaggctgtaggagtgcaattggaacctgagcgcttggtcaagatcctagaggtgcttcgggaactccctgtcccaaactacaggtatgtgacactccatatctgcccagcaacctgagacaactcattcactcgctgcctggagccttaactgggtcctactgctcccaggtcccagccctaatgcctgccctgggcattccctgtgtgatccctgcccccgctttctgcaggaccctggagttcctcatgaggcacttggtacacatggcctcattcagtgcccagaccaacatgcatgctcgcaacctggccatcgtgtgggctcccaacctgctgaggtaggtgcctgtgtgagcagtgtatggggatcctgtgagacactggcctttgggaggctgctcccaggatgaggtgtgactgtgtgggtacactggagaagggtgtagggctcacaaagcccagtgagaaaagaaggttcaagatcatggtgggtcggatgggccccatctattttagtcccttctctgtgatcaaataaagtccctaaaaggcaggacttttgtgttttcctacagtgtgtcactgagctcagggactggaacataacagttccatatcaattttttgtttgtttttgagacagagtcttgctctgttgcccaggctggagagcagcggtgcgatctcaactcactgcaaactccgcttcctgggttcaagggattctcgtgcctcagcctcctgagtagctgggattacaggcatgagccaccatgcctggctaatttttgtatttttagtagagagaaggggtttcaccatgttggtcaggctgatcttgaactcctgacctcaggtgatccacccacctcctccctgtgcaagtgctaggattacaggtgtgagccactctgtccggcctcacgccaaatgtttgttgagcaaaacgtcttgcagtctgttggctgtgctcactgtgcatatcactcactgtggtccaagacagactatgagaagtcctgtaattcattataaaattcattataaactagacaccctggtgtgcaaaggaaatagagattaatcctgaggcgggtgtccaagaaggcttccttcctaraagtcttcaagtggcatttgagaattggaa

SEQ ID NO: 67039 - DNA, 1875 bp, Homo sapiens
ggctgggtgggaccaacattagcttaggcaggtcagggctctggtatctggccctgcaggtctatcctgtcccatctgggccctctcagcatccttcttccctctccttctggtagcagggccacaggaaccccttcctgtgctctatgtgctgcctcactaaaactctctgatccattctggtggggcttcatttcctccctccatgcctgcctccttccatccctatttttttcctctgtccagtctggaggtgctccctttggcagtgaacccaattagctagcccagcctatcctgcctccaccccaaggttaccatgtaatgttcctccctggccagcccaatgcttgttcctcctcattttttttggtggcggggggatggtgtcttgctttgttgcccaagctggaggtcagtggcatgatcttagctcactgcaacctccacctcctgggttcaccagttctcctacctcagcctcccgagtagctgggactacaggcgcccgccaccacgcccatctaatttttttatttttagtagagacagggtttcaccattttggccaggctggtctcaaactcctgacctcaggtgatctgcctgcctcagcttcccaaagtgctgggattagggtgtgagccactgtgcccagcctgttcctcctcattctacactttccttctgtctctctcatttattaattcacctgttcattcattcacttggtcaataaatgttgacggaacccacataccactgagcactaaatcagaaacaatggttccaatggtgatgtgaggcccagaaaatagggataaagtgctgtgatgggaatgaaagcagggtgctggggagcacagaggaagggcacctaatgctgcctggggtgggggtgggaggagggaggactcctgctggaaatgatgtctaagcggagtcttaaatgatgagtaggtgctaccagatatagggaggagggcattccaggcagcgggtacggtgtgagcagaggtgaggaacaacaaggtgtgtggcttgctgggcagaggcagggacaacacactgttgggggttgctggggcacgcgttccaaggcaaggagctcctgccatcccagcatgttcctttgctctgcccccaggccccaatccccatatttcacttttgattccatgactccaaatttatttcttcccaaaaatgaacatcctcaggccctgtctccctcataagttactcatcctagaaatttaggagctgcctttgagtctttcctctccttcatctctctttctggtcagtgaccaaatccctgtcaaatctccccccagaactgtcccctcctctccaccctagcrctactgcacccaggctgcagctgcagccttcagtgactgcccctcaccacttgctcatggcactccctggctaaggaacctttagtgactccccatttcctcttgaccaagtatgaattcctttgctggtatggaagttccccggtgatttggccccaccctgtcccaaccatattttccactcctgctcaacacacacaccctgtcttaggctgggtcctctcctctttgcttcctaaacaagccaccttctccatctccttggtgtttgctcaccgtggttcctgatttagaatgcctttctaggcctctctccctcctaatcctacccaactcatgcatgggggccctcccaaatgattcagtcccatagtgattgccccatcccacagttggcctgtaacacacccctgagcactaaatcagaaaccatcatcacatgtttccatatgtgtctccatatgtatctcttgctcctgagcagaactcaagtcccatgagagcagggagt

SEQ ID NO: 67040 - DNA, 847 bp, Homo sapiens
taatggggggaggggtgtctcgtggatttgggtccctcagccccagggcaagagatgggggagggagaagggaggagacytcacccggaaactcaacccattaaggagagacaaagagctgtggtgctgaggcgcctcccaagcctgggctcctttccctgtcaggggtggggcagggccctggggctcagagctctaatggcccaggatttgggtggggggtgaatttgcagtagggccaggaaggcctggggaaaggtactctggtaccctctgagagatgcgaccagaacgctttcctcctcctatctccacagccagacccagtgacccttccaacaccccagcaccccacttcagccaggcctggaccatcacagagtcatcgtatttcagagctggaaggtcaatagagatcatctggtcctagctctcggtctactgaagtctggtttcatcgctgcccaaggttaccaaatagattaatagcagaaacgggatctggaccaagactcctgacttcccagtccaaggattttttcagagacatgaaacattccaggttcctgggagccattaaggagagtctacacacagaagagccagaatgggggtggtagtggaggtaggaccatctgatcctcaggctaggagcctccagcccccagagcaacctcagctctgtgcaggttgtagctgctgcagcagcagcagagtggcctcctaccaggtgccagcttcctggggcaatctggagccaggcttcctcccttactgccaggcattgcatgaggtctaactagaagggggtctcctgtccccttccctgggcttctcttagtaagaa

SEQ ID NO: 67041 - DNA, 1620 bp, Homo sapiens
  misc_feature (1)...(1620): n = A,T,C or G
gggatcctagaaaatgggagtaggtactgaaacgatggatggtgaactgtaggactgagactaagacgaggcaagagacatgactagggtgcaaaatttaaggaagcactcactttcagtgtcgtacaattgcyctaggtgccttttttttttttttttttttttttttttgagatgcagtcttgctctgtcacccaggctggagtgcagcacaaccatcttggcttactgcaacctcgacctccagggttcaagcaattctccctgcctcagcctctcgagtagctgggactacaggcaccaccacgcctggctaatttttgtactttttagtggagacggggttttgccatgttggccaggatagtcttgaactcctgagctcaggggatccactcgcctcggcctcccaaagtgctgggattacaggtgtgagccaccacaccaggcccctnnnnnnnnnnnnnnnnnnnnnnnnnnnnnnnnnnnnnnnnnnnnnnnnnnnnnnnnnnnnnnnnnnnnnnnnnnnnnnnnnnnnnnnnnnnnnnnnnnnncctgcctgtaaaaaattgctcctgactacaccgcctatcccaaacctataagaaccaatgataatcccaccaccttttgctgacccctttctcggactcagcccactcacacacaagtgaataaacagccatgttgctcacactaagcctgttcaggtggtctcttatgtggacacgcataacacttttattattattattattaaaaaagtaataataaaaagagacagagttttgctcttgttgcccaagctggagtgcaatggcgtgatcttggcttgctgcaacctctgcctcctgggttcaagcagttctcctgcatcagcctcccaagtacctgggactacaagcgtgcaccaccacgcctggctaattttttgtatttttagtagaaacggggtttcaccatgttagccaggctggtctcgaactcttgacctcaggtgatccacccgccttggcctctcaaagtgctggattacaggtgtgagccaccacgcccagccgaaacttttattttttatttttttatttgtttgagatggagtctcttgttgcctaggctggagtgcaatggtgcgatcttggctcactgcaacctctgcctcctgggttcaagcaattctcctgcctcagcctcccgagtagctgggactacaggcgcacatcaccacgtccagctaatttttgtatttttagtagagatggggtttctccatgttggccaggctggtcttgaactcctgacctcaggtgatctacccgcctctgcctcccaaagtgctgggattacaggcgtgagccaccgcagccagccaacttttatttttaattgacaaatactaattgcatatatttatgaggtacaagtgatatgttgatacttgtatacattgtggaatgatcaaatcaagctaattaacatatacatcacagcaaatattatttctttgtggtgagaataatataccttaaattatctttcaactacctaatggaagctgtcagagctagcagtcagcagcagggcagaagacaggtttggctggcctgaagttcatttgat

SEQ ID NO: 67042 - DNA, 1620 bp, Homo sapiens
  misc_feature (1)...(1620): n = A,T,C or G
gggatcctagaaaatgggagtaggtactgaaacgatggatggtgaactgtaggactgagactaagacgaggcaagagacatgactagggtgcaaaatttaaggaagcactcactttcagtgtcgtacaattgccctaggtgccttttttttttttttttttttttttttttgagatgcagtcttgctctgtcacccaggctggagtgcagcacaaccatyttggcttactgcaacctcgacctccagggttcaagcaattctccctgcctcagcctctcgagtagctgggactacaggcaccaccacgcctggctaatttttgtactttttagtggagacggggttttgccatgttggccaggatagtcttgaactcctgagctcaggggatccactcgcctcggcctcccaaagtgctgggattacaggtgtgagccaccacaccaggcccctnnnnnnnnnnnnnnnnnnnnnnnnnnnnnnnnnnnnnnnnnnnnnnnnnnnnnnnnnnnnnnnnnnnnnnnnnnnnnnnnnnnnnnnnnnnnnnnnnnnncctgcctgtaaaaaattgctcctgactacaccgcctatcccaaacctataagaaccaatgataatcccaccaccttttgctgacccctttctcggactcagcccactcacacacaagtgaataaacagccatgttgctcacactaagcctgttcaggtggtctcttatgtggacacgcataacacttttattattattattattaaaaaagtaataataaaaagagacagagttttgctcttgttgcccaagctggagtgcaatggcgtgatcttggcttgctgcaacctctgcctcctgggttcaagcagttctcctgcatcagcctcccaagtacctgggactacaagcgtgcaccaccacgcctggctaattttttgtatttttagtagaaacggggtttcaccatgttagccaggctggtctcgaactcttgacctcaggtgatccacccgccttggcctctcaaagtgctggattacaggtgtgagccaccacgcccagccgaaacttttattttttatttttttatttgtttgagatggagtctcttgttgcctaggctggagtgcaatggtgcgatcttggctcactgcaacctctgcctcctgggttcaagcaattctcctgcctcagcctcccgagtagctgggactacaggcgcacatcaccacgtccagctaatttttgtatttttagtagagatggggtttctccatgttggccaggctggtcttgaactcctgacctcaggtgatctacccgcctctgcctcccaaagtgctgggattacaggcgtgagccaccgcagccagccaacttttatttttaattgacaaatactaattgcatatatttatgaggtacaagtgatatgttgatacttgtatacattgtggaatgatcaaatcaagctaattaacatatacatcacagcaaatattatttctttgtggtgagaataatataccttaaattatctttcaactacctaatggaagctgtcagagctagcagtcagcagcagggcagaagacaggtttggctggcctgaagttcatttgat

SEQ ID NO: 67043 - DNA, 572 bp, Homo sapiens
tctatttcattgccttcccctgcagtcagcgcggcaagcttcgcaggcatttcctcttcaggtttgaagatggaaatgtaggtggtcccaaaacactagtgctacttccccttatcgactgggatctccttgcagcgttacttcgtctgtacggtttcactttcagttcctttttcaacattttcctcggacgcggtctttccgaggcttatccattgaaaattttccttggataggaaaggtttggaggaccttatgggtagagaatttccaaaaatcttgccccttttgtgytgggattatcttattgctttgtactgtgtagctgtttctttctggaggcatgtctgcccagctctttgtttttcctgccctctggctgggtgtcagggtcctaaggcagagcttgtaggtggattcttccccctttgtctcttcttcagaaccctgttttttttttttttaccccttcttgctcaggcttagttgatttggagttgtcatagcaacattttagcaacagtgttgttctgcaggaaggcttgatgaataaaatagagaatgcttgaaga

SEQ ID NO: 67044 - DNA, 572 bp, Homo sapiens
tctatttcattgccttcccctgcagtcagcgcggcaagcttcgcaggcatttcctcttcaggtttgaagatggaaatgtaggtggtcccaaaacactagtgctacttccccttatcgactgggatctccttgcagcgttacttcgtctgtacggtttcactttcagttcctttttcaacattttcctcggacgcggtctttccgaggcttatccattgaaaattttccttggataggaaaggtttggaggaccttatgggtagagaatttccaaaaatcttgccccttttgtgttgggattatcttattgctttgtactgtgtagctgtttctttctggaggcatgtctgcccagctctttgtttttcctgccctctggctgggtgtcagggtcctaaggcagagcttgtaggtggattcttccccctttgtctcttcttcagaaccctgttttttttttttttaccccttcttgctcaggcttagttgatttggarttgtcatagcaacattttagcaacagtgttgttctgcaggaaggcttgatgaataaaatagagaatgcttgaaga

SEQ ID NO: 67045 - DNA, 363 bp, Homo sapiens
agggtttggcggtctaaaggttttttagcccaaggttgggtcggtgggctcagcctggtaatcccagcactttgggaggtcgaggcgggtggatcacgaggtcaagagatcgagaacatcctggccaacatggtggaaccccgtctgtactaaaatacaaaaatttagctgggtgtggtggtgggtgcctgtcatcccagctactcgggaggctgaggtaggagaatcacttgaaccccrgaggcggaggttgcagtgagctgagatcgtgccactgcactccagcctgggcaacagagtgagactgcgtctcaaacaaaacaacacaacacaaaacaaacaaacaaaaagtgctttgctcca

SEQ ID NO: 67046 - DNA, 363 bp, Homo sapiens
agggtttggcggtctaaaggttttttagcccaaggttgggtcggtgggctcagcctggtaatcccagcactttgggaggtcgaggcgggtggatcacgaggtcaagagatcgagaacatcctggccaacatggtggaaccccgtctgtactaaaatacaaaaatttagctgggtgtggtggtgggtgcctgtcatcccagctactcgggaggctgaggtaggagaatcacttgaaccccagaggcggaggttgcagtgagctgagatcrtgccactgcactccagcctgggcaacagagtgagactgcgtctcaaacaaaacaacacaacacaaaacaaacaaacaaaaagtgctttgctcca

SEQ ID NO: 67047 - DNA, 393 bp, Homo sapiens
  misc_feature (1)...(393): n = A,T,C or G
tgcattctcatcttgaatagccatgcctcatctgcttcctggtatggcactgccccatgctctgaggctgctagcctccyctccctctcacaagcctcctcctctccccagggcactgtctcctacatcagcggctctcagtcctcaacctgccaacctgcactagttgtctccccacacacttctttttttttttttttttttgagacagagtccactctgtctctcaggcttgagtgcagtggtgcaatcttggctcactgcaacctctgcctccccaattcaagcgattctcctgcctcagcctcctgagtagctgggactacaggcatgtgccaacatgcctggataatttttgtattttagtacgtgatgtggtttcanctatgttgg

SEQ ID NO: 67048 - DNA, 793 bp, Homo sapiens
aggagcttaagtaatgtcagtgggactttgtcttgctctatttctccagttcagatttgccctgtgctgccttccttttcaagtaggtgacaaaaatggccttggcagctctagactgctgagctcttactaccctgagggagtatctttttccttatagtgtttagtaaagatctgatggaaggttcacactgatctgactggggtcacttttgaattaatcgccatagccaggataattttctgctctggtgggctaagactgggtgatacaacccattctagagccaggtttgtggtcagcttcacccaaaccatatagattataggggtggggtagttccccaagggaaaattaggattctgggcaggctcaagtcacagatacccacagtattcggacagtgtggaccctgctgcccaggtttgacccttgckttttccacatgccagctatgtgaccttggcaaagttctttttttttttctttttttttttttttcctgagatggagtctcattctgtcacccaggctggagtgcagttgtgtgatcttggctcactgcgacctctgcctccggggttcaaacgattctcctgcctcaacctctcaagtagctggattacaggtgcctgccaccacacctggctaatttttgtattttttggtagagatggtgtttcaccatgttgggcaggctggtctcaaacccctgacctcaggtaatctgctcgcctcagcctcccaaagtgctggtattacaggtgtgagccactgtgcccagcctcccca

SEQ ID NO: 67049 - DNA, 762 bp, Homo sapiens
tgcatggcagagctcaggaccagcttaaccaagtcccctctggatgatcatgggtcagtctctcctctccccggggcctgaatctcccaaatgcagagaggggaacaagactctttcatgctctccctgccctgatttctgtgacttgattaggacaagcccctccctcaggggcttgggaccctacgttctgccccatcctccagcatgtgcgcacacacacagacaaacacacgcacacacacccggactgtctgctcagggaacctccacagcccggcttccacattcactctgggcttgcccagggcccatggggtcggctccctggggcctcagcctctgagtcacagtccacaaatgcagctcccatcagagcaggtgactctttccagctctgaatctcaattgcaaatttcctgactggaaaatctgattggcccaggtggcatcagggggcccagtgggctgggtcatgcrtcatgtatcatgggctaggggtggagcagcttctccaagaacagggtgcagatgagaaggaaatgaaagcacctctaagtcagaagcaaaatgagttcacccagaatgtaaattagttacatggaaaaatcgatctacactcatttcacatttatctagaaaactctcagaaagcagctgctattggggtgaaaattagaaagaaaaaaactaccccttattctcagctgccaaaacaaatgtcaaaaatccacatccctgactcatcagagagtcctctca

SEQ ID NO: 67050 - DNA, 742 bp, Homo sapiens
tcttttcgtgacctggtgcatctgcccagagcatggttctgtgtcagtagacaccttgcctaggtcacatgcaagtgagtggcaaagggcagtttctacctggggtctttatgtccagaagtggctttctggaaagtgcccccagatttcatctttgtcaatcccagggcccractcttgggttcctagttgaaaaacaacagctgtgaatattaaatgaggcacatgcactgagattcttcgatcagtggtacgtgtataaatttcaataataatggggttgcattcatcagacccatcaatcattactgcctatgctgctgagacattgctcaatgtcagacacatacttcgcagacatagtctctggaatccagctgcatggccagaggcccatggcccccaccgtgggcagtccctttcccctgccaggcctcagtctcccttccttcagtagggaggggaatttgcggtggatagctttgctcagactgtccaggtttcagaactctgagtgctaagatggcgcatgaggaaacgtcatttcttcgctctctgtgcatctggtgcctgcacaactgcctgcgtgtctaatgatgtctcacttttcctaaaagtccctgcaatggttcccttgtgcctggagaatgaaacttctactcatcatagagcgcttaagaccttgcttgatctggttgccaaatctccccttctcactcactttgtggccagccaggtggga

SEQ ID NO: 67051 - DNA, 662 bp, Homo sapiens
  misc_feature (1)...(662): n = A,T,C or G
tttcaagaaaataattgtggtatgtgtgtaggtcagggtgggagtggatgaaatgaaaggctgcttcacagaacagcagcatttgggctaggcttggaattcagtggttcccaccccggtcatactctggaatcacccgcagagctttagaagtcccgatgcctgngtcccgcccagaggtgctgttttgattggcctgnggcagggcgtgggcttcaggacttttaaaaagccccctagtggttcaaatgcccagctaagtggagagccagcgctcgatgggggaccaggattccgctggcagtggaaggctggagagacggagtgggctgtgctccaggagcagcgtgagccaaggcagggctgaagccgatgatttgtatggaaaaacctgaaaaagaattgctttgggggtgtagatgcttaaactaagcaaaacaaaacagaacaaaacaraaaggggtggccctgccttctgtgccctggtgtgcttattgaattggttcacagaaatgctcaatcctcatggccaggttgctcaatctcagaaggaattcatttgagggatggtaataattaggtctgcttacagggagaaatgctatgcagtgcaaaatccctctccacacaggaacggcctttcctagtcctgagctttgctg

SEQ ID NO: 67052 - DNA, 662 bp, Homo sapiens
  misc_feature (1)...(662): n = A,T,C or G
tttcaagaaaataattgtggtatgtgtgtaggtcagggtgggagtggatgaaatgaaaggctgcttcacagaacagcagcatttgggctaggcttggaattcagtggttcccaccccggtcatactctggaatcacccgcagagctttagaagtcccgatgcctgngtcccgcccagaggtgctgttttgattggcctgnggcagggcgtgggcttcaggacttttaaaaagccccctagtggttcaaatgcccagctaagtggagagccagcgctcgatgggggaccaggattccgctggcagtggaaggctggagagacggagtgggctgtgctccaggagcagcgtgagccaaggcagggctgaagccgatgatttgtatggaaaaacctgaaaaagaattgctttgggggtgtagatgcttaaactaagcaaaacaaaacagaacaaaacaaaaaggggtggccctgccttctgtgccctggtgtgcttattgaattggttcacagaaatgctcaatcctcatggccaggttgctcaatctcagaaggaattcatttgagggatggtaataattaggtytgcttacagggagaaatgctatgcagtgcaaaatccctctccacacaggaacggcctttcctagtcctgagctttgctg

SEQ ID NO: 67053 - DNA, 1425 bp, Homo sapiens
cgtgtctcgtttctaagttggagcatcactttgcagctcccaaccagggccagccacaaaatttgaaaggcccagtgcaaaataaaaatgcagagccccttgttcaaaaagcaggaaaagaatgggccagcaaaggaactaaaataaacgaaagcttttccctttcttccatggtctctcttttgaccyatcatggtgtttttatttgctactgaatatcatgctttcttgggacagggtgagtgtcaactgtcacacttgcccaggggccctgccgagtgacttggtgggtacacagtccaccagctgcttgcatggccacgcccaccctgagatgccacgggtagtgtagtaaaagcatctgatgtcaaccccacacccctccacacatacacactcaggttcccgcagaccatggagggcaccagcggttgctgggtgagggtggggatggggaggccatgtggggcccaggacaccaaagggagggagacgagcagtcaataatgtgcctgggagaggtggcggaccagcagcagatgggagcacacatgaggcaggctccaagtgctcacgtatgctccactgtccaatgaggcctcacttacaccacacaaattcaaagataaaataaagttttttttgttttgttttgttttgttttgttttggagacaagagtctcactctgtcacccaggctagagtgcagtggcgcaatcttggctcactgcaacttccaccttccaggttcaagtgattctcctgcctcagcctcccaaacagctggggctacaggtgtccaccaccacacctggctaattttttgtatttttagtagagatggggtttctccatgctggccaggctggtctcaaactcctgacctcaagtgatccgcccccctcggcctcctaaagtgctgggattagaggcatgagccaccgtgcccagcctgataaaataattaagaatgtcaagacagcaatcacagagcactaaaccccaagtgcagggccctgtgcctctgaggggctgcatggccacgaagccaccctgctccagcattggcagcaggaaatacaatccattcctggatggaggttgggttagttcctcagggctgctgtaacaaagacaacctgggtggctccaaacaacagaaatgggctatctcatagttccagaggccagaagtctgacatcagcgtggtgcagggccgtgctccctctgaaaccttaggaagtccttgcttgcctcttcctggcttctggtggctgcagcaatctttggagttccttggcttgtggctgtgtcactccaatcctaggtcttcaccggtctcctttttataagaacacagtcacattgggtcagcggcccaccctgctccaatgtgacctaactttaactattacatctgcaa

SEQ ID NO: 67054 - DNA, 578 bp, Homo sapiens
tgaatctattcaggtcccctggacacaggcagcaccaggtcaggatgctggcatgacaaagggcctgcagcctttgtcctccaggctagatcatggagatcttaaaaactgagagataattgacacactgtaaaattcacccactgagagcattattcaatgggttttagtagattcacaaagtcagactcccatcaccaccaatgatctccagaacattttcatagtccccaagaaaaaccccagacccataaacagttacactcccttcccacctgcccctcccaggccccggaaaccaccaatctactttctgcctcttcagatttgccagttctggacatttaatatcagtggaatcatgaaatgtggccttttgtgacttctttcacttagtactttcttttttttttgagacaaagtcttgctctgttgcccaggctgtagtatgtacagtggcatkatctcggttcactgcaacctctgcctcccaggttcaagagattctcccacctcagcctcctgagtagctgggattacaggcgcacaccaccacgcctggctaatttttgtagttt

SEQ ID NO: 67055 - DNA, 748 bp, Homo sapiens
caagatcagaaattatagtttataagtttataagttaggcagctggaggctacaagattctgaccttccctaaactgctcttaagatcagtgcttgagatattttgcagaccctgcacttgacagatcagctggcaacasccagattgattaactggcccatctgatattatgcccccacccaggaattgacccagtgcaagaggacagcttcaattccctattatttcatctcctacctaaccaatcaggcactcctggctcattggcttcccccaacccaccaagttgtccttaaaaattcttatccccaaatgctcggggagactgatttgagtaacagcacagcggctctgcatgaattactttatcgcaattcctctgtcttgataaattgactctgtctaggcagcaggcaaggtgaatccattgagtggttacatgactagctcacaattagagactccaaccaaaagctgactttggatctcctggcattcaggtgcttcaaacccaagccagtagtgattctaaatctggtgacaaagcaattccggtgcaacctagcagtggaaggacaaagaatattgtgactgaattctctggatccctttcaataaatacactactgctgctgggctgttctgtatatccattgcctgtaatcacactgttccagaaatataaatggtttgattcctgggagtccttcagtaatcaaacacagtgattaatatgtaattaatgca

SEQ ID NO: 67056 - DNA, 1002 bp, Homo sapiens
tttcagcaaaaactcctttgatcttggaacattacaaaaggcaaatagaaaatttctgttcactcgtactcaaaagaaagaaaagacccccttggaatttttattccataaaagcggtctgaattcaaaatccttagatattttctggcgctcaatgaactatcctacataaaggatgccagtgaccctaaaggaataatatattaatagtttcaaatgctgaactcactgcaaatgatccatttttagtccgtaagtctttctgtatttaaaattctccatttctttctttctttttgtttgactgctactgtaattcctcttaaagttattagtgaaggctgggcatagtggctcacgcctataatcccagcactttgggaggccgagttgggtggatcacttgaggtgggtggatcacctgaggtcrggagttcgagaccagcctggccaacatggtgaaaccccgtctctactaaaaatacaaaaattagccaggcatggtggcacgtgcctgtaatcccagctactcggaaggctgagacaggagaatcacttgaacccgggaggcagaggctgcagtgagctgagatcacaccacactccagcctgggcaagacagaatgagactctgcctcaaaaaataaaaaaataaaaaataaagttatcagtgaagatacaagaaaatacgagacactgtgacctgtcaatagaaaacggccacatttctttttttgtttgtttgttttgtgtttaattcatctagtgtatttaggggaaaaaaaggccacatttcttattgtgtgcccctgtagtctatgaagctgtggttctggataattacattaattgggggtgagaggtggaaggtggggaccaagagctaaattagaaatgtgggctcgtgaattcaaaagaaaacctgatttatgttttaaaacatgcaattcagagagtggaacagaagagtaaaaaagatactgggttgggatattttatgca

SEQ ID NO: 67057 - DNA, 540 bp, Homo sapiens
ggatcaaggtatcagggccacactccctccagatactctagaggagagtccctctttgcctcttccagctcctgttgtctcagatgatgctcagctgtggcagcgtcactcccatcctggcctccgtctcccctcacctctcctctgtctctctcttttgtgtcacttcataaggatacttgtcattggatttaaggcccacccgggtaatccaggatgatctcatctcaagttctttaatttaatcacatctgcaaagacccttttaggtcccattcataggggctggggattagcrcgaggacgtatattttgagggctgccattcaacccacacagttgaatggatctgagatgccctggagggaacgcgtgggagaaaaggaggtgtgggccagagctcaggggttgcaggggagccccctccttgtctctgctactgttttactccttgtagtctcttctcactgtcctctccacaacccagccatagagatcaggcgtttgtctgtctgtcccaagatgctgtgatttctatga

SEQ ID NO: 67058 - DNA, 635 bp, Homo sapiens
cccttagggaacagtcccacccagagacaagaaacgctgtgggaggcctcatggcacactcaaaccaaagtacatcaaggagtgactacctctcatctaactctagtacagaagacccaacatctgggggtgtaagacatgtatcctaactgcactggtgtgataagtgycagtctagttatcctgagacaagctgtgtttgcttttaatgaggagtggcagtcagaggaaaactagaatagagagggttctcttccacgaggagggcaaatgatgggagttagccctggaaatataatgaggctttagcaaagtgggtcacgaagactcaataaataacgtagggtactgctaaaacccagtactgggaaaggatttgtgcctggacccaatagggcctcaattattttaatacacatggaagctgaagtgggcataagtcagtggccctctattctagctcctgaagctcaaggggcacacctatgggaatcttatgactccccaaacatgtaaaattctttggaggcacttttgatttacactgatgtcttgtgacagttctggcccccagaatagtttgctaaatactactcatgacttccccattggagggaagagagccctgttacata

SEQ ID NO: 67059 - DNA, 635 bp, Homo sapiens
cccttagggaacagtcccacccagagacaagaaacgctgtgggaggcctcatggcacactcaaaccaaagtacatcaaggagtgactacctctcatctaactctagtacagaagacccaacatctgggggtgtaagacatgtatcctaactgcactggtgtgataagtgtcagtctagttatcctgagacaagctgtgtttgcttttaatgaggagtggcagtcagaggaaaactagaatagagagggttctcttccacgaggagggcaaatgatgggagttagccctggaaatataatgaggctttagcaaagtgggtcacgaagactcaataaataacgtagggtactgctaaaacccagtaytgggaaaggatttgtgcctggacccaatagggcctcaattattttaatacacatggaagctgaagtgggcataagtcagtggccctctattctagctcctgaagctcaaggggcacacctatgggaatcttatgactccccaaacatgtaaaattctttggaggcacttttgatttacactgatgtcttgtgacagttctggcccccagaatagtttgctaaatactactcatgacttccccattggagggaagagagccctgttacata

SEQ ID NO: 67060 - DNA, 480 bp, Homo sapiens
ggcgttctcccagacacagaccaactttggaaattgggattgtggtactwtctgaaagtgtgcagcattttaacctcgagtgtgtaagtctaagtattgtaaaacatgtttttatattttaaaagctcttaaaggtaattttattttattgaacatcagaaactatctacatattcataaagaatgcttgattaaaagacagtatctcccagagcgccagaaattttagtgtagttacactcatttggaatcagcctaacacttaccatattcataattactaagaaattctaaggaaagtgtatgtatgcacatacacatcatatacatattcagaatatatgtgtatatagattatataccgtaaatatatatgtctgttacctgtctttttttctataaaaaaaaactttattcatgcctagtattaactcccaggcaaagcatgtatttaaggattaggctaatgtttaaaggttt

SEQ ID NO: 67061 - DNA, 1041 bp, Homo sapiens
  misc_feature (1)...(1041): n = A,T,C or G
aggtgtatatatatacctatatttttccagctaatacctcaaatgtgtgattgtttaatatataccacactatgtttgcacagagcagggcttctattagcagtggatatttttatttcttttttttttttttttttttttggtttgagacggagtctctctctgttgcccaggctggagtgcagtggcgcgatctccgctcactgcaagctctgcctcccgggttcacgccattctcctacctcagcctcccgagtagctgggactacaggcgcccgccactacgcctggctaattttttgtattttttgtagagacagggtttcaccgtgttagccaggatggtctcgatctcctgacctcgtgatccacccgcctcggcctcccaaagtgctggaattacaggcatgagccaccacgcccagtggatatttttatttctaactttgaaaatcagcccacacaatttcattggggggaattctttctgttgctctttttcatattttaatgcagagattcctcttacaaggcccatgcttcaaacacaattatatctttctatatccagccagctggaaatatataggggtaagaagtatttcttgaaaagtccttgtttagtaagttagtaacaactgggatgactannnnnnnnnnnnnnnnnnnnnnnnnnnnnnnnnnnnnnnnnnnnnnnnnnnnnnnnnnnnnnnnnnnnnnnnnnnnnnnnnnnnnnnnnnnnnnnnnnnntgcagtttatctgtattaagaaatgcttcttgccaatttctggttttggtttttggattgctacataagactttctttcmatttactttatgtgtttttaaaagctgcaggtgatttttaaggtttgatggaattataatgggagccttgtataagttaaatgaaactggtaaaggagagcttactttgtctataatgctttcaggattataacttagatttaaaaatgaaatgtctgacttgtaaaatatttaatgttatatcagacttcaataaaattttctgcgagaa

SEQ ID NO: 67062 - DNA, 1005 bp, Homo sapiens
aacaggccaccctggggcattaagcaacagtcagtttcttataccagttttgtggcccaagaaattagggctcagccatgagagtgtgtttctgctacccagcactgggggctgaaggctggaatcatctggagactccttactcactcgtatgtctggctcctgggctgggatcagtgcaagtctgggctcacctggcacttgattggagcacctacacttgggctggccrtgtagtttggcctctcacagcatgaagacttgattctagtatggagcataccaacagggggcctcttgaaaacgagatggcgctccatggcctcttatgatctggcctcagaaatctcatatcatcatttcaccacactcgatgggtcaaaacagtcactgccacaatatattcaaggccacagaacctacttcctgatcagaagattgtgaacgaacaaactggggaccatacgtttaacctctcattttgcatcctctaaagtatggtgcttgttcaagtccttgggacagaaaaaatttgtttcacttaggctatttttttcttgttgctgtgtagctgttacatatatatgatatgtatgtgtttgtatatattctcttttccccattttgtgaattgttttatctcaatagtacatattaataaacaaaagttataattataatgtaattccatttgtattagtctttttcttttttttggagacagaatctcactctgttccccaggctggagtgcagtggtgccatcttggctcactgcaacctccgcttcctgtgctcaagtgattctcccacctcagcctcccaagtagctaggattataggcacccaccaccacacctggcaatgtattagtctttttatgtctggtttaagaacaattggtttaacccaaggtcaaaaaattattctcatatgtaatattatagaaactatatttctttacctttcacacttaagtctccattggaattgactttagtatat

SEQ ID NO: 67063 - DNA, 1005 bp, Homo sapiens
aacaggccaccctggggcattaagcaacagtcagtttcttataccagttttgtggcccaagaaattagggctcagccatgagagtgtgtttctgctacccagcactgggggctgaaggctggaatcatctggagactccttactcactcgtatgtctggctcctgggctgggatcagtgcaagtctgggctcacctggcacttgattggagcacctacacttgggctggccatgtagtttggcctctcacagcatgaagacttgattctagtatggagcataccaacagggggcctcttgaaaacgagatggcgctccatggcctcttatgatctggcctcagaaatctcatatcatcatttcaccacactcgatgggtcaaaacagtcactgccacaatatattcaaggccacagaacctacttcctgatcagaagattgtgaacgaacaaactggggaccatacgtttaacctctcattttgcatcctctaaagtatggtgcttgttcaagtccttgggacagaaaaaatttgtttcacttaggctatttttttcttgttgctgtgtagctgttacatatatatgatatgtatgtgtttgtatatattctcttttccccattttgtgaattgttttatctcaatagtacatattaataaacaaaagttataattataatgtaattccatttgtattagtctttttcttttttttggagacagaatctcactctgttccccaggctggagtgcagtggtgccatcttggctcactgcaacctccgcttcctgtgctcaagtgattctcccacctcagcctcccaagtagctaggattataggcacccaccaccacacctggcaatgtattagtctttttatgtctggtttaagaacaattggtttaacccaaggtcaaaaaattattctcatatgtaatattatagaaactatatttcttyacctttcacacttaagtctccattggaattgactttagtatat

SEQ ID NO: 67064 - DNA, 1188 bp, Homo sapiens
ctgggtcccttgagtccgtctgctccgacggcaggtgcaccggggttgcgggggactcggcgcatctccagggcgagtgagtccaggcccttcggcctacaggctgagcacgcggacaacagcgagggggctccgtggcacagcctggcggggtcacggcgcacgcctgggcgccctggagcccggagactcagcagccatcgctcggggctaccacggccctccaggctcctgagccacccgcacggaggacgagctgcggagcgcggtgtgcggatagccaagctcctgccgccaaggccaccccgagcccaggctgccagggcggcatccacagccggcggcccgcgggcctgggcctgagacccgcgcagcagccccgcctgccctgccgtgagagggaagtagaccgcgcttggtttccgcaggttagagtctcagatgcattgttacagctgcacaaactaccctaccccgacagtgcgtgggtgccggagccttggtccataagggagccttgtgggcagtggcttaggcaagagcctgactggtgtcatcctgtccacttktttactaaaaccctctgctgtggtcattcattgctgaccattcacataggacagacatatcttcatgatttttgcccattcgcgaggcctattcacatatcttttccccaaatatcttcaccaccaatttttccaatcgttctttccatgtctctgaccatccagcataaacattgagcacagctggcgaaatagtccatcactgcacaactggccactgctccttctaagcaaagtgcacagccaggtgcactgcctgcagctctgcccaggaggacttcccttccccactgtctttcagggacgtcccaggaaggggctgtagttctgcagcatccactttcaggtggtgcctgcatatggggcagagccgtctgtaaaccaggcctgagtcatctcttcctctgtcagatatcatggggacctccccaggaggtcacaggctcaggctgggagagagggtctcagctgagaaaggcggtggggcaggagtggggaccatgggcacttgggccactgcttcatgtaacctacttgagcattcaggggctgattgggcctaatcacatacataccacttccattcgatgacagagtgttgctgtgcacacctaactgt

SEQ ID NO: 67065 - DNA, 761 bp, Homo sapiens
atgtcataactatataaatgtctgtatatttctgttgtgcacagaaaattgcatatatatgtataatgtacaaaagttttatctgagtgctttacatattatatcatgagcgttttcctaattcatcaagcagttcttttttttttttttttttttgagacagagtttcactcttgttgcccctgctggagtgcaatggcgcgatcttggctcaccgcaacatccacctcctgggttcaagtgattctcctgactcagcctcccaagtagctggaattacaggcatacaccaccacatccatctaattttgtatttttagtagacacggggtttctcctgttggtcaggctggtctcaaactcccaacctcaggtgatctgcccgcctcggcctcccaaagtgctgggattacaggcacgagccaccaaagtagttcttaatgttgtataatatatcatgttttggatgtactaccagttaattgttcatgcctttaaaaaaacttgtatgcttctaaatgttaatacyattatatctttcattgacattgccattcttgaacttggattctagacaaaatctgccattatttccttgaattctgagacatgaaattattgggctgaaaactgaaaacagtaaaatattttaacacacactgccaatgtgtttccctagaaaggtttgatccaattatcaatgattgtaactgcatactccactgaccataacttagttatattttgtttcttatttccta

SEQ ID NO: 67066 - DNA, 663 bp, Homo sapiens
aattgtaaatgccatgctaaagtctggaacatttctacaaaattcagtttagcaaatatttgttaagacttcagtcaaagccttttacaactgcactgctctaggttttgaggactcaaaataatctctgctcacaaaccagacatgcagacaaataaggttctatgtattaaggtcaataatagaattttgctgaagacaaaatattatcgcagacacaaaaaaattagccagrcatggtggcaggtgcctgtaatccaagctactcaggaggctaaggaaggagaatagcttgaacccaggaggcagaggttgcagtgagccaagatcacatcactgcactcatcttgggcaacagagtgagacttcatctcaaaaaaaaaaaaaatcttgattcctttatcccctgtgcttcacagcattcagagtcttccatattttctgggagtttcttggttagttgggcttggcctctcctcacttactgttggagcctgccctcttctctgtgctccagagcagatcatgttttctctactcagttccctctagtgaggagactcattccactttcacccccaccttagcaccaagcaccattaattcaagaccactatgtggaggagataagggagaattacatcccacgaagagcagcaaaat

SEQ ID NO: 67067 - DNA, 663 bp, Homo sapiens
aattgtaaatgccatgctaaagtctggaacatttctacaaaattcagtttagcaaatatttgttaagacttcagtcaaagccttttacaactgcactgctctaggttttgaggactcaaaataatctctgctcacaaaccagacatgcagacaaataaggttctatgtattaaggtcaataatagaattttgctgaagacaaaatattatcgcagacacaaaaaaattagccagacatggtggcaggtgcctgtaatccaagctactcaggaggctaaggaaggagaatagcttgaacccaggaggcagaggttgcagtgagccaagatcacatcactgcactcatcttgggcaacagagtgagacttcatctcaaaaaaaaaaaaaatcttgattcctttatcccctgtgcttcacagcattcagagtcttccatattttctgggagtttcttggttagttgggcttggcctctcctcacttactgttggwgcctgccctcttctctgtgctccagagcagatcatgttttctctactcagttccctctagtgaggagactcattccactttcacccccaccttagcaccaagcaccattaattcaagaccactatgtggaggagataagggagaattacatcccacgaagagcagcaaaat

SEQ ID NO: 67068 - DNA, 639 bp, Homo sapiens
gcataaaatcacaaataggaagaaacaattattccaaatatttacacatgaaagtragcatcactgtgatggttaatattgagtgtcaacttgattggattgaaggatacgaagtattattcctgggtgtgtctgtgagggggttaccaaaggagattaacacttgagtcaatggactaggagagacagacccaccctcaatctgggtgggcaccgtctaaccagctgccagcacagctaggataaaagcaggcacagaacatgaaaggactagtctggctaagttatctgggctccatctttctcctgtgctggaggcttcctgcccttgaacatcagatcccaagttattcagcttttggactcgtgcacatacctcagcgatttgccaggtgttctcaggccttcagccacagactgaaggctgcactgccggcttctctacttttgaggttttgggactttgacttgcttcctggctcctcaacttgcagatggcctattatgggacctcaccttgtgattgtgtgggtcaatttccctttaaaactccccttcatatattcatctatcctattagtttcgtttctttagagaaccctgactaatgtaatcattaactatgagtgaacctcattt

SEQ ID NO: 67069 - DNA, 634 bp, Homo sapiens
ccattctggctaacacggtgaaaccccgtctctaatacaaaatacaaaaaaaaaaaaaaattagctgggcgtggtggcgggcgcctgtagtcccagctacttaggaggctgaggcaggagaatggcctgaacccgggaggtggagcttgcagtgagccgagatcgcaccactgcactcagcctgggcgacagagygagactccgtctcaaaaaaaaaagtcaaaaaataaaaattcaaagagaattgtttttttctttttttacttttatggcacgacttctaatatttttatatccttaacactttatacaaaaaaatcaaaggaagaagaagaacatttaagtttactttgtttcatttttcagagttaatagttgtttcacattctcaccaagatttgatttttaaatgtggatcttgtatcctgcaacccttgataaatttccttgtaaattatagttctttaaagacaccatagtatgctctacacatatatttcttctatgaataaatagatttttatttttttcttcctaatattaatacctttaaaaaaaaaactttatttcagtggttagcacatgttgaatagaagtggtgagagcatgaatacttgcattcttcctaatctta

SEQ ID NO: 67070 - DNA, 634 bp, Homo sapiens
ccattctggctaacacggtgaaaccccgtctctaatacaaaatacaaaaaaaaaaaaaaattagctgggcgtggtggcgggcgcctgtagtcccagctacttaggaggctgaggcaggagaatggcctgaacccgggaggtggagcttgcagtgagccgagatcgcaccactgcactcagcctgggcgacagagtgagactccrtctcaaaaaaaaaagtcaaaaaataaaaattcaaagagaattgtttttttctttttttacttttatggcacgacttctaatatttttatatccttaacactttatacaaaaaaatcaaaggaagaagaagaacatttaagtttactttgtttcatttttcagagttaatagttgtttcacattctcaccaagatttgatttttaaatgtggatcttgtatcctgcaacccttgataaatttccttgtaaattatagttctttaaagacaccatagtatgctctacacatatatttcttctatgaataaatagatttttatttttttcttcctaatattaatacctttaaaaaaaaaactttatttcagtggttagcacatgttgaatagaagtggtgagagcatgaatacttgcattcttcctaatctta

SEQ ID NO: 67071 - DNA, 634 bp, Homo sapiens
ccattctggctaacacggtgaaaccccgtctctaatacaaaatacaaaaaaaaaaaaaaattagctgggcgtggtggcgggcgcctgtagtcccagctacttaggaggctgaggcaggagaatggcctgaacccgggaggtggagcttgcagtgagccgagatcgcaccactgcactcagcctgggcgacagagtgagactccgtctcaaaaaaaaaagtcaaaaaataaaaattcaaagagaattgtttttttctttttttacttttatggcaygacttctaatatttttatatccttaacactttatacaaaaaaatcaaaggaagaagaagaacatttaagtttactttgtttcatttttcagagttaatagttgtttcacattctcaccaagatttgatttttaaatgtggatcttgtatcctgcaacccttgataaatttccttgtaaattatagttctttaaagacaccatagtatgctctacacatatatttcttctatgaataaatagatttttatttttttcttcctaatattaatacctttaaaaaaaaaactttatttcagtggttagcacatgttgaatagaagtggtgagagcatgaatacttgcattcttcctaatctta

SEQ ID NO: 67072 - DNA, 634 bp, Homo sapiens
ccattctggctaacacggtgaaaccccgtctctaatacaaaatacaaaaaaaaaaaaaaattagctgggcgtggtggcgggcgcctgtagtcccagctacttaggaggctgaggcaggagaatggcctgaacccgggaggtggagcttgcagtgagccgagatcgcaccactgcactcagcctgggcgacagagtgagactccgtctcaaaaaaaaaagtcaaaaaataaaaattcaaagagaattgtttttttctttttttacttttatggcacgacttctaatatttttatatccttaacactttatacaaaaaaatcaaaggaagaagaagaacatttaagtttactttgtttcatttttcagagttaatagttgtttcacattctcaccaagatttgatttttaaatgtkgatcttgtatcctgcaacccttgataaatttccttgtaaattatagttctttaaagacaccatagtatgctctacacatatatttcttctatgaataaatagatttttatttttttcttcctaatattaatacctttaaaaaaaaaactttatttcagtggttagcacatgttgaatagaagtggtgagagcatgaatacttgcattcttcctaatctta

SEQ ID NO: 67073 - DNA, 634 bp, Homo sapiens
ccattctggctaacacggtgaaaccccgtctctaatacaaaatacaaaaaaaaaaaaaaattagctgggcgtggtggcgggcgcctgtagtcccagctacttaggaggctgaggcaggagaatggcctgaacccgggaggtggagcttgcagtgagccgagatcgcaccactgcactcagcctgggcgacagagtgagactccgtctcaaaaaaaaaagtcaaaaaataaaaattcaaagagaattgtttttttctttttttacttttatggcacgacttctaatatttttatatccttaacactttatacaaaaaaatcaaaggaagaagaagaacatttaagtttactttgtttcatttttcagagttaatagttgtttcacattctcaccaagatttgatttttaaatgtggatcttgtatcctgcaacccttgataaatttccttgtaaattatagttctttaaagacaccatagtatgctctacacatatatttcttctatgaataaatagatttttatttttttcttcctaatattaatacctttaaaaaaaaaactttatttcagtggttagcacatgttgaatagaagtggtgaragcatgaatacttgcattcttcctaatctta

SEQ ID NO: 67074 - DNA, 1288 bp, Homo sapiens
gcatttaaaaaataattttctctggctgtcagagtatatcagtcctcatgctttgagacaaacatttggacaaaagatgttttaaataaaaaatggttcttaccttctattttgccatttgttgtctttatttctttttgatatgtagcctaagtaaacactcataattctgtgtatcactcacagagataatctgttaaagataatattaataatttctttttttactatttttttattttgtttttctgagatgaagcctcgcagtgttgcccagtggcatgatcttggctcattgcaacctccggctccaaagaccaagtaattatcctgcctccgtgtcccgagtagctgggactacaggcatgagctaccacacctggctaaatttttgtatttttawtagagacaggtttcaccatgttggctaggctggtctcaaactcctgacttcaagtgatctgcccacctcgccctccgaaaatactgggattacaggtgtgagccaccacagcctgcctcaataaataatttcaatttaaaaataataatgacaagcatcacattttttattaaaaatcttttttaaaacacattttttaactttaaaggcaattagatttaaggctgttcacatattgaaaaccaaaacatttcaagagaaaacctcaaatatgctctgtagattacgcttatcttttattttcatgtggctattgactaggttactgagcaaggaaaataatcatattcgcaaaaaaattcactcgtgcatattttaaaaggaatttacttcaaagtatctgccttacactgtagtcctcaccaaaaacaataggacatttcaaacaaaatacaatgtgattcaacatttgacatatgcataattatagatttttttggttaaaaactatgcatggcatgaagagaattttcagagtatgtcgtgcgaagtaggaatagaactctgttaaaagctgtttcatttaggaaaacaagggcataaaataatgaaaataattttacatcttttttgctgatacagaactgcttgaataaaaggaaagattcttaaggaaaatttatatttatgttatttttaaatgaaaacaagcaatcattagataaagtatgcaattcgttcttaaggcataacttcagaaaagtagagcaagccttcatataaagagaaaaataaaaacatgtattcgtgaaacatctaacatgtgacagacacatatttgcagacttttcttcaccttagaataatgaggataacgatgacatt

SEQ ID NO: 67075 - DNA, 1283 bp, Homo sapiens
gttcaagctcttactcctctgtcagctcagagcctgcacagtggaaaggaagtgcatctattgatttcttggccaaaagaactagttaatacatttttaaaaactttgacattttgttttaaagcaacagtgggccttgtttaactaaaatctcatttctccagcctaattttgctggaaaggccccaaaccaaggcaagcccctggaggagagagagcagctaggatgctggcaccagatggctttgttccccagccttcaatatactcagttagaaaataaccacatcagaggtttgataagattatcccccaggccatttttcaggtctaaatgttaccatattttatacgagaatacggtatttgaatcaactctcaggggacccagccttcaggagacactgaaggaatacagacattttttctagcttcaaaagcatggtttgcaaactggcttgttctttgccggagaaaaccacacacgtggccattgaygcccttgattggcagagttgatgggattttctctggctctcaccttgagggcatcatcagcatcctgaagtcacttgcaggcctctgtgcagatgtcctttcgaggggcttcaggctgtggaagtgaccagtgaacacaggacctgcctggactcccagcctcacagcacagcaccacagcctggactgccctctgcctgatacttgcttggtttggaactttactccatcaaagcatccaaataaaaatatgtagactccccaccctatcccatctgctatagggttctaattcccccacagccatcccatcacagtgctttcccccatgacgggggacccctgccctggactccatccctcccctactggaaaagcacaggtgctgtggcatgagttcaaccgactgaaattccctgatcttcacagtaataattctaaaatagggcaacaatacccctgtcagtgttcttggaagaacctctcattacttgaggccccagaaatgcaaacaccctcctgttttccagtgtgctgtcaaccctggcatcagagctgttcctgccatggacactggtaattgacttactggagaaagtcaagcttttaagtcccaggaataaagggttcctatttccttaagctgtgtttatttttacaccattgctggtagagtcaatgtgtactgagtgaagatgaggcaaaagtgtcaaagagtgatttccaataagatgaaaagtgatctgcagtttccacttccttaaccagcaggaaacgtctctcct

SEQ ID NO: 67076 - DNA, 734 bp, Homo sapiens
gagggaccttggaattcatctagtctgaattcattatacataggaaaagttaagctgagccattctgcaagtcacactaatgtgacatagaaaatactagaacctaaggttctgaattactgtttcaggtgttcatctgctacaacaaacatttatcaaacacctagtaggtataagagatcatttaaacccaccccaaaggatacaaagttgaggaaatcactctttgcctttgcagaaatcacaatctattatcaaagcatatgatagaaatttcaatatctaaaacacaagatccaaagtgttgagtgccatgagaatgatataagagtttaagaagggagagatacaacaaagtttgggcaagccagtatgtttcttgaaggaatagcacttaatttgtgatgtgaagataaaatctcagtaaagaaaaatggggaagcagatggtaagcctggcagaaggaatattattagcaagtgcaggaaaatatactctaatcaaaaagagcaagtagcctaatgtgactggatttcaatttacctttacatttttctatcatgttatttcatgcccataaattatggcaatagtctaaatgaacttgaatatcagaccaaattgccttgtcttatgtagtaacccactcaagtttctaagcagaaaataacctgacccccattctctgagatttkagaaaaaattgtgtatccttcattaaagtttggaatgca

SEQ ID NO: 67077 - DNA, 721 bp, Homo sapiens
tacccccacccccacttttcacccctcacccccaccataatccacccattctccccaatccccaccttccaatacccagtgccctccacgattaaatcaccttccacctggccccactttcaacatttctgattacaattccatatgagtttccatagggacacacagccaaatcttattattctgtccctgccccacaaatctcatgtccttctcactttgcaaaatacaatgatgccttacttaccattccccaagccactgtgctttttttttacagcctgcagaaccatgagcccattaaacccctttttgttatgatcatacagaaaattagtattgtgaagtgaagctatgaaatgccttcaatgactwttccccatcatctcggctaagacccccaaggtcttaactcattccatcatttactcaactgtctgaagcccaaagtctcatctaagacaaagatgcagtcccatctcctcctgagcctctgaaatacaaagcaagttaactacttccaaggtatgattgtccagacattgagtaagaattcccaaccaaaaggaagatttatgccagagacaagaacaaaacacaaacgggacttacaggtcccatgaaaatccaaaacccagcaggccagttattcaaacctacagctccaaagtcatcctttttcaatccttgtcccacatccagggcacaagtgtatgagggc

SEQ ID NO: 67078 - DNA, 628 bp, Homo sapiens
taatataagctgatggccgaaattatctgccttactttagttactataatatctattaagtgtaaatttcttttgaaagaaaacagatacatttttctcagaaatgtctttagatgaagatctagcacatctgtgtttctcactttttaaaatgttgattttattgataaataaatatatatagggtacaatgtggtacgatacawgtaaatattgtgaaatggacaaattaggctaaaaaacatatccttcacctcagatatttattacattatggtgaaacatttaaaatgtactattttagcacttttaagatatgcactacattataagtgactgcagtcactttgctgtgcaccatatcaccagaatgtctttctcctaactgaagcattatcccattgaatatttcccctttttccacccctgccccccaccctgctcagcctctgataaaccaccattctactcttaacttctatgagtgcacagttttggatttcacatataagtgatattaagagatatttgtctttctgtgtctggcttattttacttagcataatgtcctctaaatccatccatgtttttgcaaatgacagaatttcattcatttataaagataagc

SEQ ID NO: 67079 - DNA, 589 bp, Homo sapiens
atgtctccttccaacatggaaggatattccaagactcagtataaacaagtaccgagkgaagactttgaacgcactcctcagagtccgactctcccacctgctaaggtagctgcccctaatctaagtcgaatgggcgtgattcctgtgatgattcccgcacagagcaaggatgggtctatagtatagagcctccatacgtctcatctgtgctctccgtgttcctttccttttttgatatatgaaaacctattctggtctaaattttgttactagcctcaaaatgtatccaaaaataagttaatcaggagctgtaaggaatatatttttttaaatttttctttggttatatcgaaatagttacaggcattaaagttagtaaagacaagtttaccatctgaaaaagctggattttctttaagaggttgattataaaggtttctaaatttatcagtacctaagtaagatgtagcactttgaatatgaaatcataagtgaagacattggtgaacttacttgcataccaagttgatacttgagtaaccatctgaaagtggtacttgataatttttaccgttatttttaggatgtg

SEQ ID NO: 67080 - DNA, 589 bp, Homo sapiens
atgtctccttccaacatggaaggatattccaagactcagtataaacaagtaccgagggaagactttgaacgcactcctcagagtccgactctcccacctgctaaggtagctgcccctaatctaagtcgaatgggcgtgattcctgtgatgattcccgcacagagcaaggatgggtctatagtatagagcctccatacgtctcatctgtgctctccgtgttcctttccttttttgatatatgaaaacctattctggtctaaattttgttactagcctcaaaatgtatccaaaaataagttaatcaggagctgtaaggaatatatttttttaaatttttctttggttatatcgaaatagttacaggcattaaagttagtaaagacaagtttaccatckgaaaaagctggattttctttaagaggttgattataaaggtttctaaatttatcagtacctaagtaagatgtagcactttgaatatgaaatcataagtgaagacattggtgaacttacttgcataccaagttgatacttgagtaaccatctgaaagtggtacttgataatttttaccgttatttttaggatgtg

SEQ ID NO: 67081 - DNA, 570 bp, Homo sapiens
caatgcaggcagtgacaccctagatagcacccccaacccaccccacactgtgaaaagtgcagccctgatagcccctgtcctaccactctggtcatgctgcagtctctgttaccaccaccaccagccacagtgaggcaagccactgggccgcaggctctagcctccagcagctgggcagggagcagctcttgctgatggcggcctgctaccactccaaccacgctgctgtctccatggccatcttctttgactacaaaagaataaaactaggtatcaataagaagagtaattttggaaaccatacagtcacatggaagttaaacagtacgctcctgaatgaatgactagtcwtagtatcaatgaagatactaagatggaaattgaaaaatttcatgaaacaaatggtaatgaagacacaatataccaaaacttatgatatgccaaaaacagtacaaaggaagagattcatagctgtaagtgcctaccatccaaacagaagaaaaacttcaaataaaccatacatcttaaagaactagtaaagtaagaacaaactaaacccaaaataagaaa

SEQ ID NO: 67082 - DNA, 570 bp, Homo sapiens
caatgcaggcagtgacaccctagatagcacccccaacccaccccacactgtgaaaagtgcagccctgatagcccctgtcctaccactctggtcatgctgcagtctctgttaccaccaccaccagccacagtgaggcaagccactgggccgcaggctctagcctccagcagctgggcagggagcagctcttgctgatggcggcctgctaccactccaaccacgctgctgtctccatggccatcttctttgactacaaaagaataaaactaggtatcaataagaagagtaattttggaaaccatacagtcacatggaagttaaacagtacgctcctgaatgaatgactagtctkagtatcaatgaagatactaagatggaaattgaaaaatttcatgaaacaaatggtaatgaagacacaatataccaaaacttatgatatgccaaaaacagtacaaaggaagagattcatagctgtaagtgcctaccatccaaacagaagaaaaacttcaaataaaccatacatcttaaagaactagtaaagtaagaacaaactaaacccaaaataagaaa

SEQ ID NO: 67083 - DNA, 570 bp, Homo sapiens
caatgcaggcagtgacaccctagatagcacccccaacccaccccacactgtgaaaagtgcagccctgatagcccctgtcctaccactctggtcatgctgcagtctctgttaccaccaccaccagccacagtgaggcaagccactgggccgcaggctctagcctccagcagctgggcagggagcagctcttgctgatggcggcctgctaccactccaaccacgctgctgtctccatggccatcttctttgactacaaaagaataaaactaggtatcaataagaagagtaattttggaaaccatacagtcacatggaagttaaacagtacgctcctgaatgaatgactagtcttwgtatcaatgaagatactaagatggaaattgaaaaatttcatgaaacaaatggtaatgaagacacaatataccaaaacttatgatatgccaaaaacagtacaaaggaagagattcatagctgtaagtgcctaccatccaaacagaagaaaaacttcaaataaaccatacatcttaaagaactagtaaagtaagaacaaactaaacccaaaataagaaa

SEQ ID NO: 67084 - DNA, 570 bp, Homo sapiens
caatgcaggcagtgacaccctagatagcacccccaacccaccccacactgtgaaaagtgcagccctgatagcccctgtcctaccactctggtcatgctgcagtctctgttaccaccaccaccagccacagtgaggcaagccactgggccgcaggctctagcctccagcagctgggcagggagcagctcttgctgatggcggcctgctaccactccaaccacgctgctgtctccatggccatcttctttgactacaaaagaataaaactaggtatcaataagaagagtaattttggaaaccatacagtcacatggaagttaaacagtacgctcctgaatgaatgactagtcttagkatcaatgaagatactaagatggaaattgaaaaatttcatgaaacaaatggtaatgaagacacaatataccaaaacttatgatatgccaaaaacagtacaaaggaagagattcatagctgtaagtgcctaccatccaaacagaagaaaaacttcaaataaaccatacatcttaaagaactagtaaagtaagaacaaactaaacccaaaataagaaa

SEQ ID NO: 67085 - DNA, 570 bp, Homo sapiens
caatgcaggcagtgacaccctagatagcacccccaacccaccccacactgtgaaaagtgcagccctgatagcccctgtcctaccactctggtcatgctgcagtctctgttaccaccaccaccagccacagtgaggcaagccactgggccgcaggctctagcctccagcagctgggcagggagcagctcttgctgatggcggcctgctaccactccaaccacgctgctgtctccatggccatcttctttgactacaaaagaataaaactaggtatcaataagaagagtaattttggaaaccatacagtcacatggaagttaaacagtacgctcctgaatgaatgactagtcttagtrtcaatgaagatactaagatggaaattgaaaaatttcatgaaacaaatggtaatgaagacacaatataccaaaacttatgatatgccaaaaacagtacaaaggaagagattcatagctgtaagtgcctaccatccaaacagaagaaaaacttcaaataaaccatacatcttaaagaactagtaaagtaagaacaaactaaacccaaaataagaaa

SEQ ID NO: 67086 - DNA, 824 bp, Homo sapiens
tgcatactgaatttgtacttctaatgctttgcttaccacacattaccaaaaatgaacacattacattgataaagtataagattgatctaaaataataaaaaagaaatatagtaataaaaattttttatraattcaagtacaatccagttttctattttaatccatatatattataccaaagtacaaaaaatatataagcttctttacttgaaaaatctccctaaggcttttgctcaacctatcaccacatctgtccatttaatattctcttttttttgccattaatatagaggcccctaaatttgacttcatttttttatttatttgtttattttaaattcataaaattctatgtattcattatgtacatggtgttttgaagaataaatacattgtggaatggttaaatatagttaattaaaatacacattacctcatatagttattttgcaacaaaagcattcaacatctactctgcatttttcaggaatataatattttgttattaactgtggtcaccatgctgcacaataaatctcttgaactcattccttctatctaactgtaattttctatcctttgaccaacatctccttaacaccttcccctcccaactgcccagcctctggtaaccatggttctactctctgcttctatgagatcaacttttttagattccacatgtgagtgaaatcctacagtctttgtctttgtgtgcctggcttattatacttaacataatgtccttcaggttcattcatgctgttgccaatgatgggatttccttctttattatgtctgaatagtattccaatttatagatc

SEQ ID NO: 67087 - DNA, 824 bp, Homo sapiens
tgcatactgaatttgtacttctaatgctttgcttaccacacattaccaaaaatgaacacattacattgataaagtataagattgatctaaaataataaaaaagaaatatagtaataaaaattttttatgaattcaartacaatccagttttctattttaatccatatatattataccaaagtacaaaaaatatataagcttctttacttgaaaaatctccctaaggcttttgctcaacctatcaccacatctgtccatttaatattctcttttttttgccattaatatagaggcccctaaatttgacttcatttttttatttatttgtttattttaaattcataaaattctatgtattcattatgtacatggtgttttgaagaataaatacattgtggaatggttaaatatagttaattaaaatacacattacctcatatagttattttgcaacaaaagcattcaacatctactctgcatttttcaggaatataatattttgttattaactgtggtcaccatgctgcacaataaatctcttgaactcattccttctatctaactgtaattttctatcctttgaccaacatctccttaacaccttcccctcccaactgcccagcctctggtaaccatggttctactctctgcttctatgagatcaacttttttagattccacatgtgagtgaaatcctacagtctttgtctttgtgtgcctggcttattatacttaacataatgtccttcaggttcattcatgctgttgccaatgatgggatttccttctttattatgtctgaatagtattccaatttatagatc

SEQ ID NO: 67088 - DNA, 824 bp, Homo sapiens
tgcatactgaatttgtacttctaatgctttgcttaccacacattaccaaaaatgaacacattacattgataaagtataagattgatctaaaataataaaaaagaaatatagtaataaaaattttttatgaattcaagtacaatccagttttctattttaatccatatatattataccaaagtacaaaaaatatataagcttctttacttgaaaaatctccctaaggcttttgctcaacctatcaccacatctgtccrtttaatattctcttttttttgccattaatatagaggcccctaaatttgacttcatttttttatttatttgtttattttaaattcataaaattctatgtattcattatgtacatggtgttttgaagaataaatacattgtggaatggttaaatatagttaattaaaatacacattacctcatatagttattttgcaacaaaagcattcaacatctactctgcatttttcaggaatataatattttgttattaactgtggtcaccatgctgcacaataaatctcttgaactcattccttctatctaactgtaattttctatcctttgaccaacatctccttaacaccttcccctcccaactgcccagcctctggtaaccatggttctactctctgcttctatgagatcaacttttttagattccacatgtgagtgaaatcctacagtctttgtctttgtgtgcctggcttattatacttaacataatgtccttcaggttcattcatgctgttgccaatgatgggatttccttctttattatgtctgaatagtattccaatttatagatc

SEQ ID NO: 67089 - DNA, 824 bp, Homo sapiens
tgcatactgaatttgtacttctaatgctttgcttaccacacattaccaaaaatgaacacattacattgataaagtataagattgatctaaaataataaaaaagaaatatagtaataaaaattttttatgaattcaagtacaatccagttttctattttaatccatatatattataccaaagtacaaaaaatatataagcttctttacttgaaaaatctccctaaggcttttgctcaacctatcaccacatctgtccatttaatattctcttttttttgccattaatatagaggcccctaaatttgacttcatttttttatttatttgtttattttaaattcataaaattctatgtattcattatgtacayggtgttttgaagaataaatacattgtggaatggttaaatatagttaattaaaatacacattacctcatatagttattttgcaacaaaagcattcaacatctactctgcatttttcaggaatataatattttgttattaactgtggtcaccatgctgcacaataaatctcttgaactcattccttctatctaactgtaattttctatcctttgaccaacatctccttaacaccttcccctcccaactgcccagcctctggtaaccatggttctactctctgcttctatgagatcaacttttttagattccacatgtgagtgaaatcctacagtctttgtctttgtgtgcctggcttattatacttaacataatgtccttcaggttcattcatgctgttgccaatgatgggatttccttctttattatgtctgaatagtattccaatttatagatc

SEQ ID NO: 67090 - DNA, 583 bp, Homo sapiens
ttgcataaaattagaaaagacagacaatttcaaaacaaattatattttcttgaaaacatctccaatgttttccatatttcaatagtttggattaaacctatgaatttcttaatattcatcagaatgtaattcaacattctttatttgtgagcatttctaaacattgataaaacttcagaatacacaaatgwtatacactcagtttgattctccacttttatccatttcttttttgattcagtcattcaacacaattttatagaacacctcctaggtactgagcagtgttcttggaactggggattttcatggtaaacaagataacagggtgcttgctataatgaaggatattctattgtgttagctgtgtgtgtttgtgtgtgcgtgtgtgtgtgtctgtgtagagtatttggggaggtgtgtctaaacacaataagacaatttcagagaatagtaagtgttatgaaagaaataaaactgggtgatgtgagagaatttgttgctgaggttagggttaggggttggctgatttaaatggagtatcctccaaagacctctgccatacagtaatatatgccctgaa

SEQ ID NO: 67091 - DNA, 583 bp, Homo sapiens
ttgcataaaattagaaaagacagacaatttcaaaacaaattatattttcttgaaaacatctccaatgttttccatatttcaatagtttggattaaacctatgaatttcttaatattcatcagaatgtaattcaacattctttatttgtgagcatttctaaacattgataaaacttcagaatacacaaatgatatacactcagtttgattctccacttttatccatttcttttttgattcagtcattcaacacaattttatagaacacctcctaggtactgagcagtgttctkggaactggggattttcatggtaaacaagataacagggtgcttgctataatgaaggatattctattgtgttagctgtgtgtgtttgtgtgtgcgtgtgtgtgtgtctgtgtagagtatttggggaggtgtgtctaaacacaataagacaatttcagagaatagtaagtgttatgaaagaaataaaactgggtgatgtgagagaatttgttgctgaggttagggttaggggttggctgatttaaatggagtatcctccaaagacctctgccatacagtaatatatgccctgaa

SEQ ID NO: 67092 - DNA, 583 bp, Homo sapiens
ttgcataaaattagaaaagacagacaatttcaaaacaaattatattttcttgaaaacatctccaatgttttccatatttcaatagtttggattaaacctatgaatttcttaatattcatcagaatgtaattcaacattctttatttgtgagcatttctaaacattgataaaacttcagaatacacaaatgatatacactcagtttgattctccacttttatccatttcttttttgattcagtcattcaacacaattttatagaacacctcctaggtactgagcagtgttcttggaactggggattttcatggtaaacaagataacagggtgcttgctataatgaaggatattctattgtgtyagctgtgtgtgtttgtgtgtgcgtgtgtgtgtgtctgtgtagagtatttggggaggtgtgtctaaacacaataagacaatttcagagaatagtaagtgttatgaaagaaataaaactgggtgatgtgagagaatttgttgctgaggttagggttaggggttggctgatttaaatggagtatcctccaaagacctctgccatacagtaatatatgccctgaa

SEQ ID NO: 67093 - DNA, 1590 bp, Homo sapiens
taattctcttccacattacacagtaaaataaatgaattcattttggcygactgctgttttgggttatttccccattttgctgttttgggttatttccccaatttccttagatgtgtacaaaaaaattagtgctgatgatatttttaatcttaaccctcatctgcttttttgatagatttttttcccagattttttctgttaacccaagcccacacagccagcaaaactcccaagaactcttgcaaccaatttttccttttcaattgtataaagctttgaaagttattgattctgcaaatgtgaaaaattaacttatcaaaaaatagcacacataaaatgggaactggccaaagaaacacaaagaatattgttttaactggaagttctatcattaactgctacaactactgtattcctgatatggctttttgcaatatatttatcactatatgggaacgatttaatctgctccatagagagagcagtaggagctctcagtggcctcaaaatatgatggttcttaccaaaaacaacgaatctaaatttcttgcagatagtaggcctaacttttttttttctaaaaggaaataactctcctctaaaagtcaaatttgtttttaaaactgtggtgtctttaaccactttccccccccccagtttttcacttgacaccttgtcatgagttacagtggcttgcatcaatcattctgggttcacacagaaaatattttgtggtggttgactatcacatgcgagaaactaagtgccctttgcgggtgactgcgcaggtacctctgatttcttgccaaatcattcagaatgccgcaaatccattaaatctctccacagggaggaaaaagttcccgcattctagagagagaatttatgagttcatttcaatcaccacaaatgaaagccacccttaatattcattagagattttacagtggcaatatgcattatctattcatatgcccctctaaaaggccaatttcccttgaaaccttgcatggctccaagccactctttgtagaaacaatggcctatgtccaagtggaatcaggggaggcaaatggatgacatttccttatccattggtagtaattccactaagccactatggtggctatgagtttctgagctttaaaaattaaaggacagatttggaatgtgcagtcgtgtcattgtatcacttctctgctgtcatctgtgaccatatgtcctaaattgaatagagcttttcggttggcatcacaagagatgacttttgaaactgacatttctttcatttggagaaatgtatatgttggagacataatcctatgagcctgagagcttttcattaatctctgtctttctaccaccatagttcacgccaccatcatctttcatctatttttcccttcaaatctattttcttcactgtatgtagagtgatctttccaaaatatcaactcaagcctcatatcctcaacaaatcaacaagaaatatcaaaataagcccttggcttaaaacagttcttgcttagcttcctcattgcttttagggaagacacagcaaaacagcataacctgtaagaccatatgtgg

SEQ ID NO: 67094 - DNA, 1590 bp, Homo sapiens
taattctcttccacattacacagtaaaataaatgaattcattttggccgactgctgttttgggttatttccccattttgctgttttgggttatttccccaatttccttagatgtgtacaaaaaaattagtgctgatgatatttttaatcttaaccctcatctgcttttttgatagatttttttcccagattttttctgttaacccaagcccacacagccagcaaaactcccaagaactcttgcaaccaatttttccttttcaattgtataaagctttgaaagttattgattctgcaaatgtgaaaaattaacttatcaaaaaatagcacacataaaatgggaactggccaaagaaacacaaagaatattgttttaactggaagttctatcattaactgctacaactactgtattcctgatatggctttttgcaatatatttatcactatatgggaacgatttaatctgctccatagagagagcagtaggagctctcagtggcctcaaaatatgatggttcttaccaaaaacaacgaatctaaatttcttgcagatrgtaggcctaacttttttttttctaaaaggaaataactctcctctaaaagtcaaatttgtttttaaaactgtggtgtctttaaccactttccccccccccagtttttcacttgacaccttgtcatgagttacagtggcttgcatcaatcattctgggttcacacagaaaatattttgtggtggttgactatcacatgcgagaaactaagtgccctttgcgggtgactgcgcaggtacctctgatttcttgccaaatcattcagaatgccgcaaatccattaaatctctccacagggaggaaaaagttcccgcattctagagagagaatttatgagttcatttcaatcaccacaaatgaaagccacccttaatattcattagagattttacagtggcaatatgcattatctattcatatgcccctctaaaaggccaatttcccttgaaaccttgcatggctccaagccactctttgtagaaacaatggcctatgtccaagtggaatcaggggaggcaaatggatgacatttccttatccattggtagtaattccactaagccactatggtggctatgagtttctgagctttaaaaattaaaggacagatttggaatgtgcagtcgtgtcattgtatcacttctctgctgtcatctgtgaccatatgtcctaaattgaatagagcttttcggttggcatcacaagagatgacttttgaaactgacatttctttcatttggagaaatgtatatgttggagacataatcctatgagcctgagagcttttcattaatctctgtctttctaccaccatagttcacgccaccatcatctttcatctatttttcccttcaaatctattttcttcactgtatgtagagtgatctttccaaaatatcaactcaagcctcatatcctcaacaaatcaacaagaaatatcaaaataagcccttggcttaaaacagttcttgcttagcttcctcattgcttttagggaagacacagcaaaacagcataacctgtaagaccatatgtgg

SEQ ID NO: 67095 - DNA, 760 bp, Homo sapiens
tggggcttgaaacgatgacaggttaatgggtgcagcaaacccccatggcacatgtatacctatgtaacaaacctgcacattcagcrcatgtatcccagaacttaataaaataaaataagaaaatcaagaaccactatgtccgtatctcataaaaatctttgagtctgtttcataatattccttcttggggtaaattttgttgctagaaaatttactttcaatggtccctctttaacaaaaaacagtaatgctcactcttttaaaaaaataaagtaaaaaaaaaattatttctgccaacccaccagatttcacaatggtaatgtgggccaaccacaaatcagttattgtgtgctccttcaatgttcccctctgtgtatatttgaactgagattactaaaatagataaatgtgcattttttattttataaatagtttgtacagctctgtatatagtattctttgtctatatgtgtgtttgtatttaaggatatgtttatgtttttctctctctaaatgatagaattgtggatttaattttctactttctaattgctgtattttcaattgttttctgaaacagtatatgttgctttttaaatcaagggaaaatacagataatttaatgctttttagaatttcccattaaaataatttccattcaggaacaaactagagaacagtctgagaatgtgtgatggttgttgtcatcccagtactcctattcagatgacaggcctgattcattctcctgcaaagaact

SEQ ID NO: 67096 - DNA, 760 bp, Homo sapiens
tggggcttgaaacgatgacaggttaatgggtgcagcaaacccccatggcacatgtatacctatgtaacaaacctgcacattcagcgcatgtatcccagaacttaataaaataaaataagaaaatcaagaaccactatgtccgtatctcataaaaatctttgagtctgtttcataatattccttcttggggtaaattttgttgctagaaaatttactttcaatggtccctctttaacaaaaaacagtaatgctcactcttttaaaaaaataaagtaaaaaaaaaattatttctgccaacccaccagatttcacaatggtaatstgggccaaccacaaatcagttattgtgtgctccttcaatgttcccctctgtgtatatttgaactgagattactaaaatagataaatgtgcattttttattttataaatagtttgtacagctctgtatatagtattctttgtctatatgtgtgtttgtatttaaggatatgtttatgtttttctctctctaaatgatagaattgtggatttaattttctactttctaattgctgtattttcaattgttttctgaaacagtatatgttgctttttaaatcaagggaaaatacagataatttaatgctttttagaatttcccattaaaataatttccattcaggaacaaactagagaacagtctgagaatgtgtgatggttgttgtcatcccagtactcctattcagatgacaggcctgattcattctcctgcaaagaact

SEQ ID NO: 67097 - DNA, 750 bp, Homo sapiens
aaaaatttttttttactttatttgtacatataatggaaccttttgatctacagctcaaaggcaaaaagcaatcattccaaattaaattatcttggttaatatggctgtttacaatagggaatatggctcatcacactccaactgaaaaataaagactttctaatctcaatagcctggcctgtaataagaatataaaattataaacgcaaactttcaactcccaagtgaagcatgaattccagagccactgtatattgagagtggggagaagtgtatgcttaagggtaagattcatattttatattttatmtccctggaggaacagcgtctctcctcaaagagagagccatcacagtgtaaagcataatacaatggcaatcaaaggggcatccacagataaccatgttcattacattgcctttaattgctttagcctaaaagacagcagcccaaaagtatagatccatggcagatcattgtacttaaacagtcaaatatgtatccttcatattttaaaatatagccactggcccaccaaataggagttctactgtccacttctctcacactgccttctacacagtataaaacctttcatcttgacataattagaagaatcttccaaacaagtaaaactatgacttgctcacatgcctacttttcccacatgaccgtggcaaaatcagatattgtcagacaacttgaggacctcaattcaccatagaattttcataaaatggttaagaggta

SEQ ID NO: 67098 - DNA, 750 bp, Homo sapiens
aaaaatttttttttactttatttgtacatataatggaaccttttgatctacagctcaaaggcaaaaagcaatcattccaaattaaattatcttggttaatatggctgtttacaatagggaatatggctcatcacactccaactgaaaaataaagactttctaatctcaatagcctggcctgtaataagaatataaaattataaacgcaaactttcaactcccaagtgaagcatgaattccagagccactgtatattgagagtggggagaagtgtatgcttaagggtaagattcatattttatattttatctccctggaggaacagcgtctctcctcaaagagaragccatcacagtgtaaagcataatacaatggcaatcaaaggggcatccacagataaccatgttcattacattgcctttaattgctttagcctaaaagacagcagcccaaaagtatagatccatggcagatcattgtacttaaacagtcaaatatgtatccttcatattttaaaatatagccactggcccaccaaataggagttctactgtccacttctctcacactgccttctacacagtataaaacctttcatcttgacataattagaagaatcttccaaacaagtaaaactatgacttgctcacatgcctacttttcccacatgaccgtggcaaaatcagatattgtcagacaacttgaggacctcaattcaccatagaattttcataaaatggttaagaggta

SEQ ID NO: 67099 - DNA, 750 bp, Homo sapiens
aaaaatttttttttactttatttgtacatataatggaaccttttgatctacagctcaaaggcaaaaagcaatcattccaaattaaattatcttggttaatatggctgtttacaatagggaatatggctcatcacactccaactgaaaaataaagactttctaatctcaatagcctggcctgtaataagaatataaaattataaacgcaaactttcaactcccaagtgaagcatgaattccagagccactgtatattgagagtggggagaagtgtatgcttaagggtaagattcatattttatattttatctccctggaggaacagcgtctctcctcaaagagagagccatcacagtgtaaagcataatacaatggcaatcaaaggggcatccacagataaccatgttcattacattgcctttaattgctttagcctaaaagacagcagcccaaaagtatagatccatggcagatcattgtacttaaacagtcaaatatgtatccttcatattttaaaatatagccactggcccaccaaataggagttctactgtccacttctctcacactgccttctacacagtataaaacctttcatcttgacataattagaagaatcttccaaacaagtaaaactatgacttgctcacatgcctacttttcccacatgaccrtggcaaaatcagatattgtcagacaacttgaggacctcaattcaccatagaattttcataaaatggttaagaggta

SEQ ID NO: 67100 - DNA, 1047 bp, Homo sapiens
gatcrcatccccttgtcacggcaggcttgcaaaaatatattaggaacgagggagggcaatgtgcacagagaagacagacctgctcctgtaccttgtcatttgtactccagtgatgaatttctaaactacgtatttgagcatgttaatgaaaaagaaaagagcaaaggaaagaaaagagaaggggagagagaaaatgacaaaagaacagaggaaaaaaaaacactaggcaaaaaccagaggaaaatgaggcaggaatattaggttggctaacaaagtacgttttggtcaaccggctttggcataaacggacttggtgcctgggaaataaagcagataggtgagtggggggctgaaccactctggaagatctagatgtggttggggaatgaggaattgtcagagagaattaggggtatttattgcatggtaccctagactgggctccaggactgaccccttgctgaatgagaagctagacacacaggcgttttttaagattaaaagaaaaatgagaagagggtgacttggtgtctgaactaagctcaactactaaaatagacaaaatagcccagtggcgaaaggttaatttgttggcccccagaccctgaagcaaagcttcagagggggcccctttgatctttgctggttactaaatgaatagcctgtagtcaccacctcctgggtcccagaaaccaaagactacttattgatcagtattgaacaaaatttggcaattgaaatagtagcaatatattatctggttttggggagggggatggaagtctgagtattttcactaggactagtatggattttgcaggtggtccctaatgcttagctcactaacaatctcactctcccttttctagagctcagaccctctctttaaatagctaacccttcaggcttactgagtatcagttactgatttgttgaagttaactacagtgtgtttatttgggaaggaggttacttgaacgtgcccttaaattgctttgacttccaactgcaacaaaacacgtcttggcttctttggctgaggggatg

SEQ ID NO: 67101 - DNA, 616 bp, Homo sapiens
tggtgatacctcaattgttcacaacttctgtgggtaaaacatactttgggcaaagttggcycaggtaggggaaaattcctgactcttcattgttttagtggctgctgagaaagctcaaccatttcttttgtaaagccttctgagacccatcaagaagaggtgatcccttcctcctttgcacctttactagcgctttgacatgttcttgtttttgtatcaatttacaatctcctcccttcctagactcttatctcttcgaaggaaagatctgtttctttgaattcctaacacatttcatagttcctgacataaaattttgggattaaatatgggtggatgaatgaatggatgaatggatagggagagaaaaacaagactcagtaggctactgaagttgtctggcctggggctgctgaactagaactaactcaccccatgctcccaccgttgagtcaacttggagagaaaaaatgagggaagtaatctcaagcagttattatatgacatctgtgctacttgataggagtcgctactgagaggagaagaagcttcctccattttaaccaaggttgttgcagatcaaccttcctcctggtatgaggagagaagagattat

SEQ ID NO: 67102 - DNA, 683 bp, Homo sapiens
aatgtccacttacttccattagatcaaatactaagaagactggcccaagataccaacgaaaatgtttcacaaattaaactgtrgctaatgaaatgaattttatggctatcagtttaggaagacttttgtgctgtatctttgattagacttcacattaatattttccattttattatataaatatagaaaaacagagatgggaaaaaacaaaactactcctttgaggacttctaaattgcccagtttacattttcataaccaagactaagaattaaaacccaaaagacaggaataaaagatttactgttatacaagtccagtattataaacactgtcattcaaaagttgggctgctttttttgcatttaatgaggaatttatgaattctcatacaccattcatctttcactaagcactcttttgagtactaaaacatttgtttgaatgtggcgtattgacatatgaggcagtaataacaaaacaaacacataaacaaatcctcgaacttgaaaaagtcattgcctccaaaaacacatctcttttcttcaacaccctcagtttgtgactttcatttatggtgtttttcttttaatctcaaacttcactattaacagttatacatatggtgtatgagtcctctggggcctaggtcaacatccaggccaacagattggtccacctgt

SEQ ID NO: 67103 - DNA, 683 bp, Homo sapiens
aatgtccacttacttccattagatcaaatactaagaagactggcccaagataccaacgaaaatgtttcacaaattaaactgtagctaatgaaatgaattttatggctatcagtttaggaagacttttgtgctgtatctttgattagacttcacattaatattttccattttattatataaatatagaaaaacagagatgggaaaaaacaaaactactcctttgaggacttctaaattgcccagtttacattttcataaccaagactaagaattaaaacccaaaagacaggaataaaagatttactgttatacaagtccagtrttataaacactgtcattcaaaagttgggctgctttttttgcatttaatgaggaatttatgaattctcatacaccattcatctttcactaagcactcttttgagtactaaaacatttgtttgaatgtggcgtattgacatatgaggcagtaataacaaaacaaacacataaacaaatcctcgaacttgaaaaagtcattgcctccaaaaacacatctcttttcttcaacaccctcagtttgtgactttcatttatggtgtttttcttttaatctcaaacttcactattaacagttatacatatggtgtatgagtcctctggggcctaggtcaacatccaggccaacagattggtccacctgt

SEQ ID NO: 67104 - DNA, 683 bp, Homo sapiens
aatgtccacttacttccattagatcaaatactaagaagactggcccaagataccaacgaaaatgtttcacaaattaaactgtagctaatgaaatgaattttatggctatcagtttaggaagacttttgtgctgtatctttgattagacttcacattaatattttccattttattatataaatatagaaaaacagagatgggaaaaaacaaaactactcctttgaggacttctaaattgcccagtttacattttcataaccaagactaagaattaaaacccaaaagacaggaataaaagatttactgttatacaagtccagtattataaacactgtcattcaaaagttgggctgctttttttgcatttaatgaggaatttatgaattctcatacaccattcatctttcactaagcactcttttgagtactaaaacatttgtttkaatgtggcgtattgacatatgaggcagtaataacaaaacaaacacataaacaaatcctcgaacttgaaaaagtcattgcctccaaaaacacatctcttttcttcaacaccctcagtttgtgactttcatttatggtgtttttcttttaatctcaaacttcactattaacagttatacatatggtgtatgagtcctctggggcctaggtcaacatccaggccaacagattggtccacctgt

SEQ ID NO: 67105 - DNA, 683 bp, Homo sapiens
aatgtccacttacttccattagatcaaatactaagaagactggcccaagataccaacgaaaatgtttcacaaattaaactgtagctaatgaaatgaattttatggctatcagtttaggaagacttttgtgctgtatctttgattagacttcacattaatattttccattttattatataaatatagaaaaacagagatgggaaaaaacaaaactactcctttgaggacttctaaattgcccagtttacattttcataaccaagactaagaattaaaacccaaaagacaggaataaaagatttactgttatacaagtccagtattataaacactgtcattcaaaagttgggctgctttttttgcatttaatgaggaatttatgaattctcatacaccattcatctttcactaagcactcttttgagtactaaaacatttgtttgaatgtggcgtattgacatatgaggcagtaataacaaaacaaacacataaacaaatcctcgaacttgaaaaagtcattgcctccaaaaacacatctcttttcttcaacaccctcagtttgtgactttcatttatggtgtttttcttttaatctcaaacttcactattaacagttatacatatggtgtatgagtcctckggggcctaggtcaacatccaggccaacagattggtccacctgt

SEQ ID NO: 67106 - DNA, 509 bp, Homo sapiens
gtgatggagggagggtggtaaacaggaaataagagagggtcttcacaaagatgcattgttgagttggccaccacgtgaggctgctcatatggaagggctttcggagaagtgtgatgaaatgaacctcggcaacagacactctcagcctcagagagaccccagggcagggagtaagtggcacatctggtatacccaagtccttgtcctgctagggtacccatgggatgagaagtcaagcctatgcagagttagctttcatatctgtggctacrcaaagaggggaggcagggagaatttgatatgtggcaagagagctgtatgctgcccccaaaaagggattactaacacttgcatataagttgtagaacttgcctttaatttgatacaataaaatgaatcatcggattaattttgggaatgttgatattaaacagccaaactcctaataggtaattttatgattgatgtctttaccaagatatacagcttcctcaggagagaatagtaca

SEQ ID NO: 67107 - DNA, 509 bp, Homo sapiens
gtgatggagggagggtggtaaacaggaaataagagagggtcttcacaaagatgcattgttgagttggccaccacgtgaggctgctcatatggaagggctttcggagaagtgtgatgaaatgaacctcggcaacagacactctcagcctcagagagaccccagggcagggagtaagtggcacatctggtatacccaagtccttgtcctgctagggtacccatgggatgagaagtcaagcctatgcagagttagctttcatatctgtggctacayaaagaggggaggcagggagaatttgatatgtggcaagagagctgtatgctgcccccaaaaagggattactaacacttgcatataagttgtagaacttgcctttaatttgatacaataaaatgaatcatcggattaattttgggaatgttgatattaaacagccaaactcctaataggtaattttatgattgatgtctttaccaagatatacagcttcctcaggagagaatagtaca

SEQ ID NO: 67108 - DNA, 789 bp, Homo sapiens
atcctaaaaactgggaagactaatagaagaaaaagtaaaggaagtaaagaaagagggtttcttttacctcttttgaatgcagagatgatcttaggcaacatttgaaacagagtatgcttttgtgttttttaacagttttattgagacataatctacctaccatataattcacccatttaaagtgtatcattcagtagcttttaggatattcacagcattgtgcaaacaacacaacaatcaattttagaactttttaagaaaagcaccacagaaagaaaccctgtattccttagccaataccctccaatccctgcttgcttactctagtactagccaaccactaacctactttccatctctctagatttgcctgttctagacatgttatataaatggtatcaaaaatatgtggtcctttgtaactgccttctttcacttagcatgaggttttccaggtcagtacatgctacaaaaaaacaaaacaaaacaaaacaaaaaacwctttatttctttttatggccaactaatataaaaagaaacttcatttctttttgtggctaaataatatttcattgttatgtatacaacatgttttatttatacatccatcactgaggcacatttttggggggttgtttccactttttggctattttaaataaagctgctacaaatatttaactctaagtttttacatggacatatattttcagttctcctcagtacatggctaggagtggaattgctgggtcatatggtaattctttgttaattttttaagaaactgcc

SEQ ID NO: 67109 - DNA, 708 bp, Homo sapiens
cgtttgccagtatttattgaggatttttgcrtcggtgttcatcagagatattggtcgaaaattctctttttttgttgtgtctctgccaggctttggtatcaggatgatgctggcctcataaaatgagttagggaggattccctctttttctattgattggaatagtttcagaaggaacagtacaaactccttcttgtacctctggtataatttggctgtgaatctgtctggtcctggactttttttggttggtaggctattaattattgcctcaagttcagagcctgttattggtctactcagagattcaacttcttccttatttagtcttgggagggtgtatgtgtccaggaatttatcaatttcttctagattttctagtttatttgcatagagttgtttatagtcttttctgatggtagtttgtatttctgtgggatcggtggtgatatcccctttatcattttttattgcgtctatttgattcttccctcttttcttctttattagtcttgctagtggtctatcaattttgttgatcttttcaaaagaccagctcctggattcattgattttttgaagggctttttgtgtctctgcctccttcagttaacatcatgctttttgaaaagaggtcactacactcagccgccagttaacaaacaagtgaaaaattatgttctacctctttaagaatatatatatata

SEQ ID NO: 67110 - DNA, 708 bp, Homo sapiens
cgtttgccagtatttattgaggatttttgcatcggtgttcatcagagatattggtcgaaaattctctttttttgttgtgtctctgccaggctttggtatcaggatgatgctggcctcataaaatgagttagggaggattccctctttttctattgattggaatagtttcagaaggaacagtacaaactccttcttgtacctctggtataatwtggctgtgaatctgtctggtcctggactttttttggttggtaggctattaattattgcctcaagttcagagcctgttattggtctactcagagattcaacttcttccttatttagtcttgggagggtgtatgtgtccaggaatttatcaatttcttctagattttctagtttatttgcatagagttgtttatagtcttttctgatggtagtttgtatttctgtgggatcggtggtgatatcccctttatcattttttattgcgtctatttgattcttccctcttttcttctttattagtcttgctagtggtctatcaattttgttgatcttttcaaaagaccagctcctggattcattgattttttgaagggctttttgtgtctctgcctccttcagttaacatcatgctttttgaaaagaggtcactacactcagccgccagttaacaaacaagtgaaaaattatgttctacctctttaagaatatatatatata

SEQ ID NO: 67111 - DNA, 708 bp, Homo sapiens
cgtttgccagtatttattgaggatttttgcatcggtgttcatcagagatattggtcgaaaattctctttttttgttgtgtctctgccaggctttggtatcaggatgatgctggcctcataaaatgagttagggaggattccctctttttctattgattggaatagtttcagaaggaacagtacaaactccttcttgtacctctggtataatttggctgtgaatctgtctggtcctgkactttttttggttggtaggctattaattattgcctcaagttcagagcctgttattggtctactcagagattcaacttcttccttatttagtcttgggagggtgtatgtgtccaggaatttatcaatttcttctagattttctagtttatttgcatagagttgtttatagtcttttctgatggtagtttgtatttctgtgggatcggtggtgatatcccctttatcattttttattgcgtctatttgattcttccctcttttcttctttattagtcttgctagtggtctatcaattttgttgatcttttcaaaagaccagctcctggattcattgattttttgaagggctttttgtgtctctgcctccttcagttaacatcatgctttttgaaaagaggtcactacactcagccgccagttaacaaacaagtgaaaaattatgttctacctctttaagaatatatatatata

SEQ ID NO: 67112 - DNA, 708 bp, Homo sapiens
cgtttgccagtatttattgaggatttttgcatcggtgttcatcagagatattggtcgaaaattctctttttttgttgtgtctctgccaggctttggtatcaggatgatgctggcctcataaaatgagttagggaggattccctctttttctattgattggaatagtttcagaaggaacagtacaaactccttcttgtacctctggtataatttggctgtgaatctgtctggtcctggactttttttggytggtaggctattaattattgcctcaagttcagagcctgttattggtctactcagagattcaacttcttccttatttagtcttgggagggtgtatgtgtccaggaatttatcaatttcttctagattttctagtttatttgcatagagttgtttatagtcttttctgatggtagtttgtatttctgtgggatcggtggtgatatcccctttatcattttttattgcgtctatttgattcttccctcttttcttctttattagtcttgctagtggtctatcaattttgttgatcttttcaaaagaccagctcctggattcattgattttttgaagggctttttgtgtctctgcctccttcagttaacatcatgctttttgaaaagaggtcactacactcagccgccagttaacaaacaagtgaaaaattatgttctacctctttaagaatatatatatata

SEQ ID NO: 67113 - DNA, 706 bp, Homo sapiens
atatttctcctccttctagaacacttctccaagagaggagagtatggcctagcagttggtggtgtatcttaagcaaaaaggaaaaaaacaaactatatattgttcaatctgttagcactgtgttgctcagaaaaatgaaagttaatattaaatggtaaccgtaactaaatccaacttcaagtttcaattgttcatgccctccatgagataggcaagatattatgtaaggtgctttcacagggatcataaacttaagtaacttctgggtccaggtagtataagccagacttttaagacaaggggaagtaatggggactgtggtagaccaaagaaggcatatttacctttaagatatttcaaaataggccaacgccgtggctcacgcctgtaattccagcattttggggggccgaggtgggcggatcacctgaggtgaagagttcaagatcagcctggccmacatggtaaaaccccctcgctactgaaaacacaaaaattaactgggcgcgatggtgggcactcgtaatcccaactactcaggaggctgaggcaggagagtcgcttgaactgggaggcagaggttgcagtgagttgagatcacgccactgcactccaggctgggccacagagcgagactgtctcaaaaaaaaaaaaaaaaaaaaaaagatattttaaaataactcttgttagtatgaatttggatccc

SEQ ID NO: 67114 - DNA, 706 bp, Homo sapiens
atatttctcctccttctagaacacttctccaagagaggagagtatggcctagcagttggtggtgtatcttaagcaaaaaggaaaaaaacaaactatatattgttcaatctgttagcactgtgttgctcagaaaaatgaaagttaatattaaatggtaaccgtaactaaatccaacttcaagtttcaattgttcatgccctccatgagataggcaagatattatgtaaggtgctttcacagggatcataaacttaagtaacttctgggtccaggtagtataagccagacttttaagacaaggggaagtaatggggactgtggtagaccaaagaaggcatatttacctttaagatatttcaaaataggccaacgccgtggctcacgcctgtaattccagcattttggggggccgaggtgggcggatcacctgaggtgaagagttcaagatcagcctggcccacatggtaaaaccccstcgctactgaaaacacaaaaattaactgggcgcgatggtgggcactcgtaatcccaactactcaggaggctgaggcaggagagtcgcttgaactgggaggcagaggttgcagtgagttgagatcacgccactgcactccaggctgggccacagagcgagactgtctcaaaaaaaaaaaaaaaaaaaaaaagatattttaaaataactcttgttagtatgaatttggatccc

SEQ ID NO: 67115 - DNA, 764 bp, Homo sapiens
ttttgtgaaattagtcactcaaatacaccacaaatctacttagcaattttaacaattactatgtatctktaattgctgaaagaatttacacaggggatgatactctctgtagaaagaagaagttttaaattactattcattttatgattgaagcccaatgtcttaattgatagataacaagttttttcaataatttaccttcctgaaaaccatacattctcattcagtgacaaagctcagtgtagcaaatttgtgtaccatttaacagaaaagttttgtagtgctctaggtataatatggaagcccataaataaatgtatttattctttccctgcttcctagacacatttttgcttctctttccatgacagtactgaaaaactttcagttaaccaataatttccattagaaaatcatcttcctcatggaaaactaaaatatggttataatttagatatcttagagaagtcacaaggatatcatattctaaaatattaggtatgagtctctttaatattgtgcttctcaattccatttcaaatagcttaccaagctttcaaaaaaatcttgaagaatagccaaatgttttaggagactcagaagtaattgagctcagaatcaaggacagagttctgtggcatacactggagatctcctggtggactcactgcctaagtcatttgttcaaaaaatatttgctgaatgcctactacggacactgctgtgctgggagctggtgaatcagcgatgaactatgggagctg

SEQ ID NO: 67116 - DNA, 732 bp, Homo sapiens
acattgccaaaaataataataatgatgatttcaaacaatcctgatsttctgatttgcaagattggtaaattctttcaggaaagaaattgcttaactcagaagttcccacggttgcttttctattctaaatcttctgggatgtagagatgtcaagattgtgaaagagtttaaatcacttttttctcccacttatgccatacatcttaacttttctctcttccttcaggtcttctctgtgctatgcagattgttccttacctctctcccttcatcctttctttttccttgtcaccttaccaatctaccaattgtttcccttttgaatttccttgaagattgctccgggtctctctcagagagtggtgcccctgcctgggccttgcttggctcctggctcactgctgggcttgctccacccactcagcctggctggctgcactcagcttgtgccactggctgggattctgcacctgccatggttctgtgctcagcctgcggctggcctgggcatgctgtgaccatctttcaccttggatgctggcgtctggatgaggaggatgcagcagtgccccaaaactaggagatgccagcaactgcagaaccccaaggggtgttatggctcttgcctggggagtcctgaggtctgagtccaaaaggggcattaccgctgtctctccttcctgctgcccacagtgccacgagcaggagggacgtttcagttcatttgtgttt

SEQ ID NO: 67117 - DNA, 768 bp, Homo sapiens
aataacgtggaacaactgcttcttcctgccaaaactttatttgaagtttgttaaaaaaaaaaaagttaagacaaacaattataatgacttttcattagcaaaaagctctactttaaaaataaaactctaggacaacttttttcagattcagcatacaggtgaaattcaatttataactctctgaaaacctgttggagcactttcctgttkcttttctcattttatatcacattctgtgctatttttaaagaaactcaatgtgccaagtggaaaatgtttttacatgctatgaaagataaaaagtgctttttcccccaaggatgttttacacattaacctgttttcctttgctttctatttttcacatgccccttgctcatatgttttgactggttttgctccaatgaaggcaaagccacgcccatcaggaacttcaaagtcattgaaactcaccaaagaccaactcctatgatcagcccgtggacaataccggttattttcaaaccagtccttagtcaccaggattcttgacaagctcctgcaaagcagacacaggtttgtcttggtggaagctgctgactgtcatcccctcagtttgaaactcgaggtcctgctttggtgtggaagcagagcttttcttggcaggtgaaagattgcttagcaaaggaaacggtgtcaaatggaatatgtcagaacctatctcagaacaaggtcaccctgaccctaaatgaattccacaaaaactcattggagacactgttttgcaaa

SEQ ID NO: 67118 - DNA, 520 bp, Homo sapiens
ccccttccataacctctgtatccttgtcatcccaaactgcccacatttcgctgaactccttgcacttctcagaggacatcttacctgtcaacccacggtatcagttggctgggggaggtccccaaatactggtgagaccctgacccctgctaatgtccaggcacctgacaccgatatagaaggaatccaaagacgacgagtcagaaaacagtgactgtatgaagatttactgcaaagtgaatctccacggaagtgcagttcasgcctactcaagagagagacactcccagaggggcttggggctgctatctttatgggtttctttagccaaagggtgaaatattcatgaagatttctggaaaaaaggtgaagatttcttggaactgtggtgccacccatttttacaccaaatatgggtgttcccagaagtgtcatggcattggtgggtatgtaatttagtatgttaatgaatgtacagtgaagtcctcatgagacctaggtgaaatccagcaccatgttg

SEQ ID NO: 67119 - DNA, 490 bp, Homo sapiens
ttgctacagagtttcactcttgttgtccaggctggagtgcaatggtgtgatcttggctcaccacaacctcagcctcccaggttcaagcgattctcctgcctcagcctcctgggtagcttggactacaggcgcatgtcaccacggctggctaattttgtgtttttagtacagaaggggtttctccatgttggccaggctggtctcgaactcccgacctcagtcgatctgcctacctcggcctcccaaagtgctgggattataggcgtgagccaccgcacctggccatattgtaaatttaaattataattgtatttagaaatagaatgtatattatgaatccatttgtagagaagttatttatttatttaattwattaattaatttatttatttatttattttgagacagggtctcattctgcagtcaaggctggagtatagtggcacaatcatggctcactgcagccttgaactcctgggctcaagggatc

SEQ ID NO: 67120 - DNA, 490 bp, Homo sapiens
ttgctacagagtttcactcttgttgtccaggctggagtgcaatggtgtgatcttggctcaccacaacctcagcctcccaggttcaagcgattctcctgcctcagcctcctgggtagcttggactacaggcgcatgtcaccacggctggctaattttgtgtttttagtacagaaggggtttctccatgttggccaggctggtctcgaactcccgacctcagtcgatctgcctacctcggcctcccaaagtgctgggattataggcgtgagccaccgcacctggccatattgtaaatttaaattataattgtatttagaaatagaatgtatattatgaatccatttgtagagaagttatttatttatttaattaattwattaatttatttatttatttattttgagacagggtctcattctgcagtcaaggctggagtatagtggcacaatcatggctcactgcagccttgaactcctgggctcaagggatc

SEQ ID NO: 67121 - DNA, 652 bp, Homo sapiens
tcctccgcrcaacatatctgccagccaaatacctgagcaacctcaatcaatgccgcatggagtggaaaaatcacccaggtgagtcctgcctgaattcctgatacacaagatcttaagatataataaaacaagtcccgctttaagctgctaacatttgaattgatctattacacagcaataaatcatggaaacatcaggtacatagcattctaaatcactgaccaagatgatgctggtattttttttctttttctttttctggttttttttttttttttttttttggagacaaagtcgtgttttgtcacccaggttggagtggcataatcacgactcactgcctcaacttcccaggttcaagtgatcctcccacctcagcctcctaagtagctgagactacaggcacgcaccactacacccggctaatttttgtatgtttttgtagagacagcgtttcaccatgtttcccaggctggtcttgatctcctgaactcaagtgatccacctgccttggccttccaacgtggtggtattttcttcataattgtttaatgaatgctgcaactaagtgtcccaaaatgtattgccaatttaaatatgtagttcaaacttcactgagaaactaagaggctaagttctctttctgttatct

SEQ ID NO: 67122 - DNA, 745 bp, Homo sapiens
tttttgtgtctctgtgtcttcagatataaggatgttccttcctgtgggtatggggagggtgttacgacctgttccagggaaaaagggtagggcaagatcagagtgacctttctacttctgtggttttcttaaattccttcagctttggggtaacatgtgtttaaccccaccatgggaaagtggacaacagtatcaatggcttctaattcttacagtaaaaatgtctcataaatattacataaaatctggctttaaggaaggtaaaattggatttatccaacactgttacagggaagcatttctaatgattcaaggggacaggaaactgaacaaatgatattggcaatgttgaatatgtgtccaggagctcactgaggagggaacttggcttagtcatctcggggtctttaggacctagagcttagccctgacttatagcttcataaagtgtttactgttccttataagatcctttaaaattcttccttagtgaccatgagaaggcagtttttatcttcccagaaacagatttgaataatttaaaaccagttgtagccaccgtggggttgtagagtatcgaagttaacagttgaggggctgaattcaagctgcagacaaattaatttttttggtctttatcagctcagattgtaaaacattaaatttagattcccttggaagagaagtacactctccagttttaaactttcyctgcactctcttaaggttcaataatttggatccc

SEQ ID NO: 67123 - DNA, 566 bp, Homo sapiens
aaacagtgttccattgcagagaaatgtgtgtgaaaatttttaaatattatgtgattccttagagcatagcttctcttatattagccaaattggtcataagggggctgaaatcaattacaaaccatagtgattttattttgaggtcattttaatcctgttagagtaaaactttgttacctgaatagagatgtatattcacatagtatttattatctatacagagagctggagtgagaagtaatgaatctcatttatatagaaacayatcaaattgcacatattcacaataaattcttgatttatctgatttaagatttttatagaatctgtcaacatagtactcattacttccttatttcttataatattttatagccattaatctttttttagaaaaaaatattaaggtaaacttacctctttgcccataataggtgctatccatctcaccatcctaaattaatgtatattaatagtttatattatttctaactcttttataattataatatttaaaatgaagttaattttttaagaatattgctcttaggctaagttgaaaatta

SEQ ID NO: 67124 - DNA, 1131 bp, Homo sapiens
ctgctcttctctaaccacgccatattaaatagcattattatgttaatattcatcctaaatttgacttcatattgtggtaacaacactgaytaaaaactgctaaaaatgatcatttccaaagtacctgatgtatattttatttgtagtaagattgttaccaagtcaggttaagatacttgagctttctaggcctcactagaaagtgagattatctagattatctagatctggataatttcagatctacattccaagatttacattttatgaccttatttttccagcctttgtcttagtccttgcataattatttagcccctaaaaggtcttatgctatgttaataatagagaaagtatcattttattttcattgttttaagatttcacaaatgttgtatctgaacaaattagcataaattctaagaaagcttattgcagatgaagttctattaaaaagcattcatcatcaaagaaatacaatgtttgaagttgaagtattaaaggattccatgttattcttttatattcagctgtctaaattgttatttctattccacaggtctttaaaaaacattttaaggcatattttaatattaagactttatgccaatttcagccaacttggaatgtagtctaaatataggtagaacaagtaaagacaggagaagagtataaatagggtcttagagtctaaaatgtatatggttatgttcaagagacaatgaagagatagtttctcatatacagtagacttcagaacctaatattcttcttcacaaaacatcaaaatcacatgatgttaataaggtgtcttgatgggaagaaaaatgttctatgtaagcttatgaaatgtccttattcgcatatctatctcacaggtttacaacaaacttcaataaaatttctaagggtatccgctctaaagaaatttgcctaatttgtttaattactatgatttgcatttggaaccagattatattgttgaccatataatgccattttataccaaaaaattaaatatacttggtgtcaatggattcatcactatgtataaagcttatttgtgtaataagtcaaataagtaaagaattatttgaattgtgtttgtgtaacattcttatgttaaatgca

SEQ ID NO: 67125 - DNA, 1131 bp, Homo sapiens
ctgctcttctctaaccacgccatattaaatagcattattatgttaatattcatcctaaatttgacttcatattgtggtaacaacactgattaaaaactgctaaaaatgatcatttccaaagtacctgatgtatattttatttgtagtaagattgttaccaagtcaggttaagatacttgagctttctaggcctcactagaaagtgagattatctagattatctagatctggataatttcagatctacattccaagatttacattttatgaccttatttttccagcctttgtcttagtccttgcataattatttagcccctaaaaggtcttatgctatgttaataatagagaaagtatcattttattttcattgttttaagatttcacaaatgttgtatctgaacaaattagcataaattctaagaaagcttattgcagatgaagttctattaaaaagcawtcatcatcaaagaaatacaatgtttgaagttgaagtattaaaggattccatgttattcttttatattcagctgtctaaattgttatttctattccacaggtctttaaaaaacattttaaggcatattttaatattaagactttatgccaatttcagccaacttggaatgtagtctaaatataggtagaacaagtaaagacaggagaagagtataaatagggtcttagagtctaaaatgtatatggttatgttcaagagacaatgaagagatagtttctcatatacagtagacttcagaacctaatattcttcttcacaaaacatcaaaatcacatgatgttaataaggtgtcttgatgggaagaaaaatgttctatgtaagcttatgaaatgtccttattcgcatatctatctcacaggtttacaacaaacttcaataaaatttctaagggtatccgctctaaagaaatttgcctaatttgtttaattactatgatttgcatttggaaccagattatattgttgaccatataatgccattttataccaaaaaattaaatatacttggtgtcaatggattcatcactatgtataaagcttatttgtgtaataagtcaaataagtaaagaattatttgaattgtgtttgtgtaacattcttatgttaaatgca

SEQ ID NO: 67126 - DNA, 1131 bp, Homo sapiens
ctgctcttctctaaccacgccatattaaatagcattattatgttaatattcatcctaaatttgacttcatattgtggtaacaacactgattaaaaactgctaaaaatgatcatttccaaagtacctgatgtatattttatttgtagtaagattgttaccaagtcaggttaagatacttgagctttctaggcctcactagaaagtgagattatctagattatctagatctggataatttcagatctacattccaagatttacattttatgaccttatttttccagcctttgtcttagtccttgcataattatttagcccctaaaaggtcttatgctatgttaataatagagaaagtatcattttattttcattgttttaagatttcacaaatgttgtatctgaacaaattagcataaattctaagaaagcttattgcagatgaagttctattaaaaagcattcatyatcaaagaaatacaatgtttgaagttgaagtattaaaggattccatgttattcttttatattcagctgtctaaattgttatttctattccacaggtctttaaaaaacattttaaggcatattttaatattaagactttatgccaatttcagccaacttggaatgtagtctaaatataggtagaacaagtaaagacaggagaagagtataaatagggtcttagagtctaaaatgtatatggttatgttcaagagacaatgaagagatagtttctcatatacagtagacttcagaacctaatattcttcttcacaaaacatcaaaatcacatgatgttaataaggtgtcttgatgggaagaaaaatgttctatgtaagcttatgaaatgtccttattcgcatatctatctcacaggtttacaacaaacttcaataaaatttctaagggtatccgctctaaagaaatttgcctaatttgtttaattactatgatttgcatttggaaccagattatattgttgaccatataatgccattttataccaaaaaattaaatatacttggtgtcaatggattcatcactatgtataaagcttatttgtgtaataagtcaaataagtaaagaattatttgaattgtgtttgtgtaacattcttatgttaaatgca

SEQ ID NO: 67127 - DNA, 1131 bp, Homo sapiens
ctgctcttctctaaccacgccatattaaatagcattattatgttaatattcatcctaaatttgacttcatattgtggtaacaacactgattaaaaactgctaaaaatgatcatttccaaagtacctgatgtatattttatttgtagtaagattgttaccaagtcaggttaagatacttgagctttctaggcctcactagaaagtgagattatctagattatctagatctggataatttcagatctacattccaagatttacattttatgaccttatttttccagcctttgtcttagtccttgcataattatttagcccctaaaaggtcttatgctatgttaataatagagaaagtatcattttattttcattgttttaagatttcacaaatgttgtatctgaacaaattagcataaattctaagaaagcttattgcagatgaagttctattaaaaagcattcatcatcaaagaaatacaatgtttgaagttgaagtattaaaggattccatgttattcttttatattcagctgkctaaattgttatttctattccacaggtctttaaaaaacattttaaggcatattttaatattaagactttatgccaatttcagccaacttggaatgtagtctaaatataggtagaacaagtaaagacaggagaagagtataaatagggtcttagagtctaaaatgtatatggttatgttcaagagacaatgaagagatagtttctcatatacagtagacttcagaacctaatattcttcttcacaaaacatcaaaatcacatgatgttaataaggtgtcttgatgggaagaaaaatgttctatgtaagcttatgaaatgtccttattcgcatatctatctcacaggtttacaacaaacttcaataaaatttctaagggtatccgctctaaagaaatttgcctaatttgtttaattactatgatttgcatttggaaccagattatattgttgaccatataatgccattttataccaaaaaattaaatatacttggtgtcaatggattcatcactatgtataaagcttatttgtgtaataagtcaaataagtaaagaattatttgaattgtgtttgtgtaacattcttatgttaaatgca

SEQ ID NO: 67128 - DNA, 1131 bp, Homo sapiens
ctgctcttctctaaccacgccatattaaatagcattattatgttaatattcatcctaaatttgacttcatattgtggtaacaacactgattaaaaactgctaaaaatgatcatttccaaagtacctgatgtatattttatttgtagtaagattgttaccaagtcaggttaagatacttgagctttctaggcctcactagaaagtgagattatctagattatctagatctggataatttcagatctacattccaagatttacattttatgaccttatttttccagcctttgtcttagtccttgcataattatttagcccctaaaaggtcttatgctatgttaataatagagaaagtatcattttattttcattgttttaagatttcacaaatgttgtatctgaacaaattagcataaattctaagaaagcttattgcagatgaagttctattaaaaagcattcatcatcaaagaaatacaatgtttgaagttgaagtattaaaggattccatgttattcttttatattcagctgtctaaattgttatttctattccacaggtctttaaaaaacattttaaggcatattttaatattaagactttatgccaatttcagccaacttggaatgtagtctaaatataggtagaacaagtaaagacaggagaagagtataaatagggtcttagagtctaaaatgtatatggttatgttcaagagacaatgaagagatagtttctcatatacagtagacttcagaacctaatattmttcttcacaaaacatcaaaatcacatgatgttaataaggtgtcttgatgggaagaaaaatgttctatgtaagcttatgaaatgtccttattcgcatatctatctcacaggtttacaacaaacttcaataaaatttctaagggtatccgctctaaagaaatttgcctaatttgtttaattactatgatttgcatttggaaccagattatattgttgaccatataatgccattttataccaaaaaattaaatatacttggtgtcaatggattcatcactatgtataaagcttatttgtgtaataagtcaaataagtaaagaattatttgaattgtgtttgtgtaacattcttatgttaaatgca

SEQ ID NO: 67129 - DNA, 1131 bp, Homo sapiens
ctgctcttctctaaccacgccatattaaatagcattattatgttaatattcatcctaaatttgacttcatattgtggtaacaacactgattaaaaactgctaaaaatgatcatttccaaagtacctgatgtatattttatttgtagtaagattgttaccaagtcaggttaagatacttgagctttctaggcctcactagaaagtgagattatctagattatctagatctggataatttcagatctacattccaagatttacattttatgaccttatttttccagcctttgtcttagtccttgcataattatttagcccctaaaaggtcttatgctatgttaataatagagaaagtatcattttattttcattgttttaagatttcacaaatgttgtatctgaacaaattagcataaattctaagaaagcttattgcagatgaagttctattaaaaagcattcatcatcaaagaaatacaatgtttgaagttgaagtattaaaggattccatgttattcttttatattcagctgtctaaattgttatttctattccacaggtctttaaaaaacattttaaggcatattttaatattaagactttatgccaatttcagccaacttggaatgtagtctaaatataggtagaacaagtaaagacaggagaagagtataaatagggtcttagagtctaaaatgtatatggttatgttcaagagacaatgaagagatagtttctcatatacagtagacttcagaacctaatattcttcttcacaaaacatcaaaatcacatgatgttaataaggtgtcttgatgggaagaaaaatgttctatgtaagcttatgaaatgtccttattcgcatatctatctcacaggtttacaacaaacttcaataaaatttctaagggtatccgctctaaagaaatttgcctaatttgtttaattactatgatttgcatttggaaccagattatattgttgaccatataatgccattttataccaaaaaattaaatatacttggtgtcaatggattcatcactatgtataaagcttatttgtgtaataagtcaaataagtaaagaattatttgaattgtgyttgtgtaacattcttatgttaaatgca

SEQ ID NO: 67130 - DNA, 985 bp, Homo sapiens
atgttaatgctcatacaactttgtaaatatagtaagaaccattgcattttatgctttaaatggagggattttatacatgtaaattatatcccaaaaaggctgttaaaaatgaaagtagagtaaccaaatatgtgtcccatartatgaaaggctcaattattaaatacctcccttttacaatggaggtgggaaggggatagagcatgacatattgggatatacctggttttctttgctcctgcttataatactgagagggcattagggccagacctgatatttgatggaaaggctaagcatgttccattaggatgttaacataggttgttaattttaggaaatcaagtgttacacttcttgctttgttagataaattgaatcacagcaaattttacaaacataatttgtccatattttcataataaactctatgtaaacatcagttttcttgttcctttaaaaacaaaataattcatatcaaactgtcttgaataggaaaggcaaaccagtcacaagtccacaatattaaagcaaaagtaaagtgatgaattttctgcttaattttcaagttcaggatcttcaaaagttagtttctaaagggtacagcaatgctgtttgtgtcaaataactagctcatcagctgaatagtccacaccaactttccaacaaaacacacatcacctatactcaatttgtggcatccagtgtgaaatgatgttaaatctttgcagaaagttttctctgatctttgtcaaaatccagatatgtttattctcttaattaaagtatctaattatatccaaaaatatcagacttcatcatctgatggtaaatccttgtcatgaaatatcttattcttttcttcattatacatggtttcttttctttgttttattttgttttgcatatgcttctatgtccagtcaatattagtttctctattttgtaatcctttctagtttaggaccattgtcatggctgacag

SEQ ID NO: 67131 - DNA, 531 bp, Homo sapiens
ggtagattgaaraaaatatggtacatatacaccatggaatactactcagtaataaaaaacggtgagatcatttcctttgcagcaatgttaatggagctagaggccactatcttaagcaaactatccctggaacagaaaaacattcattgtgtgttaggaatgtgcattaggatcattgtgtgacaatgataggtttatattgtatctcatccactagattatcagtttatagggcagtattcaagtatgcaagcatgttactaaatagtaacagtaaaaattgctttatcaaattgcttataagtgaaaaccacatgttttcacttataagcaggagctaaacaaccataacatatggatgctaggaaagtaacaacagatactggggcctacttgaggggagaggttagtaggagggagaggaccagaaaaaaatacctattggttactatgtttataacccaggtgacaaaattatccgtacaacgaatccctgtgacattcaatttacctgtataacaaacctgcaca

SEQ ID NO: 67132 - DNA, 712 bp, Homo sapiens
cctacacattgtgcacatgtaccctaaaacttaaagtataataataataaaaaaaagaatgcttgcttacaaattgtgtttctttagcacttaatgttgttttgtgtttttcaaaaaaacagcatccaaatatactggttgacaatttgtttccagtttttttctataaatgacaaataggatatttaatttttgtctagcgtagagaagaaacattataattttgacaaaaatatggtttcacctttcatataaaattctaaacccggtagcacacttacctgaaaggtgagaaatatgacattgccccagtaagtgacaacatctgtggtgctatcrcaaggctaaattcctttattgtgtcttttataagatactgttaagtctagcaaaataccattttgagatgctacttaaacgtggctcagaataaataaaaaattgtcaaagaaacgttttaaattaacacttctgattttaaaatataaagcaatcaaagacagtggttttccaacgtgaacacaccgggtatcagaggagtattattgaggcaatgtaaagagtatgacagaaatcactgacacagccactagggatgcacgaagccattcataagatatgtcattggtgtattttatctgctccacttacaataaatcctatgttcttgaaagaatgtcatatttatactctcaggaactgccttgttagt

SEQ ID NO: 67133 - DNA, 1241 bp, Homo sapiens
gctgctagtctttcttctaatccttcctttcataattatcactctttatttagaaaagaaatccatatcttttacccactgtgaaatagaaacttcactgtttctttactcttgagtaaaaagtctgaagtgtgccaagcaaaggaacaattcaaaacactgatgtttgtgaggactcttttattcaaaacatcacaaatccatggtaggactgattttgcatttttacacacataggcacacactcatatacaycctattaaagtggaaaagtggcattacaaatggtatattctgacctattccacaatatctgaattaaaacttattatgtaagaaattctgggagtgatatcaattcctctttcattcctgtgttaatcaacgcactcattgttcctgagaaagagaaccatggggaattaaaattgtctatagaaattttagatgatgtattatttatgtaatgattctgtagacattaaattaataatgcaaacttgaccgcataactccattctcagcagtattgataatgacaaatagtctgctcaattctgttattcatgtataccacagacatatgggatcccacatttttcatgaccttaagaaagatgtaaattcgtccttttaatttttttaatattcatttagaatcagaagagaatcatctctttcctaagctccagtattatcattttggccaatctaccaacttcccttatctggatcccttatctgcaatcacctcttcattttttttctacttgtacaccaggtccactattttctatttgcaaaaagagcagccagaatgatctctgtgaaacaaatttcgttattccacttttctgcttcaaacacccatagtaaatctcaaggccgtaccataccaaggggctggcccccattacctccttgacagtccccttaactaccttccttatctgtttattcccattaaggcacatcatgccagaatatgttcacctcagaatgtttgcaaggctttatttaaaccttttcattatgggtggtgggatgacaatatttagttaagcaaatcaagtgcttatgtttttatctcagaactataacagcggtgctggtttaaaaaatttgtaaacaaaaagtaagatagggcagggggagatcatttagggtattattgcaaatataggagtaaatttatatgaactaaagcgaaaataattgtaacagaggatcatagactttga

SEQ ID NO: 67134 - DNA, 1241 bp, Homo sapiens
gctgctagtctttcttctaatccttcctttcataattatcactctttatttagaaaagaaatccatatcttttacccactgtgaaatagaaacttcactgtttctttactcttgagtaaaaagtctgaagtgtgccaagcaaaggaacaattcaaaacactgatgtttgtgaggactcttttattcaaaacatcacaaatccatggtaggactgattttgcatttttacacacataggcacacactcatatacaccctattaaagtggaaaagtggcattacaaatggtatattctgacctattccacaatatctgaattaaaacttattatrtaagaaattctgggagtgatatcaattcctctttcattcctgtgttaatcaacgcactcattgttcctgagaaagagaaccatggggaattaaaattgtctatagaaattttagatgatgtattatttatgtaatgattctgtagacattaaattaataatgcaaacttgaccgcataactccattctcagcagtattgataatgacaaatagtctgctcaattctgttattcatgtataccacagacatatgggatcccacatttttcatgaccttaagaaagatgtaaattcgtccttttaatttttttaatattcatttagaatcagaagagaatcatctctttcctaagctccagtattatcattttggccaatctaccaacttcccttatctggatcccttatctgcaatcacctcttcattttttttctacttgtacaccaggtccactattttctatttgcaaaaagagcagccagaatgatctctgtgaaacaaatttcgttattccacttttctgcttcaaacacccatagtaaatctcaaggccgtaccataccaaggggctggcccccattacctccttgacagtccccttaactaccttccttatctgtttattcccattaaggcacatcatgccagaatatgttcacctcagaatgtttgcaaggctttatttaaaccttttcattatgggtggtgggatgacaatatttagttaagcaaatcaagtgcttatgtttttatctcagaactataacagcggtgctggtttaaaaaatttgtaaacaaaaagtaagatagggcagggggagatcatttagggtattattgcaaatataggagtaaatttatatgaactaaagcgaaaataattgtaacagaggatcatagactttga

SEQ ID NO: 67135 - DNA, 1241 bp, Homo sapiens
gctgctagtctttcttctaatccttcctttcataattatcactctttatttagaaaagaaatccatatcttttacccactgtgaaatagaaacttcactgtttctttactcttgagtaaaaagtctgaagtgtgccaagcaaaggaacaattcaaaacactgatgtttgtgaggactcttttattcaaaacatcacaaatccatggtaggactgattttgcatttttacacacataggcacacactcatatacaccctattaaagtggaaaagtggcattacaaatggtatattctgacctattccacaatatctgaattaaaacttattatgtaagaaattctgggagtgatatcaattcctctttcattcctgtgttaatcaacgcactcattgttcctgagaaagagaaccawggggaattaaaattgtctatagaaattttagatgatgtattatttatgtaatgattctgtagacattaaattaataatgcaaacttgaccgcataactccattctcagcagtattgataatgacaaatagtctgctcaattctgttattcatgtataccacagacatatgggatcccacatttttcatgaccttaagaaagatgtaaattcgtccttttaatttttttaatattcatttagaatcagaagagaatcatctctttcctaagctccagtattatcattttggccaatctaccaacttcccttatctggatcccttatctgcaatcacctcttcattttttttctacttgtacaccaggtccactattttctatttgcaaaaagagcagccagaatgatctctgtgaaacaaatttcgttattccacttttctgcttcaaacacccatagtaaatctcaaggccgtaccataccaaggggctggcccccattacctccttgacagtccccttaactaccttccttatctgtttattcccattaaggcacatcatgccagaatatgttcacctcagaatgtttgcaaggctttatttaaaccttttcattatgggtggtgggatgacaatatttagttaagcaaatcaagtgcttatgtttttatctcagaactataacagcggtgctggtttaaaaaatttgtaaacaaaaagtaagatagggcagggggagatcatttagggtattattgcaaatataggagtaaatttatatgaactaaagcgaaaataattgtaacagaggatcatagactttga

SEQ ID NO: 67136 - DNA, 1152 bp, Homo sapiens
aaaaattctagaacaatattgaaacagcctcattttctgaggtattacctggagttatttgagaataaggaatgtggacaccaagggtgaggtgggaacaaaggcttaataagctaaagagaaaatctctccacagtggacagaaggcctgaaagagggttgccagctgtgaagctgagtctggggtttttatggaccggaaggggaggaatgggctgaccggtctgtaggctatcttggagaaggcaccacttagaaagaggtataatagtgtaaagaaccaactggaagtagaagtgaaggcttggcctgggaccaattgaaggtagaagtgaaggcttggctgggaccaatcaggggctgaagtgatgatttactctgttaatgaagacttagcccacagccaattatagaaaggtaggcatacgtaaaataggtgaaaagtaaaagaccaataggtgaaaagtaagagastaagacatgccaaggggaaagaaatgtgtccaaaaaggggtggaatttgttcatctgggttcatagagtaagtgtttccattcaaggatgcagggtctttcttatctgggacctgaagtttgattatcaagctgttcttggtttgaaggagttataccaaggacctgtcctaactacctgcctgacaggtttcttcctcctctgtcagtatgagttatattgagtagtgatataatgagagtactagagctagggtcttgctgaaaatgatgtataataacagtagtgtgaaaataagatcaagtagagacaatgatattttgttatccacagactaattcctatgccatatcaccagttatgattaaacaaaagctgatttttaaaagtgaattaaataaaatagaaacttatatctctgaaatatatatgtgtatatatataagtgtgtatatatatatatatatatatatatatatatatatatatatatatatatatacctactgtatatatgtgtgaaatagtagcatttcatggttgatatgaaagggactatgggagtgtcattaggtcctaaggtcctagctactgttctaccatcctcagctcactgtttgcgttgcaagtcaccacatcatacaacaggtctgctggccctctaactttatctatgta

SEQ ID NO: 67137 - DNA, 658 bp, Homo sapiens
aaatttgagaacataaagagaatataaagtcacattatgatacctcctgccaattgcagatataatgaacatgaaatgtccaatattaaatttgtttttgaatgtcttttatttggatattgttttgcatttcctctactccatttaagccaaacttccttgcaggtaagttcttctaagttcttctacatattagacttaaaccttatatcaattctgtcttcyaaaataaaacatagaataagtcaatatccaaaagaaaaaagcaaaaaaagccatgtttatattttaagatagtagcttttctttttagacatttccattgtattctcttctaccatctatgtacccaaatatttgtttaggttgatttttaatgaaatgcaaaataatacaatatgacttacctcccaatatgtacaactcaacaaaataataactcaacaaaaaatccagaacatactcttcaattatgattaattttttttttttttttttttttttttttttgagacagagtctcgctgtgttgccaggctggagtgcagtggcacgatctcggcttactgcaacctccgcttcctgggttcaagcgattctgctgcctcagcctcccgagtagctgggactacagccgcccgccaccacgcccagctaa

SEQ ID NO: 67138 - DNA, 1286 bp, Homo sapiens
cttttatttgactgtgtaactgtgcttccaataacattttcccgaatgtaaaagcctaaatatattgtataacaaagaagtatatataattacactaattccgatagattattggtaatctgttggggatagtcagtagggatgaattactatgtttatattaacttaatttgacattttaaaacatcwttgccaaatgtcaacattcatatctgaggaaatgctttaatttttgcttactctgtgccataacttttgcctctatgtaaattaccaatttttttttggtgtttttaacagtggtattaacttattaaataaaaaccagttgaaaatatgtttctgggtgaatatttaaaatggcaaaacatatgtccaaaaatataagctggtaatttattaccattttagttcacatttttctaaattggccaagcaaaaacaatgatatttagtttaactgaatgtttcaggtataacgtgatcaacgttattgatactaaactaaaaaacagagtgatatgttttaaattcttttgtggaattcattagattttttttgtttcctctgtgatccatatgtgcaaaaacgtaatcatgtgagaatgaaaaggaatagaccatttaaataagtttgaaatcctcatctaaatatgtcaaggtgtgttaacacttatgaaaatcacagctaatatagacatttctaactgatcattggataaatggtggggtttgtgatagaggcagagttatcaccattcaataaccatatctacaaccaatatcagataagttactttatttctagggtttaatttttctgggggggggctttaatttttttcagctcttggtgcccaggctgaagtccaatggcatgatctcagctcactgcaacctccacctcctgggttcaagggagtctcctgtctcagcctccctagtagctgggattacaggcatgcgccaccacactgggctaattttgtatttttagtagagatggggtttctccttgttggtcaggctggtctcaaactcccaacctcaggtgatccacccgccttggcctcccaaagtgttgggattacaggcatgagccaccactcctggctggggtataatttatatatacaaattagccttcatactttacttttaaaattatgtattgacttacatgtgtgtagaataatattgtattttttaaaatatacgtcaattactacaattttatatatagctatatatatgacactacctatataatagtgctgtatgaaaat

SEQ ID NO: 67139 - DNA, 1286 bp, Homo sapiens
cttttatttgactgtgtaactgtgcttccaataacattttcccgaatgtaaaagcctaaatatattgtataacaaagaagtatatataattacactaattccgatagattattggtaatctgttggggatagtcagtagggatgaattactatgtttatattaacttaatttgacattttaaaacatctttgccaaatgtcaacattcatatctgaggaaatgctttaatttttgcttactctgtgccataacttttgcctctatgtaaattaccaatttttttttggtgtttttaacagtggtattaacttattaaataaaaaccagttgaaaatatgtttctgggtgaatatttaaaatggcaaaacatatgtccaaaaatataagctggtaatttattaccattttagttcacatttttctaaattggccaagcaaaaacaatgatatttagtttaactgaatgtttcaggtataacgtgatcaacgttattgatactaaactaaaaaacagagtgatatgttttaaattcttttgtggaattcattagattttttttgtttcctctgtgatccatatgtgcaaaaacgtaatcatgtgagaatgaaaaggaatagaccatttaaataagtttgaaatcctcatctaaatatgtcaaggtgtgttaacacttatgaaaatcacagctaatatagacatttctaactgatcattggataaatggtggggtttgtgatagaggcagagttatcaccattcaataaccatatctacaaccaatatcagataagttactttatttctagggtttaatttttctgggggggggctttaatttttttcagctcttggtgcccaggctgaagtccaatggcatgatctcrgctcactgcaacctccacctcctgggttcaagggagtctcctgtctcagcctccctagtagctgggattacaggcatgcgccaccacactgggctaattttgtatttttagtagagatggggtttctccttgttggtcaggctggtctcaaactcccaacctcaggtgatccacccgccttggcctcccaaagtgttgggattacaggcatgagccaccactcctggctggggtataatttatatatacaaattagccttcatactttacttttaaaattatgtattgacttacatgtgtgtagaataatattgtattttttaaaatatacgtcaattactacaattttatatatagctatatatatgacactacctatataatagtgctgtatgaaaat

SEQ ID NO: 67140 - DNA, 1286 bp, Homo sapiens
cttttatttgactgtgtaactgtgcttccaataacattttcccgaatgtaaaagcctaaatatattgtataacaaagaagtatatataattacactaattccgatagattattggtaatctgttggggatagtcagtagggatgaattactatgtttatattaacttaatttgacattttaaaacatctttgccaaatgtcaacattcatatctgaggaaatgctttaatttttgcttactctgtgccataacttttgcctctatgtaaattaccaatttttttttggtgtttttaacagtggtattaacttattaaataaaaaccagttgaaaatatgtttctgggtgaatatttaaaatggcaaaacatatgtccaaaaatataagctggtaatttattaccattttagttcacatttttctaaattggccaagcaaaaacaatgatatttagtttaactgaatgtttcaggtataacgtgatcaacgttattgatactaaactaaaaaacagagtgatatgttttaaattcttttgtggaattcattagattttttttgtttcctctgtgatccatatgtgcaaaaacgtaatcatgtgagaatgaaaaggaatagaccatttaaataagtttgaaatcctcatctaaatatgtcaaggtgtgttaacacttatgaaaatcacagctaatatagacatttctaactgatcattggataaatggtggggtttgtgatagaggcagagttatcaccattcaataaccatatctacaaccaatatcagataagttactttatttctagggtttaatttttctgggggggggctttaatttttttcagctcttggtgcccaggctgaagtccaatggcatgatctcagctcactgcaacctccacctcctgggttcaagggagtctcctgtctcagcctccctagtagctgggattacaggcatgcgccaccacactgggctaattttgtatttttagtagagatggggtttctccttgttggtcaggctggtctcaaactcccaacctcaggtgatccrcccgccttggcctcccaaagtgttgggattacaggcatgagccaccactcctggctggggtataatttatatatacaaattagccttcatactttacttttaaaattatgtattgacttacatgtgtgtagaataatattgtattttttaaaatatacgtcaattactacaattttatatatagctatatatatgacactacctatataatagtgctgtatgaaaat

SEQ ID NO: 67141 - DNA, 1286 bp, Homo sapiens
cttttatttgactgtgtaactgtgcttccaataacattttcccgaatgtaaaagcctaaatatattgtataacaaagaagtatatataattacactaattccgatagattattggtaatctgttggggatagtcagtagggatgaattactatgtttatattaacttaatttgacattttaaaacatctttgccaaatgtcaacattcatatctgaggaaatgctttaatttttgcttactctgtgccataacttttgcctctatgtaaattaccaatttttttttggtgtttttaacagtggtattaacttattaaataaaaaccagttgaaaatatgtttctgggtgaatatttaaaatggcaaaacatatgtccaaaaatataagctggtaatttattaccattttagttcacatttttctaaattggccaagcaaaaacaatgatatttagtttaactgaatgtttcaggtataacgtgatcaacgttattgatactaaactaaaaaacagagtgatatgttttaaattcttttgtggaattcattagattttttttgtttcctctgtgatccatatgtgcaaaaacgtaatcatgtgagaatgaaaaggaatagaccatttaaataagtttgaaatcctcatctaaatatgtcaaggtgtgttaacacttatgaaaatcacagctaatatagacatttctaactgatcattggataaatggtggggtttgtgatagaggcagagttatcaccattcaataaccatatctacaaccaatatcagataagttactttatttctagggtttaatttttctgggggggggctttaatttttttcagctcttggtgcccaggctgaagtccaatggcatgatctcagctcactgcaacctccacctcctgggttcaagggagtctcctgtctcagcctccctagtagctgggattacaggcatgcgccaccacactgggctaattttgtatttttagtagagatggggtttctccttgttggtcaggctggtctcaaactcccaacctcaggtgatccaccygccttggcctcccaaagtgttgggattacaggcatgagccaccactcctggctggggtataatttatatatacaaattagccttcatactttacttttaaaattatgtattgacttacatgtgtgtagaataatattgtattttttaaaatatacgtcaattactacaattttatatatagctatatatatgacactacctatataatagtgctgtatgaaaat

SEQ ID NO: 67142 - DNA, 1286 bp, Homo sapiens
cttttatttgactgtgtaactgtgcttccaataacattttcccgaatgtaaaagcctaaatatattgtataacaaagaagtatatataattacactaattccgatagattattggtaatctgttggggatagtcagtagggatgaattactatgtttatattaacttaatttgacattttaaaacatctttgccaaatgtcaacattcatatctgaggaaatgctttaatttttgcttactctgtgccataacttttgcctctatgtaaattaccaatttttttttggtgtttttaacagtggtattaacttattaaataaaaaccagttgaaaatatgtttctgggtgaatatttaaaatggcaaaacatatgtccaaaaatataagctggtaatttattaccattttagttcacatttttctaaattggccaagcaaaaacaatgatatttagtttaactgaatgtttcaggtataacgtgatcaacgttattgatactaaactaaaaaacagagtgatatgttttaaattcttttgtggaattcattagattttttttgtttcctctgtgatccatatgtgcaaaaacgtaatcatgtgagaatgaaaaggaatagaccatttaaataagtttgaaatcctcatctaaatatgtcaaggtgtgttaacacttatgaaaatcacagctaatatagacatttctaactgatcattggataaatggtggggtttgtgatagaggcagagttatcaccattcaataaccatatctacaaccaatatcagataagttactttatttctagggtttaatttttctgggggggggctttaatttttttcagctcttggtgcccaggctgaagtccaatggcatgatctcagctcactgcaacctccacctcctgggttcaagggagtctcctgtctcagcctccctagtagctgggattacaggcatgcgccaccacactgggctaattttgtatttttagtagagatggggtttctccttgttggtcaggctggtctcaaactcccaacctcaggtgatccacccgccttggcctcccaaagtgttgggattacaggcrtgagccaccactcctggctggggtataatttatatatacaaattagccttcatactttacttttaaaattatgtattgacttacatgtgtgtagaataatattgtattttttaaaatatacgtcaattactacaattttatatatagctatatatatgacactacctatataatagtgctgtatgaaaat

SEQ ID NO: 67143 - DNA, 1286 bp, Homo sapiens
cttttatttgactgtgtaactgtgcttccaataacattttcccgaatgtaaaagcctaaatatattgtataacaaagaagtatatataattacactaattccgatagattattggtaatctgttggggatagtcagtagggatgaattactatgtttatattaacttaatttgacattttaaaacatctttgccaaatgtcaacattcatatctgaggaaatgctttaatttttgcttactctgtgccataacttttgcctctatgtaaattaccaatttttttttggtgtttttaacagtggtattaacttattaaataaaaaccagttgaaaatatgtttctgggtgaatatttaaaatggcaaaacatatgtccaaaaatataagctggtaatttattaccattttagttcacatttttctaaattggccaagcaaaaacaatgatatttagtttaactgaatgtttcaggtataacgtgatcaacgttattgatactaaactaaaaaacagagtgatatgttttaaattcttttgtggaattcattagattttttttgtttcctctgtgatccatatgtgcaaaaacgtaatcatgtgagaatgaaaaggaatagaccatttaaataagtttgaaatcctcatctaaatatgtcaaggtgtgttaacacttatgaaaatcacagctaatatagacatttctaactgatcattggataaatggtggggtttgtgatagaggcagagttatcaccattcaataaccatatctacaaccaatatcagataagttactttatttctagggtttaatttttctgggggggggctttaatttttttcagctcttggtgcccaggctgaagtccaatggcatgatctcagctcactgcaacctccacctcctgggttcaagggagtctcctgtctcagcctccctagtagctgggattacaggcatgcgccaccacactgggctaattttgtatttttagtagagatggggtttctccttgttggtcaggctggtctcaaactcccaacctcaggtgatccacccgccttggcctcccaaagtgttgggattacaggcatgagccaccactcctggctggggtataatttatatatacaaattagccttcatactttacttttaaaattatgtattgacttacatgtgtgtagaakaatattgtattttttaaaatatacgtcaattactacaattttatatatagctatatatatgacactacctatataatagtgctgtatgaaaat

SEQ ID NO: 67144 - DNA, 529 bp, Homo sapiens
ttggagttatcctgtcttcattccatattatacatactgttatgttgcaattacatttttcataaagaaaaatgaatatgttaactccgtttcaatgactgctgtcacacaagagactagataaaaatttttaaagcatagtcctatgtactttatgatggaataccatctaaaaaatgactgagtcttctacccttagttgtcagagattgtgcttccgtatagcyacaaagtttactctaaaataatctctagcaatattaattcagtgattcatatatcaggttttaccacactaaattccagatcttgtgactgtatatcttattccttttggaagttgacaatgtcggaagtctgcatttggctcttgtcataaccaccttatgtttgccttcaatcgccatccatacaggcgagtgcacataaggtctctcacgtcctatgctagatgaagatagattctcaggccactcttaagtgatgaaggctagtctctacctatgaggcacaaaatcagaatagaaat

SEQ ID NO: 67145 - DNA, 680 bp, Homo sapiens
tctgagaatgagagttacaccttgaaaaaagtcataaaatactattacattttttgtaggggaaatattatagctcataaagtttagcagaggttcagttattactgattgaaatgtgttyggtgctatattaccctttttggggttttgggttttaagaagtacagacatgcttgggctaaccagttgatgaaaatttatttgacagttaagagatgtcgagaaggaagccttcaaagctgttgcccatattgcagttggctgactttggctttggttatgacacctggttctgatagttgtgcccatggtggcatgcccaccatcacatgactatctagcttaagaaacctgagactattcctctaaaaagaagtctaggccactcaaatgctgcttagaagatggacgtgttccatggcttccaaatccatattgcatccactagaacaggtcctaaagctcacacacatctgggagccttatgatggaaagaatagatagagggttgtatcggtcctattcaaggaaggtcctgttcaaggaaagtaagatagagttgatctttaacataataaaaatatgaggaagataaacagccatgattctagttactgtatgcccataaggatcacctggagaatgctttgtaatgattatatttgttccctttaattatg

SEQ ID NO: 67146 - DNA, 680 bp, Homo sapiens
tctgagaatgagagttacaccttgaaaaaagtcataaaatactattacattttttgtaggggaaatattatagctcataaagtttagcagaggttcagttattactgattgaaatgtgtttggtgctatattaccctttttggggttttgggttttaagaagtacagacatgcttgggctaaccagttgatgaaaatttatttkacagttaagagatgtcgagaaggaagccttcaaagctgttgcccatattgcagttggctgactttggctttggttatgacacctggttctgatagttgtgcccatggtggcatgcccaccatcacatgactatctagcttaagaaacctgagactattcctctaaaaagaagtctaggccactcaaatgctgcttagaagatggacgtgttccatggcttccaaatccatattgcatccactagaacaggtcctaaagctcacacacatctgggagccttatgatggaaagaatagatagagggttgtatcggtcctattcaaggaaggtcctgttcaaggaaagtaagatagagttgatctttaacataataaaaatatgaggaagataaacagccatgattctagttactgtatgcccataaggatcacctggagaatgctttgtaatgattatatttgttccctttaattatg

SEQ ID NO: 67147 - DNA, 662 bp, Homo sapiens
ctggaaggaatcccccaagcttagctttttcttcattctgagaaggtaccgaatttgccccttcacttaaattctttagcagcatcaacaaaatagcaccaagtattttggagatcgaaagttgattcaggctaggagttacagtctaagcacaggtgcacttaaatctaactaatctaactatggatccttcagaaacaaataaacctgaaccctgtccccacatgtaacctgagattattagactagagatcctggagacaccttcaggctagaatcatccaagattctgagatgcctgaaatacttgcattgaaaaaacttaaacaaaaggttgtttctgtatttagccactccaatttatttgccatttaaaaatttatctgtcatcctttccctatctttatgaatactttggagtgcattctttgtaaactgtgttttctttgtataatacttaatcttggtactaaacataaatgtccctggctataatataaaragctcctgcaactgattggaggcctgagaaacagaattgctgtttactacttaaaacatttaaatggttgattttatggaaagtgggagtttttcagcctggtgaaatatttttcctatggctacatcgcagcacacttcatagcagttcaaacacatct

SEQ ID NO: 67148 - DNA, 979 bp, Homo sapiens
tgtattggtggaggccgggcacggtgactcatgcctgtaatcccagcactttgggaggccgaggcaggtggaccaggaggtcaggagatcgagaccatcctggttaacacagtgaaaccctgtttctactaaaaataccaaaaaaaaaaaaaaaaagccaggtgtggtggtgcgtgcctgtagtcccagctactcgagaggctgaggtagaaaaatctcttgaacctggraggtggaggttgagttgagccaagattacgattgtactagcctgggcaacaagagtgaatctctctctgtctctctctctctttctcactctctctgtctctctctcctctctctctctttcctctctctctctctctctcattcctagaatgtgtgaacattagggtaatattttcctgtccaattttagcacaatttacaggatgtaatggctcccacctgtaatcccagcactttgggaggctgaggtgagaggattacttgagctcaggagttcaagatcagcctaggcaacatagtgagaccttgtctctactaaaaacaaaaattaaaaaaaaaaaaaaagccaggtgtggtggtgcacacccacagtcccagctatttgggagggtgaggtgggaagattcctgagcccagaagattgaagtggcagtgagccataatcccacccctgcactccagcatgggccacagagcaagactctgtgacaaaaaaagccaaaataaaataaaaaagttcaatctaggagtaaaataattttttctccttactttatttcagtaataaaaattctgtaaatctaaaatcccaaaaaaacaaaaccatagaatgttttcaggcatggtatgggcaattttgcatgtgtggggtggcactaaatgagaattcaccatgtaaaatgaatacttgagaaaatattagaatcaaaagatgtttctgtaactagagggcaagttccagctgctc

SEQ ID NO: 67149 - DNA, 979 bp, Homo sapiens
tgtattggtggaggccgggcacggtgactcatgcctgtaatcccagcactttgggaggccgaggcaggtggaccaggaggtcaggagatcgagaccatcctggttaacacagtgaaaccctgtttctactaaaaataccaaaaaaaaaaaaaaaaagccaggtgtggtggtgcgtgcctgtagtcccagctactcgagaggctgaggtagaaaaatctcttgaacctggaaggtggaggttgagttgagccaagattacgattgtactagcctgggcaacaagagtgaatctctctctgtctctctctctctttctcactctctctgtctctctctcctctctctctctttcctctctctctctctctctcattcctagaatgtgtgaacattagggtaatattttcctgtccaattttagcacaatttacaggatgtaatggctcccacctgtaatcccagcactttgggrggctgaggtgagaggattacttgagctcaggagttcaagatcagcctaggcaacatagtgagaccttgtctctactaaaaacaaaaattaaaaaaaaaaaaaaagccaggtgtggtggtgcacacccacagtcccagctatttgggagggtgaggtgggaagattcctgagcccagaagattgaagtggcagtgagccataatcccacccctgcactccagcatgggccacagagcaagactctgtgacaaaaaaagccaaaataaaataaaaaagttcaatctaggagtaaaataattttttctccttactttatttcagtaataaaaattctgtaaatctaaaatcccaaaaaaacaaaaccatagaatgttttcaggcatggtatgggcaattttgcatgtgtggggtggcactaaatgagaattcaccatgtaaaatgaatacttgagaaaatattagaatcaaaagatgtttctgtaactagagggcaagttccagctgctc

SEQ ID NO: 67150 - DNA, 645 bp, Homo sapiens
ctatgagcaaacaaaggtataagaatgatacaatggactttggggacttgtggggaagggcggtagggaggcgaaggataaaagactaccaatatggtgcagtgtatactccttgggtgatgggtgcaacaaaacctcacaaatcaccactaargaaattacttgtgtaaccaaataccacctgtaccccaataacttgtggaaaaatttttaaaaagtaagaaaataaaaataaaaaaagaaattagctgggcgtggtggtgcacacctgtggtaccagctactcgggaggctgaggcaggggaattgcttgaacctgggaggcagagattgcagtaagccaatatctcaccactgcactcaagcctggtgacagagcgagactccatctcaataaataaataaagtaaacaaaaataaaaacagcttctggaatgtcttcaaattatttcaaatggttgtaattggagctgaagtgacactaaagcctatttgagtcaaaccagcagaatctgtttttgtgcctgatgttcagagctgttttagctatattatagactgatggctttcatttttcacttcaaatttccctgtatagtccactatattttctcaagagcttaataaggacaaaagctaaaatgg

SEQ ID NO: 67151 - DNA, 645 bp, Homo sapiens
ctatgagcaaacaaaggtataagaatgatacaatggactttggggacttgtggggaagggcggtagggaggcgaaggataaaagactaccaatatggtgcagtgtatactccttgggtgatgggtgcaacaaaacctcacaaatcaccactaaagaaattacttgtgtaaccaaataccacctgtaccccaataacttgtggaaaaatttttaaaaagtaagaaaataaaaataaaaaaagaaattagctgggcgtggtggtgcacacctgtrgtaccagctactcgggaggctgaggcaggggaattgcttgaacctgggaggcagagattgcagtaagccaatatctcaccactgcactcaagcctggtgacagagcgagactccatctcaataaataaataaagtaaacaaaaataaaaacagcttctggaatgtcttcaaattatttcaaatggttgtaattggagctgaagtgacactaaagcctatttgagtcaaaccagcagaatctgtttttgtgcctgatgttcagagctgttttagctatattatagactgatggctttcatttttcacttcaaatttccctgtatagtccactatattttctcaagagcttaataaggacaaaagctaaaatgg

SEQ ID NO: 67152 - DNA, 548 bp, Homo sapiens
acgctttggggagcacctttctgaagagctccacacagctgtacattgatactgtcgagtttacatcgtgttgtgcagagaaatgagaagtcgagaattcatcctgctccaccggcttcctcaccttctcttgcattttctttttaatctagcatccaatgcatttttttttttaatttaagcttccttcctttgtgtgctaacattttacatgtagatcctagcacatttctttaggcaaggaaacagaccctttgytgagcaccgtcatcgtggccactgcagttgcctgggaggctccggaaggttttttgactcctgaagccagctgaggcagccacctgagcaagggggttgttcatcccagggctcaccctcattcagggccatgaccttttctagtaagtgtgcactctcttaggtcccaccctgtgtcacccggactctcttggagttcggtatgtggagatgactttcttcctcactctggatgcaatttgggaactacaccgaggattgtggccaggggctcttccctcacctctgac

SEQ ID NO: 67153 - DNA, 782 bp, Homo sapiens
cagcccttcccttgagggtgggtgacctgggcagctttcatcctccccaggttggggacaacagcagcccccatctccagggtctttgagatcaggatgacatggggtgatgaccaaatgcaaccgtcactgcacaatgcttgctctcagccttcagatctgcaccccacgatgacagctgcactcatctccaacaagcctgagtttgtgaagctcttcctggagaacggggtgcagctgaaggagtttgtcacctgggacaccttgctctacctgtacgagaacctggacccctcctgcctgttccacagcaagctgcagaaggtgctggtggaggakcccgagcgcccggcttgcgcgcccgcggcgccccgcctgcagatgcaccacgtggcccaggtgctgcgggagctgctgggggacttcacgcagccgctttatccccggccccggcacaacgaccggctgcggctcctgctgcccgttccccacgtcaagctcaacgtgcgtgctggtaacggggcccatcctggactcgtcttcgcgggctactgctatgttcttagagctctctgtttttaaaattagcttttatttttattagaaaagacacatgctctatcttaggctgcttgggctgctgtaacaaaattccacagatggggcagaaactaccagtttattttctcgaagttctggaagcccgaagtcccagattaaggcaccagcagggctggcttctggccagggcctcttcttgcttgcacgtggctgccctcttg

SEQ ID NO: 67154 - DNA, 679 bp, Homo sapiens
ttcgatcccaagatcccagtgggaagcaagagtgttcccctccctgggtcatgctcccctgggggcttcatgttgggcatgagccttgtagctcctggagctggtggtccgtgccccaaggctgctcccctgagtacgaaaccaaggaagggcttttctctcaggtgggaggccccgtctatgggtctctgtttacggttgtccaggatggcatctggaggcctggcccagcatgggagccacacagtgccaggggcaccgaaccygtgtcccatagtgtctaaactcaggcgcaggcacaggctccccctgcagcccctccccgtgcagcttcgcttccaagcgtcactgtcacggctcctttccttccccagctctgacccaggactctgcccagtggaccacagtgctaagaacctggcctgggccttcccctggcctcggctcctcagttgccccaggtggggccttgttgggtcctggtagccccagagatcactagtaatgtccaggctgtgactggggcatttcaccctgactttacggggacagccccagctgccatgctggggccagggtggcagtggcaggaggaggtggtggttagtgaccagcagagccctgaccgcctcctgctgtggagacggccccagccccactgtcctctgtggctctggtg

SEQ ID NO: 67155 - DNA, 601 bp, Homo sapiens
cagagttggaatgagtctgaaagagacgttgtggtttaatattgctaagttaagtgtcratttgtgactacctatttttaacatgccacagaagtaaaacattgcattaattatgccatatatgtgaaatagcaagtatttttatataatataactgtgcattggagaaatgaattatttataatcctttgcaccaataaattgttcttaaaagcatagaaaaaataatcaggccagaaggagatatctaaagcatgtgctgagaaagcaaaactgaagagctggaaattataaaatattacgacatgatgagtcatatctcctcctcctgattctgtgttactaaatgctagctgcgaatagaaatcgtgtatttcctttctttcataaaataagagctaatttcggcagcaaacagtttggcgtgttattcttttcccttttcagggtggtttaaataaaaataaataaacatgaaagattttggctggaacatctttggaagcacggccgtcctcagcctcactgcactgtctggtttccctctgagcctccctcccgggtcctgccttagtgctgtctgtgccgtgtagccacaggt

SEQ ID NO: 67156 - DNA, 601 bp, Homo sapiens
cagagttggaatgagtctgaaagagacgttgtggtttaatattgctaagttaagtgtcgatttgtgactacctatttttaacatgccacagaagtaaaacattgcattaattatgccatatatgtgaaatagcaagtatttttatataatataactgtgcattggagaaatgaattatttataatcctttgcaccaataaattgttcttaaaagcatagaaaaaataatcaggccagaaggagatatctaaagcatgtgctgagaaagcaaaactgaagagctggaaattataaaatattacgacatgatgagtcatatctcctcctcctgattctgtgttactaaatgytagctgcgaatagaaatcgtgtatttcctttctttcataaaataagagctaatttcggcagcaaacagtttggcgtgttattcttttcccttttcagggtggtttaaataaaaataaataaacatgaaagattttggctggaacatctttggaagcacggccgtcctcagcctcactgcactgtctggtttccctctgagcctccctcccgggtcctgccttagtgctgtctgtgccgtgtagccacaggt

SEQ ID NO: 67157 - DNA, 732 bp, Homo sapiens
ccccagtactcagtcccgtggtggccccaggcctctgccattcatttcggtgtctgacgtttccgggtgttgaggggctgaggggtccgggggttcctgcctgctgatctgtggtctccattctttcagcgaggaagaaaggacccggtttcaggagctgctggccagtccggcctacagagccagccccctggtggccatcgggcagacgctggcccggcagatgcagctggaagatggcggccagctctgaccagggcagcgggcatgccacaactcctcaggacacatgtgggccaagtagagagcgccggcccctcaaggaccatggcctgagcctggtggacgcccttccctctggtcggttgtggggctcaataaatggctctgtgaacttcccctgcactgccagggccgttcccatgagctgcttccctgattcacagggctgggcacaccctgggacagctgcccccactctcctcaggacaacaagccacatccctccactgggggccccagcccccacgcagtcagggtggaccgtgcacagggtttgtggggactgcagttgtggaggccccaagtccgtccctgagcaggcgctggtgcccacaagatagtctgctggctgtgttgggaaggaattgtgcctgggtgtggccccagctgtgccaccagccgccctgatttgcttcagcctcagttcctgctgyggccctggtaggatcc

SEQ ID NO: 67158 - DNA, 1050 bp, Homo sapiens
ctgtattttaaatttataagctattgttagatgtgcttttcaataaatcaaatagatggtttactacctgtggggttttaactctttttctctcttagaaccagcagatagacacccaaatcgtaaagcaagaggacagctacggaccaaaatagagtctggtgaggggacgattccagtgcgctccaatgcgagcatccaaacgtgggacggggtgctgcaaggggagcggctgctcaccatgtcctgcagtgacaagattgcacggtaaggggcgggggctccctgtggccacctccctgcacacaggattcatccatactgtttgccaacctcccttttccacaaccatttgaattttggccccatttcccactcaggtgttccacagtattctttgaaggactgaggttctaaacaggtgctgctgggacccccgtgaggggcagcagcaggacctagacacaggaggctccacgcttctaacattcctatccaagcgtctcagagtttaccacttatttttaacgtgggcttctgggttaaactgatgtttttaatgggctacaggccatgacatcttaaaactactggcttctcctcattagtagtagatgcaacttcagtggtcactttcatcattcagttaacattttaggtagttgatatgtgcattttaaaagtaatgcaaaccctgtcacaggcattgtgttctaagcacagagagcatccccagccattctgtgcctgggtgtgggttaggcttagaggagggctctgcaagcacacttctgtagtcagcaggcacctgggagatattcatctttcagaggcctgtatccagagcagattatagaaaacccatttcttcagatggtatcagttccagtagttctttgttttcatttttaaactaatgtttatttggaaaaaaaaagtaacataagcagatggyaaaaagcatacaatgataaagtttaaaacctccctcttcagagccctcctgtggcacccacagtgagtgggttttgactgtccatccagaagctg

SEQ ID NO: 67159 - DNA, 731 bp, Homo sapiens
ggatccttgctggggcgtggggatgtcacacacataaatgcaggagtcggggctcatggacctgaacccttcakatccaagccttttattatatagtaattagactttacctcaaggaagaaacaaacacaagctgatagaacctagcatgggtgggccaagaaatagcaaatggccagaaaagttgcccggaaagagccctggtggccaaaatgatgccagttggctgcagctgtgtccctgctctgggagagttgagagtggggagcagccaccttggagggccaggtggatggggctgggtgaggctgaactgttccccttacacaggacacagtgacaggcagagggcccagggccatggtaggttgggggtggggtgggagccacagcactgccattggaggtcaccagggtgtccatcccactggcaggcagtttggcggtgaatgcagccccagagagttgtccacaagaccatggggtgagaggctcccatggggttggccaccccacggtgattatgttggcgcgggagccgtgggaaggaacgagagtcttggttcagatgacctcggcctgtgtcctcagctgcacagagctgtgggaacaaacaagaccatccagaggaggaccagcagcctgtctattcagagtcggctatggcaagggggccagagcactgtgttgggcagactcaaaggcacgcacaggaagggggatggctttat

SEQ ID NO: 67160 - DNA, 589 bp, Homo sapiens
ggtcagtaaagaaagcagacagaaacctcttcctgcactggggtaggatgggagcagagagtccaacatggatctgtaaattatgtggaagtcagaatggggttggagggcttgggcggcagggaagggagacctcaggcagcaggtaagcaaaaggcttgagtggctgggaagggaggcctccctcagaacggcttttgtacagggacctaaagtgggggcagccatggctgcctctgggattggtgttccagctggtggacctgtggacagaagctttgggcaagcagcaaggaggtccctgagggtggccagaagcttggggacaggtgcagggtgagaggtgacagggctgggggatctggccggaggactgctggcattttcttgggagccactggactgttttgtgccagggaatggcctgtgctggcccacgtgttcacargggtcaagaggagagggcttggggcaggcaccgggttccccttaggagagggcgtcatgacacaggcaggggggcatgacttgacccatggcgtagcagtggcagtggccagaagtcaggtcctatatctcttccaaaagt

SEQ ID NO: 67161 - DNA, 426 bp, Homo sapiens
ctaggacccagcccgtggaccccaggctccggggtgccatgctggtcacgttcctccttcccagaagcatcctggctcccccgggctcagtgagaagtggccgaggactcaggccagaggacagctgagccccgtggcacttgggtccactcagacaaggccctgcctgggggtgatgcygggggccggggcggtggccgtgctgaccactggctgctagggtggggggccccatactccccactcaagcttcgggggtgggctggtgtccaggtttagacgaggcaggtgggacccagaagcacaggctgcttacagagcagcaggtggttctcattgccagacggacaggcctgggaccagcctctcggccctggggttcctgtgtgctccaaggacctgcggcctcggctgcaggagaggcca

SEQ ID NO: 67162 - DNA, 492 bp, Homo sapiens
agagcctcgggttcccagcaagctgcctctgcccgccaaggaagagcattctggaaactgccgctgaggctgctgcgcttcctcgcccacactcagcacttccagcgtgaccacccctttgtccgggcggaccctccagtcagaggagccagggctcaacagaaacctgtcctgggcgtgcacccgaatgaaccgaaaacctgtattcacacaaaacccgggagtgaatgtggagagatgctggtgtgtaaccccctacgcgctggagagaactcaggtgcccatcaccggcgaggggataaaacagctgcggaccccccataccgcagaatcttgggggcaaaaggcacgcgctggcacttcacagcacaggcgagtcctaaacgcgcttttctaagtgaaggaagccagacaggccgcatcctgtgagamctcatttctgtaacattccggaaaaggcaaaactttggcgacagagcagagacgtaaatc

SEQ ID NO: 67163 - DNA, 660 bp, Homo sapiens
cttgtcccagggctggcggttgctgaggagaagggacacacgtgctgactgggaaatgcaggcccggctctgacggcgaggtccgggttgcggtttccacgtcttcgtcacgaagcctcgaagygctgcctgtgcttagcagtgaaaatatttacttggagatgttcagtttcacagaagccaggaaggggcgggggtggtgcggaagcattgttccccagagcacgcgggaggcggcccagccctcagccaggacgctcccccacctcaccctcgctgggctgtggccctggggacgccaccactggcctcacaccgtggagcgtggataggccgctctggcctgtctgcaggggaaatggctgtcacttccatcagagatgacggacacagcagggcctgtctctgccaaaaccagagtcgaggcagtccccggcagccggtgtatggggaacccctcagcttccgtgtggagggtcagggaggctggatggcttttccttccgttcctgtaggcccgaagccttccccggatgcactcatgaccggggcctggccagcaggcgtccgggagtcagcggctgcttggggaaccagggccccactcacacgcgggaaggtgatggtggcaggcagactggtagctgagagcgaaaggtg

SEQ ID NO: 67164 - DNA, 1155 bp, Homo sapiens
agggtggctggaacccaattccacattaacctggggtctggcagccagaaccaccagtctctgggagacgactgcccgggtccccagcaggccagagtcaggccctgtctgggtccccacagcccccatgcccgygctgtaaaccagcctcaggggctggggaggaggagtattcccagccatttcccaggcagaagccttggtgcttctgctctaattagggctgggggaggggacctggggtcatcatctccaaggtcagtggtcaccacattccaggaatcaccaccagcattggcctcaaactcctcagcaccaattgacataaaatccatgggaattcagctgaagcttcacgcctacaatcccagcactgtgggaggccaaggtgggaggatcgcttgagcccctgagtttgagaccagcccaagcaacacagtgataccccatctctacaaaaagtacaaaaaacaattagctgagggtggtggcacgtgcctgtagtcccagctactcaggaggctgaggcaagaggattgtttaaggccaggagttcaaggctgcagtgagatatgatcgtgccaccacactgcagcctggatgacagagcaagactctgtctctaaaaacaaaacaaatgaacaaaaaatccatggaaattccctcagagccagaaaattgcttccagcctttgggaacggagtgtggtttgagctgcaccgactgggcacggtgggccccactctgggaagagaggtttctttctgcagcttgatcaccccagtggactaatgaggcgagctgttcccaggaagtgtgctttacgtaactgctggtaatgagactggtggggccgtgcgtgtgtgtgcgtgtgcgtgctcgtgactctggaagccttcaagctgccagcattcatccgtcttctctaatgagcctcatgggaacattatcgccctggaggaaggagaaagcggggctgggctctctcgccggcagctctgctccagaactggaagaacttactgctgtcagggacactccagagctcctgcctctgctcattcctacatcactcaagtgaacagctcctgaatttaaaaaggcacatgtacacatgcgcaagcattcacacatgcacaagcattcacacatgca

SEQ ID NO: 67165 - DNA, 733 bp, Homo sapiens
agacttttaatgagggttgcggtcttatgacatcatctggacgggcccagcctgagcacgtgagccttcgagggcagagaacgttccctggcccgtgctggagcgattcactggctcatgatacggagatcatctggacgggcccagcctgagcacgtgagccttcgagggcagagaacgttccctggctcgtgctggagcgattcactggcttggaaaagaaggggaggatgatggggaatgtgggaccttcaggagcagaagccccagctgacagccaggagggagagggggccctgggctcacaattgcaaaaacctgaattctgccgacaacaataatgggctcagaagcgggtcctctcccaggcctcccgctcagagcccagccggccaacgcctggactctggccgagagactctyggcagcaaatccagtggagccccccgacttctgacaccagaaaccgtctgtgagtgcaggtctgcgttctcaagccgctaaactcacggagatttctacgcagctgcagaagatgaatgcatctcccttctacgccttctgctgtggcggccgtgagtgttaacccactgcttctaaacccgtgaagcctgtcatgtgacgctgatgtcctgtgactctggtggtccctaccccccaaggcctccacacccccctctctgtgctgtgttctgtgggccacggccacccctcatcagagcagccccctggg

SEQ ID NO: 67166 - DNA, 1864 bp, Homo sapiens
tgcatgggctgtgacgatgacgtcgtggatgtggtcattacctagaaggttgccgggttggcctagttcagcccgaataaggaggcttaaagctggaggtggcctggagatgatggcttagagatggcctggacaggcctagagatgatagcctggaggtggcctggaggtggctcgtcccctgttgctgcatcctcatggcagccaggggtcttttggaaggcctggccagccactgctgagccacttcccccagcttcatcccctgtgactctgacaagcccccaccagccacagggatgagcagaccctgcccagggacaccatccagctgcccatgtggccctgagtgctggcttacctgcctgcctatgtctctgggggtccctgttgggagccccggctccccagcaagattggtcctctcctgggtgggggcttccgcagcagctggagagaagggggagcattccccattaattgaacctgggctgagtttctgtgggagctttgccctgggaacccatggtggccataaaacaccaaactcagatgttgcaagaaccaaactcagagcccctgtgacatcagtggaatgagagcgggaaaccagcccctggggaatcagccatgttctgcagcagagggagggcatgtgagatccaactgaagcctcttctgccttcagcaaaggctgcggtgcaatcctgcattcttgttcaggcaaatgttttccttgaaaaaacctcttgatgatgaagccggtttaactggtgttgaccaatggggtgtcagctttgaaggatgacactggtcagcctaggaggtcttggtggtggaggccaggggccctacccagaccccgggggacctggctgctgggcatgttgatggctcccttgttcaactgcaccccctctgggagcagcccttggtgaagaggattgtaatacatgaccccaaaatatgccacttttgcataagaattattttgagctgaaggcaattcagaagctacagattcaggaagagctctctaccctcctttttcrcctaaaagcagggcatacatttctctgggtaaaggtgttcccctctccagtaccaggcagaggagaatgactcttaactacgaaaaagcccctaccaaacaacacttacctcccatgcattttttaatcaccgccaacaatctaccacccctaggagcccaaaccccctttttcctttgtccttctccacaatttatcaccctttgttaaaatggtatataagtccccgtgtctcatcccttctttgggtttttgcttcttgtctgtgaagcttccgtgcacataacattcaaatttaaatttaattttctgctatcttttctgctgcaaatctgccttttgtcagtttaatttgcaaacctcaggaacagaacctgaggggagtgataaaggttttcctcccctaaataagccaatagggaaggatacagtgtataaaggtccataaggcccctgctcttatgggggctacttggaagggctaccccagccccacagtgcccaggggttggctgataccataaatctcctgggagaatcaacactttggccttgtgtttttaaaaacacagatatgaaagcaggtactagcaccacgcagagcccttccttagagcgcagaggggccatttctcccattatcggattccaaccccacttgacaggtgggaaacagcagataaaggactccaggatggggcttccccaggccagagaaaaaactcaaccacccaaaagtacagaacccacccaggctctggaggggtccacggctgaaaatcccatcttgggacctatgttttgggagggga

SEQ ID NO: 67167 - DNA, 621 bp, Homo sapiens
cagtgacttgtggtcgctgatgtcctaatattgacccatctttatatttctgaatgtgatgggattctgagcctctgtatttctaggggagactagtctctgtgtgatgtatgacgaatcagaaaattcattccttatctgatcacatcatctaggatctcaagaagtatcaaatgtttattcttatgaaattttatcagtttttctatgatctgtaagaataactttgaatggtgggttgtgtgtgtgtgtgtgtgttttgatacagggtcttgctctgttgcccaggttggagtacagtggcccaatctcggctcactgcaacctctgcctcccaggttcaagcgattctcccgcctcagcctcccgagtagctgggattacaggcacgtgccactacacctggcttatgtttgtattttaagtagagatggggtttcaccacgttggccaggctggtctygaactcctggactcgagtaatccgcccatctcggcctcccaaagtgctgggattacaggcgtgagccactgccccccagcccactttgaatgtttctgaccactaaacagtaagggttttgtgtgcatgggatcatcgactgtgtgcacttaggcatc

SEQ ID NO: 67168 - DNA, 1143 bp, Homo sapiens
cacaggtgcacattcccagtcacgcgaagtgcaggggcacaactgtgtacatgcacacacacacaaaagtgcacatgtgtgtgcacacacatgccccccgcaggcgtgtgattctcacagtcatgctgcatccacacaaagtcttcctccctcagagtgccttgttctgtcttcacctggattgttgaaaaggctgggggctgggttctttgggccccgggagtgccaggggatcctgtggtatgatcaacagcaccaccgccctgggagcagctcctgattgctgggaacagacagtaggggctgggctggggtagaagctgcagcctgcaggcagcccagagagaggggcccccacaacaccctccccagcccccgctgattgtgtgggggcagggagtatgcaggcagctcggagagaggggcccccacaacaccctcccacccccgctcactgtgttgggggaggggtgcctgcttctgctcaggaaggagacccggctgggtctggctgtggagcgtatgttggagaccygaggccaccctggaactctccaggtgaagcctagggatccaaagaacctcacagctgtgggggatggagtggggcaacacctgaaacctccagcaagtctcttcctctctcagccccaggcctgcagaggagggtgtgccagccaactgggcctttgtgccggcactggctccccaccagtgctcaggggtcaggtgcagaggctggcagggacaaagctggctgtggctgtgtctggaggggctggccatggccctcaccccacccccggcatggggcactggaccatgcagagaaggggccaccccagtgcctgccagggccagtcagagctgccaccctccaggctgtctgttagcgggtgcctgtcagagaacaagacgacaggcctggccaggcccaaccccacagcgagatttcagcggctggccagtggcagacggcgcagggtctgagacagatattccctcgtatggtgctgtgcagggcaggggcagaatcctgggaaactaaaatgcatgttgggcgcccttatacgatgatgatatttggtacattttgaaatactgtggcccatgaagatcctgaaagcagtttggggcactgtg

SEQ ID NO: 67169 - DNA, 1143 bp, Homo sapiens
cacaggtgcacattcccagtcacgcgaagtgcaggggcacaactgtgtacatgcacacacacacaaaagtgcacatgtgtgtgcacacacatgccccccgcaggcgtgtgattctcacagtcatgctgcatccacacaaagtcttcctccctcagagtgccttgttctgtcttcacctggattgttgaaaaggctgggggctgggttctttgggccccgggagtgccaggggatcctgtggtatgatcaacagcaccaccgccctgggagcagctcctgattgctgggaacagacagtaggggctgggctggggtagaagctgcagcctgcaggcagcccagagagaggggcccccacaacaccctccccagcccccgctgattgtgtgggggcagggagtatgcaggcagctcggagagaggggcccccacaacaccctcccacccccgctcactgtgttgggggaggggtgcctgcttctgctcaggaaggagacccggctgggtctggctgtggagcgtatgttggagacccgaggccaccctggaactctccaggtgaagcctagggatccaaagaacctcacagctgtgggggatggagtggggcaacacctgaaacctccagcaagtctcttcctctctcagccccaggcctgcagaggagggtgtgccagccaactgggcctttgtgccggcactggctccccaccagtgctcaggggtcaggtgcagaggctggcagggacaaagctggctgtggctgtgtctggaggggctggccatggccctcaccccacccccggcatggggcactggaccatgcagagaagggrccaccccagtgcctgccagggccagtcagagctgccaccctccaggctgtctgttagcgggtgcctgtcagagaacaagacgacaggcctggccaggcccaaccccacagcgagatttcagcggctggccagtggcagacggcgcagggtctgagacagatattccctcgtatggtgctgtgcagggcaggggcagaatcctgggaaactaaaatgcatgttgggcgcccttatacgatgatgatatttggtacattttgaaatactgtggcccatgaagatcctgaaagcagtttggggcactgtg

SEQ ID NO: 67170 - DNA, 1143 bp, Homo sapiens
cacaggtgcacattcccagtcacgcgaagtgcaggggcacaactgtgtacatgcacacacacacaaaagtgcacatgtgtgtgcacacacatgccccccgcaggcgtgtgattctcacagtcatgctgcatccacacaaagtcttcctccctcagagtgccttgttctgtcttcacctggattgttgaaaaggctgggggctgggttctttgggccccgggagtgccaggggatcctgtggtatgatcaacagcaccaccgccctgggagcagctcctgattgctgggaacagacagtaggggctgggctggggtagaagctgcagcctgcaggcagcccagagagaggggcccccacaacaccctccccagcccccgctgattgtgtgggggcagggagtatgcaggcagctcggagagaggggcccccacaacaccctcccacccccgctcactgtgttgggggaggggtgcctgcttctgctcaggaaggagacccggctgggtctggctgtggagcgtatgttggagacccgaggccaccctggaactctccaggtgaagcctagggatccaaagaacctcacagctgtgggggatggagtggggcaacacctgaaacctccagcaagtctcttcctctctcagccccaggcctgcagaggagggtgtgccagccaactgggcctttgtgccggcactggctccccaccagtgctcaggggtcaggtgcagaggctggcagggacaaagctggctgtggctgtgtctggaggggctggccatggccctcaccccacccccggcatggggcactggaccatgcagagaaggggccaccccagtgcctgccagggccagtcagagctgccaccctccaggctgtctgttagcrggtgcctgtcagagaacaagacgacaggcctggccaggcccaaccccacagcgagatttcagcggctggccagtggcagacggcgcagggtctgagacagatattccctcgtatggtgctgtgcagggcaggggcagaatcctgggaaactaaaatgcatgttgggcgcccttatacgatgatgatatttggtacattttgaaatactgtggcccatgaagatcctgaaagcagtttggggcactgtg

SEQ ID NO: 67171 - DNA, 670 bp, Homo sapiens
acttaggaagcctcagatggctctgagaaggctcctccagggcttcagaggcacccttagaggcttagagtctcctgaagatgcgagataggcctttgcccaccagcccatcacagagcagtggctcatgcctgtaatcccagcagtttgggaggctgaggcgggcggatcacctgaggtcaggtgttcgagaccagcctgaccaacatggtgaaaccccatctctactaaaaatacaaaagttagccagacatggtggcaggtgcctgtaatcccagctacttgggaggctaaagcaggagaatcgctggaacttgggaggtggaggttgtagtgagcagagatcacgccattgcactccagcctgggcgacaagagcaaaacttcatctcaaaacaaacaaacaaaaaggtagaggaagggagaattatctctctgcctgactgcttgagaggtggcaccttctcctgtcctccagctgggacttgaacccacagccccactcatgtgcaggccttcaactcaaactggaaccacaacaccggctctcctrggtctctggcttgcagatggcagatcgtgaggcttttcagcttccaaaatcatgtgagccaactcctcagaataaacttctctctttctctcatgtaaccacacacatataaacatg

SEQ ID NO: 67172 - DNA, 647 bp, Homo sapiens
aggcacacacatctccagcatatgtgcacacacacctctccagcatatgtgcacacacacacataggcacacacatctccagcatatgtgcacacacacacctccagcatacatgcacacacatgcacacacacatctccagcatatgtgcgcacacacatacacgcacacacacatctccagcatgtgtgtacacacacacacacctctccagcatatgtgagcacacacacacctctccagcatgtgtgcacacacatgcacgcctctccagcatatgtgcacacacacacaygcacctctccagcatatgtgcacatacacatagccagcacatgtgcacacagctctcatgtatgtgcacgtgtatctctagcatacatgcacacatgtatctggtgtatatgtgcaacacatgtatctggggcatgtgcacacgcatctcttatgtgcacatacacacacatgtatctaggtatgtgcccacgtttttctagcacacatgcacacacatctctctagcatatgtacacacacatgtatttgtagtgtgtgtgcacatctgtgtctctagtatgtgtgcatacacgtacacatgtaggctttgagttaagcaggggaggaatattttgatcaactttaaaatc

SEQ ID NO: 67173 - DNA, 653 bp, Homo sapiens
cagatgcagggcccagggcagcagagctgggtgtggccaggggttcagatccctgcagagttctctgtggccaccagtggaaggggggctgcccggggcagagctgagagcaggcaccgtcagctgtgtgacactggacaagttacctaacccttgtgctccagctccccacctaggaggtgggactctaacagtcttgagaggaggggtggagttgggaacaggcaggagagggcttgccccagcacggctttgctaggagcaggcagacaggcatcgggaggcaggggcagcccgagaggccacagggacctcggcgtgacggtcaagacatcagaacatcagaaaagcctcccgtaggccgagccacctccgccggcaagcaagggagcgtctagcagaggcaggagcattttaaaacaaaatggaagtaaaaaccatggcccttagggcgtctggagtctgcatccagctgctctgagctgaggggcgtctgtgctgcaggagggatgccccaggcccaggaagactggaaagcaacattttccttgaatttcctggtttggtgttttgttgatctgtaagtcgctygagtccagttgaattttaaacgcggctctttgtttccgatttttccttttgctcgtggacag

SEQ ID NO: 67174 - DNA, 1314 bp, Homo sapiens
tgcacgcaccaacctggacgcaaaccccaaacccgaccctcccctcaccagtggcycctgtcctccccagggctgcctgcgccttggggacggcccagtgcacccaaagggaccacagcggcccttagggaggctatcaggtggggcacaagccgccacctaaccgtgccttcgccacaggggccctcagagaggctgccaggtggggcacaagctgccacctaaccctgtcttcttgtttttttgctcagggagagccgggcttccgaggacccccggtaagtcggtccctggctttctctgcactgagctcgggcatgacggcccccaaggacacggtcgcccgcggctgctgagcttgtgctgtgcggcccagggctcatctccctagtgcagttttaaagcgtgtggggcaggtgtcggcgtgaggctgcagtgggctcctccgagctgatgggtggcccagggtgctgtgctctgcatggcccctccccttccccaggaccccccaactcgtggtcaagggccagggtctgccccactaagcctggcccccttcctcttgcagggtccatacggacggccggggtacaagggagagattggctttcctggacggccggtgaggacctggggtctccagtgggggcggcagatggggtctggcaggtggggagcagcccaggcccacgggggtgacatgcccagaggggagtggacggccgccgcacccactgtcctcccccaagaaccggccctgcctgagcgcagctcttgtcctggatgtggctggcagtaccccacgaggggccagtacccaggaggaagccctggaggcagacagggcagtgggcctgtgtgtgctaggctcagtcacctcctcccaaaagggtccttgtgcaggaaaggggtgagaagggccggggtagcctgagagctgggaacgtgtgaggctgagcgtgggccggccgggcctggcgtggggctaacggcaggcaccctgcgggaaggtgtctggtaatcatcagtgcccagcagtccccaccccctgtgctccgccccagggtcgccccgggatgaacggattgaaaggagagaaaggggagccgggagatgccagccttggatttggcatgagggtgagtgtctctcaaggggcggactgggtggctgggagaccaggacctgggaatggcctggccacagcctggggtcctgcagctcctcccagaggccacttataagcagccctgccatgtggccacacagcactggtcatgccatacccatgcacagtcatacatgtccacacac

SEQ ID NO: 67175 - DNA, 1314 bp, Homo sapiens
tgcacgcaccaacctggacgcaaaccccaaacccgaccctcccctcaccagtggctcctgtcctccccagggctgcctgcgccttggggacggcccagtgcacccaaagggaccacagcggcccttagggaggctatcaggtggggcacaagccgccacctaaccgtgccttcgccacaggggccctcagagaggctgccaggtggggcacaagctgccacctaaccctgtcttcttgtttttttgctcagggagagccgggcttccgaggacccccggtaagtcggtccctggctttctctgcactgagctcgggcatgacggcccccaaggacacggtcgcccgcggctgctgagcttgtgctgtgyggcccagggctcatctccctagtgcagttttaaagcgtgtggggcaggtgtcggcgtgaggctgcagtgggctcctccgagctgatgggtggcccagggtgctgtgctctgcatggcccctccccttccccaggaccccccaactcgtggtcaagggccagggtctgccccactaagcctggcccccttcctcttgcagggtccatacggacggccggggtacaagggagagattggctttcctggacggccggtgaggacctggggtctccagtgggggcggcagatggggtctggcaggtggggagcagcccaggcccacgggggtgacatgcccagaggggagtggacggccgccgcacccactgtcctcccccaagaaccggccctgcctgagcgcagctcttgtcctggatgtggctggcagtaccccacgaggggccagtacccaggaggaagccctggaggcagacagggcagtgggcctgtgtgtgctaggctcagtcacctcctcccaaaagggtccttgtgcaggaaaggggtgagaagggccggggtagcctgagagctgggaacgtgtgaggctgagcgtgggccggccgggcctggcgtggggctaacggcaggcaccctgcgggaaggtgtctggtaatcatcagtgcccagcagtccccaccccctgtgctccgccccagggtcgccccgggatgaacggattgaaaggagagaaaggggagccgggagatgccagccttggatttggcatgagggtgagtgtctctcaaggggcggactgggtggctgggagaccaggacctgggaatggcctggccacagcctggggtcctgcagctcctcccagaggccacttataagcagccctgccatgtggccacacagcactggtcatgccatacccatgcacagtcatacatgtccacacac

SEQ ID NO: 67176 - DNA, 1723 bp, Homo sapiens
gagtggctccatattcagacagcggcggcatcgtctccaagcctgggctcagtggttagcacgtcccgtgctgacgagagactggaggcggcttctgaaaacccttcggggccaaggctctctagtcggactccacacggctggtgacagatcaggccagacaagtgcatgacacccaccatccaagacgacaggctgagaccccccaagtccaggtgggccacggctggctggacctcagctgggactcggacatgctggctctgcagcctggccccagggtgtgggcctgcagctctggctgctgagaaatccccagtgggcccttcaayctttgaaggattcgccccattgtcactgcagtgagaccccctgagaacccgggaaggcagtggtgccgcagaaggggtgctggccggcgagccttggggatcttcccagggatgcagcaggtggggctgtgaccaggctgcagagggtgtttcttcttcgtatgtggccagtgtgacttgagttcagccccagaaataaatgtgtgagaggactgcgtttggtttgagcgagggcaggcacaggtagggagcggagctgctacaggaagccctgcggctgggaatctgagggagtcggggcagccttgttgccagggcaggacagagtacggccacctggttgcttggaacaaggtggagctgtgttccaatttctcagcacacagggaaacacatttcagttaaattgaattttctttttcttttttcttttttttttttttgaggtggagtctggctaggtccccaggctggagtgcaatgctgcaatctcagctgactacaacctctgcctcccaggttcaagcgattctcctgcctcagcctcccaagtagctgggattacaggtgcacaccaccacgcccagctaatttttgtatttttagtagagacggggtttcaccatgttggccaggatggtctcgatctcttgacctcgtgatccatccacctcagccatccaaagtgctgggattacaggcatgagccaccgtgcctggcctaaattgaattttcatgtggaagtcaataactacataaatttgggaatgtcagtggcagaaatcacaaaggaaaagatgagtagatgtgcttgcatccaacctaaaaacatctttaagtcaaaaagcaccatgaagaactgccagcccctcagctgtgtggaaacatcgcaacgttgaggccgggtgagtgtcggtgtcctgggtccatcagggaattgcccccatctgtgtatttaggtcggtgaggtgtcaccacgcaccgacaaggagacaaacacacacactgaaaatggccaggggtgtgggcgagtcccccatggggaccagcggtaggcagcatcctccggagaccacgggaaggccaggtcttccagctccaacttgcaaagatttgctaagatttatatttttttccagttgtttttcagtctttattttattgaggcccctgcaggtacctgtggattctgatttgcagctctgtccagggagcatccggccaaacctggagcccggggcgtgcggatggacctctggacgtggggccacacctgtgcgcgagttttctcacttactggctcggaggtggttccacatcagcacacgcagagcttccgtgttccttattaacagcagtgaagaactagtcattcaaatgcgcatcattc

SEQ ID NO: 67177 - DNA, 1378 bp, Homo sapiens
agtgtatctttatctttgaattgaactttctggttcttttgttttgattccattatctgcgtttgaattctggcattatgaattgttttctgtttttcctacttgttccctgttccttcttctcctcgtggcttcgattattttttattccatgtttatcctctcttagcctgccagttatgaattactgttcattcagtagttatccatgttaaagtccagtgtaaattcttcctgctatctcttaccagaccaccaaagatttacatcacccctttattccatcccaccctttgttctgttgttcttatgtattttaactctacttgcatgtcaaactctggaaatcactattgttattattttctttttcattttttcgggtcttgctctgtcacccaggctggagtgcagtggcaccgtcacaggtcactgcagtctccaactcccaggctctaccaatcctcccacctcagcctccccagtagccagtactacaggcatacacaaccatgcagtctaattttttaaaatttttggtagagacagcgtcttgctgtgttgcccaggctggtctcaaactcctgggctcaagtgatcctcctgcctctgcctcctaaagtgctgaaattgcaggtgtgagcccccgtgccggacacattatcattattttctaccatgtatgcgtctctttattcacttccctttcccgggtctgcgttccttcctttatccccaagctcccaccccaccctggggggtcatttcctttccaccctaagagcccctcatcatgggtgccggtctctgggtggtcactccccggcccgtccggggtcacctccctcccactcccctgcctgcctggggccacctccctccactccactgctcatccagggtcaccttcctccactcccttgcctgcctggggtcacctccctcccactcccctgcctgcctggggtcacctccctcccactcccctgcctgcctggggccacctccctccactcctctgcagcttctctgcattgcttcttctccttcaccttttttggttgattttcatcttgtacccttggcatttttggttgagtgacagatgttcataggacaggtctcaggccaccagtggtgccgtctccagggagccgagtggcgctcgctcctgtggtcacccagggagggaggcccttgtgacccaactgcagactctgggagggtggggtcaggctgattccccttcagggttcccaccaacagctgaggggcttctcggggcccctttgtttcctttggccccatgagtgcygagagctgagtccggctcccatggctcagctcagcttttgcttccccagttattggtcagccc

SEQ ID NO: 67178 - DNA, 670 bp, Homo sapiens
gggagaagggaggtgaaagggaggagggaggggaaaatggaggagaaagggaggagggaggggaggagggatgagaragggaggacagagggaggggaggagggaggggaggggaaggaagggggaggagagaggggagggagggaccacgagaggtgggagggaacgctgagagccacagagatgggttcgggtgtcgtgtcaaaactcaacacgctgtgcactttaaacacgggcagctttaactacatgtaattgtgtatcaattatgcctcactgaagctggaggaaaaaacagaagacaatggaaaagtcagagtaaagagaattcacttacgaaatgccaaccgtttaaaaatactccacaccgaacatgatgagccttttccattattaatgcctcagggagaaatcaaagtccgagccgcagctatccctgctattctcaaattaggagaaatcaccgtgtcctacttgacttcagggtgggtggcgggcgttcccgcggcagctgcagcctcgcagtgcctgcgtgagccgtgctccgctgcgccccgggcagctccgctccgacccacgcaccgcaggttgcttatatacttgtgcatgttagtttggactttgaggggtgcttgctttattttatgttaaggtgcagtttacaggcagt

SEQ ID NO: 67179 - DNA, 670 bp, Homo sapiens
gggagaagggaggtgaaagggaggagggaggggaaaatggaggagaaagggaggagggaggggaggagggatgagaaagggaggacagagggaggggaggagggaggggaggggaaggaagggggaggagagaggggagggagggaccacgagaggtgggagggaacgctgagagccacagagatgggttcgggtgtcgtgtcaaaactcaacacgctgtgcactttaaacacgggcagctttaactacatgtaattgtgtatcaattatgcctcactgaagctggaggaaaaaacagaagacaatggaaaagtcagagtaaagagaattcacttacgaaatgccaaccgtttaaaaatactccacaccgaacatgatgagccttttccattattaatgcctcagggagaaatcaaagtccgagccgcagctatccctgctattctcaaattaggagaaatcaccgtgtcctacttgacttcagggtgggtggcgggcgttcccgcggcagctgcagcctcgcagtgcctgcgtgagccgtgctccgctgcgccccgggcagctccgctccgacccacgcaccgcaggttgcttatatacttgtgcatgttagtttggactttgaggggtgcttgctttattttatgttaaggtgyagtttacaggcagt

SEQ ID NO: 67180 - DNA, 575 bp, Homo sapiens
tgtcagctgcaggcattcccctcgttggccccgtggtacagaagcaagcctcgatctccacggtgttcagagcctgcccactccccatctccatgttgttcagagtctggcccccccacccctatctccaccgttttcggagcctggcccccaccatctccatgatgttcgaagcctggccccctcatcctgatctccacagtgttctgagcctggcacccccccaaccccagagatctccatggtgttcagagcctggccctttcacaggtacggtaagtgcatgtgtggcttgcccactggcacgaggaggccaaagtggccaaatggtggtcatggcttctagtcttgcagcaacctgtgtacgctggcaggagcctcccctcaaccagggggtcaagggttccagtccaagagagcctcagacttcagccccaggaagcrcagccatgcaagccgttcaccgtgtgtgctggggaggggccaaactggcttctgtccctggggtcctcagagctttgtatgcaaggtcccagggacacgggatcatttcctgaccatgggctcagcacgga

SEQ ID NO: 67181 - DNA, 907 bp, Homo sapiens
cggaggaggaacggcttctcgtcttgtcttagtcctgtacctgtgaagataagctgtttattgacactgtcagggtgagagtcagcaggacactgccttagggtacagactggggcccagagggcatttccgtgtgggcagctggtgagggaggcccctggggagcctcgcagccttctatctgcagctgtctgcttaggaccaaaaggaaggccacctttgcatgactctgttcccaaactgaactcctcgtcatagtgggtttggggtcctgagattttattttccttccacagttcccaggtcccccttcagtgaggtcttcctgatggatgctgatatggtctggctgtgtccccacccaaatctcatcttgaattgtagctcccacaattcctacaggtcatgggagggactcagtgggaggtaagtgaatcatgggggcgggtctttcccgtgctgttctcgtgatagtgagtaagtctcatgagatctgatggttttctaaagcatagttcctctgcacgtgccctctcttgccggccaccatgtaagacgtccctttgctcttcctgcatcttccaccatgattgtgaggcctccccagccatgtggaactgtgagtccatgaaacctctttcctttataaattacacagtctcgggtatgtctgtattaccagcgtgagaacagatgaatacagacgccatataaaaccccaatccagcctttccagccttgtctgctgccaccaactcctgctgcttgtccactcctttgctggtgtcaccgtccttgggatgtgagctctgtgaatgcccggcactgtgctgtggtatcagcaggtcyccgaccaggaacagctgagccaggaggggccgtgctgcagaggtggccagcgggtcag

SEQ ID NO: 67182 - DNA, 757 bp, Homo sapiens
cagccccacatgacttcccccttccctggctcagttggatatccacaggggcctctttctcttggacatgcccccacctagcacccaccatttctatttctcttgctctggatgccaccgcatcttcaggacacagcttctcctgagctgatagggatgccctggagcctgtggagtgcctctgttgtccagagttctgtggtaagrtcccaagaaactttcccacctgaagaacagagcatagttgaggcgaggtcctgtgctttgcaggacttactgaggagactttgaccctggtcttccttctgtcatttccaaaagtgagtatgtgggggcagtggggtggaggtcagttcagtgagcacacatgatggggaggcagagccctctacctcttgggcagctgaggctgaggtcctgggctgggcctgtctgcttagtgtccttgatgcagggatagatcttatttaagtgaacatgtccctacagacaggcaggtaccacctagggaacccacaggcaaggcccaaatgctcttatttgtggtctacattaggcaaagaaccagattggactatgaagccggaagggagcttataacttcctgctgaacagaggataaaaatgtgacccactgagggcagtaatagctgatgagcaatcatggtggttcttactcctggttggctcagggctgggagcactaggcgtattgcagtgccagtgaaagcagagcggggcctcaaaccctcttttt

SEQ ID NO: 67183 - DNA, 592 bp, Homo sapiens
ctggatcccatgtgataggcaggatggcagggtctaagcatcctcccagaggaggctcctcccccgccccaaattgtgcaacccattcctcatctgggctgggactcgatggggatgggrgcttcacagccagactgtagacctgagccaggaatgccctttcagagctacacagatgcagaaatttccagaagaaaaaccacccaggccctgtttccttggcctagggttctgctgggggctaagcctacctgcagggctgggggcagggccttgagcatccagttctgcaggaccaactggtgcacctgtgcgttctgcagcagcagcagctccaccatgtctgcagggaagaagcagggggaccctgaataaagtttccgtttttcctatttgttaaagtgatagagcattataggaccagagaacaggtgtgtctgtacactgtgcaggtccccggggcaggctctgagtccgtctgcacacggtgcgggtccccggggcgcgccctgagcccgtctgcacacggtgcgggtccccggggcgcgccctgagcccgtctgcacacggtgcgggtccccggggcgcgccc

SEQ ID NO: 67184 - DNA, 592 bp, Homo sapiens
ctggatcccatgtgataggcaggatggcagggtctaagcatcctcccagaggaggctcctcccccgccccaaattgtgcaacccattcctcatctgggctgggactcgatggggatgggggcttcacagccagactgtagacctgagccaggaatgccctttcagagctacacagatgcagaaatttccagaagaaaaaccacccaggccctgtttccttggcctagggttctgctgggggctragcctacctgcagggctgggggcagggccttgagcatccagttctgcaggaccaactggtgcacctgtgcgttctgcagcagcagcagctccaccatgtctgcagggaagaagcagggggaccctgaataaagtttccgtttttcctatttgttaaagtgatagagcattataggaccagagaacaggtgtgtctgtacactgtgcaggtccccggggcaggctctgagtccgtctgcacacggtgcgggtccccggggcgcgccctgagcccgtctgcacacggtgcgggtccccggggcgcgccctgagcccgtctgcacacggtgcgggtccccggggcgcgccc

SEQ ID NO: 67185 - DNA, 592 bp, Homo sapiens
ctggatcccatgtgataggcaggatggcagggtctaagcatcctcccagaggaggctcctcccccgccccaaattgtgcaacccattcctcatctgggctgggactcgatggggatgggggcttcacagccagactgtagacctgagccaggaatgccctttcagagctacacagatgcagaaatttccagaagaaaaaccacccaggccctgtttccttggcctagggttctgctgggggctaagcctacctgcagggctgggggcagggccttgagcatccagttctgcaggaccaactggtgcacctgtgcgttctgcagcagcagcagctccaccatgtctgcagggaagaagcagggggaccctgaataaagtttccgtttttcctatttgttaaagtgatagagcattataggaccagagaacasgtgtgtctgtacactgtgcaggtccccggggcaggctctgagtccgtctgcacacggtgcgggtccccggggcgcgccctgagcccgtctgcacacggtgcgggtccccggggcgcgccctgagcccgtctgcacacggtgcgggtccccggggcgcgccc

SEQ ID NO: 67186 - DNA, 592 bp, Homo sapiens
ctggatcccatgtgataggcaggatggcagggtctaagcatcctcccagaggaggctcctcccccgccccaaattgtgcaacccattcctcatctgggctgggactcgatggggatgggggcttcacagccagactgtagacctgagccaggaatgccctttcagagctacacagatgcagaaatttccagaagaaaaaccacccaggccctgtttccttggcctagggttctgctgggggctaagcctacctgcagggctgggggcagggccttgagcatccagttctgcaggaccaactggtgcacctgtgcgttctgcagcagcagcagctccaccatgtctgcagggaagaagcagggggaccctgaataaagtttccgtttttcctatttgttaaagtgatagagcattataggaccagagaacaggtgtgtctgtacactgtgcaggtccccggggsaggctctgagtccgtctgcacacggtgcgggtccccggggcgcgccctgagcccgtctgcacacggtgcgggtccccggggcgcgccctgagcccgtctgcacacggtgcgggtccccggggcgcgccc

SEQ ID NO: 67187 - DNA, 539 bp, Homo sapiens
aagaaggtgaccacaggcgcaggtcacagaggggccgggacccccacccccgagcaggggagggacagatcaccagcatgggggaggggcctgaagggcctagaaccttccgggtggcaggactgctgggagcaggggctcagccccaaatcttgccctgtcccagggccttggtgctggctggaatcccggcatgacgaggcctccctgcacccctgcgggtgacccctgtggcctggtgctgcsctctgggaggccttccaggtggcccttagggcctgcgtttgttcccggaggagcctggacctcagggctgtggaaggcgagaggccggacctgggggcctgctgccccctctgtgcctacttcgttttgggtccagtgaggatggtggctgcagggtgggggctcagcaagctaactccagtggagatggagaggcggcagtggggaccatgctgggccacctcgtgtggcctcacacagccctttcagtcagtggcaggagccccattttcaggggggagcaccaaggccct

SEQ ID NO: 67188 - DNA, 539 bp, Homo sapiens
aagaaggtgaccacaggcgcaggtcacagaggggccgggacccccacccccgagcaggggagggacagatcaccagcatgggggaggggcctgaagggcctagaaccttccgggtggcaggactgctgggagcaggggctcagccccaaatcttgccctgtcccagggccttggtgctggctggaatcccggcatgacgaggcctccctgcacccctgcgggtgacccctgtggcctggtgctgcgctctgggaggccttccaggtggcccttagggcctgcgtttgttcccggaggagcctggacctcagggctgtggaaggcgagaggccggacctgggggcctgctgccccctctgtgcctacttcgttttgggtccagtgaggatggtggctgcagggtgggrgctcagcaagctaactccagtggagatggagaggcggcagtggggaccatgctgggccacctcgtgtggcctcacacagccctttcagtcagtggcaggagccccattttcaggggggagcaccaaggccct

SEQ ID NO: 67189 - DNA, 539 bp, Homo sapiens
aagaaggtgaccacaggcgcaggtcacagaggggccgggacccccacccccgagcaggggagggacagatcaccagcatgggggaggggcctgaagggcctagaaccttccgggtggcaggactgctgggagcaggggctcagccccaaatcttgccctgtcccagggccttggtgctggctggaatcccggcatgacgaggcctccctgcacccctgcgggtgacccctgtggcctggtgctgcgctctgggaggccttccaggtggcccttagggcctgcgtttgttcccggaggagcctggacctcagggctgtggaaggcgagaggccggacctgggggcctgctgccccctctgtgcctacttcgttttgggtccagtgaggatggtggctgcagggtgggggctcagcaagctaactccagtggagatggagaggcggcagtggggaccatgctgggccacctcgtgtgrcctcacacagccctttcagtcagtggcaggagccccattttcaggggggagcaccaaggccct

SEQ ID NO: 67190 - DNA, 582 bp, Homo sapiens
tgcagatggcagtctgttttgtggtgggtggtccttgctcacttttcctcaactgcttgcctcctggatgcttctgcttttctgtcctgccagcattcaggggagagactgggtgtaaggcctgtcaggacagtttagttgggggccatgactgcccattcttttttttctttgagacagggtctcattctgcctcccaggctggagtgcagtggcacaatcacagctcactgcagtcttgacctcctgggctcaattgatcctcctgcctcagcctcccgagtagctgggactatagktgcatgccaccacatcccactaatttttgtatttttttttttgtagagatggggtctcactatgttgcccgggctggtctgtaaccctaactcctgggctcaggcgatctgcctgcctcagcctctcaaagtgctgggattagaggcatgagccacgttgcctggcctgctcagaggttttgactgtgtgatttaaatttctttagcacagataatcaactattgagtttaatttttttttcttttaaattagaccctgaaggaagattgggaatctgaaaaa

SEQ ID NO: 67191 - DNA, 555 bp, Homo sapiens
ccagtttcctggggctgcaggaccatcgtctgtctccttgctggctgtgccccccacatccstgccacttcgagtgctgcttttgctcccagccctgtggctcttgccaccgcttggagagagctctccacattcaggggcgtacgagagtctaagccgtaggggtccctcatccctctccggttctgggatgggcccttttccgagttctgcccccaccacaggtaaccaggctcttgcctctcgcctggcttgttgtgggtgtcccattttaagacgattgcctgactccgttatgttgcagagctacatgagcaactcctggcgcgcacctctcgtgtggaagatttagaacagctgaagcagcgagaaaaaacccagcatgagtccgaactggagcaactgaggatttattttgaaaagaagttaagggatgctgagaaaacttaccaagaagacctaaccctgttacagcagaggctgcagggggcgagggaagatgctcttctggactctgtggaagttgggtaagcaaagcagttccagcctcagtga

SEQ ID NO: 67192 - DNA, 1178 bp, Homo sapiens
ggcattaatgctaaatataaagatcctttcagtttttcttggcctcctggctcaaactccttcactctgaaagaaagctagagaatggcacatctattttctttattatatcaggtcttaacccaacattaatatcaattgaataaaatcaattttaaaacttcccctaaatgtcacattattcaaatagaccatgttgtcacaaaatgtactatctattaaagcaataaaagtaaaacacgaatgccctgtgttgacatttcactgcatagcatctccactaataagattttggctctgcttctagttataatgcacttgtgaaatactagaaaccaaatataaatcagatgttataaggtagctccaaggtccatggcagtacaaggacctgcagagaagtactggaaggaaaagggcagagaagttttgcttctttttctccctcaaatataggcaggtattttccttatcttcttcttttacatttattacattaaagctgtaattcttttgggaaaaaagcctgactacaaatactggacatatggcaaaacctcaatagatattttcatttgtatacctatctcacaccatttacaacagtataacaaatgccaggtagagatgccgacatttacaaatgayattgcacttaagatttagatataccattttatcctatgttttatgcaatatttaatcatatgctcttttcaattattctgtagttttcataattattgttaatgatccttttgttctccaaacctttattaaaatttaactaataagctattttttccaatatttacataaagcactatatcatcagatgcaaaatgtgtcatgagttaatgtctttttaatatgaaagcagtaaagttttcctattcacccatacatcattatgcttactggtataattagtggtaattaaatattctctctcttaatcatttctttaaagctggcagaaatcaatttctaaatccttatttagatgagtaatgcacactctacagagatttttttttcctattaaggtgaaggcattatccttttagaaactgaaccattcactacaccaagagctaccaatccattcacaacaccaataattactatgtaatatttaatttcttattacaatgtagaaacttatctgagaagtctga

SEQ ID NO: 67193 - DNA, 586 bp, Homo sapiens
ccacgcctggctaatatttgtatttttagcagagatggggttttgccatgttggccaggctggtctcgaactcctgacctcaggcaatctgcctgccttggctttgcatagtgctaagattacaggcatgagccctcatgcccagtcccttaattaatttctaattcttctacttcttttctttggctacaatagcttctgcagttacagcatttgaattcacaaagtattagttgccaaaaggaaatttcttttaaggagctagtatatgagccatagaaattgtatactaaaactcaaatagagtacttgcctaagaatattttcaagtcgatttttaaaacctctctacttttagatgaaaatagagaatagctacctcaaagacatatgtattttccactgaaaggtgacaatatcaaaactcwcttgtaagttattctctattttcagaatataaaatgacatttcaaggctctcactaaaattgctgtagtcatagccaatcccacagaaataaaaccatctaaggtaatgattttcaatctatgttccaaaaaaggagctggagtattccaattcttta

SEQ ID NO: 67194 - DNA, 548 bp, Homo sapiens
tgctgtgggtaaactaaggaaaacagcagtttaaggtgacatttcagacaaggaagaacaacaatctccatttccttgatttgggattaaatgtaatctactttccatttaaggctgcagcatatgctaagcatatttctccattaaaatgagacacttataagcaggttrtgtatggcatgtatgtgcataaccttagctcattcataggaaatcctttcaaaaattatataatttgaaatggaagattatagaaatagaatataataaacagagcacctagactaggcttctcctttgtttcaaacccacagaaatgatgaaaaagatgtacatttaaaatatgtgcaacaatactacaggactacaaatgatagataacctccaaagttgaaaggcaacgggatgagattaaaggaagaaaccacaagccaaaaatatgacaggaaggactgtggccacgagatgtgtggttggagaaccacaatgaaaagatcttggcaatttacaccagagaaatacaaatggcagccaaccatcaaattgtc

SEQ ID NO: 67195 - DNA, 557 bp, Homo sapiens
attcttttattaatccactaaacacatatttacttggcagttactatgtgccaggcactttactatttgctggaaatattaaataaagaaaacatagggctgtgccttagtgatatggaaaacrcgttttaaaagtccatttcaacacaatgtggtaaggacacaacagggcataggacaacaagatgatacagaagcacctaaatctgcaagaggcactgactacggcttcaaagatgaagtacagcataaaaggaagtaataatatacacaatggaagcaaatttaatcaagctactgtccgtacaattggtacagctaaaaagttttcattaatggctaattcataatgctttaagaagagaaggtacgtttggagacagcttaagaaaagtccctcagggccactgtgtaaagttcatggcagccctgagtcctaaatgtccatgtcacaaacaccatggcaacagacattgtgttcaagggcacaatggtctttgctgctactgtatttcctacattcttatatcctgtgaagtcttttcaatctttgccac

SEQ ID NO: 67196 - DNA, 1822 bp, Homo sapiens
tgtgttaggattctttgtcacaagtggtggaaacccaattggagcaactggcaagtgacagtttagggctgggtgtcatgggcccacctgaggggtgggaagcagtaggggcctcatggtacatgggacagggacaggaaccccactgcactccccacctctgccctctgctggctatgtggcctcattctcatggggcttccagcagctctcgggtggggctcccacaagacagcctgggtttcattctggctctgccacttaagagtgatggccctagcacaagtcgttgagcttttctgtgcctcgatttcctcatctgtgaactcctttttaagtcaagttctgtggaagcagagcatgagatgggtttggtccactgaggaatgctctcaggaaaaagggagggagggatgcgagaccatcctggcgaaagcgtggtctcagctggagtctgcattctgcctggttccatgggagctctggagaacaaatcgctgtataaagttgatctcagcttgtggcacagactggcctttgtaacccagtgttagtaggctgcagcttgtcaactgcctcttgtgggggccaggaggtatggaaatagcttcctaggaaaagtgttttaattttgtccagggcagttggggagaagggaatatctctgagttattaacagccagctgtgtgtcggggggtgatgagtgcaccagcccagtgtgggggccaccagcttccacgacgctgggcacgattgcagaacccaccccggggttggctggaatgactgaggggatgaatttatgtgaagtgctcggatcatcatgtggaatgcagtaagccctccatgcatgtgatatgatggcaattattttttattttcactagtagctcatgagaggtattatgtctaggaaaacaaaacaaaacaggaaaaaataacccagacaccagtattttcccagcagtccaggatccaaagcttaaaggtctggttggttccccttttggtgtctatcagagtcaacgggtcctagggctggatctgggcttcacacgctggagatgctgtattgcgtccaggcccatgtggctgaaccccttcactcagcgatgtcytctacacgcacacatcctcagccacagttgtttttctcatggctctccctctgtctctgtctcttcctctgactctcttcctctctccctctctccctctctatttgctttctgaggtatgctatgatgttggttttaaatacttaattgtacccaagtaatacgtgtgtgtttaaataaaatcaaagagaaagaaagcatatgacaaaacccagcaacccccaggccaacactccccaggccttgatcccactcactagggccaatcactttccacccttgtggatgtttccttttttttttttaacctcttccatgtatttataatctccactcatcatttattaacttagacatgaccttttttctttgttttatcatgaatgagctgccataagcaacacctcaccttctctagcacatcctcaccaacacattctatcactgttaatagatcaggaacacgggcacatctgtgcatttccattatcccttgcagagccaggtggcatactacaattatatttcctttcttatatcaccattttagctggagaaaaatgtcttcctttttctttttccccatttcatttgtgttgaattccatccccaggccctcacgtgtcttcagatgtcattattctttccttgtacttgataggttgactacttttagaattctaaattgaagattattctctgt

SEQ ID NO: 67197 - DNA, 668 bp, Homo sapiens
atcagataagtctgagtattttgcttagtacaggtttgacaagccaagatgctgctaaagattcttagtgttgattctactattaaatccaaatggcatgactaaacctagcagaacctaggatatactttaaaagatcctcaactccgctccyttcctccccctgaaaaatatgtccattcctctgtcttagttttaaagaccaaaggcatccctggaaggttatgaagtctcttttattcttcctatttaactgttggggaaataaattggtgttaagtgatttgctcagatttgacacttagagacagaatttagttgaaactcccatctgctgtctctttataaagtcgtttttgtcttccccctaccactggcatatacacaccacaaatattatatgcaattaactaaattcccaagagaacaaaaaacttacttttaattaattgatgatgccaagttcaagacatgttaatgatgttaattactaaccttgtagtaatacttcttaagtcagaggtaagtggctctttgtcttgatcataattatagcagagatcactgaagctagaaatactgagtttaaaaacaatctctagtcattcattttgtatcctccctttcactgaacattcagccttagtgtcaggagggaaatgcaagga

SEQ ID NO: 67198 - DNA, 968 bp, Homo sapiens
cttcttaaatagtttttgctttttttatttaggttaagacaagatagaagaaatattttccttgtttctttttattgcttcctaagcaccaaagtaaaattcacatagacacataatatgtaaactcaaatgtacaacatccrtatataaatataaataatatgtgtggtttctgtggtgttgtacatttcatggtgtggtagatttcagaaatgactataaatccttccatctctagatgtgcatctatctccatttgacacttctcctatcatgaggtaaagttgatttccctgtccttgaatctgggcttgaccatatgacttttttggttattgagacatttgcaaaagtaacggaagcagagtctctccgaggtgtttgtgtactggggctcgcttgtcttgctcttctgtggaactcttctgccatcatgtgaataagctcaggctgcccttcaggaggaagagagaccacatgaaaggagcacccagatattgcagctggcccagtgtgcttaggtgagccagctgaactgcagctttatgccagttgagccaactcaggccagaagagccacgacgctgacccatggaatcatgagaaataatgagcatatgtagtttaaagctagtttcagattcacatactattgagggaaaagagtaggctttaatgaggaatagtttttcatttctcagctgtgtgatataaatgagggacttgagctctcctaagttctagtttccccagtgaaattctacataatatatgtgagttaaataacacacatctatataaatatctatctatccctctatttatttgtccattattcatttattcacctgttcatccatcaatctttgtatctatgtatccatccatccatccatccatccatccattcatccatccacctacccattcatccatctatccatctatggatatattgatgtatcaat

SEQ ID NO: 67199 - DNA, 968 bp, Homo sapiens
cttcttaaatagtttttgctttttttatttaggttaagacaagatagaagaaatattttccttgtttctttttattgcttcctaagcaccaaagtaaaattcacatagacacataatatgtaaactcaaatgtacaacatccatatataaatataaataatatgtgtggtttctgtggtgttgtacatttcatggtgtggtagatttcagaaatgactataaatccttccatctctagatgtgcatctatctccatttgacacttctcctatcatgaggtaaagttgatttccctgtccttgaatctgggcttgaccatatgacttttttggttattgagacatttgcaaaagtaacggaagcagagtctctccgaggtgtttgtgtactggggctcgcttgtcttgctcttctgtggaactcttctgccatcatgtgaataagctcaggctgcccttcaggaggaagagagaccacatgaaaggagcacccagatattgcagctggsccagtgtgcttaggtgagccagctgaactgcagctttatgccagttgagccaactcaggccagaagagccacgacgctgacccatggaatcatgagaaataatgagcatatgtagtttaaagctagtttcagattcacatactattgagggaaaagagtaggctttaatgaggaatagtttttcatttctcagctgtgtgatataaatgagggacttgagctctcctaagttctagtttccccagtgaaattctacataatatatgtgagttaaataacacacatctatataaatatctatctatccctctatttatttgtccattattcatttattcacctgttcatccatcaatctttgtatctatgtatccatccatccatccatccatccatccattcatccatccacctacccattcatccatctatccatctatggatatattgatgtatcaat

SEQ ID NO: 67200 - DNA, 1592 bp, Homo sapiens
aggaaatcaggcaggttcttggggataaattcatggtgataagtaggtcacaatttgaaatctgggyccatagcttctgattgatgccagtcataagtctgtgagcttacaaggacttttggttcactttgattaagaaaacaaataaactgttagtgaatacgggctgtaaacttagactgccccagacagtacagtatatgttaagagcacagactctagagccaggacaccttaatttaaagcccagtttaaaaaaaaacataataataacatgacatgagtcaaatttcttagcatttgtatgccttaattttccctccattaaatggaataaaaacattacctacctcataagattgttgtgagagctaaacagcttaatatatcttatgtccttagaacaagattttagctaattgttgaatatattgtctttttgtactcactatatttaagagaacattctaggggctatatttactatttgctggactgttatcaccataatacagcatgataaaatgcaatccaggttgaatttgctcctaaatatcatatattaggcactatgctatgtttttacacattatctcattttttaaaatgctcctctacacccatttatctcctgaccccatttttacatgagcactgtggttaaggaacacatatgctagagccagaatgccatttttgatcccagtctcatcacttgatagctatgagactctatacaaggtttttaacatctctgttttcatttcttcaattataaaatagagacaatattgcaccactttctttgtattaaaggttaaatataaaacatttaaaagaagaactgaacataattgttactcagagagtgttcactgttgctattattgttgtcttcaaagtcattcatatgacctcatagacctataaattcctttataattcccagcaatcaaaagcagttggctcagattttatgcagttccttatttatcaatgcatgcttgtatccaagaacatgcctgctttcctagaattttgcaaatactctttatgaaaattttgtagaacacaaacaaaaataaatgcatacatgtaaatacagacacacacacatatatttatgttttctagtagcctgcatattttagtaaaacttgcaatgtacatttatagtgtttataactttgatactacttttgctaaatatgattgagaatatgaagtcttcagcttgtttttgcttccctttgcttaaacctttgtctacacgaatgttcttcccacaccattaaatatgcacacagaaaaaatataaaatgtaatatatctagagatgatttgaatatttttctgtattgtaaggaatgatatttctagtctgtaagcaatatttaaatgagctttgagaattctatgtataatttcctggattcctttccttatggatgactgtaaccaatcaccttgctcaggctttaaactctattttttctgcttcagctgtttaattaagcattaagttgttgatagccgggaatccccatcataagagggtttttctttcaatctgtctcttgaagagaatcact

SEQ ID NO: 67201 - DNA, 1803 bp, Homo sapiens
gctttgattaatgcaaagaaagaaagtggactgtttttttttttttctagttttctatttaagtagatcttggtgtcctatggacagaaaataaaactcttaaaaaagtaaacagttatgctcattgataaaaagctatatatttaaaaatacaaatcattttggtgttttgagaaaatagaaacatctggaattcaacctaatatttccagttactgagcacaaacctagaaactttataattgttacctcacttaaatataaaaacaagacaaaacaaaacaaccctacaatataaataatattttactaaagaaagtcaagtacttttggttctaaattcaaaatgtgatgggaatcttcagttagattaccgtaatattctcctattatttgcttttctgtatcttctttttcctttctctttttttttttttcttttttttttgagacagtgtctcgctctgtcacccaggttggagtgcagtggcccgatctcgtctcactgcaagctccgcctcccaggttcacgtcattctcctgcctcaggggaatgtaggtgcccgccaccacgcccagctaattttttgtatttttagtaaagacaaggtttcaccatgttagccaggatggtctcgatctcctgtccttgtgatctgcccacctcggcctcccaaagtgctgggattacaggtgtgagccaccgcsccgggccctttttcctttttctttacccacatgtcagccagagtcatcttaaaggttagagtatgcattagaggaacaattaaagctttattgtccctgttatgaattcagctcaattcagttcatcagaatttttgttcacatcacataaaagagaaatgttttctttcttaaaatctcatcatgcgccacggaatccttgctgattctattatcagttgtctattcttattgtattatacactagaattaaatattgcaaaaaatgaagctgaaaatagaggttaaaatgaaaaacattatttcttagaaacatgtttggctaacagaaataattagctggtccaagcatatttatgtaagcttttcaaatcagttattttggacagcgtattaaaaggaaaccctctctaagagttcctttttctctgcatccttaccagcacttgttatttttttgcctttttgataatgctactaactggcttgagatgataacctattgttgtattgattttcagttccctgatgattagtgatgttaaacatgtttttcatctgcttggtggccacttgtatgtcttcttttgagaagtaaatgttgagataatttgcccatttttataatcagatatttttgttggtggtgattggtctgctgttgagttctttgagtcccttgtagtctggttatcaattccctgtcaaatggatagtttgcaattactctctcccatgctgtgagttgtcttttcactctgatgattgtttcctttgctgcacataagctctttaatttgatgtaatccgatttgtgtatttttgcttttactacctgtgcttttgaggccttaccaaaaatatctttgcccagaccaattacctgagcatttctctaatgttttcttctagtggtttcatagtttcaggtcttacattaaggtattgattccattttgagttgatttttgtatatgaggagagagtaatctagtttcattattctgcatatggatattcagttttcctagcaccatttattaaagagactgtcttttccccaatgtattacttggtacttttgccaaatatcag

SEQ ID NO: 67202 - DNA, 620 bp, Homo sapiens
gatcagctagatgcttctctgattgaagatttccataggctgatccagggtcctgatcctgaaacattaagcctgtttagatccactggaacaacaaggtggaaagcagccacaatggcaactaaactttctctaattctgtgttacttagttcacgagttaaagccaaatattcaactaaatattctcttacttctcaaatctaaatagatccagtaagcatcaggtcttctatcagctaagaaatacagctgttacaagagataaatgcaaaatctcacttaaaaaaatgaaataaaattcasaattagataataagaaacaaacagtaatcacaggttatatgattacgtacataaaaacattcaacataaataaactttcagaataagagattagatatccattgtacacatatatgcattttatttcaaaattaaaacaataaatggtttttcttttctaacagattctaatatttgtatggaaatacaatagcctaaccacaaccaaaatgctaattaagaagaaaatgggaggaacatgtattgtcatatatcaagacttacactaaggaaccataggattgttgcagggattgacaacatgacaaatggagc

SEQ ID NO: 67203 - DNA, 620 bp, Homo sapiens
gatcagctagatgcttctctgattgaagatttccataggctgatccagggtcctgatcctgaaacattaagcctgtttagatccactggaacaacaaggtggaaagcagccacaatggcaactaaactttctctaattctgtgttacttagttcacgagttaaagccaaatattcaactaaatattctcttacttctcaaatctaaatagatccagtaagcatcaggtcttctatcagctaagaaatacagctgttacaagagataaatgcaaaatctcacttaaaaaaatgaaataaaattcagaattagataataagaaacaaacagtaatcacaggttatatgattacgtacataaaaacattcaacataaataaactttcakaataagagattagatatccattgtacacatatatgcattttatttcaaaattaaaacaataaatggtttttcttttctaacagattctaatatttgtatggaaatacaatagcctaaccacaaccaaaatgctaattaagaagaaaatgggaggaacatgtattgtcatatatcaagacttacactaaggaaccataggattgttgcagggattgacaacatgacaaatggagc

SEQ ID NO: 67204 - DNA, 1898 bp, Homo sapiens
acccactccacttagactgagtaaaatatagagctagttcaagtctaaaactctgtccttcacctaaggagataaaatctgaccgggttctgtccatcttctatttttaaactggccaaagaggtagggacagaaagtaaccaagtatccacagaaagagttaggaagagctaatcttagacagagacaggctggtgacactagccacatctgagtagctagcaccagtgtggagatagcaggtcagatgggagctgcaatggaagcgtccagcttcaggtagcagtgcaggagaactccttcccaagcctgtattcattgtctaaagctgctataaccagttaccacaaattcatggcttaaaacaacacaaattacattttatcattcataaattcaaaatgggtcttgctgagctaaaatcaagatattggcagaagtgcatttctttctcgagactcccagggagaatccttctcattagtatttccagtctcacaaggccatcctctttcttggctggtgaccctttttctttatcttcaaagccagcgacaataggttgtgttcttacattgtatcactccaccttttatcctcttccttctcttccacattttaaaaccttgtgattacactgggctgtcctggcttatgcaggatgatctccatatttcaaggttggttgttttgcaagctgattttgtttccttagtttttcttgccatgccaaataacacactacaggttctagggactgtgctgtggacatcttggggctggatagaaaycactattctacctaccacaaattcccttaagaagcaacagttgaacaaacagggccctggtaacctcaacacagggatccacctggatctagtatcatgaagaagaaaaggctatctcactcaaagaaagtgggaaagtggtaggagagctgagttttccctgagccctaccacgatagggtcacaccaagccaaccagcactttatttttcccagaacatcaagtaggtcctcaagtgaagtgcctacaaaaatataagaggttggaactaaaagtactaaatagtgggtcacaagtgacaggtgtgttcttgacaataaatgacagagagctgagccactacctgaggtagaggcaggacagcctgggccaatttggcttaaggagcaaaacccacccaaccatgcctgtgtggtcatctgtaagggaggatgcagaaatgataagaaggaagatagcatgtatggtaagcaccgaagcaggagctggggaatgtcagggctgatggagacaacttccattcctcaatttttgtcctaggttggttcccccataagccaattgtgaagcaaagatttgagaataagctttcatgggaggtgataccaacaaatactgctatgggagggggagtatgacatgaaagggaagccagccaatgtagtgtgcttttgtgagcaggtcattcatggggaactggaactatatccatgaagacctctaggagcattttcccatcggagggtgagagaagctggggcatttatctatcaactttcacttatcgttgaagtcttctcccaaggcattaacctcccatcacttttggcctgccctgcatgtgggcctagcatgtctccccagccagtggaagcctagagcagggagcaaaatgcatgaatgataatgaaggatctgagcacagcatcagtagcatctgctccaaggatggaggaaggcaggatgggaacttcccaggctaggaagggttataaacaagaagactcagaggttcccgatggaaggctcaggattgtcccaagggttcttttcagagttctagcccagtatgtcaagcagcatgcagaaacgaatacctaactact

SEQ ID NO: 67205 - DNA, 764 bp, Homo sapiens
tagacatctgctacataaaatgcaacccctgtctttatttagccacatgactcattggagaactactattggctgaaaaggaattgatagaaagggagatttcataacacagtgagagaaacaattacaagcaatgtgccaatctgacaggcaaatatgtgtgcaaagtaaaacccagcaaccaagagcccttatgtcagaaacacaagtcttattcagaatactcaatataattgttgcaaatataataattttgttctcaaaggtgtgtgtttcaggagaaaagtcatatgtgaaagccatttacacattgcttacacatcctgactttctgcttcttaccatctcttgaagctactggatctctaaagacaatctgtgagtttgtctgcaattaatggactactacaattatgtagtccattaattgtccataaacgtctgtgttcactgtttatgcagtgaaaactatttctatttataatctcttaacatatgatggcatcaagccttcgactgcacagagaggggaagcaatatcacaccatcaatgtcacattacccacggtctctgtccctgcttcctctaatagtgctggcatgacatggtacatggctatctccacaatatcagagaacagttttataaggcacaacttagtaaaactagaatgcagcagaagctatcacatgacaaagtcattytgagtactgttagagacaatgggtttagactcttgaaagaaaacgctatttcctttatg

SEQ ID NO: 67206 - DNA, 648 bp, Homo sapiens
ggacaaagctgtgggctaagtcccaactttctaggattcgagcacactaccctgaggggtattgagctaaggtctgtggccagagcttgggcagaggaggagccaccactcttgggacacaaagaagagtgaggtgctggtttgtgtgccagtgtaggagccaggcatccctccctttgcaagactggtccaggaagggtgtagctgttggccagccacagcttctgcccaaggaaaccatacagccctgaacacstggaagagcccagttatatgagcacaagaaggcttggtacaaatctagctgggcgggcctgctcctagggaagacactagaaggagacccagtctgaaaagcatgaactaggtggaccccacagtcatcagctggactaaaatccctgggctgtgggcaccataccaatttcacatctatggcaccactgccctgcccaggatcatgtgcctttgacccctgtatcatcagaccactcacagacatatcccacagcccactctgaccctgccaagctcagaggaccagcaggttcctggggagttacaggtttcctggcaatctaacctttggctcaggccacccctaaaggaggggagaatgcagcccaacaaggtcccccatgggactaa

SEQ ID NO: 67207 - DNA, 1084 bp, Homo sapiens
aaccattattataaaatcagaattttgtaggcttattttccaatgttcttcaaaaaaaccacagaaaacttaggccatttatgcttagcataaatcacactagtagaatcagatctatgaaaatgataaacagctaaaaaatttcaccataaggctgtcatttctcattctaagagaaaggaggaatccatagaaacagcaaaagtcctgggccctgatcttctgccagtgattaactgacccttcttgcctcagcgtattaaactcttgactctaccatctggtgctcacccatcatctktgtttcctgttgctgctgttgcagaggctctccaggatgtaccacatggtgtatctattcatgagtcatggatatgtaggttgtttctgctttttaactattattggagttatgaacatgcatttataagttttggtgtggacatagttttaaattttttggtatatacctagaaaaggaattgctgtgccacactaaactccatgtttaaatggactccatgtcaaactccaagtttaactttgtaagaaactttcaccaggtcacatatcataaaaggcagttactaaggaaggcatattttcctatttgcctattctggatattttatataaatagaataatctgatatatggccttttatgtctggttcagagacagaaagtaagtcagtggtggctaggggctgggtagaggaggacatgggaaattggtacaagggatcttttggaggagatgaaaattttctaaagagttttaagaatggtgatgggtgcagagtcagtttggtagtatacaagtagcagaaatggtcaccaggaaactcaccacaatttcagaatttctgtttgcatggtaaaaatacaccatcattttaatttctctttcctcataggaggagtcttagacatttccctcttgtatgatatgtgtttatatattacaaatatcagacatatgatagaaaaagactagtaaggaataagtcaaaatattaataaaaattatctcttttagtagttatttttcagtgggatttcaaataacttttccttattgttg

SEQ ID NO: 67208 - DNA, 858 bp, Homo sapiens
ttaagagattaaagacaggcataaaaattataaaagtattatttgggaattgataaatgtccatgaaatcttcacaatttatgttcctctgctgcggctccagccggtccctccatttgggggtccctgacttcccacaacaggactaaatgaatttaaaattttattttaaatttaaatagtcccatgtgtttagtggccacagtattggacagtgcagatatagaacacttccattattacagaaagttctattaaccaatgctgagctaggctagactcagtgtttttggaagagcatttcagctaggtgcagtggctctggcctgtaatcccagcactttgggaggctgagatgggtgaatcacctgaggtcatgagtttgagactagcctgggcaacatggtgaaactccatctctaccaaaaatcaaaattagccaggcttggcggcacatgcctgtaatccaagctaytcgggaggctgaggcaggagaactgcttgaacccgggaggcagaggttgcagtgagccaaaatcacaccactgcactccagcctgggcaagagagtgacactccgtctcaaaaaaaaaaaaaaaagcatttcacaggtactgatgtgaacttccttcagaagagcatataatggatgtttctctttgtattaatttagcagtcatttatggccattgcctggacccactacttcattaggggttgcaaaattatgacattataattctatcatctcctctttattttattgactggaatacttttagaaaaacaaaacaaaacaaaacttccttcatcaaccatttgggttaccctgaggaataaatttatacaggaaagtta

SEQ ID NO: 67209 - DNA, 927 bp, Homo sapiens
tgatgtgttttcttttcctcaacaccccactttcttggggttttggtttgtttgtttttagaaacagggtgttgctatgttgcccaggctggtctcaaactcctgggctcaagcaatcctcccttcttggtctcccaaaatgctaggatttcaagtgtcaatccttttctaggatgtctagtccacttgcttttacccaggacaaacatactccctcagggactcacctctatccagttttcctgcgcaaggctgccagctgtttcatacattactggaaaattgtgcaattctaagcaaagaggctggaggctgggattctgtgccaatattagaatctggggttcccggagggctgagggctgtgttgcagagaagattgttgtcattgttgcagcaactattgctctaggacagcagtttcagaacgtggtcagagaaaccctgggatctctgaggtcctcccttttccaatcacctatctgtataaggtcagatttcaaccaaaacacatctcaatagattgaatgcagatgtaggtatgagaatccagctcccttctgtcaagagatttgcaaaaaattaaaatttttgttttaattttaatacaataaatattgacataacccatgtaaagaaaatgccttggagtccccaacaatttctaaaagttgtaagggggttctgagattgaaagtttgagaactgctactctaagctactcttggccccactttgttcttcccgctcatcttgagggacctyataagactcattgcttcaactaccacgtccaagttggtgattgttgtgggcagtacataagcttctgcgtgctgttctgcaagcacctggggataagggaaataagattgcccctgagaattgaactggataaatccatacacagcagatatgacccaccat

SEQ ID NO: 67210 - DNA, 1126 bp, Homo sapiens
gtgcttgtatttacagtatcctccaggtgtaaaatttttgttcaatcagccactgaggagattttgtttatctggtaatatcattatgctatttacagtataaaatccctgaggtattcagtttactcatttaataatcatttgttgtgctcttatgatttactaaatgctctcctaagcatgtgagacagagtttggggcaagaaaagcaaagttctcactctcgtgaggcttagcagtagtagtctrggtgacagagggatcccgtctcaaaaaaaaaaaaaaaagtagatgtcagtgtcctcacccagagtaacctgcaagctggaactctgcaatctttgagtgcaccattgacccaacaccatgctaggcctataacaggtgcttcatggaaaatttatgctgtttggtggttgatatacatcttagtagaagtcagagggtaattgctaaagaagggaatcattaattacaaaggttaatatcataatagcataaaaagaacagaagtgttacacattagctaaagttcttattccacaatattctagtatctatcaatgtttcctcaaatgtgttgtcttaactctctctgcctggcatcagtgggagtctttaaactatgtttgggtaaattgggcttttgagattttctgaaagcaatgggccctctcaagtgttcaaacacaatctcatgcaatacataatggaatatttaaaatataatcttaggagtaccatggatgcctagaatcttgtcaaaggctctccaggggctcccaggatcagaactccctggcagagagcaaaatgagatggccttgttttaattacatgttatttaaaaatgattttggttcctgtgtttcaagggctctcaaaggatgcctctatgatgctaatacacactaacatgtgagaactcctggtgtacaagatttgaggaaaatttttatatgtatttttttagccctcaaattcattttgctttctcctgttctactgggtcaccactcttcccaactctgaccaatatggaaaattttagtactggaaaatgctattggaaggcagaaaattaggaaattgcagaataaatagcggtggatgcataacatgagta

SEQ ID NO: 67211 - DNA, 1126 bp, Homo sapiens
gtgcttgtatttacagtatcctccaggtgtaaaatttttgttcaatcagccactgaggagattttgtttatctggtaatatcattatgctatttacagtataaaatccctgaggtattcagtttactcatttaataatcatttgttgtgctcttatgatttactaaatgctctcctaagcatgtgagacagagtttggggcaagaaaagcaaagttctcactctcgtgaggcttagcagtagtagtctgggtgacagagggatcccgtctcaaaaaaaaaaaaaaaagtagatgtcagtgtcctcacccagagtaacctgcaagctggaactctgcaatytttgagtgcaccattgacccaacaccatgctaggcctataacaggtgcttcatggaaaatttatgctgtttggtggttgatatacatcttagtagaagtcagagggtaattgctaaagaagggaatcattaattacaaaggttaatatcataatagcataaaaagaacagaagtgttacacattagctaaagttcttattccacaatattctagtatctatcaatgtttcctcaaatgtgttgtcttaactctctctgcctggcatcagtgggagtctttaaactatgtttgggtaaattgggcttttgagattttctgaaagcaatgggccctctcaagtgttcaaacacaatctcatgcaatacataatggaatatttaaaatataatcttaggagtaccatggatgcctagaatcttgtcaaaggctctccaggggctcccaggatcagaactccctggcagagagcaaaatgagatggccttgttttaattacatgttatttaaaaatgattttggttcctgtgtttcaagggctctcaaaggatgcctctatgatgctaatacacactaacatgtgagaactcctggtgtacaagatttgaggaaaatttttatatgtatttttttagccctcaaattcattttgctttctcctgttctactgggtcaccactcttcccaactctgaccaatatggaaaattttagtactggaaaatgctattggaaggcagaaaattaggaaattgcagaataaatagcggtggatgcataacatgagta

SEQ ID NO: 67212 - DNA, 1348 bp, Homo sapiens
ttaaaaaggcagaaatatggaactaagccaaacatgtaccaataagatggttaaataaatgagagtaaatctgttctgcactaaattatatcaaaataaatataaataattatttcgtataccattcgttatatacatttcagtgtttttaataatgtcaatttcttatattttaaggagaactctagttatttttataaatctaattgacttaattttgtgggaatataaaagaagtgattaaaaacctttggtttaaagtagttaatcctgaaatcaagctctgtaaatattgtgtagggatatggagaaatcctcaaaaagaaagagctaaagaaaatggcagggatggcatcttgggagtataactgaaagtaggaagatgtggataraagagtcttatttttaatcacagggcatatgtgctatttgaattattttgacaaaagtataaaaatatggaattatgcattgtgtgtgtgtgtggtttcatctgtttaagaaatatgtgatggagactgtcctatcatcaggaaattattccagttcacagatcagaaatgactgaggaattgagagtacagctaattactaaggttgcttcttttgaccaaataggccagagcttgaataaaagaaacatggattgaatgaatttttataagacctaagaagaaagtttcataagccacattttttcttttgactcccctgttctgatgtcttccttcttcattcatttcctgactcctgaactctgctggctacagaagaaaatcttaagccaagctgtttttcctgtggcatatttgacataggcattggaatatttcccctggattcatgaataggcaaggtaggagaaagtcaagaaatagacagttattcttaaaaaggacatatccaaaataggccaagaacacagaaaatttttccactcaacagcctgaatatcagaatgaacagggcctttgggtgggcaggcctgattttaaatttcagtaactcctaaaccctggacctcagtcctagcacctgtaataatggatagcaatttctatgccacagttttctttagtaatgaattagacaataaatacaaagtaaatagcctactgtttagcatagagtaaacattcaacatagctaagtttctctgctgactatcataaatttttcacacacaactatatccttcttaatgcctacaatcctacaaataatagcaaaacatatctatatacacttatagctattaaatataggtaaaataatttcactctcaagcaattatgtacttcctttgatgtcagataagcactttgaaggcaagaagcacatttaataa

SEQ ID NO: 67213 - DNA, 1348 bp, Homo sapiens
ttaaaaaggcagaaatatggaactaagccaaacatgtaccaataagatggttaaataaatgagagtaaatctgttctgcactaaattatatcaaaataaatataaataattatttcgtataccattcgttatatacatttcagtgtttttaataatgtcaatttcttatattttaaggagaactctagttatttttataaatctaattgacttaattttgtgggaatataaaagaagtgattaaaaacctttggtttaaagtagttaatcctgaaatcaagctctgtaaatattgtgtagggatatggagaaatcctcaaaaagaaagagctaaagaaaatggcagggatggcatcttgggagtataactgaaagtaggaagatgtggatagaagagtcttatttttaatcacagggcatatgtgctatttgaattattttgacaaaagtataaaaatatggaattatgcattgtgtgtgtgtgtggtttcatctgtttaagaaatatgtgatggagactgtcctatcatcaggaaattattccagttcacagatcagaaatgactgaggaattgagagtacagctaattactaaggttgcttcttttgaccaaataggccagagcttgaataaaagaaacatggattgaatgaatttttataagacctaagaagaaagtttcataagccacattttttcttttgactcccctgttctgatgtcttccttcttcattcatttcctgactcctgaactctgctggctacagaagaaaatcttaagccaagctgtttttcctgtggcatatttgacataggcattggaatatttcccctggattcatgaataggcaaggtaggagaaagtcaagaaatagacagttattcttaaaaaggacatatccaaaataggccaagaacacagaaaatttttccactcaacagcctgaatatcagaatgaacrgggcctttgggtgggcaggcctgattttaaatttcagtaactcctaaaccctggacctcagtcctagcacctgtaataatggatagcaatttctatgccacagttttctttagtaatgaattagacaataaatacaaagtaaatagcctactgtttagcatagagtaaacattcaacatagctaagtttctctgctgactatcataaatttttcacacacaactatatccttcttaatgcctacaatcctacaaataatagcaaaacatatctatatacacttatagctattaaatataggtaaaataatttcactctcaagcaattatgtacttcctttgatgtcagataagcactttgaaggcaagaagcacatttaataa

SEQ ID NO: 67214 - DNA, 693 bp, Homo sapiens
tggttggcttctgggaatcattccagggagaccagaaatctccccttgagggcttgaagcatagagagacccctgccaccccaaggagtttggaagcacctgaggccagtgcctgggtggaatctgctgggagttgcaagtgtgccgctctgatggaagttgaggggtagatacagaactgstctggccaggctaggctgggccccttcctagtttggtgcaagctgaagagcccaggctggcaggatctcaagacttcgtgcctgctcgctaggaagtatgtggctgaaaagcactcttgctactccccgggcgctgggctgaaggagctgactcaatgctctgtgcctctcttcttacagggcatccagtcctgaatgtgcccccagagcaggcctctctgctctctggctcttggctgcccagttccctgggcacctgaggtctcctgtcaagggctttgggtctcaggcagggacgggccagcctgcctcctgccctggccttctttccagctgcctgcctactgtccctatgtcctcaggctgggccagtttccattcccccaccttatctcagactgaggtgaggtgggacatgacctggtgggacatcatttctgaccagtagcccttccctggaatatttctgatgctcctgccaactccctccccaatttggtttaggataggg

SEQ ID NO: 67215 - DNA, 693 bp, Homo sapiens
tggttggcttctgggaatcattccagggagaccagaaatctccccttgagggcttgaagcatagagagacccctgccaccccaaggagtttggaagcacctgaggccagtgcctgggtggaatctgctgggagttgcaagtgtgccgctctgatggaagttgaggggtagatacagaactggtctggccaggctaggctgggccccttcctagtttggtgcaagctgaagagcccaggctggcaggatctcaagacttcgtgcctgctcgctaggaagtatgtggctgaaaagcactcttgctactccccgggcgctgggctgaaggagctgactcaatgctctgtgcctctcttcttacagggcatccagtcctgaatgtgcccccagagcaggcctctctgctctctggctcttggctgcccagttccctgggcacctgaggtctcctgtcaagggctttgggtctcaggcagggacgggccagcctgcctcctgccctggccttctttccagctgcctgcctactgtccctatgtcctcaggctgggccagtttccattcccccaccttatctcagactgaggtgaggtgggacatgacctggtgggacatcatttctgaccagtagcccttccctrgaatatttctgatgctcctgccaactccctccccaatttggtttaggataggg

SEQ ID NO: 67216 - DNA, 713 bp, Homo sapiens
taagaaaccaaccctctgtgctcctacagcccctacattttttaggctgttttaaagcctcaattttaatgttgtctcttccttgccatccaatgagcatcctaaaagcaggaccataatgtgttcatctttgcatcccagaaaccagtgaaggctatttcgttggataagtgtaagcatacctaaaacaatacaaatatatttattcagaaattttaaaaaataatcaaaccataaatataatcagctagcattaagctactatctgggtttacttgtcagtctttcttcatgaacactaaatatgaaatgatattacaaatttgtgatcttatatttatacaaaataatgtgtgtatgtgtgtttacacgtagaaagatactgaaagggccgggcrcggtggctcacacctgtaatcccagcactttgggaggccagggtgggcggatcacaaggtcaggagatcgagaccatcccggctaatacggtgaaaccccatctctactaaaaatacaaaaaattagccgggcgtggtggtgggcgcctgtaatcccagctactcaggaagctgaggcaggagaatggcgtgaacctgggaggcggagcttgcagtgagccaagactgcaccactgcactccagcctgggtgacagagcaagactccgtctcaaaaaaaaaaaaaaaaaaaaagagagaaagaaagacactgaaa

SEQ ID NO: 67217 - DNA, 713 bp, Homo sapiens
taagaaaccaaccctctgtgctcctacagcccctacattttttaggctgttttaaagcctcaattttaatgttgtctcttccttgccatccaatgagcatcctaaaagcaggaccataatgtgttcatctttgcatcccagaaaccagtgaaggctatttcgttggataagtgtaagcatacctaaaacaatacaaatatatttattcagaaattttaaaaaataatcaaaccataaatataatcagctagcattaagctactatctgggtttacttgtcagtctttcttcatgaacactaaatatgaaatgatattacaaatttgtgatcttatatttatacaaaataatgtgtgtatgtgtgtttacacgtagaaagatactgaaagggccgggcgyggtggctcacacctgtaatcccagcactttgggaggccagggtgggcggatcacaaggtcaggagatcgagaccatcccggctaatacggtgaaaccccatctctactaaaaatacaaaaaattagccgggcgtggtggtgggcgcctgtaatcccagctactcaggaagctgaggcaggagaatggcgtgaacctgggaggcggagcttgcagtgagccaagactgcaccactgcactccagcctgggtgacagagcaagactccgtctcaaaaaaaaaaaaaaaaaaaaagagagaaagaaagacactgaaa

SEQ ID NO: 67218 - DNA, 630 bp, Homo sapiens
tccacccgcatccacccctcccacaaccctttcgtagccctcgcccctagtccatagcaggcgmtgccctacccagtccttgccggacacaccgcgacccctttcgtgctcccttgacaaccctggccccacctccacctggcgcccactcgaatccgctcctcccttctacccccctggaccgccagaccccccgcttctgcacccactcccgccttcgcccttccctccttcctcctcctcctctgctgccgagcgccctctcttcccactccctctctgtgtagaatcacagggagtgaccttgagccgagagggcctacctcattttacaggagaggaaatccagcttccattgagtgagactcttttataaataacgtaaaagagtgtgtgaaactgtggaggcaggctgttgtagataggcggtcggaaaagctttgaagagatggcatgtgtgctgagtgcttaattagaatatggaagagagagacatgggcccttcctatgtccagttttaggaaaaggccctaaaactggaggtttggcatgtttcaagaatggaaacagaggacaaaaacgttcgagtgagtatcattttgcctgtaaaatgggcatagaggagtagaa

SEQ ID NO: 67219 - DNA, 630 bp, Homo sapiens
tccacccgcatccacccctcccacaaccctttcgtagccctcgcccctagtccatagcaggcgatgccctacccagtccttgcsggacacaccgcgacccctttcgtgctcccttgacaaccctggccccacctccacctggcgcccactcgaatccgctcctcccttctacccccctggaccgccagaccccccgcttctgcacccactcccgccttcgcccttccctccttcctcctcctcctctgctgccgagcgccctctcttcccactccctctctgtgtagaatcacagggagtgaccttgagccgagagggcctacctcattttacaggagaggaaatccagcttccattgagtgagactcttttataaataacgtaaaagagtgtgtgaaactgtggaggcaggctgttgtagataggcggtcggaaaagctttgaagagatggcatgtgtgctgagtgcttaattagaatatggaagagagagacatgggcccttcctatgtccagttttaggaaaaggccctaaaactggaggtttggcatgtttcaagaatggaaacagaggacaaaaacgttcgagtgagtatcattttgcctgtaaaatgggcatagaggagtagaa

SEQ ID NO: 67220 - DNA, 582 bp, Homo sapiens
taaacaccaactgagtggggcttcctagcccactcagcctaaagctcagccctctgaagaaccaatgaggaaaccagtggggaaactgggaactgccggccaagcctgcctctacttggggtcagtggcctcactgcattccatgagcttgcacagtaccactatgtcttagttttgtgaagcgtttaaattctgtaaagccctgtcacctgatgtttgagccctagaacataattggtgtatggtaaaagcaagtgatagccttccttctcagataaaaaagaggtcactgacctgcttatggtgagatcctgtctgaactgggcctgggaccccatctcctgacagtgcagctagcctagttctctgtttcctgctgcctcagtaactgaatgtagtaatttcatttggagcagaggtcagcttgtctttggraaagcctctattcagcagaaaaagcatcagcagtatatttaaaagctgccatgtaatgactatagggactccattgagcagatccttttcttatctccagatcttttccctcaacttccagagcatgtccttacacctgagatgtag

SEQ ID NO: 67221 - DNA, 868 bp, Homo sapiens
aaggagcatcgctgcaccttcgcagctagagcaaaggcagtttgaaaacagtttattaggctattccgcagatccacacagtttacagtataccgagttttgctcacgtgccaattctcagcgagacattccctggctactagattttaaattctcactatcctcgaccttcgtactgcatcttctcatcctcttctctgctttgttctcctccatggtgcctgggaccttctgttacgcttcagattgcagtccttaacatgctgttcaccacctttcctccatagcgtgggaactccatcacgagggctttgtgtctgcagcttactgctgcatccccagcatagaagccagagaaagacacaggacagacactctgtgcctggatgctgggccaagaaatgagtttctgtaaataagaaactaccaaacaatacagtacacttgatgtggatgcaaagacatgtaagaatttttacaggctgggcgcagtggctcatgcctataatmccagcactttgagaggctgaggcgagtgtatcacctgggatcaggagttcaagaccagtctggccaacatggtgaaaccctgtctctactaaaaatacaaaaaaatagccagggatggtcgtgggcgcctgtaattccagctacttggtaggctgaggcaggagaattacttgaacctgggaggtggacgttgtagtgagcagagattgtgccattgcactccagcctggacaacaagagtgaaactccatctcaaaacaaacaaacaaaaaactttttaaaatttattgttttgaaatgaaataagaatccaatggatttttagctttatatctacgtgtataagatacatgtatta

SEQ ID NO: 67222 - DNA, 1455 bp, Homo sapiens
ataaaagtagtatgtatccttgataggaaatttgaaaaagaaaaaaactgaggaagaaaatacaatctaccagaattgaactacctaaagataactactgaaaatatttggtgcgtattcattcactttgtttttaaaaatgatattacatgtatttgatccttactcagtgtgtctttctctctttccacacttaacttcctgaggacaggtgtcatgtcgccgtgttcttttgtatttttacatgtgtgcacatgtgtgtgtttcactatgacatctcttacagggtctggcacatagtgtgtatgaaacttgtgtttgttgaatgaatgaatgaataaatgaacctcctactgatgaccacatcttccctttgcaaatgaaggtatctgcagtgcgtttgggtgatatgtgtgatagtttctgcctttagagtaattttacattttttcactcagcttcattatgcatgaagagtaatatcttagagtactatctggcacctactaattgctgattaaaactgactaggcctatgcctaatccaactttgattgcttagaaatccatctgttttcctctacttcaagtttattgattgactgattcaacaagcatttactgatcaccatatgagttcccccaaattaggcaaggcaattgcgatggctcacagtctgctgggggagaaacagtcagctttaaactaataaataatcacaggttaggatccaggtgcaaagagagcaaatgggacactgcagtagtgaactggagggttcctgacctagacagggcagttgtcatgcagggcatttctgggagggtcacatgcaggcccagatctgaagggtgagaaggagctggggacgtgctgaggcaggaccaaggggcccagggtgaggggcccgagtgtgctgagcccccgaggtgaggacatcctgggagaactgacaggagagtaggagggctggggacagaaccagatgagaacgggagacagggatgctacaaagccatgtttctcaacctttatgttttcattattgccccactaaggagaaaaactgagagaattaataaagaattgagttctggggaggcaaaaataactttgctattacaacagtttctgaccttcaaagctcagtcctgctggataatatgaggcccctaacaactactgaaagaggggtgtttgtgtctgttcctactgagagatccaactccatatcttctatgtcaatataaatttccccaacttcaagattatttagtcattcgataagcatttactgagcacgtattatatgccagaagccttgtaattactaacacgtttttcttctcaagaaccagttgtacccactggacaggatcaccacaaggagaaggtgtgtttagagctaaatggktcggaaccagtgggactttatgtgtcaaagtgcagcattc

SEQ ID NO: 67223 - DNA, 639 bp, Homo sapiens
ttaaataaaaatgacagcacaatgttatgctgtatttagttacagtataaccaaaacttgctatccatttcactaaatgattattgattgcatccaatagacaaggcattgtgctggctgctgcagagacagaactgagaaatgcgtagtcatcgccctgaagacacttggtagcagttttaccagggaagtttggaagcactatcaaaaaacaagcccatagcatgaacaaagataggcaagaaatgtatttaatgaaactctgatggtccagttgtgcgtgtgtgtgcatgtgtgtgcgtgtgtgtttcatttgaaatcatcggatttccatgcagagactaagctagaattgtagattgtggctatatagaggaagactctatatgacagagtcagaggttctgaacaggagaaatgacattctcagtttaatrtatgcatcaaatagcagtgttgcattaaagtgaggatgtaaaaaggccagtacttagcctttttgactatttgtctgtcaaaataataagtgatggtttttactagtgtgaaggtagtaaatataaaaaagcagggattgaagggaaaatgaggggaaagctgcagccattggcagatgacagggagccgtcctgggggagg

SEQ ID NO: 67224 - DNA, 677 bp, Homo sapiens
cgtctgttagtttgttgtcagactgtaacctccctgagggtgaggactgtgcccsgttccccactgtctccctatcacccaacacaatgcccgctacataccagctttccatgtggaatgaacaaatgcttgacagaccccggagcctgaactcttaccctttccactattctgcccttcagggaaactcacctgcttcaggtcccctgctctttgtcttgaaacaatcactgcctgtcactttggtgcagatattggcagctacagccatgctggagtgaggaattataaaaacaggcaagggatcaggcattgacttctccactaatgcccctacagtcccacccccacacccacccccagctgggggaaactcccaagcagagtctacctcctgctgagcctgcttctctctgggaacttaaaggtgaacttggcagagtgccaggcagaaaagccaaggaagcttcctgccctggggctcatcccttccccctccttatgccctttctccagggcacattaccagactgagagctggcatccctggggggggacaggaactcacctgccaaaataattagacacttgagaagtgcagctactacaaaagaaagataaatcaaaccacatatgccattcagagcagaattaccgaagcagatggaccaagattt

SEQ ID NO: 67225 - DNA, 528 bp, Homo sapiens
gtgatcatgaaaatgtgtctttaggtattaaataatccttctcaaatcagtttactataacaatgtactttggtgtttttaattttcttctgaaaaactagaatttgttttttaaataaatgatccatgamcttcctctctcttttcttctttatttttctttcctatatcctttattttatcttcctttttctgcccttcttcccaatatttaccaagtttatactccatgctaaatattattctacactctggagatccagagttgaataaactctagtctctcaggaaatctgtttgggaagatagacaagtgcatattgcagcatggtgtgatgacattatggacagaacagggggctgaggaaagggtaggagaggcactgggccttccaacaaaatgaggagagtaaaggcttgctgctcctagatggcttacatgagaaaagatatgaaaagcacagtcaggtaatttatcttctttctctcccttatagattcatctttttgtgtactccaattctctat

SEQ ID NO: 67226 - DNA, 829 bp, Homo sapiens
ggatccaagtttatatctggccccacaggtggtctgtcaacctgtttcaacactgtagatgacagcagttgtgactgcctgaccaagttttgaagattaggaatagcacttctgcttctaataaaaagggggttcatctttatagtgccatccagtcttccctcactttgggaataacttagattccatgagaagagctagaagcactgttagaagacaaagctgcacagcacaatacaggcttgggggtcagcctgaaatgtattttaatttaacttgccagttggatgagtttctgcagttgtcttctccaaacattgctatcatattttgtctttgaacttcagtagcttaatctgtgaatcagagtagtaattggaatgcaagcaagaggaatmgaagtgactgatatttgaaaaacattttttaaggatgcaatgaaaaataatttactgcagttcacagagtcaaaggaggaattgagcaatggagcattgttgggaagagtaaaaaccacagcagagccgggtgtttctgaacagatggccgggcttcaactatgttccatttccctttatattttattttattttatgtcttggagacagagtctctctcacccaggctagagtacagtggcacgatctaagctcactgcaacctctgcctccagggttcaagcgattctcctacctcactctctcaagtatctgggattacaggtgtgcaccaccacgcctgactaatttttatatttttaatagagaaggggtttcaccatgttggccaggctggtcttgaactcctgaccacaagtgatctgcctgcc

SEQ ID NO: 67227 - DNA, 738 bp, Homo sapiens
cagggagaatcactcactcacattagattttctttttaaatcttgccagtggtcattaattatgtacaatcatttgtgacatttaaaactgttaatttcctttgtgatttaggctgtggggattttatttttcaaggaaacagtttctcaaaacccatactgtaaatkattttaaaaatacctcaatgaatagtaactatttcttcttcttattattattaatctatttgagtacctaggccaggaactatgtatacatcaaccctagttgacaaatttgtagttaagtcattcaaaagacaggaacactcagaaaggtaaagtgatattccccaactagaaaatggttgagggaaggtttatttccaaatctgcctaattcccaaatcattgttctttccaccagctaatgctgcctccttagagagaaccatattgagatgctgccatattatagatgcctctgtgtgtgtgtgtgtgtgtgtgtgtgtgtatatgtgtgtgtgtgtatgtgtgcgtgcgctcagaggctttcacacaaatttttatatcctaaataagtctctaaccagctttataatttggcaaaaactgaagtgcaaattagaattagattatttgttttatcttttctgttctcggcctgcactaccttcatcctattcaagaaaagagactttgttgggtggcatgaaattggttgccaacgactcttaggtgtctttttgtttttatttg

SEQ ID NO: 67228 - DNA, 738 bp, Homo sapiens
cagggagaatcactcactcacattagattttctttttaaatcttgccagtggtcattaattatgtacaatcatttgtgacatttaaaactgttaatttcctttgtgatttaggctgtggggattttatttttcaaggaaacagtttctcaaaacccatactgtaaatgattttaaaaatacctcaatgaatagtaactatttcttyttcttattattattaatctatttgagtacctaggccaggaactatgtatacatcaaccctagttgacaaatttgtagttaagtcattcaaaagacaggaacactcagaaaggtaaagtgatattccccaactagaaaatggttgagggaaggtttatttccaaatctgcctaattcccaaatcattgttctttccaccagctaatgctgcctccttagagagaaccatattgagatgctgccatattatagatgcctctgtgtgtgtgtgtgtgtgtgtgtgtgtgtatatgtgtgtgtgtgtatgtgtgcgtgcgctcagaggctttcacacaaatttttatatcctaaataagtctctaaccagctttataatttggcaaaaactgaagtgcaaattagaattagattatttgttttatcttttctgttctcggcctgcactaccttcatcctattcaagaaaagagactttgttgggtggcatgaaattggttgccaacgactcttaggtgtctttttgtttttatttg

SEQ ID NO: 67229 - DNA, 738 bp, Homo sapiens
cagggagaatcactcactcacattagattttctttttaaatcttgccagtggtcattaattatgtacaatcatttgtgacatttaaaactgttaatttcctttgtgatttaggctgtggggattttatttttcaaggaaacagtttctcaaaacccatactgtaaatgattttaaaaatacctcaatgaatagtaactatttcttcttcttattattattaatctatttgagtacctaggccaggaactatgtatacatcaaccctagytgacaaatttgtagttaagtcattcaaaagacaggaacactcagaaaggtaaagtgatattccccaactagaaaatggttgagggaaggtttatttccaaatctgcctaattcccaaatcattgttctttccaccagctaatgctgcctccttagagagaaccatattgagatgctgccatattatagatgcctctgtgtgtgtgtgtgtgtgtgtgtgtgtgtatatgtgtgtgtgtgtatgtgtgcgtgcgctcagaggctttcacacaaatttttatatcctaaataagtctctaaccagctttataatttggcaaaaactgaagtgcaaattagaattagattatttgttttatcttttctgttctcggcctgcactaccttcatcctattcaagaaaagagactttgttgggtggcatgaaattggttgccaacgactcttaggtgtctttttgtttttatttg

SEQ ID NO: 67230 - DNA, 738 bp, Homo sapiens
cagggagaatcactcactcacattagattttctttttaaatcttgccagtggtcattaattatgtacaatcatttgtgacatttaaaactgttaatttcctttgtgatttaggctgtggggattttatttttcaaggaaacagtttctcaaaacccatactgtaaatgattttaaaaatacctcaatgaatagtaactatttcttcttcttattattattaatctatttgagtacctaggccaggaactatgtatacatcaaccctagttgacaaatttgtagttaagtcattcaaaagacaggaacactcagaaaggtaaagtgatattccccaactagaaaatggttgagggaaggtttatttccaaatctgcctaattcccaaatcattgttctttccaccagctaatgctgcctccttagagagaaccatattgagatgctgccatattatagatgcctctgtgtgtgtgtgtgtgtgtgtgtgtrtgtatatgtgtgtgtgtgtatgtgtgcgtgcgctcagaggctttcacacaaatttttatatcctaaataagtctctaaccagctttataatttggcaaaaactgaagtgcaaattagaattagattatttgttttatcttttctgttctcggcctgcactaccttcatcctattcaagaaaagagactttgttgggtggcatgaaattggttgccaacgactcttaggtgtctttttgtttttatttg

SEQ ID NO: 67231 - DNA, 792 bp, Homo sapiens
cgacaagagcgaaactccatctcaaaaaaaaaaaaaaagtctactacttgacttcacatgattgcagtgaaacaaaaaggaaatgatatttgtgaatattctctatagtatagctataaggtgatatacaaatatctggttattgtcatctgattttccttggcaggagcatctcaggaggtctatccgtttgtctctaacccataccaaggactctatgcaaaatagtcccaagaccaacttcacttctccttggtgctcagtgagaatggttgctgccttttgagccatggcacaccagcagatgtgcatgggcagaaaagcgctgataaatttctatatagacagaaagagcaatgcatgtgttcctctgggcaasatttgatattcactgaaacagctgttatctctcagtcattgcacataaggttaaagtgaataggatattgttagtatagactcaagcagtttttttttttttttgtagcaataggaccacaccacacatgggccattctgccatctatgagactgttcaattttgttcctcacaagaggaaagaaataacttgaatccacagaaaacgttatagactaccctaaatatagcatgcattctgctttccatattccaaagctctgaaacaaattcaggaagtaactttgacttcttgtcatcaactatgatttatttaagaatagcattccaaaacctgagtcccagaaccaactaaattaaaaagatgaaacacattttaaaatatgtgacggtgtttagatcaaaaggatccc

SEQ ID NO: 67232 - DNA, 792 bp, Homo sapiens
cgacaagagcgaaactccatctcaaaaaaaaaaaaaaagtctactacttgacttcacatgattgcagtgaaacaaaaaggaaatgatatttgtgaatattctctatagtatagctataaggtgatatacaaatatctggttattgtcatctgattttccttggcaggagcatctcaggaggtctatccgtttgtctctaacccataccaaggactctatgcaaaatagtcccaagaccaacttcacttctccttggtgctcagtgagaatggttgctgccttttgagccatggcacaccagcagatgtgcatgggcagaaaagcgctgataaatttctatatagacagaaagagcaatgcatgtgttcctctgggcaacatttgatattcactgaaacagctgttatctctcagycattgcacataaggttaaagtgaataggatattgttagtatagactcaagcagtttttttttttttttgtagcaataggaccacaccacacatgggccattctgccatctatgagactgttcaattttgttcctcacaagaggaaagaaataacttgaatccacagaaaacgttatagactaccctaaatatagcatgcattctgctttccatattccaaagctctgaaacaaattcaggaagtaactttgacttcttgtcatcaactatgatttatttaagaatagcattccaaaacctgagtcccagaaccaactaaattaaaaagatgaaacacattttaaaatatgtgacggtgtttagatcaaaaggatccc

SEQ ID NO: 67233 - DNA, 792 bp, Homo sapiens
cgacaagagcgaaactccatctcaaaaaaaaaaaaaaagtctactacttgacttcacatgattgcagtgaaacaaaaaggaaatgatatttgtgaatattctctatagtatagctataaggtgatatacaaatatctggttattgtcatctgattttccttggcaggagcatctcaggaggtctatccgtttgtctctaacccataccaaggactctatgcaaaatagtcccaagaccaacttcacttctccttggtgctcagtgagaatggttgctgccttttgagccatggcacaccagcagatgtgcatgggcagaaaagcgctgataaatttctatatagacagaaagagcaatgcatgtgttcctctgggcaacatttgatattcactgaaacagctgttatctctcagtcattgcacataaggttaaagtgaataggatattrttagtatagactcaagcagtttttttttttttttgtagcaataggaccacaccacacatgggccattctgccatctatgagactgttcaattttgttcctcacaagaggaaagaaataacttgaatccacagaaaacgttatagactaccctaaatatagcatgcattctgctttccatattccaaagctctgaaacaaattcaggaagtaactttgacttcttgtcatcaactatgatttatttaagaatagcattccaaaacctgagtcccagaaccaactaaattaaaaagatgaaacacattttaaaatatgtgacggtgtttagatcaaaaggatccc

SEQ ID NO: 67234 - DNA, 792 bp, Homo sapiens
cgacaagagcgaaactccatctcaaaaaaaaaaaaaaagtctactacttgacttcacatgattgcagtgaaacaaaaaggaaatgatatttgtgaatattctctatagtatagctataaggtgatatacaaatatctggttattgtcatctgattttccttggcaggagcatctcaggaggtctatccgtttgtctctaacccataccaaggactctatgcaaaatagtcccaagaccaacttcacttctccttggtgctcagtgagaatggttgctgccttttgagccatggcacaccagcagatgtgcatgggcagaaaagcgctgataaatttctatatagacagaaagagcaatgcatgtgttcctctgggcaacatttgatattcactgaaacagctgttatctctcagtcattgcacataaggttaaagtgaataggatattgttagtrtagactcaagcagtttttttttttttttgtagcaataggaccacaccacacatgggccattctgccatctatgagactgttcaattttgttcctcacaagaggaaagaaataacttgaatccacagaaaacgttatagactaccctaaatatagcatgcattctgctttccatattccaaagctctgaaacaaattcaggaagtaactttgacttcttgtcatcaactatgatttatttaagaatagcattccaaaacctgagtcccagaaccaactaaattaaaaagatgaaacacattttaaaatatgtgacggtgtttagatcaaaaggatccc

SEQ ID NO: 67235 - DNA, 792 bp, Homo sapiens
cgacaagagcgaaactccatctcaaaaaaaaaaaaaaagtctactacttgacttcacatgattgcagtgaaacaaaaaggaaatgatatttgtgaatattctctatagtatagctataaggtgatatacaaatatctggttattgtcatctgattttccttggcaggagcatctcaggaggtctatccgtttgtctctaacccataccaaggactctatgcaaaatagtcccaagaccaacttcacttctccttggtgctcagtgagaatggttgctgccttttgagccatggcacaccagcagatgtgcatgggcagaaaagcgctgataaatttctatatagacagaaagagcaatgcatgtgttcctctgggcaacatttgatattcactgaaacagctgttatctctcagtcattgcacataaggttaaagtgaataggatattgttagtatagactcaagcagtttttttttttttttgtagcaayaggaccacaccacacatgggccattctgccatctatgagactgttcaattttgttcctcacaagaggaaagaaataacttgaatccacagaaaacgttatagactaccctaaatatagcatgcattctgctttccatattccaaagctctgaaacaaattcaggaagtaactttgacttcttgtcatcaactatgatttatttaagaatagcattccaaaacctgagtcccagaaccaactaaattaaaaagatgaaacacattttaaaatatgtgacggtgtttagatcaaaaggatccc

SEQ ID NO: 67236 - DNA, 792 bp, Homo sapiens
cgacaagagcgaaactccatctcaaaaaaaaaaaaaaagtctactacttgacttcacatgattgcagtgaaacaaaaaggaaatgatatttgtgaatattctctatagtatagctataaggtgatatacaaatatctggttattgtcatctgattttccttggcaggagcatctcaggaggtctatccgtttgtctctaacccataccaaggactctatgcaaaatagtcccaagaccaacttcacttctccttggtgctcagtgagaatggttgctgccttttgagccatggcacaccagcagatgtgcatgggcagaaaagcgctgataaatttctatatagacagaaagagcaatgcatgtgttcctctgggcaacatttgatattcactgaaacagctgttatctctcagtcattgcacataaggttaaagtgaataggatattgttagtatagactcaagcagtttttttttttttttgtagcaataggaccacaccacacatgggccattctgccatctatgagactgttcaattttgttcctcacaagaggaaagaaataacttgaatccacagaaaacgttatagactaccctaaatatagcrtgcattctgctttccatattccaaagctctgaaacaaattcaggaagtaactttgacttcttgtcatcaactatgatttatttaagaatagcattccaaaacctgagtcccagaaccaactaaattaaaaagatgaaacacattttaaaatatgtgacggtgtttagatcaaaaggatccc

SEQ ID NO: 67237 - DNA, 556 bp, Homo sapiens
attcaacagaaacattagtatctctaagagaaacattctttttctcaggatctatgaccactgacttggcaaagcctacagtcagggggacagaaatcacaaattccacaagcagatcattggggtaaggtgagaaaagccagcactatttctactccttggttgccaggcttatatataccagttattatgagcactcttggtccagcaaacagactgtattttggtgggcagtgcctcagtgtcaygggatgttgatccctcactacctttttagctaatcctttaacaatgcattctactgcttcttctgggtgatcgggtttatgataagaacaatgcagctgttatcatgcaactttttcgtagctcctttgctgtacaagaatcccttgttccaaaataatgtgtgggctaccatgacaataagttaggtatttttaagtccttaagcagtgatggtgaaaatacagcgggtagggaaggaagccccatattttgagtaggtgttgattcctgtaagaaggaattctctcccttcttagtggaagggatc

SEQ ID NO: 67238 - DNA, 606 bp, Homo sapiens
gggcatcttaaaacgaggaaactagtgattaggaattctatttggttttaaacacattacttttttgtcttatcagcatgtgaagtggtatagttgctgtaagtcaatctaaccatagtttagtggcttacactatgcactacagattttcaatgttgtcaggttatggagcttttctgtatttgtgaccaacacattcccacattttctccctctcatacttccagggcagaaggaattctcttttgttgaagccctgatgcaatgaaagaccttcaaaacaagacagtgttctacctcatataagactactatctcttatagatctaaagaccctataagagctttgggatgagagaatgaaaagctactgatggtgatctcaacttgaggggcactgaataagtcatcgtatctatcaatatttgtccttttgactaaatttccaacctaagaagtccaatttcaagggaaatacaactgcacctgtgaaaggattctcttaatttgataagagcttttagttaattggagcagatatctgaaaacatgaagcttgggacatgagcyatgagacaggcatagagtggaaagggaaatgggaaa

SEQ ID NO: 67239 - DNA, 667 bp, Homo sapiens
ccactttagaagtctgtacacagttctgaagcactgccgtgaatagtttttaaaaagtccgttgatttttggcattttcctctaaagtaaaaaatatgcaagtaacatattatatacaaaatgttttcttaattcattttgtacattaaagaactgtttggggaatgcacattagattgaagagatctcaaacaataaaagtattgatgactaaaaacttgtgggacagtaaactttaaaaagagactaaaagttttagaatggtaattattctttatagctgtgaatgttaaatactttttaatcagcaaattacaaagcagttgcagactacttgatcttatcactatatatgtatcaaaacatcactktacacctcatgaatatgtacaattactatttgtcaattaaaaataaaactttcttaaatgttaaaaatttttaaggcgagtatagtaagttgttccatcattcaaccaaatttttctattttaagacgaaatttttaaaaggattaaaaaaaaaaacagcgttacctatttgcaatttagtaccatgtctaagaataaaaattttagggacagccccatcaacagattcaaaagtaccatgtgtcaaataatttagaaaaaaaaaaagatgatacgctctagataactgtgttaca

SEQ ID NO: 67240 - DNA, 667 bp, Homo sapiens
ccactttagaagtctgtacacagttctgaagcactgccgtgaatagtttttaaaaagtccgttgatttttggcattttcctctaaagtaaaaaatatgcaagtaacatattatatacaaaatgttttcttaattcattttgtacattaaagaactgtttggggaatgcacattagattgaagagatctcaaacaataaaagtattgatgactaaaaacttgtgggacagtaaactttaaaaagagactaaaagttttagaatggtaattattctttatagctgtgaatgttaaatactttttaatcagcaaattacaaagcagttgcagactacttgatcttatcactatatatgtatcaaaacatcactttacacctcatgaatatgtacaattactatttgtcaattaaaaataaaactttcttaaatgttaaaaatttttaaggcgagtatagtaagttgttccatcattcaaccaaatttttctattttaagacgaaatttttaaaaggattaaaaaaaaaaacagcgttacctatttgcaatttagtaccatgtctaagaataaaaattttagggacagccccatcaacagattcaaaagtaccatgtrtcaaataatttagaaaaaaaaaaagatgatacgctctagataactgtgttaca

SEQ ID NO: 67241 - DNA, 821 bp, Homo sapiens
ttaaataaatgcatgatgctccacctcaccctacatgatgattctcagcaaaagcctccaagaatccagcagcatgaaaaaatcctttcctcatgagatcattccttcccgctattatggaaagcatttgaaatgtctctctgtgtaagccagatggattcaaattaatatagctagaacaatgtggctcatcaaaagttaaaattaaaatacaatgggggtccagtttttctttgttaaagtcctcatattctttttcttaaaatgctaaaatattttgttaaaaacagaatattggaatgcttaacatgtagtttgctagttagttttgtttcttcttgaaattttcctccaaggggtggcagacagaaaagtaaatgttgtattggaatttgttttatttaatcagttaatgatacagaatcatctcctttcaccaaagtgggtcccctgattaacgaatctcttttggttgtcatgactaaacattctcgggaagtgggagaggtgggcaggaatagggggcacagagacatcaaccaggaatttcagtaagccagacctgggtcgggcacactgtttctctactttcgttgtcctcatctactgaataagggtcttgatctagaatatttcttccagttttaacatgccatcctctctctgaattctgaaacaattctgccctctctggcaccattatcaccaactgatracagaggaatcatatagttgcaagggatctaccgggcttaagatacagaagtagggtcagagtcagagtttgggctgctgcatctgcacacagtcaggtaccgtca

SEQ ID NO: 67242 - DNA, 898 bp, Homo sapiens
attcacctcaggcagctcataaaagctgagaccctggagatcatctagttcaattataacaaatagatttcatttcatgtgtctactccagtctactgagagcggatttgctgctggaacactgggcttagaggcatgctgaggccgtcagaaatcaaaggaaaaaaaaaagtgccacaattgattagtgatgtctgacatgggctcaggagtggagaatgatgacacatgtgcaacacatacaccagacacaatctgatccaacttgcttgttttacagaagaggaaacagtactccaaaatggaagattgtgtgcccaaaatcgctttgcaggttagtggcagagttacttgattccctgttaagtgataattgatgctcacaggatcagcagcaaaaccagcaagaaaattacattatgcttagtacagtatttgtgttaagtgtattttattctgattccttgaaagctgctgatccatgtaatgtaactccattcattggaatatttgattattcagagcattctctgacttggctgcataatgggaaataaccatcccccaggcaagaagcagtttattctagaaaaaagaaaagacgacagttcaaggtctacattcattttcaaaaggaccagtgacaaacatttatataagtggtactgctgaccagtttgacctaagcttgtcagtaaaacttgacaaaatgaaaggcatttgaaggaatgatggctctctaaacagcaagcttggctaggctaaaccttggtggccagatttcttcatctctaaacattcttgaagtatgagctcttcaagatgtgagccccragggacaagtgggactgcaaaggtagagaggaagaaaggagggcatgccaagtagggggatgca

SEQ ID NO: 67243 - DNA, 933 bp, Homo sapiens
aaaagcttattaaaatgacctgcaggaaggtaatataacataagaaagtggtaaaattatctacagtcttttgcaactaggktttttttttttttttaatgtgagttaccttgtatgcagttgagaaataagagatcagtatcaggagactcatattggtttcaaactcatttatattttgaagtaattggagtaagttttcttacaggcaaagataaagccttgctaaatgtgaaggtcttaggaataaaaactaaaaatctacaaacatgctttcctttagtgcaaatagtggctgttccaatggcttaaagaattgctggttttctaccatgttaagctctttagcaaaagtggaagtccagatggtgaaaccacaaagatatttcccctatattaacatgacagactgatgaaaaaggcagcatcctagatcatattttcaatttagctcaaaatgttctattttagaagcaactgtcctccaagacccatatctcaaaggagaaacacaagccccaggatctaggctgcaaagagtgtaccactgtagctagatgcagaagctggaagaatgttaactgtactagccactttactatgatgtttattggttttgttagtgcttggttcaaagttccataggctttgagtcatctgcccccaaatctgttttttccacaagccctgatatttttagcatacaattttgtagaactatggttgtagctaaaacgcctgtattttattttcacacagcagccaaagcacctgtgtgacccagagaagggtagtgtcctggagaggggtcttagaaggttgttagaaggaattgtaattgggtttgcagcggcatctagagaaatggctcctgatgtgatctgtttcttggcattaaagggtctctggcttggagaaaggcaatgcatcaag

SEQ ID NO: 67244 - DNA, 566 bp, Homo sapiens
ctaggatctaaaggtaggtagcagttatccagatgaagaggggaggaaaaaagactttagacgacaggatcctagtgtgaaaaggtcttaggaagaggggtgcagagagattgatcatgcctcttcttcatttttttttgattatttccctagattaagtgaaaaggatgggacattaaaatttaaataaaatgtaatttctgaagcattttataatgctttattttacaatgaagttcattgtaaaaattataatattcagagaagtaacaaaatgaaaagaagccaccttgtagtcacatcctgcagagctggcagagggaggagaaggagccctagtgcactatgagtggatgtgtaaattggtgcaarttttaggaaaagcgaattgaaaatccttaccacaccagtgtgcggtggagactagtcattgtttagaatgcagcatgtctaacttgctttgattatgcacacagcgatgccacttgtccaaaatccatgccctctcatgtaattctcaccatattccattcttcaggcgagtaaacagagactccacaagctca

SEQ ID NO: 67245 - DNA, 696 bp, Homo sapiens
tgtgacatgaagtggtgtgaaagcataattataaattagaggggggaaagccatcaataagagacaggtaagggctggaaactctcactagtgagtggttctcaaagtcaagacttcagagcagctgcaccagcatcacctcgagattttttgaaatgcaaattcccgggccccactccagacctagggagtcaggaacttggcggggccaggggggtggaagggcctgcaatctttgtctgaaccagctcacagggtggttctgatgcctgccttccactcsaagtctgcttgtcacgaacgcctgtctcagctcagggacatccccggcttaggaagtatgctcaggtgtgtgcagggccagtcagaaattgtttccagaaacagcctttcataagtgatagacttggtgaataaataccccagctgtctccccgccttgctgggtgaactctggggtgtcagctctgtctctcggggttccccagtgggattcagctccagttgtgcacatgacggtaacttacttgataatgcacgccttccccgtcagcttccttctctccctacttccgggatcttcactcaaataaactacataacctcaagtcctctctcagggtctccttctggaggaaccccaactaagaggaagtagaaacactgtctctcccatctgaatgactcaggctttta

SEQ ID NO: 67246 - DNA, 1304 bp, Homo sapiens
ttacttaaattcacccaaaaatgatactgtgtatgtgctatttctagtagcctctctcttcctgcaacttgctaggtactttggtattactccatgtgtttgtaatgacgacatttcacaaggggcaagaatttccactctccagtatttattttatacatgtcaccccctttcattttcaacacaactaggcaacagcattatcctagttttacaaaagtggaaacggaggccctgggaggtaaagtgccttccttaagcaggagagctgacaactacagcaagttctcctgattccagggtctgtggcctccttccacccgacagtaggcaagaaaccaagtgatcaagaagaaggcttatgagccgggccgcagacgaagaggtggcaagtgcaggcagtttactgcagcgtcggagagtgacgagttggtgcgtaatgatttgccatgtggacagacaggctaaaacaaggatattctttgtatctgagcatcctttgtgtataaaacataaacaaggcaggtacagacttgtttcttgggaaatcccgtcctgtccctgtgggcttccttcatcttctcatcttatcctcacaatgttcactccttggagtcttcccgtccaccagcgcctgcctcattcaatccttgagctaatgggagcccagaaggatcctgacagtgccatgggacaagaaggaaaagagagaagggcaaagccacagcactccagaggaccctctccctctccctgtgtgaggctcccatgcagcgcwcaggccccgcttctcttctcaccactcagcccctcaggggctccgtcatcatggggaaagatgagcaagccttgctaagttgcatgttcttctcaagtgctggctttctgcatgccatccctgtgaaacaggaactttctagaatgtgtctcactatcactaatggtaaagtgctcagaaaaacgttcagacggagggggtgcttgtttctggggcaggagggcagggaacaagctgcaaggctgttcactccaggcaagagacaaaaccctggaaagaaaccagaggctgggtgagtgaggaatcaggaggctggcgtgagctgaagagatggaaggacagtgtgtgcgcatacacgtgcacgtgtgtctgtgtgtatatgaatctgtatgtgtgtctgtgcatgtctgtatgtatgtctgtttatgtgtgtctgtgtgtgtgtctgtgtgtatgtgtgtctgtgtgtgtgtttccctctatgtatatgtgtgtgtgtatctgtgtgtctatgtgtttctgcatg

SEQ ID NO: 67247 - DNA, 1304 bp, Homo sapiens
ttacttaaattcacccaaaaatgatactgtgtatgtgctatttctagtagcctctctcttcctgcaacttgctaggtactttggtattactccatgtgtttgtaatgacgacatttcacaaggggcaagaatttccactctccagtatttattttatacatgtcaccccctttcattttcaacacaactaggcaacagcattatcctagttttacaaaagtggaaacggaggccctgggaggtaaagtgccttccttaagcaggagagctgacaactacagcaagttctcctgattccagggtctgtggcctccttccacccgacagtaggcaagaaaccaagtgatcaagaagaaggcttatgagccgggccgcagacgaagaggtggcaagtgcaggcagtttactgcagcgtcggagagtgacgagttggtgcgtaatgatttgccatgtggacagacaggctaaaacaaggatattctttgtatctgagcatcctttgtgtataaaacataaacaaggcaggtacagacttgtttcttgggaaatcccgtcctgtccctgtgggcttccttcatcttctcatcttatcctcacaatgttcactccttggagtcttcccgtccaccagcgcctgcctcattcaatccttgagctaatgggagcccagaaggatcctgacagtgccatgggacaagaaggaaaagagagaagggcaaagccacagcactccagaggaccctctccctctccctgtgtgaggctcccatgcagcgctcaggccccgcttctcttctcaccactcagcccctcaggggctccgtcatcatggggaaagatgagcaagccttgctaagttgcatgttcttctcaagtgctggctttctgcatgccatccctgtgaaacaggaactttctagaatgtgtctcactatcactaatggtaaagtgctcagaaaaacgttcagacggagggggtgcttgtttctggggcaggagggcagggaacaagctgcaaggctgttcactccaggcaagagacaaaaccctggaaagaaaccagaggctgggtgagtgaggaatcaggaggctggcgtgagctgaagagayggaaggacagtgtgtgcgcatacacgtgcacgtgtgtctgtgtgtatatgaatctgtatgtgtgtctgtgcatgtctgtatgtatgtctgtttatgtgtgtctgtgtgtgtgtctgtgtgtatgtgtgtctgtgtgtgtgtttccctctatgtatatgtgtgtgtgtatctgtgtgtctatgtgtttctgcatg

SEQ ID NO: 67248 - DNA, 743 bp, Homo sapiens
ccacagagattcccactcagctgcctgttcagaggactcctctggtctctgccagtttcctgcgagatgcttgcacatcctgagaccccactgcttcatcagcaacatgggaataataataccaatatccactgcacaggactggtgtgaaaaatgaatgcatgaacacagaaaaaagcacagtgccagacacatgggaggggatcatatgtttttgtttctgaacactgagtgggtgacagccatgtggcaagaggaggaaagcgtggagttgggggccagacagactctgcatcaagacctagttctcacctttctcactgtttggccttgggcaagcccctgaatctctctggacctcagttccagccttccttccaccatggctccgttatgaaccccaccttcagctccaggactaatccacctgcaaaacccagcccccttgcccagggagatagggagaagccaccagccaggcgggagaacacagatccagaattgaactcatgacctcagctcgtcttgccaatgtgaagcatgtgacttcattttgcaggtcagaagagtaaagctgtccatgccggctggacatgaacaaggaggctgccrtcctatgcacagccccctacatggctggtagccatcttgtgatcatgtcagaagccaggcttggggtgatgttgactctgaggaggccagagaggcaggtggagccaaaccaggggatattgtgtagccac

SEQ ID NO: 67249 - DNA, 959 bp, Homo sapiens
tggccacccacacccgggcttgaaggatgctggcatgatctccccagcaggctcatcaccacatgttagattgccgtcatttcagactcattcctttagtgagaattgtgatggcaaatcggcttcaccgcaggtgtcagctctgattgctggtaggtacagccaggccggctgcctggaggatcgctgtatctagtgtgcctagtagaataggccatgattgattattgatatctggaaaaggtagttgttgtagattaaattgtgtctmaagaaaagatacgtagaagtcctaatccctggtacctgtgaatgtgagcttatttggaaacagcgtctttgcaaatgtaggcaagttaggatgagatcattctggattaggatgggtgtccttataacaaaagtgaaaggtggagacagacacacagagaagagaaggccttgtgaagacagaggcagagactggaatcatacatctacaagccaagaaatgttgaggattgctggcaaccactagaagctaagagaggggcctggaacagattcagagggagcatggcctttgctgactccttgatttcagacttctggcctctagtactaagagagaatacattcctgttgttctaagccatccggtttcaggtactttgtcatggcagccctagaaactaatataataatctgaatattggaaagctttcaaatgcaggattgttaaaatgatcactcatttaaaaacacaccctaccatcttgataactgaaggaaggtttcctggagggactgggctgtgactgtggtgtgctccagctggagatgaggtcagagtgcaatggtggtgacagggacatcacagcgatcctctggcatggcaggtgttgatggttctcagacacttagatgttttggcaggtcaatcctgtcttaacatgttgaattgcacttgtgcaaatgca

SEQ ID NO: 67250 - DNA, 959 bp, Homo sapiens
tggccacccacacccgggcttgaaggatgctggcatgatctccccagcaggctcatcaccacatgttagattgccgtcatttcagactcattcctttagtgagaattgtgatggcaaatcggcttcaccgcaggtgtcagctctgattgctggtaggtacagccaggccggctgcctggaggatcgctgtatctagtgtgcctagtagaataggccatgattgattattgatatctggaaaaggtagttgttgtagattaaattgtgtctcaagaaaagatacgtagaagtcctaatccctggtacctgtgaatgtgagcttatttggaaacagcgtctttgcaaatgtaggcaagttaggatgagatcattctggattaggatgggtgtccttataacaaaagtgaaaggtggagacagacacacagagaagagaaggccttgtgaagacagaggcagagactggaatcatacatctacaagccaagaaatgttgaggattgctggcaaccactagaagctaagagagrggcctggaacagattcagagggagcatggcctttgctgactccttgatttcagacttctggcctctagtactaagagagaatacattcctgttgttctaagccatccggtttcaggtactttgtcatggcagccctagaaactaatataataatctgaatattggaaagctttcaaatgcaggattgttaaaatgatcactcatttaaaaacacaccctaccatcttgataactgaaggaaggtttcctggagggactgggctgtgactgtggtgtgctccagctggagatgaggtcagagtgcaatggtggtgacagggacatcacagcgatcctctggcatggcaggtgttgatggttctcagacacttagatgttttggcaggtcaatcctgtcttaacatgttgaattgcacttgtgcaaatgca

SEQ ID NO: 67251 - DNA, 1271 bp, Homo sapiens
gagacacatggaaaatctctataccttctgctcaattttgctgtgaacctcaaactgctctaaaaaatgaagtcttagctgggggcagtgcctcacacctgtaatcccagcattttgggaggccaaggagggcggattataaggtcaggagttcaagaccagcctggccaacatggtgaaaccccgtctctactaaaaacacaaaaagtagccaggcatggtggcacatgcctgtaatcctagctacttaggagaccgagacaggagaattgcttgaacccgggaggcrgaggttgcagtgagctaagatcacgccactgcactacagcctgggtgacagagcgagactccatctcaggaaaaaaaaaaatgaagtcttttttaaaaaaagttaaaagattcagccctgtagcaggtcccattcaaggactaagtaataggctgcagaagaaagggtggaaggctgcggaattgatctggctgaataccctgaaggcactaatgagagaggaggctgggtgtccatccttcttccattaactgctttgggaataccagaagagccccataatgattttactaacgtcagagttcctccttggagagatggaattattgcacatcatatctaaaggtggaccacaaaccttgaaatcaattagacaaggtccaggaaattattttcttttgcttcatataagtttacttgacctcatcttccccaatgggcaatagttggtgtacgtgcctgtacatgtgtgcgtgtgtgtgtgtgtatttgtgcatgtgtgtgttttgtaggctgttccatggatgtttttaatatgggctctggaggtttgctgcaaagctaaattgggtgaagaatgaagactcattggtaaatatttctttatgtgcctatttccttgagtagactgtgacctactcatttctgtatcccctgacctagctaagctagcacagagcccgctctctactaagggcagagggaatgctggttgaatggggttagaatgatactaaagaatggggtttaccagatgtgcctagaggaaaccaaaccctcgatgcaaccatgttgacaagagcacacattttagattcagacacactcaggttcaaatcctgcttcatacaaggaaaccaggtggtgctaggtctgtgattgtctctgcgtctcagtgatagggtaggtacctctgctgagctacatcagaatgctgagcattgtggtgtgaccatgaaccagaatataaacgtgctttggg

SEQ ID NO: 67252 - DNA, 1271 bp, Homo sapiens
gagacacatggaaaatctctataccttctgctcaattttgctgtgaacctcaaactgctctaaaaaatgaagtcttagctgggggcagtgcctcacacctgtaatcccagcattttgggaggccaaggagggcggattataaggtcaggagttcaagaccagcctggccaacatggtgaaaccccgtctctactaaaaacacaaaaagtagccaggcatggtggcacatgcctgtaatcctagctacttaggagaccgagacaggagaattgcttgaacccgggaggcggaggttgcagtgagctaagatcacgccactgcactacagcctgggtgacagagcgagactccatctcaggaaaaaaaaaaatgaagtcttttttaaaaaaagttaaaagattcagccctgtagcaggtcccattcaaggactaagtaataggctgcagaagaaagggtggaaggctgcggaattgatctggctgaataccctgaaggcactaatgagagaggaggctgggtgtccatccttcttccattaactgctttgggaataccagaagagccccataatgattttactaacgtcagagttcctccttggagagatggaattattgcacatcatatctaaaggtggaccacaaaccttgaaatcaattagacaaggtccaggaaattattttcttttgcttcatataagtttacttgacctcatcttccccaatgggcaatagttggtgtacgtgcctgtrcatgtgtgcgtgtgtgtgtgtgtatttgtgcatgtgtgtgttttgtaggctgttccatggatgtttttaatatgggctctggaggtttgctgcaaagctaaattgggtgaagaatgaagactcattggtaaatatttctttatgtgcctatttccttgagtagactgtgacctactcatttctgtatcccctgacctagctaagctagcacagagcccgctctctactaagggcagagggaatgctggttgaatggggttagaatgatactaaagaatggggtttaccagatgtgcctagaggaaaccaaaccctcgatgcaaccatgttgacaagagcacacattttagattcagacacactcaggttcaaatcctgcttcatacaaggaaaccaggtggtgctaggtctgtgattgtctctgcgtctcagtgatagggtaggtacctctgctgagctacatcagaatgctgagcattgtggtgtgaccatgaaccagaatataaacgtgctttggg

SEQ ID NO: 67253 - DNA, 1271 bp, Homo sapiens
gagacacatggaaaatctctataccttctgctcaattttgctgtgaacctcaaactgctctaaaaaatgaagtcttagctgggggcagtgcctcacacctgtaatcccagcattttgggaggccaaggagggcggattataaggtcaggagttcaagaccagcctggccaacatggtgaaaccccgtctctactaaaaacacaaaaagtagccaggcatggtggcacatgcctgtaatcctagctacttaggagaccgagacaggagaattgcttgaacccgggaggcggaggttgcagtgagctaagatcacgccactgcactacagcctgggtgacagagcgagactccatctcaggaaaaaaaaaaatgaagtcttttttaaaaaaagttaaaagattcagccctgtagcaggtcccattcaaggactaagtaataggctgcagaagaaagggtggaaggctgcggaattgatctggctgaataccctgaaggcactaatgagagaggaggctgggtgtccatccttcttccattaactgctttgggaataccagaagagccccataatgattttactaacgtcagagttcctccttggagagatggaattattgcacatcatatctaaaggtggaccacaaaccttgaaatcaattagacaaggtccaggaaattattttcttttgcttcatataagtttacttgacctcatcttccccaatgggcaatagttggtgtacgtgcctgtacatgtgtgcgtgtgtgtgtgtgtatttgtgcatgtgtgtgttttgtaggctgttccatggatgtttttaatatgggctctggaggtttgctgcaaagctaaattgggtgaagaatgaagactcattggtaartatttctttatgtgcctatttccttgagtagactgtgacctactcatttctgtatcccctgacctagctaagctagcacagagcccgctctctactaagggcagagggaatgctggttgaatggggttagaatgatactaaagaatggggtttaccagatgtgcctagaggaaaccaaaccctcgatgcaaccatgttgacaagagcacacattttagattcagacacactcaggttcaaatcctgcttcatacaaggaaaccaggtggtgctaggtctgtgattgtctctgcgtctcagtgatagggtaggtacctctgctgagctacatcagaatgctgagcattgtggtgtgaccatgaaccagaatataaacgtgctttggg

SEQ ID NO: 67254 - DNA, 1330 bp, Homo sapiens
taaaattgcctatatagtttgcataaatttattcacatcttcaatcttgctgacactttttttcctgttggcctcatattccttttctgcaaattttctcacagcaaaatctggaaatatagcccttaaagttaggtggtgccactttatcacacaaatgtacattaaatagttcaaaactatgttcctttaatctaatatacaaattgtatactgattgtaagagattctgagttaatttaaacattgcgattaatagtgtataaccactgatgagtaagactctttgttgaagtaaacaagtttgatttcagagattattgaattttacgaacatttgttcatgaatcaatatttggccattatgtaagttgtatttttttagaagattaattgagctgattaagccatcttgtttaaactgaatttggaggttaattctgaatctcttgtgtttcaaaatcacaacaatgttatccattattttgttataatccagactatattttaacacatctttcaacttaattgctaatttaatttgaattttaaatattaactttcccatcaaaaaaactttatctgcctttccaagatttaatcactagatgcataacatttttccccaagggttgatacaagctgtcttacaaattagcctacccttgtcccatgtggataatagkgtatttattagaaactatggtcagatcttgtatgctgcccaacaatactgctttaaatagatatataagctatctctttgctcaaaatgaagatgtgttccaataagattcctttgatgaatgctaacagaacatttaagaaatgagtgattgtatattagccaagtgctcaccatcacggaggatggaatgcaattacctgggaacctggaatgatagaaggtttgattttctaataagctagaaggctagtaaagcataaaatttctagcatggttggaaagcttaaagagagcttacacaaatcaaattaataacatttaaatacaaatacattaatgtgcaaggaattgactgcacactttgcaaatatttaacttcatttattctaaatatacagatagatttgactttttagcagttttcattgagtagtttatgaattctaagattatttccaactatgggattatttccaggcacttctttattcctaattggttttaaatacattacaaaaaatatttcataaaatcaactagatatagtaggcatctatcttccaataatagctagatttgactcagacttgatagtttacaaagtattttacaatataccattaaatttgtatttgagtgaac

SEQ ID NO: 67255 - DNA, 1330 bp, Homo sapiens
taaaattgcctatatagtttgcataaatttattcacatcttcaatcttgctgacactttttttcctgttggcctcatattccttttctgcaaattttctcacagcaaaatctggaaatatagcccttaaagttaggtggtgccactttatcacacaaatgtacattaaatagttcaaaactatgttcctttaatctaatatacaaattgtatactgattgtaagagattctgagttaatttaaacattgcgattaatagtgtataaccactgatgagtaagactctttgttgaagtaaacaagtttgatttcagagattattgaattttacgaacatttgttcatgaatcaatatttggccattatgtaagttgtatttttttagaagattaattgagctgattaagccatcttgtttaaactgaatttggaggttaattctgaatctcttgtgtttcaaaatcacaacaatgttatccattattttgttataatccagactatattttaacacatctttcaacttaattgctaatttaatttgaattttaaatattaactttcccatcaaaaaaactttatctgcctttccaagatttaatcactagatgcataacatttttccccaagggttgatacaagctgtcttacaaattagcctacccttgtcccatgtggataatagtgtatttattagaaactatrgtcagatcttgtatgctgcccaacaatactgctttaaatagatatataagctatctctttgctcaaaatgaagatgtgttccaataagattcctttgatgaatgctaacagaacatttaagaaatgagtgattgtatattagccaagtgctcaccatcacggaggatggaatgcaattacctgggaacctggaatgatagaaggtttgattttctaataagctagaaggctagtaaagcataaaatttctagcatggttggaaagcttaaagagagcttacacaaatcaaattaataacatttaaatacaaatacattaatgtgcaaggaattgactgcacactttgcaaatatttaacttcatttattctaaatatacagatagatttgactttttagcagttttcattgagtagtttatgaattctaagattatttccaactatgggattatttccaggcacttctttattcctaattggttttaaatacattacaaaaaatatttcataaaatcaactagatatagtaggcatctatcttccaataatagctagatttgactcagacttgatagtttacaaagtattttacaatataccattaaatttgtatttgagtgaac

SEQ ID NO: 67256 - DNA, 1330 bp, Homo sapiens
taaaattgcctatatagtttgcataaatttattcacatcttcaatcttgctgacactttttttcctgttggcctcatattccttttctgcaaattttctcacagcaaaatctggaaatatagcccttaaagttaggtggtgccactttatcacacaaatgtacattaaatagttcaaaactatgttcctttaatctaatatacaaattgtatactgattgtaagagattctgagttaatttaaacattgcgattaatagtgtataaccactgatgagtaagactctttgttgaagtaaacaagtttgatttcagagattattgaattttacgaacatttgttcatgaatcaatatttggccattatgtaagttgtatttttttagaagattaattgagctgattaagccatcttgtttaaactgaatttggaggttaattctgaatctcttgtgtttcaaaatcacaacaatgttatccattattttgttataatccagactatattttaacacatctttcaacttaattgctaatttaatttgaattttaaatattaactttcccatcaaaaaaactttatctgcctttccaagatttaatcactagatgcataacatttttccccaagggttgatacaagctgtcttacaaattagcctacccttgtcccatgtggataatagtgtatttattagaaactatggtcagatcttgtatgctgcccaacaatactgctttaaatagatatataagctatctctttgctcaaaatgaagatgtgttccaataagattcctttgatgaatgctaacagaacatttaagaaatgagtgattrtatattagccaagtgctcaccatcacggaggatggaatgcaattacctgggaacctggaatgatagaaggtttgattttctaataagctagaaggctagtaaagcataaaatttctagcatggttggaaagcttaaagagagcttacacaaatcaaattaataacatttaaatacaaatacattaatgtgcaaggaattgactgcacactttgcaaatatttaacttcatttattctaaatatacagatagatttgactttttagcagttttcattgagtagtttatgaattctaagattatttccaactatgggattatttccaggcacttctttattcctaattggttttaaatacattacaaaaaatatttcataaaatcaactagatatagtaggcatctatcttccaataatagctagatttgactcagacttgatagtttacaaagtattttacaatataccattaaatttgtatttgagtgaac

SEQ ID NO: 67257 - DNA, 1330 bp, Homo sapiens
taaaattgcctatatagtttgcataaatttattcacatcttcaatcttgctgacactttttttcctgttggcctcatattccttttctgcaaattttctcacagcaaaatctggaaatatagcccttaaagttaggtggtgccactttatcacacaaatgtacattaaatagttcaaaactatgttcctttaatctaatatacaaattgtatactgattgtaagagattctgagttaatttaaacattgcgattaatagtgtataaccactgatgagtaagactctttgttgaagtaaacaagtttgatttcagagattattgaattttacgaacatttgttcatgaatcaatatttggccattatgtaagttgtatttttttagaagattaattgagctgattaagccatcttgtttaaactgaatttggaggttaattctgaatctcttgtgtttcaaaatcacaacaatgttatccattattttgttataatccagactatattttaacacatctttcaacttaattgctaatttaatttgaattttaaatattaactttcccatcaaaaaaactttatctgcctttccaagatttaatcactagatgcataacatttttccccaagggttgatacaagctgtcttacaaattagcctacccttgtcccatgtggataatagtgtatttattagaaactatggtcagatcttgtatgctgcccaacaatactgctttaaatagatatataagctatctctttgctcaaaatgaagatgtgttccaataagattcctttgatgaatgctaacagaacatttaagaaatgagtgattgtatattagccaagtgctcaccatcacggaggatggaatgcaattacctgggaacctggaatgatagaaggtttgattttctaataagctagaaggctagtaaagcataaaatttctagcatggttggaaagcttaaagagagcttacacaaatcaaattaataacayttaaatacaaatacattaatgtgcaaggaattgactgcacactttgcaaatatttaacttcatttattctaaatatacagatagatttgactttttagcagttttcattgagtagtttatgaattctaagattatttccaactatgggattatttccaggcacttctttattcctaattggttttaaatacattacaaaaaatatttcataaaatcaactagatatagtaggcatctatcttccaataatagctagatttgactcagacttgatagtttacaaagtattttacaatataccattaaatttgtatttgagtgaac

SEQ ID NO: 67258 - DNA, 849 bp, Homo sapiens
tgcatttcaaggtgctagtagcaatatcacaagattcttggcatgaatgaacacatgagcgcagtcatctcatagctctatcaagataagctgtggtgtcagtcatgacacaggagcaaagagcttgctcaaataatgatcagagttcctgccacttcccagctctctatttgtctacaaagcttctttttttcattaaatttttaacattttgtacaaaacagttattccaggcacttttctttcaaaatgatttcattacccatttccttcttttaaaatatgccaaattgggggccaggcgtggtggctcatgcctgtaatctcagcactttgggaggccgagacaggccaatcacttgagctcaggggttcgagaccagcctgggcaacatggcgaagctccatcttcactaaaaatacaaaaaattagcctagcatggtgatttgtgcctgttgtcccagctactcgggaggctgaggtgagagaatcaatcacctgattgattatatattgattatatatatataatatatatataccaaattgagaaactacagctctctcattccttaaggtgtaatgctgagtgttttattagaaaatttgattacgttaggggaaaaataatcccactagacaaggctctgaccaaactgcattcaaggtgctaccttcagctccagatgctgggtcttcagtgggggctacatcaggygcacccttggtagagagctgccctcaagcacaggaacctggagccaggatgtctcaatgtggtcaaaaagaccaaggctattaaggctagagaataaaagacttcaatatttgcttttcgttattcaaga

SEQ ID NO: 67259 - DNA, 543 bp, Homo sapiens
attgcctatcttttacttgggagaccatgcgagataaaatctagaagattatgttagaaaactgtctcttaataacacattcttccatggaacgagaaggaattaacctggttggtaaaattagactaattatctggatatacatagcttcctgggaattgactcctcttgggaattgactcttcaggaagcacagtctgatatctgctcttctaygtatgtggcaagcaggggagattgtgacttggaggttacatctatctaaccttgagtgcattattagaaattctgttgttgcctcatatctaagctgcatttgtcaacatctctatcataccaaagctgatattttgatcttgccttcctgttaactttgtctttctcaattggttaagaacttggttaaggaaaaggtttattttcctcaaataaaagatcaaaagtattgatcttcaatgttctctaaactttgccagattgcaatttcctgaatggtggaaaccttcatgcttgtattgacaacagtgcctagcacgtatagtg

SEQ ID NO: 67260 - DNA, 1010 bp, Homo sapiens
acactcctttyttggtaattacatctggcaagacaataagcttaaattcccttccgttcaaattctctattttaccccctttctaattggaaaaatagaccctgaatcaactctagaatttttcataaagttgtaagggaatgctcttatttagggatcatttaatctgcctcatttacacaggtgaagaaactaagtttccttggagtgaaatgaattgctcaagtcataagtgaaaggtagacctggcacaagagcctagacctgtcttttccctcttgtgctggagctaccatataccatggacagtgcctcccccacttccatgacctgctctgccactccctcaccaggatatttggcccctctaatggtcagctagtttacagaaagttagacagtaattcttttcatcttacccaaataagagacaaataaaaaagcatgtactgatcttctgaaactactgttacaaatatatgccacaaaaagattatttttctatccaacaacttacagataatgtcttaatcatttcttttatcaatctcaaaattcagcctcaaatagaattatgtaattatgagaaattttcctggtaatgtcagcaagagaaaaagtcatctatttttaagaacacattttctctgtaaacaacgagcctataattttttagtgttatttttcagttcactttttcccatgatactatataaaagtctttccttaaatccagagtttcaaaaattagcccaaggctgtattatgccatggccctacaggccctgccacctcccctaacttctcattgtgctcattatcaatcctacacagagctggggcagagcaataagctaggactgagaaatgatcaaatgtcccagttctgcagccatctaattttcactttttaacacaggatatgaacttgggcacttctcacagcctcctaaatcttccactcttgggtgatgctacctccattaagcagagctccttatactcatcta

SEQ ID NO: 67261 - DNA, 1010 bp, Homo sapiens
acactcctttcttggtaattacatctggcaagacaataagcttaaattcccttccgttcaaattctctattttaccccctttctaattggaaaaatagaccctgaatcaactctagaatttttcataaagttgtaagggaatgctcttatttagggatcatttaatctgcctcatttacacaggtgaagaaactaagtttccttggagtgaaatgaattgctcaagtcataagtgaaaggtagacctggcacaagagcctagacctgtcttttccctcttgtgctggagctaccatataccatggacagtgcctcccccacttccatgacctgctctgccactccctcaccaggatatttggcccctctaatggtcagctagtttacagaaagttagacagtaattcttttcatcttacccaaataagagacaaataaaaaagcatgtactgatcttctgaaactactgttacaaatatatgccacaaaaagattatttttctatccaacaacttacagataatgtcttaatcatttcttttatcaatctcaaaattcagcctcaaatagaattatgtaattatgagaaattttcctggtaatgtcagcaagagaaaaagtcatctatttttaagaacacattttctctgtaaacaacgagcctataattttttagtgttatttttcagttcactttttcccatgatactatataaaagtctttccttaaatccagagtttcaaaaattagcccaaggctgtattatgccatggccctacaggccctgccacctcccctaacttctcattgtgctcattwtcaatcctacacagagctggggcagagcaataagctaggactgagaaatgatcaaatgtcccagttctgcagccatctaattttcactttttaacacaggatatgaacttgggcacttctcacagcctcctaaatcttccactcttgggtgatgctacctccattaagcagagctccttatactcatcta

SEQ ID NO: 67262 - DNA, 728 bp, Homo sapiens
gcttgtaatcccagcactttgggaggccgaggcaggtggatcacctgaggtcaggagttcgagaccagcctgaccaacacggtgaaaccctgcctctactaaaaagacaaaaaaattggccaggcattgtggaacgcacctgtaatcccagctacttgggaggctgaggcaggagaattgcttgaacctgggaggcagaggttgcagtgagccaagattgtgccactgcactacagcctgggcgacaaagcgggactccgtcacaaaaaataaataaataaaataaagtctgttttattaaytgccaagaaatttgaaatgatatagacacttacttatcttttttcccctttgaaatgcttatttagatggaaaaattagaatgtaacctatcagagttcttggcttatcctataagaatatcttatctgctgagagtgaatgctttcttcctctgtgccttctcttctcatgggtcaggagtctgactttcttgactatgatccagatgttttagggcatattagtcatcccatatgtaatctaattctttgtaccatactgctggaaacggacctgagccaatctggtcatccacaccccttaggactttttgataggttacagtcacaaccaaaaagacttgaggtagatggagtttagctgcttccccacaacactgctaccaagttataataaaagctagcctcagatgaaaaagtctgcca

SEQ ID NO: 67263 - DNA, 660 bp, Homo sapiens
aaataagctctcggggctgtgtaataataaaacttattttatccacattgaaatttgaactttatgttacatgtcatggaatattattcttctttcaagtttttcaacaattaaaaaatgtaaaatccaggccaggcgcagtggctcacgcctgtaatcccagcactttgggaggccgaggcaggcggatcacctgaggtcaggagttcgagaccggcctgaccaacatggagaaaccctggctctattaaaattacaaaattagctgggcatggtggcgcatgcctgtaatcccagctactcgggaggctgaggcagaagaattgcttgaacctgggaggtggaggttgcagtgagccgagattgtgccattgcactccagcctgggcaacaagagtgaaactccatctcataaaaaaaattaaaaatgtaaaatccatttttatctcctagktcatataaaaatagcataccagatttggcccatcattggtaatttgccatctcctgcaataaataataaagaacaaataagaaaaagattaataaacaaaaaatcttaaaatataattaaagttccattttgttcctctctgatctcattcccctccgtctctccagtggaaaccacgatcctgagttacatgttcagcattccca

SEQ ID NO: 67264 - DNA, 552 bp, Homo sapiens
tatcaaaacttaggaaatcataccctataaatgtgtgcagtttgttgtatattgattttattcaatgtagggagcaaagtttaagatgcccctgcagtgatcctgcctactggcagtggcagcctcgagtaaccctctcttcttgagaaacgtgtttctaatcaacacactaccttgatgttaaggggatctcagttccaagtttgtaayttacctcttgctagctcactctatgccctgctggctttgatgatgctaattgctatattggggaggcccatggggaaaggaactgaagatggtctctggccaacagcctacaacgaacagaacccctgctatcaaccacttgagcttggaagcagatcgtaccccagtctagattccaggagagaccccagtcccaactaaaaccttttttggcagatttttaaagcagataaccctgctaaacttatctggattcctaacccacataaactgtgttgttttaagccactaagtttgcagtaatttgtttcacagcaacagacaaccaatgtaattttttta

SEQ ID NO: 67265 - DNA, 552 bp, Homo sapiens
tatcaaaacttaggaaatcataccctataaatgtgtgcagtttgttgtatattgattttattcaatgtagggagcaaagtttaagatgcccctgcagtgatcctgcctactggcagtggcagcctcgagtaaccctctcttcttgagaaacgtgtttctaatcaacacactaccttgatgttaaggggatctcagttccaagtttgtaatttacctcttgctagctcactctatgccctgctggctttgatgatgcyaattgctatattggggaggcccatggggaaaggaactgaagatggtctctggccaacagcctacaacgaacagaacccctgctatcaaccacttgagcttggaagcagatcgtaccccagtctagattccaggagagaccccagtcccaactaaaaccttttttggcagatttttaaagcagataaccctgctaaacttatctggattcctaacccacataaactgtgttgttttaagccactaagtttgcagtaatttgtttcacagcaacagacaaccaatgtaattttttta

SEQ ID NO: 67266 - DNA, 552 bp, Homo sapiens
tatcaaaacttaggaaatcataccctataaatgtgtgcagtttgttgtatattgattttattcaatgtagggagcaaagtttaagatgcccctgcagtgatcctgcctactggcagtggcagcctcgagtaaccctctcttcttgagaaacgtgtttctaatcaacacactaccttgatgttaaggggatctcagttccaagtttgtaatttacctcttgctagctcactctatgccctgctggctttgatgatgctaattgctatattggggaggcccatggggaaaggaactgaagatggtctctggccaacagcctacaacgaacagaacccctgctatcaaccacttgagcttggaagcagatcgtaccccagtctagattccaggagagaccccagtcccaactaaaaccttttttggcagatttttaaagcagataaccctgctaaacttatctggattcctaacccacataaactgtgttgttttaagccactaagttwgcagtaatttgtttcacagcaacagacaaccaatgtaattttttta

SEQ ID NO: 67267 - DNA, 1129 bp, Homo sapiens
ccctacagatcaggcccctgctatttctgaattgccccatcattggcattggtatgattccttattgttgtttgtgtttttctttggtaactcttcctactctatcaagggtgcgtgaaaaggaacagtttcaaagagtgaaatcagaacaaggcaaagcacgacctttgatgtcacaagaaaagaagaaaaggaaagaaatcaaatacatgtgtcgatcaactgagtcaaacatattttctgtttcaggaatatggagtgagttagtgctgcctgcacaatggaaagaggtcctctagcttaaatgaaaagctaggtagtcacaccttttatctggagagaccttaaataaataaatctgctcaaaaaactatttaatgagtagtttgtcttttctgccaaatagtacgatgctgatcgtcttgagaactcttagagaggaattagaattcatttggacatcaaaatggttttttttcgtttttctttttttttgccaattgtaygcttttaaatcaagttttaccctgttccttccttgaaccctcaatttgggcttcatcttaaagccttggtttttatacttcatacattaacaagatactatcaccactttggctatatctttgtatcagctgtcctagtactcatttaataattttctttaagtcagttttaaattgactttttctctccttagtcgtgactaagaattatagttgtgacttaaggagttaatgaaaagtaactctcaagttctttgtgctaccagtctttccaacattcattcaaaacaacatcatataattattaccatttacaaactgcttttctagttgccacctaaaatcactggttccaagcaatgaacaactctgaaagtaatgtgaggagtcatacattaacatttcaaacagcataactgcaggagctatttgccacagcaaagaggctgttttttaaaataatgccataacactgtacaatcttgctgagccaatattgctctattcaaagtatctcataatttgaaacagctgctatttttcagttgacatgatggcctattctccttccataaaaaatactggataatctaaatctggttagtttaaaatccatttatttt

SEQ ID NO: 67268 - DNA, 1089 bp, Homo sapiens
tattcattatgctcaagaggggacagggaggttaaaagcacatatgcttaggagatagagagccctgggttcaaatattgactttaccacttacygctctaacttgtactttattcaccccctgtttggcatttgtttctcttcaataaaaagaggaaaaagctacttcctttcagaattataatagagactgtgatgttagcaggtttccagacacagggcagatgctcagtaaatgacacctcatatcaaaatagcatcgtaggtttagataccattctgccttttaatcataaaaatatttcaagtatatggctatcagtctccttctagaaaataggaggacttttaggatgctttcattctgatcactctctctggtcttttattgtttctgccaggtatttttattttgccttacttttaacccccttacatgatttattaggatttatgctcatttaggttttccaaaaacatgtttactaatttattttctcaccattacttctcacatttcagtttttccttctaggtttattatccttcttagagaagtatatgtatttttattttgaaaaaaattataataagaaagttgcaaagaaatgtacagggaggtcgcaggcactctttgccctccctcccccaattatataactatagggcaataacaaaactgggtcactggcattgctgcaacccacagagcttattcaggttgatacacatacacatgtatttgtatgtgtgtatgtatttgttattaattttatgttgctctatacgattttatcacatgtatagctgtgtgtaactactaacacaattaagataattgtaccatcataactaggcccccaagtgctacccctctgtattcaaactcctctctcccacctacatccccagtccctggcatctactaatccgttctgcatctctataattttatctcaacaatgttttgtatcagtggaatggtacagtatgtaaactttagagactggcttttttcttttttcctcactgagcataaatccaagtcattgtgtatcgacagtttgtcccttgttgcagagtagtatt

SEQ ID NO: 67269 - DNA, 1349 bp, Homo sapiens
atggcggtaattcatataaaacctgtgtctccagatttgcttgaaatattgaaacatctagaaacactggatacttattctatcaggttaagagccagttggaactgagtggctactatcctttaaaggggccaatttactgtggtctctcctccatttcacttgctgttactgcccggacactgaagacatgtgactttgtcaccccctgacacaacccagcccaacccgtacacttcatttcattgcaatgtgtctttaaaattgcaaagcgagaggaagctaatgcaaaggatggggccatcacagacgatgagattcactaggagatttaaatgaatttgcatcagatgttcaaggtatctgggatgttgcctaagagacagagtagcctttggagatcagagccctcactcttctagcaaccgtcatgatccatgctggggccttggggcaggtctctcaaaccagctgcctttctgtgtgttttctggtaggcagagggcaaggggaaattgttttcttagctttcattaggtggttaaacaacttagggcttgtgctgtcgctgtgctgaagaagcagaaccgattggaagcctttttcctattagaggaaagggctcaggaggttgcatccccatggctgctccaggatcctggatacatttatcttgttttttttgagacatagtcttggtctattgcccaggctggagtgcaatggtgctatcctggctcatgcaacctctgccttccacattcaagtgattctcaagtctcagcctccctagtagctgggactasaggcacaccccaccatgcctggctaattttttttcagtataaatggggtttcaccacattggccaggctggtcttgaagtcctgacctcgtcatccacctgcctcgtcctcccaaagtgctgggattacaggcatgagccatgacacctggccctatcttctagcactatttggattatgagcttctggaagtcagggaggatatctgtatagagcctaggccagcactgtatcctcaacgaccaacctaccagccagggcagggaggtgggagaaggtgcacagagcaaatatgtggtctcatgcagagatgcacatctctacctccttattacccaggagacagcttattctgctttggcagatttacgggatttgttgaccaagattcgtgacctgaagggtcacttatcctgattcccgtagagtttatatattccttaacaatggaaaagagcaaggaacggatggatcacagtatctgaatgaaatgcagatgtttttcgtaacaaatcaccatgatggctttttttccttatgaat

SEQ ID NO: 67270 - DNA, 1349 bp, Homo sapiens
atggcggtaattcatataaaacctgtgtctccagatttgcttgaaatattgaaacatctagaaacactggatacttattctatcaggttaagagccagttggaactgagtggctactatcctttaaaggggccaatttactgtggtctctcctccatttcacttgctgttactgcccggacactgaagacatgtgactttgtcaccccctgacacaacccagcccaacccgtacacttcatttcattgcaatgtgtctttaaaattgcaaagcgagaggaagctaatgcaaaggatggggccatcacagacgatgagattcactaggagatttaaatgaatttgcatcagatgttcaaggtatctgggatgttgcctaagagacagagtagcctttggagatcagagccctcactcttctagcaaccgtcatgatccatgctggggccttggggcaggtctctcaaaccagctgcctttctgtgtgttttctggtaggcagagggcaaggggaaattgttttcttagctttcattaggtggttaaacaacttagggcttgtgctgtcgctgtgctgaagaagcagaaccgattggaagcctttttcctattagaggaaagggctcaggaggttgcatccccatggctgctccaggatcctggatacatttatcttgttttttttgagacatagtcttggtctattgcccaggctggagtgcaatggtgctatcctggctcatgcaacctctgccttccacattcaagtgattctcaagtctcagcctccctagtagctgggactagaggcacaccccaccatgcctggctaattttttttcagtataaatggggtttcaccacattggccaggctggtcttgaagtcctgacctcrtcatccacctgcctcgtcctcccaaagtgctgggattacaggcatgagccatgacacctggccctatcttctagcactatttggattatgagcttctggaagtcagggaggatatctgtatagagcctaggccagcactgtatcctcaacgaccaacctaccagccagggcagggaggtgggagaaggtgcacagagcaaatatgtggtctcatgcagagatgcacatctctacctccttattacccaggagacagcttattctgctttggcagatttacgggatttgttgaccaagattcgtgacctgaagggtcacttatcctgattcccgtagagtttatatattccttaacaatggaaaagagcaaggaacggatggatcacagtatctgaatgaaatgcagatgtttttcgtaacaaatcaccatgatggctttttttccttatgaat

SEQ ID NO: 67271 - DNA, 1349 bp, Homo sapiens
atggcggtaattcatataaaacctgtgtctccagatttgcttgaaatattgaaacatctagaaacactggatacttattctatcaggttaagagccagttggaactgagtggctactatcctttaaaggggccaatttactgtggtctctcctccatttcacttgctgttactgcccggacactgaagacatgtgactttgtcaccccctgacacaacccagcccaacccgtacacttcatttcattgcaatgtgtctttaaaattgcaaagcgagaggaagctaatgcaaaggatggggccatcacagacgatgagattcactaggagatttaaatgaatttgcatcagatgttcaaggtatctgggatgttgcctaagagacagagtagcctttggagatcagagccctcactcttctagcaaccgtcatgatccatgctggggccttggggcaggtctctcaaaccagctgcctttctgtgtgttttctggtaggcagagggcaaggggaaattgttttcttagctttcattaggtggttaaacaacttagggcttgtgctgtcgctgtgctgaagaagcagaaccgattggaagcctttttcctattagaggaaagggctcaggaggttgcatccccatggctgctccaggatcctggatacatttatcttgttttttttgagacatagtcttggtctattgcccaggctggagtgcaatggtgctatcctggctcatgcaacctctgccttccacattcaagtgattctcaagtctcagcctccctagtagctgggactagaggcacaccccaccatgcctggctaattttttttcagtataaatggggtttcaccacattggccaggctggtcttgaagtcctgacctcgtcatccacctgcctcgtcctcccaaagtgctgggattacaggcatgagccatgacacctggccctatcttctagcactatttggattatgagcttctggaagtcagggaggatatctgtatagagcctaggccagcactgtatcctcaacgaccaacctaccagccagggcagggaggtgggagaaggtgcacagagcaaatatgtggtctcatgcagagatgcacatctctacctccttattacccaggagacagcttattctgctttggcagatttaygggatttgttgaccaagattcgtgacctgaagggtcacttatcctgattcccgtagagtttatatattccttaacaatggaaaagagcaaggaacggatggatcacagtatctgaatgaaatgcagatgtttttcgtaacaaatcaccatgatggctttttttccttatgaat

SEQ ID NO: 67272 - DNA, 1349 bp, Homo sapiens
atggcggtaattcatataaaacctgtgtctccagatttgcttgaaatattgaaacatctagaaacactggatacttattctatcaggttaagagccagttggaactgagtggctactatcctttaaaggggccaatttactgtggtctctcctccatttcacttgctgttactgcccggacactgaagacatgtgactttgtcaccccctgacacaacccagcccaacccgtacacttcatttcattgcaatgtgtctttaaaattgcaaagcgagaggaagctaatgcaaaggatggggccatcacagacgatgagattcactaggagatttaaatgaatttgcatcagatgttcaaggtatctgggatgttgcctaagagacagagtagcctttggagatcagagccctcactcttctagcaaccgtcatgatccatgctggggccttggggcaggtctctcaaaccagctgcctttctgtgtgttttctggtaggcagagggcaaggggaaattgttttcttagctttcattaggtggttaaacaacttagggcttgtgctgtcgctgtgctgaagaagcagaaccgattggaagcctttttcctattagaggaaagggctcaggaggttgcatccccatggctgctccaggatcctggatacatttatcttgttttttttgagacatagtcttggtctattgcccaggctggagtgcaatggtgctatcctggctcatgcaacctctgccttccacattcaagtgattctcaagtctcagcctccctagtagctgggactagaggcacaccccaccatgcctggctaattttttttcagtataaatggggtttcaccacattggccaggctggtcttgaagtcctgacctcgtcatccacctgcctcgtcctcccaaagtgctgggattacaggcatgagccatgacacctggccctatcttctagcactatttggattatgagcttctggaagtcagggaggatatctgtatagagcctaggccagcactgtatcctcaacgaccaacctaccagccagggcagggaggtgggagaaggtgcacagagcaaatatgtggtctcatgcagagatgcacatctctacctccttattacccaggagacagcttattctgctttggcagatttacgggatttgttgaccaagattcgtgacctgaagggtcacttatcctgattcccgtagagtttatataytccttaacaatggaaaagagcaaggaacggatggatcacagtatctgaatgaaatgcagatgtttttcgtaacaaatcaccatgatggctttttttccttatgaat

SEQ ID NO: 67273 - DNA, 605 bp, Homo sapiens
agcttttttaaacacacaggtttgcatagagaaaagcttagaagtgtataaaacaaagtgttaacggtatctccagctgtgcttttccaatataaggttttttgtttgtttgtttactattttttatttttgagaacagggtctcaccgtattgcccaggcaggtctcgaacacctgggctcaagctatcctcctgcctctgcctccctaagagctaggattacaggcgtgaaccaccgcacttggccaattttttgtatttctaaaatctgcatactgaatatctgcaattttataatagagaaaactaattttaaaattctgagacctaatatagagtgcttatgtgcctattttctgcacrgcaaatgtaacctaaggacatgcaacttatttctgggcagagattcagccaatcgccaaggggagattagtaagaactgggtactgtcctgaatcccttcagatttccaaaatgaaaagaaagagggcatctgcacacaactcctttagtaagaaaataaggcaagatgcaaaaattcttcaggaggggactctaaaaaggacaatgcaattctattgatacaggtacctggagtagaggc

SEQ ID NO: 67274 - DNA, 834 bp, Homo sapiens
  misc_feature (1)...(834): n = A,T,C or G
tacctgcattcagaatgccaattgtctgttcacacaaaattgagaagcttttcattctttgcattccacattactttttaaatctcaatagatctaagaacagtaacaaaatactgatgcattagtcattagctcaatgtattttgtcggcaagatgctaaaggaacatctaactcagtgggcaatcagagccttagaggaaaaagttttaactcaatgacatttcccaacaataggtgttttactcaccactgccaccctcaaaaacctaatccttttaactgctataaacccatcacaatagtctataaatatgactaaatagttcttcctactcttcagaattgactccatatcttcaactgcctactggatatcacacactccaacacagcattgtcaaaacctgacatcaacctctagtcctaatcagagcctgcctctaacttattcctgacactatccttccagatatatggttcaaaattatgtcatccttgatcctttttcacttctgctttattttcacagtcacttataccataccaacattgctgtgaaatcctttagtttttatctctgagcccggtgtctactttctctaakctatctcagatatagctgtcagataatctgccttaaacatcctgtcagttggatcctctctgaaatagacactagttggagttgggagtgcaggaactttatcaggagtgggatagagtaatacctgnnnnnnnnnnnnnnnnnnnnnnnnnnnnnnnnnnnnnnnnnnnnnnnnnnnnnnnnnnnnnnnnnnnnnnnnnnnnnnnnnnnnnnnnnnnnnnnnnnnna

SEQ ID NO: 67275 - DNA, 505 bp, Homo sapiens
aatcatgggtgcagagagaggacaatgctgttgtttctgattttttatcttccttgtcccaggaggtgataaggagaggagartaagtgatttcacactgctaaacaaggcataatcctggcaaggggtggccaaagggcccagagcatccgcacatccctcctagaaaagattcatctgggtcaataaaatgctgttttgaagaccagttacgcccaaggagggttaaatcaactggtcattcacagtttagatcaatgttcctctttttttcttctttttttttattttttaagaaaacgaaaggcatttttgttgcccaaactggaagtgcaatggtgcgaactcgggtcactgaaacctctggctccccagttaaagccaatttcctgcctcagcctcctgagtagctgggattacaagcgcccgtcaccacacctggctaaattttgtatttttagtagagatagggtttcatcatgttggccaggctggtctcaaactc

SEQ ID NO: 67276 - DNA, 850 bp, Homo sapiens
caggggattgacatccattcacttaactcacttttatcgagcctaacatgtgtcaggcagtgtgatggggatgcagagatggatgtatcaccggcctggcctaggaggcacttactgtctgctggaggtgacagacattaaacagataaattacaatctagtcttaccagctgcctgaaatgggagggaggtgatggggcagctcctagaacagagctgggactctgccctggcctgaggaagccttcccaggataggttacagcgatctgggtttggaaagatgggtgagaatctgccaggagagagctagtccaggctgcgggaagagctctgtcttcaatatctgcctagagagactgatggtttatcctctcaagactcaattatctaaagataaaatgtgctgtttgtgtatgagaaaagagatgccattcaattagaaacatagtgtttaaaatagagtttgaaggagttgatcgagctttgaacttttaatatctcaaacttggggatggggaaaatatagtctctgaattatcaggatttttcattcccctagcaggacaytgtgcacacagaagaatcaggggctctttattatggttttatatatgtattgcaggtgcacagcagcagcactcagcaggacaggagcagggcatagatggtgaaaagaaccaaggaacatgcacagggggaaaatgcccagctccacggtgggtggcacaatagcaagcgggtggcttcaggccccatttgtgacgaagagagtagagatggaggccaggaggggagggattccatcgtacaccagcaagtcagggaaaccctggaggacacgggtggga

SEQ ID NO: 67277 - DNA, 850 bp, Homo sapiens
caggggattgacatccattcacttaactcacttttatcgagcctaacatgtgtcaggcagtgtgatggggatgcagagatggatgtatcaccggcctggcctaggaggcacttactgtctgctggaggtgacagacattaaacagataaattacaatctagtcttaccagctgcctgaaatgggagggaggtgatggggcagctcctagaacagagctgggactctgccctggcctgaggaagccttcccaggataggttacagcgatctgggtttggaaagatgggtgagaatctgccaggagagagctagtccaggctgcgggaagagctctgtcttcaatatctgcctagagagactgatggtttatcctctcaagactcaattatctaaagataaaatgtgctgtttgtgtatgagaaaagagatgccattcaattagaaacatagtgtttaaaatagagtttgaaggagttgatcgagctttgaacttttaatatctcaaacttggggatggggaaaatatagtctctgaattatcaggatttttcattcccctagcaggacattgtgcacacagaagaatcaggggctctttattatggttttatatatgtattgsaggtgcacagcagcagcactcagcaggacaggagcagggcatagatggtgaaaagaaccaaggaacatgcacagggggaaaatgcccagctccacggtgggtggcacaatagcaagcgggtggcttcaggccccatttgtgacgaagagagtagagatggaggccaggaggggagggattccatcgtacaccagcaagtcagggaaaccctggaggacacgggtggga

SEQ ID NO: 67278 - DNA, 684 bp, Homo sapiens
caatgagcccttcttcctagcattcacaccctcgtgtagtctcctcccatattgtaccagagttggtctgggtgaccaataacatacagcagaagtgattagacttgcaaggacaggtcataaagggctttatggatgctatctttttctctcttggaccactcactcagggggaagccagctgccatgtcatgaaaacattcaagcagctctcyggagaagtccacttggcaaggaacagaggtctcctgccaaaatcagaaaggaattgagactccctgcaaacagtcatctgaatgagccctcttggaagtgggttgtccagccccagtcaatccttcagatgatgcagatccagctataaagactctgagcctcaactatcagctaagccactccaggtgcctgacccacaggaactgtgagatgataaatgtctgatatttcaagctgcttaattttgggggtaatttgttatacagcaatgggtaactaatacaagtcctaaaactaaatgaaagagctgtgcaggaataagatacacaaattggagttacattctcgaccaggaatgggtaaggctggcttagtctctgctctggttcagctggaggataattgtctaacttgaggaaaagtttgtcctgtgatagtgacagtccctggtgaggtgtttttgcctca

SEQ ID NO: 67279 - DNA, 812 bp, Homo sapiens
ttaatgtcccctttgtgagggattatacataggaaaaaatcccagtcggaggagtcaaatccttgcattacagactgtctgcagtcattaattaatggagtaatgctagttaagattcatctctctgggcctcagtttccttatttgtagaatgggagcatgcaagtttggagactgaagtgaatcttggtatttgtggaacagaccaacagaatgatcgatgagcaaaaaatatacactggaaataattrttaaagttggtattgttttccatttcaaattttagagttttagtgacgggatagggtagattatctctgctaatttttgtgtttgtatgtgcaaagatgataagcattcacttagagtctccaattcaagcaattctccattttagaaggagactatagagttgcttgtatactttctgagcaagaagaagaaatcttttttatttctatcatcattcttaagtgagaaaaatgtcagcatttttaggattgtcatagcttcctgatatgtcatagaaaaagagggaagattacaaaggagcaacttagcacttatcttgctgtctcttccaaagtaatgcttctcacattaaaaagaggtagtttcagaagatataagtaaaatctacttttaaaaatgtacatactccatctgataacacttgtattttctagacacacctacaagaaatatagtctcattttttatattatttcttgaccaatcacattattacccaggttgaccatttcttgatctaaatgttttggttgctggtaattcccaaatcaaatggatcc

SEQ ID NO: 67280 - DNA, 903 bp, Homo sapiens
aaaggtgcattgcagaatcgacagccaataggttagttgtcaagctctaaaaacatccaagactggctttttagttgtttttatattcttcaaaaagtaaaaaagagaaagctgctgtcacaaggaggtaacatgaattccctaagggcatgttgaaaaattaaagtttatttccctttttgataagttacttgacctgcagaccagaagagtgacaragagaaagtgtatttgacgataccgttcatgatgttcttgtgaccgacatgggaaatgtcagatcataagacattaggtggattcatagctgtttaaatgcttatgaaaaatcactgggacagcaataaaacacctgggttcttttcctaactccatcacttagtaaccttttaccctaagggaggttacatgttctttctgcactttggattctaaagtggatctaataacagctgactttgttagcacatggggatgaataagcatcaaacaagtcaatatatgggaatcggttttgcaatcagaaaagtttaagaccttcagggaactattgttattgatgcctgtggtaggcagaataccaaaagatgtcctcatcctaatcaccagaacttatgaatacgttatgttacacagcaagaggggagttaaggctgcagatggactttgaagcaggttatccttgactatcccagacccaatgtaatcacaaggttctttaaataaggaagagggaagaagaagaatcagaaccacagagatagcataatgattccattgctggccttgaaaatggaagaggccacaagccaaggaatccaagcagctggaaaagacaagaaaacttgaatatctcttaaccatccagaaagaatgtagccttgccaacacttttattttagc

SEQ ID NO: 67281 - DNA, 903 bp, Homo sapiens
aaaggtgcattgcagaatcgacagccaataggttagttgtcaagctctaaaaacatccaagactggctttttagttgtttttatattcttcaaaaagtaaaaaagagaaagctgctgtcacaaggaggtaacatgaattccctaagggcatgttgaaaaattaaagtttatttccctttttgataagttacttgacctgcagaccagaagagtgacagagagaaagtgtatytgacgataccgttcatgatgttcttgtgaccgacatgggaaatgtcagatcataagacattaggtggattcatagctgtttaaatgcttatgaaaaatcactgggacagcaataaaacacctgggttcttttcctaactccatcacttagtaaccttttaccctaagggaggttacatgttctttctgcactttggattctaaagtggatctaataacagctgactttgttagcacatggggatgaataagcatcaaacaagtcaatatatgggaatcggttttgcaatcagaaaagtttaagaccttcagggaactattgttattgatgcctgtggtaggcagaataccaaaagatgtcctcatcctaatcaccagaacttatgaatacgttatgttacacagcaagaggggagttaaggctgcagatggactttgaagcaggttatccttgactatcccagacccaatgtaatcacaaggttctttaaataaggaagagggaagaagaagaatcagaaccacagagatagcataatgattccattgctggccttgaaaatggaagaggccacaagccaaggaatccaagcagctggaaaagacaagaaaacttgaatatctcttaaccatccagaaagaatgtagccttgccaacacttttattttagc

SEQ ID NO: 67282 - DNA, 643 bp, Homo sapiens
caaaggctacagaatgatcaatacccaacatatcttccttcaggctcatgtgtcttcaacggggaatgtggcaacggaggaggaaaatgtgatgctccttctagtgttgtctctacaacttgtctaagattcgaaatgcaaattcscaacttcccctgttatcagcagactgacctggaacagcgtgatcctgcaggtgggaggaggtgtgttaggtctggaatgtttaattattccccgctctcccctctgaggaggaggagggagtgagaaggggagagggttgctatgaacgaacccttaataccagatccagagtggctcacccacacagccgtgcccgcgttccgagggtgctcatgcctcagccttttagacgctcagtccctaaaactgcgactacacacagatacacctacgcaaatttgaagtgtggaattcacatatcccgtcctttcttcaaatcaggtatgctcttgtgagcatagatcctcttcctataaatagccccatggtgaccagtacaatgcacagaatcaaaaaaaaagtttggaaattccccaagctctaacctcgaaataagagaacaatggaagctgtatggagtgtgaagactggacgagacttcattggctcttggggt

SEQ ID NO: 67283 - DNA, 623 bp, Homo sapiens
ctttagttcctatcactggccttttattgataagtattagtttgagatttcaaaacccaatctcatgtttcaaggtacagatgtaactgtacatttgatactcaaaagccgaagatgaggtctcaggatcagcaaaactggccacctgccttgagagtggctcctaccccctgcaggctccccgtgagctcagatggtgccttcaaatcctttgtagaggctgggggaggggaaggaggagcacatttgttaatgagggggaaaatgctgtgtgctttcaagggaaaatgctaaattcatttcaataacatatgaattacttgctgttaaggaataggcacccttcatctcaatagaaccctgtctttcaaagccttcacttccgtatccttgaggtttctcttcaaagagggctgarcccattcacccaggcactaggaggccctgtgcattttttgtcctgctgtttccatggataatttaaaaagaattatgaatatctcagtccttagagagtcagacagagagccccgaggccgctcagtctaggtcagctggagtggctccctttgtgggtccctttgctggctggaacctggccagagctcgcaggggacagcact

SEQ ID NO: 67284 - DNA, 1058 bp, Homo sapiens
taaacttttgtaatactctattacctccaaagcataaaacaattattgagacaaaagaaatacaatattttctaagttccaagacaaaaaaaaaacttaccaataaagaaggagctgtctgttccacaaaccaacagccacagttttttctcttaaatgtcagactttgaaaaggttgacatttctgttcaccagcatatacacgtgggccctctcttactgatgaccacagagtcctggggaccttcctgtgctcccagcccagctctcctctccggccacactgctgcctccttcacccatacactgggtggtgtgctgggctgccctccttaccacaagttttattcctcagcacacacttcagatcacagaaaggagacaaataaggtggaggaaggaagatgggttgatgtaactaggtcacttggtaatttcaatttcagacgtaaatttttctttgtttcagaattattgatctgtggaatatttcttgattcttcttggaaattacaaattaattcaaatgattgtaaagttctctgaaaggctctacagttttcttaagagaataaaaaaacctgaaaataccatatgatatatgctttatgagtaaagacacagtgaatagagaatcagtatctcaccaatatcccactgcaggtcagtggcagccacaaaagaaggcataccctaagcataaargagaaattccaccctcaaaatactcatgttgttttgttagccattttctacaatctgtggccacgtgtcacaacttgaccaatttgaggacgcagaaacccctaagtttccatactcccaaggcaactgtcagcgctcagcttaagaacaacctcgtaatttaaggggaaatctaggttaccttctccacttaggtctataataagcaagctacaaatcccctaaggaaagtccaaaattgttgcttgataggaaacgccaacggcttctgcagggacagaagtgagagtctacaactctaggtcatccacccctctccttcctttttcaaatgattataaatagcattgtta

SEQ ID NO: 67285 - DNA, 1058 bp, Homo sapiens
taaacttttgtaatactctattacctccaaagcataaaacaattattgagacaaaagaaatacaatattttctaagttccaagacaaaaaaaaaacttaccaataaagaaggagctgtctgttccacaaaccaacagccacagttttttctcttaaatgtcagactttgaaaaggttgacatttctgttcaccagcatatacacgtgggccctctcttactgatgaccacagagtcctggggaccttcctgtgctcccagcccagctctcctctccggccacactgctgcctccttcacccatacactgggtggtgtgctgggctgccctccttaccacaagttttattcctcagcacacacttcagatcacagaaaggagacaaataaggtggaggaaggaagatgggttgatgtaactaggtcacttggtaatttcaatttcagacgtaaatttttctttgtttcagaattattgatctgtggaatatttcttgattcttcttggaaattacaaattaattcaaatgattgtaaagttctctgaaaggctctacagttttcttaagagaataaaaaaacctgaaaataccatatgatatatgctttatgagtaaagacacagtgaatagagaatcagtatctcaccaatatcccactgcaggtcagtggcagccacaaaagaaggcataccctaagcataaaggagaaattccaccctcaaaatactcatgttgttttgttagccattttctacaatctgtggccacgtgtcacaacttgaccaatttgaggacgcagaaacccctaagtttccatactcccaaggcaactgtcagcgctcagcttaagaacaacctygtaatttaaggggaaatctaggttaccttctccacttaggtctataataagcaagctacaaatcccctaaggaaagtccaaaattgttgcttgataggaaacgccaacggcttctgcagggacagaagtgagagtctacaactctaggtcatccacccctctccttcctttttcaaatgattataaatagcattgtta

SEQ ID NO: 67286 - DNA, 776 bp, Homo sapiens
ccttccctcctccatgttttttattatagttattttgtccctcctcaatgtaacacattactaattttctaataattattctctcatatttgctgtcttctaacccttctaatgcatttctcagtgtagctatttaattttcaattttcaataattttttctgttatacgggagttttatttcatgagtggaatattttcttacctctccgagaacattaacttttctttttctccttgtcttgatagacatttcaaaatttccttgttctgttttttgccttttcattttcaaggaattagtcaatatccattcactcataattaaaaggcaaaactactattgtacctgattggaagctctgtctgcatgagtgagtcatatcagcttcactgtacggtgacaaggcagcaacctggctgtctcatgtcagtatctggaagctctgtctttgtggcatttcaggctctccaaacaaaaaacaaaaacaaacaaacaaaaaaacgaatctaggaattgaagggggtggggcgaagagcagaacttctgactataggggttctggaaatagaactggagaacagggtgkcaaggtggggtattctaccattgattgtgtagaatttgaacactcctcatcttcagctcccagttttactcatttccgtacctcaagtctgaagcttttctggctggatttgtttggtgactaaacttcccatttttcttaggatggtgaaaagaaattgtgacttcattttgtagggaaggagtgg

SEQ ID NO: 67287 - DNA, 678 bp, Homo sapiens
agtccatggcctgttaggaacagggctgcacagcaggaggtgagtggtgggtgaatgaacattaccacctgagctctgcctcctgtcggtcagcagcggcattagattcttgtaggagtgagacccctttgtgaattgtgcatgtgagggatctagcttgcgtgctccttatgagaatctaatgcttgatgatctgtcactgtctcccattgcccacagatgggactggctagttgcaggaaaacaagctcagggctccactgattctacattataataaattatataattgtttcattatatattacaatgtaataataacagaaataaagtgcacataagtgtaatgcacttgaatcaccccgaaaaccataccccgcaccaccccgtctttggaraaattgtcttccatgaaactagtccctggtaccaaacaggttggggaccactgctgtattgtatacttgaacatttgctaatagggcagatcttgtgttaagtgatgttagcacatctaatgttttgtttaaaattttttttaatctatattaagaggttgtggattcttagatttgaacatgtgttcttagggttggccagaaatatttgtgctgaaaatgtatctttggacttctattttattgcctggagatgtttgccatttggaccaataataaa

SEQ ID NO: 67288 - DNA, 1428 bp, Homo sapiens
cctgcctgaagaaaatgtactatgtgaaaccaaaaatttacagatgaataaactaagggatgattattcatactgtaaaagagtctttaaagaattcccctaggattcttttaaaggctgagttccactagttcatgaaagtgtttgtatgcagatcattaactatttgacaggcagactggaaatgcaggtagcgagaaccaagggggaagggagttcaagtggcagaggaataactgacacctgaggatcatcaaatctctaaataaacattgataaaacaatcatgaaagtcaaagcaaaaaataggatatttacttacaagacatgctttatatactagagctgttggaggcacactatttgggttcaaatgctagcactgccacctgtttagctgtatgaccttggataggttacacaagctctctgaataccaaccttctgtgtctggaattggtgggttcttggtctcactgattcaagaatgaagccgcggaccctggcggtgagtgttacagttcttagagatggtgtgtccggggtttgttccttcaggtgttcagatgtgtccggagtttcttccttctggtgggtttgcggtttcgctgacttcaagagtgaagctgcagaccttcgcgttgagtgttacagctcttaaaggccgcgcgtctggagttgttcgttcctcctgatgagttcgtggtctccctggcttcaggtgtaaagctgcagaccttcgcggtgagtgttacagctcataaaggtggtgcagacccaaaaagtgagyagcagcaagatttactgcaaagagcaaagcacaaagagtccacagcatggaaatggatcccagcagtttgccgctcctggcttgggaggcctgctttcgttcccttatctggccccacccacatcctactgcttggtccattttatagagagctgattggtccattttacagagagctgattggtccgttttacagagagctgatgggtccgttttgacaaagcactgattggtgcgtttacaaaccttcagctagacagaaacgttcttcaggtcctcacctgacccagaagcctagccggcttcacttctcaatggcagtcgctataggactttgcagcacctagcccaggcactctggcagcccagagggaactcatctcctgatcaagcccagcaggcaccggctggctgcgctgagcgcggggccttctgagcccggcccacccgaacccgcgcaggcccctgagtgccgcttgcggccctggctcccagacgttcctctccctccacacctccccgtgagcagagggagccggctcctgcctcggccagccccagagaggggcccccacagcgcagcagcgggttgaagggctcctcaagcgcgtccagagccattggactctgaggccgag

SEQ ID NO: 67289 - DNA, 652 bp, Homo sapiens
tttagcaacaaatggataattattttataattatcattatggttgacaaatattgttttactaacactatgatttcttcagcatttattattgctgtctcaatawtttttaaaaaacttttccttactattactttattggtttattcttaaatttattgataccatgatggactcagggttacctattttatttagtggattacattccattgttattatttattttgaagatttcattataccatgtttggtcagtatgtgtaccttcaggctgattcttgtgaccttcaacacgccccgttcatgcttaaaaacttccttattctctagtataacaaaatattccatgaacatccaagagttttcctcttctagttctagaattagccattattccaaaaagcatggagaaaaatattactcagacactaatatatttgtgctaggtgtgtttactgccattggttgtcatgtgtaagctctacagatatttacatatacacatgtgctatgcgtgagagatgtatgtttccctctcatctctatccatccacccacctacctacctttccatctactataagttcatatcgatacctctgatttcagttcaacatgatagaagacattctttctttccacctttccat

SEQ ID NO: 67290 - DNA, 628 bp, Homo sapiens
tctatgtagtaacacagtcttttatgttacattgtccacaatgctatgaagtaagaatcattttttgtatactaatttataaattttccttattttttttttgagacagtctcactgtgtcactcaggctggagtacaatggtgcaatcttggctactgcaaccttcacctcccgggttcaagcgattctcctgcctcagccttcagagtagctgggattacaggcgcctgccaccatgcccagctagtttttgtatttttagtagagttggggtttcgccatgttggccagggtcgtctcgaactcctgacctcaggtgatccacccgcctcggcctcccaaagtgctgggattataggcatgagccactgtgccctgacaaattttccttaattaattcttcctsaagatcaattccattgcaaggtaaaactggttttctgacattacgtagaggactggtcttgtgacctgctatgcccaccaaaaatgccattgtgcctaatttaagactagactttaagaagcttggcaggttcctttcaccctcccatataattgccacttcaatagaaccaagtttggtgtatgttgatggatgatgtgagatacatgggggacagttca

SEQ ID NO: 67291 - DNA, 525 bp, Homo sapiens
aagcaggcctcctgaatttccccaagtgactgaacaaagcaggtcccacatgcttcacagcatgatggggaagatcttctggggcaaagcaaagatgatctgaatgacagcactgaccactggcaacctgcagagctgcccgaccaagaaattgtgagatggaagcaatgcctgcagataagaaggggaagatgaaaagccggagcaggcaaagacagtaatggaacaggccacgaatgctggagtgaggcaaatgacctccctgtcccacacccctccaagcatcctgcatctgctggagagcaatagaaaccacgtgcaggatggagacttggcaatggaggggaacagggaagtaggatatggtggtcccatagcatccgggctacaagttcctccgaagaatgtggatggtgacggtgacttaggtgcatcyttcaaatgtcctgaaggaaagattgaagcaacaaataagcaattgtgggaagaattccaaaggagtaaagaacgcacagcacaaatcca

SEQ ID NO: 67292 - DNA, 1495 bp, Homo sapiens
gtccccggctcagccggcagaggggtgtgctctgcagctggaaccacggaaggggaggaagttcacaggattctgtgttcrggtgccgggccgctccccagggctgggaggactctccggatctggaagaccaagtctgaccctgtgtggacagggatgctgccgtggagtcggggtcgaggcagtcatcctggcgcggctcctccggcctcagccttgcacctctctgtcccacaaggtggcttgaagtttgggtcagcaagcacgcagccaacacgctcctgcccgccttcccgccaggcagccatcgccaatcacccacgctccgccccgccgtggggcccatctctttccccggcttcacctccactggggctctgtgttgccggggcgggtgcggccagctctccatctcagagcagtgaacagtcctgggctccagctccagtcatgcgattccgtggcagttgtgtgacagggaccaaggagaaatcaggacatcggcaaagcctctggaagcagccgtgagctcctctgggctgacatggtgctggggtccatgtgggacagatgccctgggccctgggcagggccaggcatatacagagacgtggagccgagggaggagagggtgccgtggaccacctgacccatcaccctctgcagaggctgggatccgcctccccagcatgcaaggagcctgtagaaggcaccaggggctgcgtcttctccagcctgggtggccttggccccagatcccccatgggtctctctgacgggccagcatacggtgacctgcttccaacaaggacacctgtggcagcttcagatccttatttaaaagacattaatgccaatttattataaaaatgtacatgtttagtatgtattttacttcaaagaatactgaaagtaaaaaaaaaaaaaaattgaagaaaagttaccccaaatccctgcagccaacatcttctacatccaggcccagtggaaggataaagacaggattccaggcacgactccggaaggaaaaagggaggaggtggagatggcatacacgaccgtcagtgagatgctctgccaggtgcagcggctcatgcctgtaatcccagcacttttagaggctgaagcaggaagatcgcttgaggccagaagttcgagaccagcccaggcaacatagcaagtccccatctatacaaaaaatttaatggctgggggcggtggctcatgcctgtaatcccagcactttgggaggctaaggcggacggatcacctgaggtcaggagttcgagaccaggctggccaacatggagaaacctctctactaaagacacaaaaattagccgggcgtggtggctgtaaccccagctacttgggaggctagggcaggagaattgtttgaacccgggatgcagaggttgcagtgagccgagattgtgccactgcactccaggctgggcgacagagcgagaccctgtctcaaaaaaaaccaagcaaa

SEQ ID NO: 67293 - DNA, 1495 bp, Homo sapiens
gtccccggctcagccggcagaggggtgtgctctgcagctggaaccacggaaggggaggaagttcacaggattctgtgttcgggtgccgggccgctccccagggctgggaggactctccggatctggaagaccaagtctgaccctgtgtggacagggatgstgccgtggagtcggggtcgaggcagtcatcctggcgcggctcctccggcctcagccttgcacctctctgtcccacaaggtggcttgaagtttgggtcagcaagcacgcagccaacacgctcctgcccgccttcccgccaggcagccatcgccaatcacccacgctccgccccgccgtggggcccatctctttccccggcttcacctccactggggctctgtgttgccggggcgggtgcggccagctctccatctcagagcagtgaacagtcctgggctccagctccagtcatgcgattccgtggcagttgtgtgacagggaccaaggagaaatcaggacatcggcaaagcctctggaagcagccgtgagctcctctgggctgacatggtgctggggtccatgtgggacagatgccctgggccctgggcagggccaggcatatacagagacgtggagccgagggaggagagggtgccgtggaccacctgacccatcaccctctgcagaggctgggatccgcctccccagcatgcaaggagcctgtagaaggcaccaggggctgcgtcttctccagcctgggtggccttggccccagatcccccatgggtctctctgacgggccagcatacggtgacctgcttccaacaaggacacctgtggcagcttcagatccttatttaaaagacattaatgccaatttattataaaaatgtacatgtttagtatgtattttacttcaaagaatactgaaagtaaaaaaaaaaaaaaattgaagaaaagttaccccaaatccctgcagccaacatcttctacatccaggcccagtggaaggataaagacaggattccaggcacgactccggaaggaaaaagggaggaggtggagatggcatacacgaccgtcagtgagatgctctgccaggtgcagcggctcatgcctgtaatcccagcacttttagaggctgaagcaggaagatcgcttgaggccagaagttcgagaccagcccaggcaacatagcaagtccccatctatacaaaaaatttaatggctgggggcggtggctcatgcctgtaatcccagcactttgggaggctaaggcggacggatcacctgaggtcaggagttcgagaccaggctggccaacatggagaaacctctctactaaagacacaaaaattagccgggcgtggtggctgtaaccccagctacttgggaggctagggcaggagaattgtttgaacccgggatgcagaggttgcagtgagccgagattgtgccactgcactccaggctgggcgacagagcgagaccctgtctcaaaaaaaaccaagcaaa

SEQ ID NO: 67294 - DNA, 1495 bp, Homo sapiens
gtccccggctcagccggcagaggggtgtgctctgcagctggaaccacggaaggggaggaagttcacaggattctgtgttcgggtgccgggccgctccccagggctgggaggactctccggatctggaagaccaagtctgaccctgtgtggacagggatgctgccgtggagtcggggtcgaggcagtcatcctggcgcggctcctccggcctcagccttgcacctctctgtcccacaaggtggcttgaagtttgggtcagcaagcacgcagccracacgctcctgcccgccttcccgccaggcagccatcgccaatcacccacgctccgccccgccgtggggcccatctctttccccggcttcacctccactggggctctgtgttgccggggcgggtgcggccagctctccatctcagagcagtgaacagtcctgggctccagctccagtcatgcgattccgtggcagttgtgtgacagggaccaaggagaaatcaggacatcggcaaagcctctggaagcagccgtgagctcctctgggctgacatggtgctggggtccatgtgggacagatgccctgggccctgggcagggccaggcatatacagagacgtggagccgagggaggagagggtgccgtggaccacctgacccatcaccctctgcagaggctgggatccgcctccccagcatgcaaggagcctgtagaaggcaccaggggctgcgtcttctccagcctgggtggccttggccccagatcccccatgggtctctctgacgggccagcatacggtgacctgcttccaacaaggacacctgtggcagcttcagatccttatttaaaagacattaatgccaatttattataaaaatgtacatgtttagtatgtattttacttcaaagaatactgaaagtaaaaaaaaaaaaaaattgaagaaaagttaccccaaatccctgcagccaacatcttctacatccaggcccagtggaaggataaagacaggattccaggcacgactccggaaggaaaaagggaggaggtggagatggcatacacgaccgtcagtgagatgctctgccaggtgcagcggctcatgcctgtaatcccagcacttttagaggctgaagcaggaagatcgcttgaggccagaagttcgagaccagcccaggcaacatagcaagtccccatctatacaaaaaatttaatggctgggggcggtggctcatgcctgtaatcccagcactttgggaggctaaggcggacggatcacctgaggtcaggagttcgagaccaggctggccaacatggagaaacctctctactaaagacacaaaaattagccgggcgtggtggctgtaaccccagctacttgggaggctagggcaggagaattgtttgaacccgggatgcagaggttgcagtgagccgagattgtgccactgcactccaggctgggcgacagagcgagaccctgtctcaaaaaaaaccaagcaaa

SEQ ID NO: 67295 - DNA, 964 bp, Homo sapiens
cttaaaaataatctgatataaatatgatttaataaatatattttccrtgccaaataatagtgaagaaagaaatgcagcaaagtgtacaggcctacgccaaacatggaagacttggtggtagagaagattagtgtcgttgaatggcttataagcacaaccttattcagcctaaaatcccaaaaaaccattactgcccagtaagaaagtgaaatggtcctaggaagtcttaaaccactcttttcttatgagattaaaatgctcattggcacaaatttaccatcaacgtcaatttaatccacattaagaagaaactggagaataaacttcgagaatgaccatgctaatcattcccttgatcagatgaggaattcaaaactgcaggttaggtggtcagcacttacttcacactgatcaggtctgtgctatgcgggttactgcagggctgatcatctaggtcaagcataactatctcaaaatgttttttatggcttctttgcttcatttgaggatgcaggttaagatgttttatgtacttctcctgattaagcacctgatgtttctgatcatccataaatgtattaatagatgttcatcttttctcacatacgcattattccttgtaaagttagctctcctgtagtcaatgcagtggtagactcaacagatgattttgtcttcttcgtagattgttctaaatactgaggtctagaagtctagaaaacaactaatagtctagaaaacaacaataatgttcacttggtactatcaaaattagtcttttttgtggcaagtccagaactactctagtatattctgccagacattatgaaccaaaactgttcaccagaacataaaacaaatgacatagagaagtccagcagaataaaccatgtgcagaatatctttggaatgagctgatgagaactcattgagaataccagactagtgttcatagcacatatat

SEQ ID NO: 67296 - DNA, 938 bp, Homo sapiens
tgcatgaacacacacacacaaaagttcctagctatctatcgtaaatggcaaaaaagaaatccagtgcattctctcaataagcaatgctttccctaaaaccaatcagttatgtaactcaaccacagtctccttttttaaagttcctacaatacacccctccaccaccacccagattaagctaggttcataaagaaaaataatgagaaagagaygtggatggagcctagatccaggtaatgagcacaaagcttaatgggcctgaggcaatgttatggttctattcagagtaatggaaggactaaaagttccttttgggaagattattcacatagctttcaaggtaattctaaaccttttgcttcacgaaacaagtggtaagggccaaaaacacttcatgcaaaatgcacagaacatgctgctcagccctggtcaacctaaatggctctttgtgttttaaaatctaacatatttttttttctgaaaaagcattatgtaaggatgattttagtttatttttatcattactcaatgagttaagctataagcatttgaatcagagtatctttaaggcatgtgagaagaaatcaacgtgttttgaatgtctgcatgtgtgtttacatacacgagagagagactcactgactgaatgaatggatgactgatttccagaggagggaaggttgtacgatttttcttctttttaaaataatttaagattctatagtacattttgcctcctgagatcctaaagcaagtacttatgaagctagctctctagatacccttcatagtcataataaagcttctgcccacatgatagggtaaattctgctgaatcagtgggagaggggaaacggaaatacacaacaaaaaaatgaggaaaggggaaaaaagactttgagcctgaaaatgtacttcaaaagttttctagagttgac

SEQ ID NO: 67297 - DNA, 938 bp, Homo sapiens
tgcatgaacacacacacacaaaagttcctagctatctatcgtaaatggcaaaaaagaaatccagtgcattctctcaataagcaatgctttccctaaaaccaatcagttatgtaactcaaccacagtctccttttttaaagttcctacaatacacccctccaccaccacccagattaagctaggttcataaagaaaaataatgagaaagagatgtggatggagcctagatccaggtaatgagcacaaagcttaatgggcctgaggcaatgttatggttctattcagagtaatggaaggactaaaagttccttttgggaagattattcacatagctttcaaggtaattctaaaccttttgcttcacgaaacaagtggtaagggccaaaaacacttcatgcaaaatgcacagaacatgctgctcagccctggtcaacctaaatggctctttgtgttttaaaatctaacatatttttttttctgaaaaagcattatgtaaggatgattttagtttatttttatcattactcaatgagttaagctataagcatttgaatcagagtatctttaaggcatgtgagaagaaatcaacgtgttttgaatgtctgcatgtgtgtttacrtacacgagagagagactcactgactgaatgaatggatgactgatttccagaggagggaaggttgtacgatttttcttctttttaaaataatttaagattctatagtacattttgcctcctgagatcctaaagcaagtacttatgaagctagctctctagatacccttcatagtcataataaagcttctgcccacatgatagggtaaattctgctgaatcagtgggagaggggaaacggaaatacacaacaaaaaaatgaggaaaggggaaaaaagactttgagcctgaaaatgtacttcaaaagttttctagagttgac

SEQ ID NO: 67298 - DNA, 861 bp, Homo sapiens
ttggcacatgattgtaatcccatctactcaggaggctgagttgagaggatcacttaagcccagaaggttcaaaaggctgcagtgagccatgatcatgccagtgcattccagcctgggcatcagagtgagaccctgtcttacataaataaatattaaaaaaaaaaaaagmcctagatcagttgtctccaagatggagtacccttactgcaaaggtttctgaaagaatataataaaacctctaaataaacattttaaaaactcatttgctttgtaaatatgtgtatatgtaggtgtgtatatatgtaattatgtatatgtacacatatgtaaacagcatataatgtctaagtttatataggatatatatatataatatatataacaacaatatatatgaatatatagtgaggaagaaagagggaaaatgagtagttatttttactagagggaatattcaatcaaaaatccagaaacctctgatctagatgaaaatctcatactctgtcagttccttaaaccttctatgatacttctgagctggatggtgacttgaacataagtatctggctctgttctttctccctatctccaccctgctgattccctgttagaaaaactaacaaaatagaacagagaaaacactgcaacaaaactggaaaccaaagaagcaccaaggtccttagaccagcaacttggaggaatttctactagaaatggtctgcgcatggccagatcaaaggcaggccaactgaatctctgtatgtgtgggaatagcctgtctggtctgtaagaagaaacttcagcaaaaaacaaaaaacaccctctcattaagtgaggcaatcagatggtatatgtggatcc

SEQ ID NO: 67299 - DNA, 861 bp, Homo sapiens
ttggcacatgattgtaatcccatctactcaggaggctgagttgagaggatcacttaagcccagaaggttcaaaaggctgcagtgagccatgatcatgccagtgcattccagcctgggcatcagagtgagaccctgtcttacataaataaatattaaaaaaaaaaaaagacctagatcagttgtctccaagatggagtacccttactgcaaaggtttctgaaagaatawaataaaacctctaaataaacattttaaaaactcatttgctttgtaaatatgtgtatatgtaggtgtgtatatatgtaattatgtatatgtacacatatgtaaacagcatataatgtctaagtttatataggatatatatatataatatatataacaacaatatatatgaatatatagtgaggaagaaagagggaaaatgagtagttatttttactagagggaatattcaatcaaaaatccagaaacctctgatctagatgaaaatctcatactctgtcagttccttaaaccttctatgatacttctgagctggatggtgacttgaacataagtatctggctctgttctttctccctatctccaccctgctgattccctgttagaaaaactaacaaaatagaacagagaaaacactgcaacaaaactggaaaccaaagaagcaccaaggtccttagaccagcaacttggaggaatttctactagaaatggtctgcgcatggccagatcaaaggcaggccaactgaatctctgtatgtgtgggaatagcctgtctggtctgtaagaagaaacttcagcaaaaaacaaaaaacaccctctcattaagtgaggcaatcagatggtatatgtggatcc

SEQ ID NO: 67300 - DNA, 861 bp, Homo sapiens
ttggcacatgattgtaatcccatctactcaggaggctgagttgagaggatcacttaagcccagaaggttcaaaaggctgcagtgagccatgatcatgccagtgcattccagcctgggcatcagagtgagaccctgtcttacataaataaatattaaaaaaaaaaaaagacctagatcagttgtctccaagatggagtacccttactgcaaaggtttctgaaagaatataataaaacctctaaataaacattttaaaaactcatttgctttgtaaatatgtgtatatgtaggtgtgtatatatgtaattatgtatatgtacacatatgtaaacagcatataatgtctaagtttatataggatatatatatataatatatataacamcaatatatatgaatatatagtgaggaagaaagagggaaaatgagtagttatttttactagagggaatattcaatcaaaaatccagaaacctctgatctagatgaaaatctcatactctgtcagttccttaaaccttctatgatacttctgagctggatggtgacttgaacataagtatctggctctgttctttctccctatctccaccctgctgattccctgttagaaaaactaacaaaatagaacagagaaaacactgcaacaaaactggaaaccaaagaagcaccaaggtccttagaccagcaacttggaggaatttctactagaaatggtctgcgcatggccagatcaaaggcaggccaactgaatctctgtatgtgtgggaatagcctgtctggtctgtaagaagaaacttcagcaaaaaacaaaaaacaccctctcattaagtgaggcaatcagatggtatatgtggatcc

SEQ ID NO: 67301 - DNA, 1523 bp, Homo sapiens
aaaaaaatagcaagtcatggtggcacacacctggagtcccagctactcgagaggctgaggcaggaggatcacttgatctctggagtttgaggctgcagtgagccatgattgcaccactgcactccagcctgggccacagagcaagaactcatctcaaaaaataaaaattaaaaaaaaagtggtcagcatgaggggtcagaagcagaaatacaaagatacattatcctcaagtcaaggcagaatgtgacagttgtcataattcatgcacaaagaaagctgtgggtcttcagaagacagtaaggccacatcctgtgagattttaaaaaaatggtaaaagaaaaccaatggttgtggttcaaagtgctcaaaaacctaaggttagataggagtgtcagatattgagcaaatgtgatcctgttgttttaattttgcatttttgttttgagtattggtggtgtgtttgagccattcccttaaaaagtaaaggatatgcatcctttttattttatcaatagatacagctttcttgtagcaagaaaggattatttgcagacacaaaaatatttattttctcttcattttcaaagtacttgcctcaggcttggaattcactttccatcatgaaagtggaatagagaaaatccccctttattccttttgttattgcaaatttgaacataactttcatgtctgtcattatactagccattttgagcacttatgtgtcagaccctgggctggggcctttagtgacaggatcctacttaatcttcccattttacagatgaggaaacagaagctcaaattgcttaactggtccaagatcccaagagacttaaaccagggatgtctggtgtggaggcccaagcaccttcagtttcacttcactgcttgggactggtactccctcaggtcacaytgggactatgcccacatgaaccacctttgcaagattatggtggtaagagaaatctgacatagctgacgccatcttgcttctgacctctaagctgtccttgatgattcctgcgcataggccaagctaactttgggagaagtttagtttatagtttaacttgaaggcaaagatgaccatagtctctccctaaaattaacgccctccttgtttagggactgaaaaccacctttgtgagtctaataagagagcatgagaataggattatgggaagggcatgaactctgctaaaatgtaagtatagtttctataatcccttactgctcagaagtcctgtagccaggagtcacaaggtttgtgatttcctcagttgcgcctatagacaacattgctattgaaaaaccgaagattggtttttggagatatttctcaaactgaccctacccagactcatgactcatgactcaactggtcttgtggccctacacccctatgatttcattcacaacaaatcagcagcacccatttcctagtcccctgcccaccaaatcacccacaaaacccctgacctctgagcctttaggaagactgttttgagagataacct

SEQ ID NO: 67302 - DNA, 607 bp, Homo sapiens
tctttctttcctttctttctttctttctttctatctttctttctttctttctttctttctttctttctttctttctgtttcgtccttttgagacagagtttcactcttgtttccacggctagagtgcaatggcgcgatcttggctcaccgcaccttccgcctcccgggttcgagcgcttctcctgcctcagcctcccgattagcggggatkacagggaggcacccccacgcctggcttggctgatgtttgtgtttttagtaggcacgccgtgtctctccatgttgctcaggctggtctccaactcccgacctcctgtgatgcgcccacctcggcctctcgaagtgctgggatgacgggcgtgagccaccgtgcccggcctgttgactcatttcgcttttttatttctttcgtttccacgcgtttacttatatgtattaatgtaaacgtttctgtacgcttatatgcaaacaacgacaacgtgtatctctgcattgaatactcttgcgtatggtaaatacgtatcggttgtatggaaatagacttctgtatgatagatgtaggtgtttgtgttatacaaataaatacacatcgctctataaagaaggg

SEQ ID NO: 67303 - DNA, 1231 bp, Homo sapiens
ataagctttttgatatgctgctggattcggtttgccagtattttattgaggatttttgcatagatcttcatcggagatattggtctaaaattctctttttttgttgtgtctctgccaggctttggtatcaggatgatgctgtcctcataaaatgagttagggaggttccctctttttctattgattggaatagtttcagaaggaatggtaccagctcctccttgtacctctggtagattttggctgtgaatccatctggtcctggactttttctggttggaaagctaattattaattattgcctcaatttcagagcctgttattggtctattcagagattcaaattcttcctggtttagtcttgggtgggtgtatgtgtcgaggaatttatccatttcttctagattttctagtttatttgcatagaggtgtttatagtattctctgatggtagtttgtatttctgtgggatcggtggtgatatccccttgggtttaataaacagataacatcaaacattcaactaatccaataaaaagaaattttattcatttgagaatgtgttttccagagcatacttatatattacgttttaacttcataatttatattttataaaaacataactaattcaagttaatcttctctaatttttaattcaattgaatttttatcaggatcactatatttaaacaaaaattacttgaatttttcacatcataatttatagattctgcttctacaaattgtctgtagggaccattatttctacayggtctactttcctgggttaagtggtggatacccaaatgttttttggaataatgttttcttatatcagtttttagtcagtgatacgttgcaccatgtttaattttaagcattatcagttttcttttttttttttaattgatcattcttgggtgtttctcgcagagggggatttggcagggtcacaggacaatagtggagggaaggtcagcagataaacaagtgaacaaaggtctctggttttcctaggcagaggaccctgtggccttccgcagtgtttgtgtccctgggtacttgagattagggagtggtgatgactcttaaggagcatgctgccttcaagcatctgtttaacaaagcacatcttgcaccgcccttaatccattcaaccctgagtggatacagcccatgtttcagagagcacagggttgggggtaaggtcacagatcaacaggatccc

SEQ ID NO: 67304 - DNA, 1797 bp, Homo sapiens
cttactgggaattcctcgttcatggggaataattgcaatccccgatccccatcacgaatggggttcaacgggttacccgcgcctgccggcgtagggtaggcacacgctgagccagtcagtgtagcgcgcgtgcagccccggacatctaagggcatcacagacctgttattgctcaatctcgggtggctgaacgccacttgtccctctaagaagttgggggacgccgaccgctcgggggtcgcgtaactagttagcatgccagagtctcgttcgttatcggaattaaccagacaaatcgctccaccaactaagaacggccatgcaccaccacccacggaatcgagaaagagctatcaatctgtcaatcctgtccgtgtccgggccgggtgaggtttcccgtgttgagtcaaattaagccgcaggctccactcctggtggtgcccttccgtcaattcctttaagtttcagctttgcaaccatactccccccggaacccaaagactttggtttcccggaagctgcccggcgggtcatgggaataacgccgccgcatcgccggtcggcatcgtttatggtcggaactacgacggtatctgatcgtcttcgaacctccgactttcgttcttgattaatgaaaacattcttggcaaatgctttcgctctggtccgtcttgcgccggtccaagaatttcacctctagcggcgcaatacgaatgcccccggccgtccctcttaatcatggcctcagttccgaaaaccaacaaaatagaaccgcggtcctattccattattcctagctgcggtatccaggcggctcgggcctgctttgaacactctaattttttcaaagtaaacgcttcgggccccgcgggacactcagctaagagcatcgagggggcgccgagaggcaaggggcggggacgggcggtggctcgcctcgcggcggaccgcccgcccgctcccaagatccaactacgagctttttaactgcagcaactttaatatacgctattggagctggaattaccgcggctgctggcaccagacttgccctccaatggatcctcgttaaaggatttaaagtggactcattccaattacagggcctcgaaagagtcctgtattgttatttttcgtcactacctccccgggtcgggagtgggtaatttgcgcgcctgctgccttccttggatgtggtagccgtttctcaggctccctctccggaatcgaaccctgattccccgtcacccgtggtcaccatggtaggcacggcgactaccatcgaaagttgatagggcagacgttcgaatgggtcgtcgccgccacggggggcgtgcgatcggcccgaggttatctagagtcaccaaagccgccggcgcccgccccccggccggggccggagaggggctgaccgggttggttttgatctgataaatgcacgcatcccccccgcgaagggggtcagcgcccgtcggcatgtattagctctagaattaccacagttatccaagtaggagaggagcgagcgaccaaaggaaccataactgatttaatgagccattcgcagtttcactgtaccggccgtgcgtacttagacatgcatggcttaatctttgagacaagcatatgctactggcaggatcaaccaggtaggtaggtagagcgcggcgaggccccgacgcggccggacggccggccggggggcctcgcgaggacggscccggcgccccgcaagcgaggaggacgacggacggacggacgggccgcggacgggcggacgggagggagcgagcgggc

SEQ ID NO: 67305 - DNA, 1405 bp, Homo sapiens
ctctctctctgtctgtctgtccgtctgtctgtctcggtctctggctctcgctatctcccgccctctctttttttgcaaaagaagctcaagtacatctaatctcatcccttaccaaggcctgaattcttcacttctgacatcccagatttgatctccctacagaatgctgtacagaactggcgagttgatttctggacttggatacctcatagaaactacatatgaataaagatccaatcctaaaatctggggtggcttctccctcgactgtctcgaaaaatcgtacctctgttcccctaggatgccggaagagttttctcaatgtgcatctgcccgtgtcctaagtgatctgtgaccgagccctgtccgttctgtctcaaatatgtacgtgcaaacacttctctccatttccacaactacccacggccccttgtggaaccactggctctttgaaaaaaatcccagaagtggttttggctttttggctaggaggcctaagcctgctgagaactttcctgcccaggatcctgtgtgaccaaaagtgcctctgctgggagctgggatcctcgggaccatgcttgctagcgctggatgagtctctggaaggacgcacgggactccgcaaagctgacctgtcccaccgaggtcaaatggatacctctgcattggcccgaggcctccgaagtacatcaccgtcaccaaccgtcaccgtcagcatccttgtgagcctgcccaaggccccgcctccggggagactcttgggagcccggccttcgtcggctaaagtccaaagggatggtgacttccacccacaaggtccccactgaacggcgaagatgtggagcgtaggtcagagaggggaccaggaggggagacgtcccgacaggcgaygagttcccaaggctctggccaccccacccacgccccacgccccacgtcccgggcacccgcgggacaccgccgctttatcccctcctctgtccacagccggccccaccccaccacgcaacccacgcacacacgctggaggttccaaaaccacacggtgtgactagagcctgacggagcgagagcccatttcacgaggtgggaggggtgggggtggggtgggttgggggttgtggggtctgtggcgagcccgattctccctcttgggtggctacaggctagaaatgaatatcgcttcttgggcggaggggcttccttaggccatcaccgcttgcgggactacctctcaaaccctcccttgaggccacaaaatagattccaccccacccatcgacgtttacccccgggtgctggatgtatcctgtcaagagacctgagcctgacaccgtcgaaattaaaccccttgcctggctttgtgtgtttgtttgtttataaaatggagtcttgctctgtcccc

SEQ ID NO: 67306 - DNA, 1405 bp, Homo sapiens
ctctctctctgtctgtctgtccgtctgtctgtctcggtctctggctctcgctatctcccgccctctctttttttgcaaaagaagctcaagtacatctaatctcatcccttaccaaggcctgaattcttcacttctgacatcccagatttgatctccctacagaatgctgtacagaactggcgagttgatttctggacttggatacctcatagaaactacatatgaataaagatccaatcctaaaatctggggtggcttctccctcgactgtctcgaaaaatcgtacctctgttcccctaggatgccggaagagttttctcaatgtgcatctgcccgtgtcctaagtgatctgtgaccgagccctgtccgttctgtctcaaatatgtacgtgcaaacacttctctccatttccacaactacccacggccccttgtggaaccactggctctttgaaaaaaatcccagaagtggttttggctttttggctaggaggcctaagcctgctgagaactttcctgcccaggatcctgtgtgaccaaaagtgcctctgctgggagctgggatcctcgggaccatgcttgctagcgctggatgagtctctggaaggacgcacgggactccgcaaagctgacctgtcccaccgaggtcaaatggatacctctgcattggcccgaggcctccgaagtacatcaccgtcaccaaccgtcaccgtcagcatccttgtgagcctgcccaaggccccgcctccggggagactcttgggagcccggccttcgtcggctaaagtccaaagggatggtgacttccacccacaaggtccccactgaacggcgaagatgtggagcgtaggtcagagaggggaccaggaggggagacgtcccgacaggcgatgagttcccaaggctctggccaccccacccacgccccacgccccacgtcccgggcacccgcgggacaccgccsctttatcccctcctctgtccacagccggccccaccccaccacgcaacccacgcacacacgctggaggttccaaaaccacacggtgtgactagagcctgacggagcgagagcccatttcacgaggtgggaggggtgggggtggggtgggttgggggttgtggggtctgtggcgagcccgattctccctcttgggtggctacaggctagaaatgaatatcgcttcttgggcggaggggcttccttaggccatcaccgcttgcgggactacctctcaaaccctcccttgaggccacaaaatagattccaccccacccatcgacgtttacccccgggtgctggatgtatcctgtcaagagacctgagcctgacaccgtcgaaattaaaccccttgcctggctttgtgtgtttgtttgtttataaaatggagtcttgctctgtcccc

SEQ ID NO: 67307 - DNA, 1405 bp, Homo sapiens
ctctctctctgtctgtctgtccgtctgtctgtctcggtctctggctctcgctatctcccgccctctctttttttgcaaaagaagctcaagtacatctaatctcatcccttaccaaggcctgaattcttcacttctgacatcccagatttgatctccctacagaatgctgtacagaactggcgagttgatttctggacttggatacctcatagaaactacatatgaataaagatccaatcctaaaatctggggtggcttctccctcgactgtctcgaaaaatcgtacctctgttcccctaggatgccggaagagttttctcaatgtgcatctgcccgtgtcctaagtgatctgtgaccgagccctgtccgttctgtctcaaatatgtacgtgcaaacacttctctccatttccacaactacccacggccccttgtggaaccactggctctttgaaaaaaatcccagaagtggttttggctttttggctaggaggcctaagcctgctgagaactttcctgcccaggatcctgtgtgaccaaaagtgcctctgctgggagctgggatcctcgggaccatgcttgctagcgctggatgagtctctggaaggacgcacgggactccgcaaagctgacctgtcccaccgaggtcaaatggatacctctgcattggcccgaggcctccgaagtacatcaccgtcaccaaccgtcaccgtcagcatccttgtgagcctgcccaaggccccgcctccggggagactcttgggagcccggccttcgtcggctaaagtccaaagggatggtgacttccacccacaaggtccccactgaacggcgaagatgtggagcgtaggtcagagaggggaccaggaggggagacgtcccgacaggcgatgagttcccaaggctctggccaccccacccacgccccacgccccacgtcccgggcacccgcgggacaccgccgctttatcccctcctctgtccacagccggccccaccccaccacgcaacccacgcacacacgctggaggttccaaaaccacacggtgtgactagagcctgacggagcgagagcccatttcacgaggtgggaggggtgggggtkgggtgggttgggggttgtggggtctgtggcgagcccgattctccctcttgggtggctacaggctagaaatgaatatcgcttcttgggcggaggggcttccttaggccatcaccgcttgcgggactacctctcaaaccctcccttgaggccacaaaatagattccaccccacccatcgacgtttacccccgggtgctggatgtatcctgtcaagagacctgagcctgacaccgtcgaaattaaaccccttgcctggctttgtgtgtttgtttgtttataaaatggagtcttgctctgtcccc

SEQ ID NO: 67308 - DNA, 2416 bp, Homo sapiens
  misc_feature (1)...(2416): n = A,T,C or G
ctcaccgcaccttccgcctcccgggttcgagcgcttctcctgcctcagcctcccgattagcggggatgacagggaggcacccccacgcctggcttggctgatgtttgtgtttttagtaggcacgccgtgtctctccatgttgctcaggctggtctccaactcccgacctcctgtgatgcgcccacctcggcctctcgaagtgctgggatgacgggcgtgagccaccgtgcccggcctgttgactcatttcgcttttttatttctttcgtttccacgcgtttacttatatgtagtaatgtaaacgtttctgtacgcttatatgcaaacaacgacaacgtgtatctctgcattgaatactcttgcgtatggtaaatacgtatcggttgtatggaaatagacttctgtatgatagatgtaggtgtttgtgttatacaaataaatacacatcgctctataaagaagggatcgtcgataaagacgtttattttacgtatgaaaagcgtcgtatttatgtgtgtaaatgaacgagcgtacgtagttatctctgtttcctttcttcctctccttcgtgtttttcttccttcctttcttcctttctctccttctttaggtttttcttcctctcttcctttccttctttctctctttctgtccttttttccttcgtgctttatttctctttcgttccctgtctttccttcttttttctttcctctctgtttctttttcccttctttccttcgtttctttcctcattctttctctctttttcgtgtttctttcctttccgcctgtcttttaaaaaatggagtgtttcagaagtttactttgtgtatctacgttttctaaattgtctctcttttctccattttcttcctccctccctccctccctccctccctgannnnnnnnnnnnnnnnnnnnnnnnnnnnnnnnnnnnnnnnnnnnnnnnnnnnnnnnnnnnnnnnnnnnnnnnnnnnnnnnnnnnnnnnnnnnnnnnnnnnaaaaaacccaaccaccagccaagccagggttgggggtgcatcccggtaatcccccctaatcggaaggttaaggcagaaaaaacacaaaaaccgggaaggcgaaaaaaaaaataagcaaagattgggtcattgcctccctccctccctccctccctccctgcttccgagaggcatctccaaacacccacgcgccgtgggttgtcttctgactctgtcgcggtcgaggcagagacgcgttttgggcaccgtttgtgtggggttggggcagaggggctgcgttttcggcctcgggaagagcttctcgactcacggtttcgctttcgcggtccacgggccgccctgccagccggatctgtctcgctgacgtccgcggcggttgtcgggctccatctggcggccgctttgagatcgtgctctcggcttccggagctgcggtggcagctgccgagggaggggaccgtccccgctgtgagctaggcagagctccggaaagcccgcggtcgtcagcccggctggcccggtggcgccagagctgtggcgcgtsgcttgtgagtcacagctctggcgtgcaggtttatgtgggggagaggctgtcgctgcgcttctgggcccgcggcgggcgtggggctgcccgggccggtcgaccagcgcgccgtagctcccgaggcccgagccgcgacccgcggggacccgccgcgcgtggcgcgggaggctggggacgcccttcccggcccggtcgcgggtccgcgctcatcctggccgtctgaggcggcggccgaattcgtttccgagtccccgtggggagccggggaccgtcccgcccccgtcccccgggtgccggggagcggtccccgggccgggccgcggtccctctgccgcgatcctttctggcgagtccccgtgcggagtcggagagcgctccctgagcgcgcgtgcggcccgagaggtcgcgcctggccggccttcggtccctcgtgtgtcccggtcgtaggaggggccggccgaaaatgcttccggctcccgctctggagacacgggccggccccctgcgtgtggcacgggcggccgggagggcgtccccggcccggcgctgctcccgcgtgtgtcctggggttgaccagagggccccgggcgctccgtgtgtggctgcgatggtggcgtttttggggacaggtgtccgtgtcgcgcgtcgcctgggccggcggcgtggtcggtgacgcgacctcccggccccgggggaggtatatctttcgctccgagtcggcattttgggccgccgggttattgctgacacgctgtcctctggcgacctgtcgctggagaggttgggcctccggatgcgcgcggggctctggcctaccggtgacccggctagccggccgcgctcctgcttgagccgcctgccggggccc

SEQ ID NO: 67309 - DNA, 535 bp, Homo sapiens
gactttcactttgttgtttttcytccttgtcgcgtaaaaggcattcactgctcttttattttggtgctctgtggatgttcgaagggtggggaaaaagtggtccacgaatgtgattggtttcatgagagacacgagagacaaaagaacatatgatgattacttcgctaaatgccctgtttattctttcaactgcactcatacaagtaaggacgcagttggtgggttgagagatctctgtgtagtcatgactctgcaattatacttgacgagagcggtgatgatgaacgggcggcatggaaacctgcccttctttggtgtcagttgagcacagtgagaagagattcacaatggcctgtatctcaacctgatggtactgtgtttctgctctgatctttaggaatgagagaagcattcccgtgcattcctgcaacgtccttgaagttttctttttaaacttttcgattaactaacgtatttattaatttatttgagatggagtcttgttctgttggtcaggccatggcgcagtatcggg

SEQ ID NO: 67310 - DNA, 535 bp, Homo sapiens
gactttcactttgttgtttttcctccttgtcgcgtaaaaggcattcactgctcttttattttgrtgctctgtggatgttcgaagggtggggaaaaagtggtccacgaatgtgattggtttcatgagagacacgagagacaaaagaacatatgatgattacttcgctaaatgccctgtttattctttcaactgcactcatacaagtaaggacgcagttggtgggttgagagatctctgtgtagtcatgactctgcaattatacttgacgagagcggtgatgatgaacgggcggcatggaaacctgcccttctttggtgtcagttgagcacagtgagaagagattcacaatggcctgtatctcaacctgatggtactgtgtttctgctctgatctttaggaatgagagaagcattcccgtgcattcctgcaacgtccttgaagttttctttttaaacttttcgattaactaacgtatttattaatttatttgagatggagtcttgttctgttggtcaggccatggcgcagtatcggg

SEQ ID NO: 67311 - DNA, 535 bp, Homo sapiens
gactttcactttgttgtttttcctccttgtcgcgtaaaaggcattcactgctcttttattttggtgctctgtggatgttcgaagggtggggaaaaagtggtccacgaatgtgattggtttcatgagagacacgagagacaaaagaacatatgatgattacttcgctaaatgccctgtttattctttcaactgcactcatacaagtaaggacgcagttggtgggttgagagatctctgtgtagtcatgactctgcaattatacttgacgagagcggtgatgatgaacrggcggcatggaaacctgcccttctttggtgtcagttgagcacagtgagaagagattcacaatggcctgtatctcaacctgatggtactgtgtttctgctctgatctttaggaatgagagaagcattcccgtgcattcctgcaacgtccttgaagttttctttttaaacttttcgattaactaacgtatttattaatttatttgagatggagtcttgttctgttggtcaggccatggcgcagtatcggg

SEQ ID NO: 67312 - DNA, 419 bp, Homo sapiens
tcccttgcctcttccagtttctgttgcctccacatatttccgagcttgtgttcacatcactccaatctctgcctctgttttcacatcactttcttctctgcgtgtctatgtcttctcttctgttcaccctstctctaccaattagcccaggataaatgccatcagaaaaggtatggctttcaagatctagtcattgataaaaagaaatataacttttggaagcccttttgtataaagaaaaagcactcaacttgaagttaaaaggcataggtatgagtcttgactctaccccctgacataggatcaatcatttaacttctctgaggctctgcatctttatctgaaaagcccaggaagaagagggttgttaaaatccaccgaagatcagattctataaacaaaaactctttgttaaatta

SEQ ID NO: 67313 - DNA, 419 bp, Homo sapiens
tcccttgcctcttccagtttctgttgcctccacatatttccgagcttgtgttcacatcactccaatctctgcctctgttttcacatcactttcttctctgcgtgtctatgtcttctcttctgttcaccctctctctaccaattagcccaggataaatgccatcagaaaaggtatggctttcaagatctagtcattgataaaaagaaatataacttttggaagcccttttgtataaagaaaaagcactcaacttgaagttaaaaggcataggtatgagtcttgactctaccccctgacataggatcaatcatttaacttcyctgaggctctgcatctttatctgaaaagcccaggaagaagagggttgttaaaatccaccgaagatcagattctataaacaaaaactctttgttaaatta

SEQ ID NO: 67314 - DNA, 764 bp, Homo sapiens
tcgggaggctgaggcaggagaatttattgaacccaggagattgcagtgagccgaggtcgtgccactgcaccccagcctgggcgacagcgcgagactccgtctcaaaaaaaaaaaaaaaaaaaatcaatatcttaaagggtaagagcagcacctgcggggctctcacagggtgcatacagggcttctttcgtgcatgggcacaggaagcactgccatacacaggtgatggcccaatgtctgcctgcaatgcagggagctggacacgtacaggtgattctcgtggcgggctatggggcggggcacacagcgacaagagtccaggcagccagccggcagggacagggagtacaaagaagcgaaaacaggatggcacaggaagaacgaagcacagctttccaggcggcaaagacagggagaactgggggagctgggagtggggctcgtactttgccaggtgacaggaagaggaaggcattccaggctgaggggtcagcttgagtaaagccacacagatgaggtgtggagagcaggagggactaggggaggggtggaagatgaggcctggaaggaagagaggaggcaaacccggtgctgttcccaaagtcattcccaaagtcattcttcattcatcgctgtttctattcattcgacagggactatgctcagcctayggacaaagtggtgaacgaggcagacacagttcctgcccttgcagagctcatgagcttgcaaattctagaccttagtgtgggcttggggtggat

SEQ ID NO: 67315 - DNA, 510 bp, Homo sapiens
gatagatttggggcttgtgtatcaccccggcccccctgttggagctggcaggacaccctgttttgagctttgtaggacagaataaggcacttcccatctcaaggaaggggaggccgggtgcaggcttggctggagactgacttcctggccccgagctgcctgggatcccacccccgagtccaggatctacggtgtagggtacaccagagtgggcagtgcctgctccagccctgtgacaacttgggggaagctcggggcggcccccactgccccaggataccagaggctgtggagccctgtgccaggggcacaaacaaggggacgtgaccacgggcatctgcatctcggcaggaggasgaccgctacaggctcatgctcagtcggagcaacagtgaaaacattgccagcaactacttccgatctaagcgggccagccagatcctcagcacagacgccaggaagagcctcagtgagtgtccctcccctgtccccaccctctccacacaactg

SEQ ID NO: 67316 - DNA, 626 bp, Homo sapiens
gatccttgaacttcttttttgtctcccctttgggagggatataggttttcatttctctttcataacgggccttgtccgcytttgccatatcttcaaattttcctttctctttagcagacatggtctacaaaataattatttgtaagtttaagttgtaacatttaagtaaattatcctcaaaaccaatgtcttttgctatgtaatagcgtcccactacgagaatgccaactaggcttttttttgcatcctcaattggaaactgtcttttaattaccttgttagcatgttttaagccctcttaccttccacctctctgagcacttcttagaaaactctgagaagttgactgaagcatctgggtgcttcttcttatgctcctcccgacaagtttgcacaaaaaatgcatatgatgacattttgcctctcggcttcttaggatctcctttgcccatgtttagttatttttctaaaaaataaaataaatatttgatgttagcaataaaattatgacatataagaccttaaagtacttagtaagggaatgaaaaccaaagtactggttatttaacacagtagcgacatcaacctccgtaaaatcagacaagaatatggccgagagattaaat

SEQ ID NO: 67317 - DNA, 1163 bp, Homo sapiens
aaaagaatgaagtgatggaagccagactcaaaccaactgtgtactctgtccacacctcttcagcaatatggcatattgcaaagtagtgttcagagatgtgcgtgtagtaggctgcctgctctaacacatgagattaaatttagatagccacatagggaaatcagtttttaagaaagcggatggaattcagctgcaaatagatggacacctggaattctgggaagttctagctgctgctgctcaactaaggcataactgaactcaagatttacaaaaatgtatttcagcccaagtctctccataactactaacaagggactgaggagaagaatttatattaaaaggataaaaatatctacacttggaaacagcagattgtgaaagggtatgtgactgacaattattaaacaattaagagtatgactaagatgaatatgcattcattcaccaaaatctcatattcccaaaaagcaggaaaggtagtacagtgagatggatgatgccttcacatgactcagatgtcacgtgtttctcaccattgagacccccaaggcaccccctcccagcatttaccagaatgtgtgtgtaactatttacagtgatttgtgtaattatttgattgtttctcttgtatcctgtagcaatgagggtagagattatatcccacctaccactgcagctccaggatccagcttcacaaacatttgttgaatgaatgaataagaaaagaggayacccccaaagaggctgcaagggaaaaagctacaaagacagaagcaccaggaaaaagtagggtcatgtaagtcaaagcaggaaaaaagttccatggtggggtggtcagcagtgtctaatgccacgaaggcacaaagtaggataaaggttaaaaatcagcctttggttttggcaaatatgaagcttatcggtagccttagcgagaacaattccatcagggagcagaagctaactgcagtgggttgagtcatcaagcaggcataaggaagtagggataccccattataagctactctttcaagaagctcaaatctgaaggttaggagaattaggtcagtagctagaaggaaatgtggagtcgaggggctgtttttcctcccaaggagtataaaggtgtaacgttgcatgaaaccacttcagacaaaggccga

SEQ ID NO: 67318 - DNA, 1163 bp, Homo sapiens
aaaagaatgaagtgatggaagccagactcaaaccaactgtgtactctgtccacacctcttcagcaatatggcatattgcaaagtagtgttcagagatgtgcgtgtagtaggctgcctgctctaacacatgagattaaatttagatagccacatagggaaatcagtttttaagaaagcggatggaattcagctgcaaatagatggacacctggaattctgggaagttctagctgctgctgctcaactaaggcataactgaactcaagatttacaaaaatgtatttcagcccaagtctctccataactactaacaagggactgaggagaagaatttatattaaaaggataaaaatatctacacttggaaacagcagattgtgaaagggtatgtgactgacaattattaaacaattaagagtatgactaagatgaatatgcattcattcaccaaaatctcatattcccaaaaagcaggaaaggtagtacagtgagatggatgatgccttcacatgactcagatgtcacgtgtttctcaccattgagacccccaaggcaccccctcccagcatttaccagaatgtgtgtgtaactatttacagtgatttgtgtaattatttgattgtttctcttgtatcctgtagcaatgagggtagagattatatcccacctaccactgcagctccaggatccagcttcacaaacatttgttgaatgaatgaataagaaaagaggacacccccaaagaggctgcaagggaaaaagctacaaagacagaagcaccaggaaaaagtagggtcatgtaagtcaaagcaggaaaaaagttccatggtggggtggtcagcagtgtctaatrccacgaaggcacaaagtaggataaaggttaaaaatcagcctttggttttggcaaatatgaagcttatcggtagccttagcgagaacaattccatcagggagcagaagctaactgcagtgggttgagtcatcaagcaggcataaggaagtagggataccccattataagctactctttcaagaagctcaaatctgaaggttaggagaattaggtcagtagctagaaggaaatgtggagtcgaggggctgtttttcctcccaaggagtataaaggtgtaacgttgcatgaaaccacttcagacaaaggccga

SEQ ID NO: 67319 - DNA, 1163 bp, Homo sapiens
aaaagaatgaagtgatggaagccagactcaaaccaactgtgtactctgtccacacctcttcagcaatatggcatattgcaaagtagtgttcagagatgtgcgtgtagtaggctgcctgctctaacacatgagattaaatttagatagccacatagggaaatcagtttttaagaaagcggatggaattcagctgcaaatagatggacacctggaattctgggaagttctagctgctgctgctcaactaaggcataactgaactcaagatttacaaaaatgtatttcagcccaagtctctccataactactaacaagggactgaggagaagaatttatattaaaaggataaaaatatctacacttggaaacagcagattgtgaaagggtatgtgactgacaattattaaacaattaagagtatgactaagatgaatatgcattcattcaccaaaatctcatattcccaaaaagcaggaaaggtagtacagtgagatggatgatgccttcacatgactcagatgtcacgtgtttctcaccattgagacccccaaggcaccccctcccagcatttaccagaatgtgtgtgtaactatttacagtgatttgtgtaattatttgattgtttctcttgtatcctgtagcaatgagggtagagattatatcccacctaccactgcagctccaggatccagcttcacaaacatttgttgaatgaatgaataagaaaagaggacacccccaaagaggctgcaagggaaaaagctacaaagacagaagcaccaggaaaaagtagggtcatgtaagtcaaagcaggaaaaaagttccatggtggggtggtcagcagtgtctaatgccacgaaggcacaaagtaggataaaggttaaaaatcagcctttggttttggcaaatatgaagcttatcggtagccttagcgagaacaattccatcagggagcagaagctaactgcagtgggttgagtcatcaagcaggcataaggaagtagggataccccattataagctactctttcaagaagctcaaatctgaaggttaggagaattaggtcagtagctagaaggaaatgtggagtcgaggggctgtttttcctcccaaggagtataaaggtgtaacrttgcatgaaaccacttcagacaaaggccga

SEQ ID NO: 67320 - DNA, 705 bp, Homo sapiens
acagaatatttgataaaaggctatttgggtctcctaagtctaactgcaaactcaaacccataattcagccatgrtgttgtattgcttgaatgccctatgcctctatttctttacttgtatgaatcccatagattttaagagctgtgtacctagcccaaaataactgctacataactattagttgctattactactatactcattatcttactgaacaattgtggttgttttcagtaggagggtggtttagtttccctagtccatcacgctgcagaaaatagaagcccgtacatttgatcacaagcaggactatgcagctagctgtgttacctgaggcaaattacttgacctcttagttgggaggaggctggagaattctgcttccatcagtctctccctctcgggtactgccacacaatgcattaagatggtttgtaagaagagtctgcaatctgtactctctccttgtctctcaattgcattctgtctctatcttttcctccccctccttgatattttaaaagcattgtaatggactaagcaaaaatgtatgaagatactttacagagagggaagtaaaatgaagtgactttatagtccactatactaatggtctccaactccaatgcctgtaggagtgagacaggtaacataagtagatgaggtatgctgggccagacagtagcgaatggtggggactgtggc

SEQ ID NO: 67321 - DNA, 645 bp, Homo sapiens
ctcccacaagacacggaaattatgggagctacaattcaagatgagatttgggtggggacacagccaaaccatattgctgctgaatagatcatgtagacaggctctcaaactacacggagagcaagagaggcccaccttaccacaacatttcatccaatccactaataaaacaggcacatcactgaagccaccttcaactctccagactacccagctgccagctgaataccacagatggctacagttaataccacatggagcagaatcatgtagctaagccctgcttgcactaatacaagtccacaattttttttaagtttgttgttttaagctgctaagttttgaggtggtttgtggtacgtggaataagatgtcactctaatataatataaacttaaactatgtggcattggctttggaatcagacaatggatagaagcyagaaggatttcacaaagactgttagtgaaaagtgaacagacttcaaggaaaatgatagcaaaacctgtaaaagcattctgggaactgacagtaaacactgaatggtccttaaggagactgaaaacttgaaagagcttaagaagtctactggaaagggctttaaggataatgagaaaaaatcatcagtggagactgaggaaaacg

SEQ ID NO: 67322 - DNA, 821 bp, Homo sapiens
gtggaccctcaatacctattagttgaatgaaggaaggaatcagccccctacatgggcacctaaaaagggagacaggagggaatgaaagaggagattggaatggaaaaaagcttggcccagctcttactttgactttgggccagcctgaaatggaaccagtcactgatgaaaggaggtttgtcaaattctgagatgccactgcctttgccttcatgaagcctcgattctagccaagagaagacggatgaataaaatacagttatagtctttttcattattaatattattarataactttttttcctgtttacatgcccatgtaaaaaaatttagaaaatagattaatcataaaggagaagatgaatataactcagaaggaacctctgccattctgcatctgtattttcttatgattcttggagaattatactgtttgaaactttcttttaaactcaaattataatatatcatggaatttttttgcgtcattggcatcttttcaccatctgagggtatggttattaatcttgaaatgatgtatcacacaaaacaaataataggaaaatctaacactgcttgagcacttcctatgtgtgagttaccatgctaactcctgttgcatgtgttaactcaggttattcctcaaaacaaccctatgaagtaggcctcgtcattatccccattttatatgtaggaaactgagatacaaagactttaaataacttgtaaaagtgaaggagccagaagtcagagccaggggttctggctccagggttggaagcaaggctggccacagcatcacgttggaagatttgcctccc

SEQ ID NO: 67323 - DNA, 1184 bp, Homo sapiens
ataatgtacttccagcttytggtagaatcagtttgccctcccacagcctgagctggcatggtccaggggcccatagtgtagacaagttatgtttccattcttccagggaagagaggaggagaggaccggcagtaagttttgggttatttatttatttatttatttatttattttctgagacagggtcagatgggcccaggctgaagtgcagtggcatgatcacggctcactgcagccttgacatcccaggctcaagccattctcccacttcagcctcttgagtagctgggactacaggcacacctcaccgtggccagctacatttttttgtactgtttatagaaacaggctctcattttgttccccaggctggtcttgaacttctgggctcaagttatcctcatgtgtcagccttccaaagtgctgggattacaggcatgagccaccatgcccggcctgagacagtaagttttgattctagaaacattgcccagtgccctggcattctgatcttgattctgcatgattggtgaagatgggtcctatctggatgtgcctcccatggagattctgggaaaacatgaattatttcctggagtggagactagagtgaggcaggtaaggtgcatagggagtaaaatgtaaagagccagtcactctctggggcatgtaagcacctccttcagttttgcaccctaggcacctcactagattcaccccctggtgtgcccatgtttacctaagctattttattagcatgaccatgtaaagaagcctggatacaaattaccagcagcttatggatttggagtctggatgaaattaagtaagccctttaaaagtttaggctacataaaaatgaagtttaacctggctggtggggtataagttgggttgacgtaacattctggaaagaaatttgcccgcatatatctggagctttcaatgttcttgtgccatttgatccagaacacttccaggagtctaacctgattaattatgtatgtgaacaactcttcttatatacaaagatgtaatacagaagatttgtaataacaaagaggaagcaaccaaatgtctgtaaatagaggaaaacacttaaatggtggcacactgtgcattaatttacatatttgcattattatgcagccaatcaaatgataattctattgacttttcaaata

SEQ ID NO: 67324 - DNA, 2664 bp, Homo sapiens
attcattcatgcattcagtggatccgggtatccacctgaaactgcacatgttgggttcagtcagtgtcttagcatgtaatacattcatttcaatgttctaatagctaaacttctcctaaagatatatttactaataacctagagtttgctcacacattttaaaaaatcaagactctaaactcttcaagatgtgagatttacctaatcatgataayactcctgacttagatttctttgctatttattttttgtgaagtctctgaaagtcatctttttaagaagtaccaggagcacttgaatggaaaactgaatgttctctcttgtttcaagagagttcatcacaaatgctgagctggggacagcccctaaaatagcactagtcaatctatttcatttatcttgcaaggcatttgaagatggaatatttttatgtactgaaccaatttgatttctctatatgatttgccattcatattttttctttttccattcaagactgtgattttaatagtgatgatacataatgacaaacatgaagaaaagtgatttgaaatatatgtcattattattcttgacagaaacaataggctgctatgaaattttggtatcaaaatttactccatgataatattaggaagaaaataaactatcttgactatttattaaaatatctggagtaggttttgacaacagttagtgatgatcatttcctagactagatacttctacattgcaaattcctttttgggcatttcaacttctgtttagccttttatcccctgataaaaggggatatctggatattaatactaactaatatgcatgtgcttcttaagtgcttgatgggataaattattcgagttatgatgctaatcgatgctaatttcatgaaggggcagaaaagaagatacccctttataataacatatggaggaaaatactattcaaatgagctgatcacctgccaacttaaattttaatacccagtaaaagaaaataagtagggtaaagaggaggttgtaagctcccattgcactcttctcagattctagagggcctggatactgacactgaacaaacccacatctcagcctctagaggaagtagagaaatagctctgtggctcagaatcattaaaagaaacagtaacacttaaagtggactgagtgcttactacacgccaatcactgccctaagcgtttcatagtaattacctcattttcacttcatcacaaaactatgagatggatatcattttatgtccacattgctggggaggagttgacagcctcggggcattcacccagagccttcacacttagctttccttcacactgcctctctgttattttaagcatctctccacaaaataatttctctccttaagactttgtcttagcacttattctccaacatatgtcatggccgatatgccaatctccagtgatcaagtttccaaaaactgctcctctaactagttaaagtaagatcattcctttgcagacaatcttaatgcaatggtagctttctgtgttacccttccaaattgtctttccaggtgaaattttttgtcttctgaaaaataagtattacttactatcaaacatgggtcttagtcctaaaacaagagtgtccaatcttttggcttccctgggccacgttggatgaagaagaattgtcctgggccacacataaaatacactaacactaacgatagctgatgagctaaaaaaaaaaattaaaaattgcaaaaaaatattatagtattttaagaaagcttacgaatttgtgttgagctgcattcaaagccatgctgagctacacgctgcccacaggctgcgggtatgacaagcttgtcctagaactttagctccgtcttctcttccctatctgaaatggaagtctaatgtctgaatttaactttgttccttgtcaggatgtaagcaacctccctgttcccccatgcatagctcccctcatagatacttttggtattacctaattcctggtgctgcagggcccaggacccagccaagttggttctgatcctctgttcactcagcttccatgctcatagacaggaaaacccctccctgagtctggcatggtttctttctcccccaagaaataaataagctttcagaaatctggctccaaatccaatatggatgacaccttcaaatttggtattcctacagcagaagtattattcttgaatgaaagtaagggtttgtgtccaactgtaatacaattaaagttatctttcaacaccctccagcattccccaaacagatgacctcgaatgaatcaagccagcagggccatccttagatacctacgagcagtggggaaatgtgagtgcaaatccctctggtattccccctttatcactttcttcctctgttacgttccctctccagaaaagaaaagtccaaacactgccacatttagcacctcactcaggtctgaccttttttgggagttgtactacaacagacacttattttctcctctccatttcactcaaaacaaacgaacaaagcaatgacccctgccttttactcaatcaacctgcctctgacaaacaaatccacattacaggggcaattacttataacagcttcatgttttatccttcttgataacagctatatatttaatgag

SEQ ID NO: 67325 - DNA, 2664 bp, Homo sapiens
attcattcatgcattcagtggatccgggtatccacctgaaactgcacatgttgggttcagtcagtgtcttagcatgtaatacattcatttcaatgttctaatagctaaacttctcctaaagatatatttactaataacctagagtttgctcacacattttaaaaaatcaagactctaaactcttcaagatgtgagatttacctaatcatgataacactcctgacttagatttctttgctatttattttttgtgaagtctctgaaagtcatctttttaagaagtaccaggagcacttgaatggaaaactgaatgttctctcttgtttcaagagagttcatcacaaatgctgagctggggacagcccctaaaatagcactagtcaatctatttcatttatcttgcaaggcatttgaagatggaatatttttatgtactgaaccaatttgatttctctatatgatttgccattcatattttttctttttccattcaagactgtgattttaatagtgatgatacataatgacaaacatgaagaaaagtgatttgaaatatatgtcattattattcttgacagaaacaataggctgctatgaaattttggtatcaaaatttactccatgataatattaggaagaaaataaactatcttgactatttattaaaatatctggagtaggttttgacaacagttagtgatgatcatttcctagactagatacttctacattgcaaattcctttttgggcatttcaacttctgtttagccttttatcccctgataaaaggggatatctggatattaatactaactaatatgcatgtgcttcttaagtgcttgatgggataaattattcgagttatgatgctaatcgatgctaatttcatgaaggggcagaaaagaagatacccctttataataacatatggaggaaaatactattcaaatgagctgatcacctgccaacttaaattttaatacccagtaaaagaaaataagtagggtaaagaggaggttgtaagctcccattgcactcttctcagattctagagggcctggatactgacactgaacaaacccacatctcagcctctagaggaagtagagaaatagctctgtggctcagaatcattaaaagaaacagtaacacttaaagtggactgagtgcttactacacgccaatcactgccctaagcgtttcatagtaattacctcattttcacttcatcacaaaactatgagatggatatcattttatgtccacattgctggggaggagttgacagcctcggggcattcacccagagccttcacacttagctttccttcacactgcctctctgttattttaagcatctctccacaaaataatttctctccttaagactttgtcttagcacttattctccaacatatgtcatggccgatatgccaatctccagtgatcaagtttccaaaaactgctcctctaactagttaaagtaagatcattcctttgcagacaatcttaatgcaatggtagctttctgtgttacccttccaaattgtctttccaggtgaaattttttgtcttctgaaaaataagtattacttactatcaaacatgggtcttagtcctaaaacaagagtgtccaatcttttggcttccctgggccacgttggatgaagaagaattgtcctgggccacacataaaatacactaacactaacgatagctgatgagctaaaaaaaaaaattaaaaattgcaaaaaaatattatagtattttaagaaagcttacgaatttgtgttgagctgcattcaaagccatgctgagctacacgctgcccacaggctgcgggtatgacaagcttgtcctagaactttagctccgtcttctcttccctatctgaaatggaagtctaatgtctgaatttaactttgttccttgtcaggatgtaagcaacctccctgttcccccatgcatagctcccctcatagatacttttggtattacctaattcctggtgctgcagggcccaggacccagccaagttggttctgatcctctgttcactcagcttccatgctcatagacaggaaaacccctccctgagtctggcatggtttctttctcccccaagaaataaatargctttcagaaatctggctccaaatccaatatggatgacaccttcaaatttggtattcctacagcagaagtattattcttgaatgaaagtaagggtttgtgtccaactgtaatacaattaaagttatctttcaacaccctccagcattccccaaacagatgacctcgaatgaatcaagccagcagggccatccttagatacctacgagcagtggggaaatgtgagtgcaaatccctctggtattccccctttatcactttcttcctctgttacgttccctctccagaaaagaaaagtccaaacactgccacatttagcacctcactcaggtctgaccttttttgggagttgtactacaacagacacttattttctcctctccatttcactcaaaacaaacgaacaaagcaatgacccctgccttttactcaatcaacctgcctctgacaaacaaatccacattacaggggcaattacttataacagcttcatgttttatccttcttgataacagctatatatttaatgag

SEQ ID NO: 67326 - DNA, 2664 bp, Homo sapiens
attcattcatgcattcagtggatccgggtatccacctgaaactgcacatgttgggttcagtcagtgtcttagcatgtaatacattcatttcaatgttctaatagctaaacttctcctaaagatatatttactaataacctagagtttgctcacacattttaaaaaatcaagactctaaactcttcaagatgtgagatttacctaatcatgataacactcctgacttagatttctttgctatttattttttgtgaagtctctgaaagtcatctttttaagaagtaccaggagcacttgaatggaaaactgaatgttctctcttgtttcaagagagttcatcacaaatgctgagctggggacagcccctaaaatagcactagtcaatctatttcatttatcttgcaaggcatttgaagatggaatatttttatgtactgaaccaatttgatttctctatatgatttgccattcatattttttctttttccattcaagactgtgattttaatagtgatgatacataatgacaaacatgaagaaaagtgatttgaaatatatgtcattattattcttgacagaaacaataggctgctatgaaattttggtatcaaaatttactccatgataatattaggaagaaaataaactatcttgactatttattaaaatatctggagtaggttttgacaacagttagtgatgatcatttcctagactagatacttctacattgcaaattcctttttgggcatttcaacttctgtttagccttttatcccctgataaaaggggatatctggatattaatactaactaatatgcatgtgcttcttaagtgcttgatgggataaattattcgagttatgatgctaatcgatgctaatttcatgaaggggcagaaaagaagatacccctttataataacatatggaggaaaatactattcaaatgagctgatcacctgccaacttaaattttaatacccagtaaaagaaaataagtagggtaaagaggaggttgtaagctcccattgcactcttctcagattctagagggcctggatactgacactgaacaaacccacatctcagcctctagaggaagtagagaaatagctctgtggctcagaatcattaaaagaaacagtaacacttaaagtggactgagtgcttactacacgccaatcactgccctaagcgtttcatagtaattacctcattttcacttcatcacaaaactatgagatggatatcattttatgtccacattgctggggaggagttgacagcctcggggcattcacccagagccttcacacttagctttccttcacactgcctctctgttattttaagcatctctccacaaaataatttctctccttaagactttgtcttagcacttattctccaacatatgtcatggccgatatgccaatctccagtgatcaagtttccaaaaactgctcctctaactagttaaagtaagatcattcctttgcagacaatcttaatgcaatggtagctttctgtgttacccttccaaattgtctttccaggtgaaattttttgtcttctgaaaaataagtattacttactatcaaacatgggtcttagtcctaaaacaagagtgtccaatcttttggcttccctgggccacgttggatgaagaagaattgtcctgggccacacataaaatacactaacactaacgatagctgatgagctaaaaaaaaaaattaaaaattgcaaaaaaatattatagtattttaagaaagcttacgaatttgtgttgagctgcattcaaagccatgctgagctacacgctgcccacaggctgcgggtatgacaagcttgtcctagaactttagctccgtcttctcttccctatctgaaatggaagtctaatgtctgaatttaactttgttccttgtcaggatgtaagcaacctccctgttcccccatgcatagctcccctcatagatacttttggtattacctaattcctggtgctgcagggcccaggacccagccaagttggttctgatcctctgttcactcagcttccatgctcatagacaggaaaacccctccctgagtctggcatggtttctttctcccccaagaaataaataagctttcagaaatctggctccaaatccaatatggatgacaccttcaaatttggtattcctacagcagaagtattattcttgaatgaaagtaagggtttgtgtccaactgtaatacaattaaagttatctttcaacaccctccagcattccccaaacagatgacctcgaatgaatcaagccagcagggccatccttagatacctacgagcagtggggaaatgtgagtgcaaatccctctggtattccccctttatcactttcttcctctgttacgttccctctccagaaaagaaaagtccaaacactgccacatttagcacctcactcaggtctgaccttttttgggagttgtactacaacagacacttattttctcctctccatttcactcaaaacaaacgaacaaarcaatgacccctgccttttactcaatcaacctgcctctgacaaacaaatccacattacaggggcaattacttataacagcttcatgttttatccttcttgataacagctatatatttaatgag

SEQ ID NO: 67327 - DNA, 1255 bp, Homo sapiens
ctgattagtttgttgagctagtatttgtgtaggacacttattctttgttgaattgtgtgccttaccaagtgttggaaccaatgtccatgtcttcatgtagtcattcatttaatggctttctagttaaccatagttttttctgaaataatgatcagttatgtatcaaccattaaacaattgtttatcatgcagtggagctgacattgattatcacaattgccaagaacaatttgataacttggagagcttttgggaaaatagatttggcttgaattagaatcctggctctgcctcttgcaaattatttaacatgttcaagcttcaatttcatcaataaatgaactccaactacttacctcagagttgttgagaagattaaactagacttgcmtttgccaaattctctcctcccattctctcttgaacccacttcagattttcacctctacctctctactgaaaaatcatgatgacctccatgttgataaatctaaaataactttctcagttcttcctttacctgccctatcttttgttttccttcagatagatgcacggccatcaccttcacttaatttaggtctttactcaaattcattttctcagtgaggcgcttcatgcctctgtaatctaaaatttcagcccttatgacatttcatattcatgtttcctggtatacttcttagcactatttcatatattttacttatatttcttggttactttctgtcttattctctccctgcctacttcctcctgtctcccatataagctccatgaatgcagggtttatcttttttttccactgtttactaagtatctctaaaatagatacatagtatctagaacatagtaggcactctgctagaacatagtaggcactctgaatatttgttgaatgaatgaatggatgagaaaatgtatttgtgccagcaaagtgcctgtacataacagatgcttaatcaaattaacttactctctaaatttttttctttttactgtacttcaatggatgcaaacaaattaatttactctttccccttttatgcagatcattgaaataattattttaatgaatgttgaaaataattttggaaaagttagacccctaatctagcacccctactatttcataatgtagcattatattccgtcatagatattataatattctttaattcattgatttatttttcaacacacatttattcaatgtgcattatgtatcaagcatctatatacaaagaagaacaaa

SEQ ID NO: 67328 - DNA, 2789 bp, Homo sapiens
ttgggggtctcactgtttgcccaggctggtcttgaactcctgggctcaagtgatcctcctgcctcagcctcccaaagtgttgggattacaagcatgagccaccatgcccagcctaaatcttactaccttttaaatacaatttttactttatcatattttaaatttccaagtgctttgtctattccctcttttggtttggtgttttcatgctggtggctttggctttctattcacgtttaagtatgaggcactaaaaaaataacagtcacaaagtttgtgtgtcagaggtgtgcttgctgatcattaagcttcactataggttgaaagttaattggctttgccggggaagtccccaaaatgtaaacatgtgaagggcttgggtgagggtttctccagagaattctggctgaggactgatgttggggaatgctggtgtgttgcttttacttaatccttgtttaagttctttcacttcactctgccccacactgtgcctggtgcttagtcctctttggtctctggttcccattttctggagactataccttctgcctcctgcacagggtggggatgaatggggactgtttcaccaagggctttactgctctgatcactgactgtgtgtatctttgccttatcccaacagtacctggtgcttccagagtctgagcccctcttagggatcctaatgggctgatagactgactcccccctttcctacttacttacttagtttataacttcattgctggcaattaccatcccttcattatctttccacattctaaaatttcattgaaatatatcacaccagtaatcccagcattttgggaggccgaggtgggaggattgcttgagcccaggacttcgagatcagcctgggcagcatactgagatcttgtctttgtttctttatttaaaaagaataagaaatatattgtccactgctaccccctttccttttattgctttaaagatgaatacagttttaattctttatttttaaatttttattattttttttgagacagggtcttgctctgtaatcacggctcactgcagcctcgacctcctgggctcaagtgatcctcctgcctcagccttctgggtagctgggactacaggcacgtgccaccacacctggctaactttttgtgttttgtagagatgagtctcaactatgttgtccaggctggtctcraaattctgagcttaagcagtccttctgcctcagcctcccaaagtgctgggattataggcatgagccattgctcctggccttagtttgtttatgatcattttagtgggcttttgggaagaagagatggtaaagacattttagtgtgttaaatgaaattctccctttgaaaattctaatggacttcaatttattccacaactgttgatgaagaccagtaagtgtaaagccaagagtcaggccctggggatttagaaatgggcatgacatggtaactgacctctctgcaagctcacactaatgtaatgtgataagtactttgccagcagtgtgactaaagctctgtgggaccacaggtggcagtgtgtccgctgagttgtgcacacacattagcagtgggttaaaaggaggtttatggaaagacttggtagaagctgtcttgaggttaggcttgagggccacataggtacagaaaggactgccaccttctgaggcctgagagcatgctgagactcttcagaagcttgagcactaatatttgtctcctttcacaaacgtactttccctcaaacactcatatttaatttggaaagatttcataataattctcatttttgtctagtttctacttggttacaaatatggagcacttcagtcatcgagtatgaaaatccctttttatgccagagtcaacctttgcccctgcaggaagtaaattttactattcttttattgaaaaaataatgacaaatggctaccatgaatgcagttaatggtgtttaaaaagtcatatctagattactcctaagagccttatatatatttgaaaatggtaccctggagtaaataaatttggtgagtaactggagaaactaaacactgttataattttgatgagggatcctttcaaaccttgtctgtccgtttggggtctgctggattagcctgttgcctgtttgattcatgaaacatttatatgaaggtgacatcttattttgtttgtccctgttcaagaaaagtatcatctgttaggatagatgatacttttaaatcatccatttaaaatcagtcatttaatatcccgtgcatctttaaaaaatattgtagagcatgtacaattaataaatatatctttttttcttatttatttatttatttagagacggtgtctcgctgtgtcaaccaggctggagtgcagtggcgcaatcttggcccactgagacctccgccttctgggttcaagtgatcctcctacctcagcctcccaagtagttgggattacaggaatgcaccaccacacttggcccattttgtatttttagtagagatggggtttctccgtgttggtcaggctggtcttgaactcccgacctcaggtggtctgcctgccttgccccccaaagtgctgggattacaggtgtgagacacctcacccgctgttttttcacttaattcagatgctttaaataattaacagtcgtatgttcattatttgctaacctaacaccctgtgctggatatttggtaggttgtccctaaaatttattacaaatgatgttgagatggatatattcctatacataaatattgg

SEQ ID NO: 67329 - DNA, 1403 bp, Homo sapiens
tttccaggcttgggttttatggatcagtaagaaaaaaaatgggatgatgaacatatgattgctagcttttaattttgtcaatatagacattggtatcatttatcttgaatactcaatatttaatttggaaacatgaatatttttccttcatttattctctcattatagatttatggtctatctagagttggctggttattcagtctactacctttattttactgatgagggagctgaggctccaaaatgcctttgagaccccagagagaagacagaaaacttctttctcatgaatatattatagcctaatattgacatgttactagcagttacaaacataaatgttgctatgacttgtatgggagttaatttttcttcaggcttgaaatgtgatgattcccaaagccatctttttgtgtaaattagataatttcctggattaatttgtatcttgggaaattactgattgcagctattattttagaagtgtgactgatagcttactgagattctgagttgctattttgttttgggaagcatttttagagagtattataataatttgacagatatgcaaaaggaaaggaagtgaaaatgagagaacattaatacagttgcccttgggctttctcctccccttctcagagggcctggtccttcgcaaggtgttttttattattactttttaaaaatttcctggtctcctatccctgcctccttcaacttttccttttcccatttcttcccattccttaacccatctcttcttctttcattctggctcctccttctctccctgcatttctcttgttacctgtttccccatctctttttattcttagatttattctttgttcttttttctgatgtctttaaccagtaattcagattttaagttaccgggttttcttcctgtagcatttgaactgaagtgatactgagctggaaaaatagaayatcactgataagttgttggttttgggatttctaagttttattagtgtaaaagttcttgaattatgaatgtgtgttccaatccataccaccagctaaaaaagaaaaagaatatgttttattgttatttttgattgatactttccctttaatagaagcatatacttattttagtggaaatttatgattgattataaatttttttccctgtgattaattatagctttacattagtggcaaacatttctttcagtcttgttttgtgcacattttttacataaggcaatttaatttaatttattaaaacattttaaaatttataattattggccaggaatggtggcttatacctgtaatcctagcactttgggaggccaaggcaggaggatagcttgagttcagaagttcaaaaccagcctggttaacatagtgagacctcatttctatta

SEQ ID NO: 67330 - DNA, 597 bp, Homo sapiens
agtaaagaatagttattctgataatgttggatggagtattctataaatgtttattatattaagatgttctatttcttttgtcaaagaagagagaagaaagaagtccttaactgaaagaagagagtgttgaagtctctaattataatattttatttatctctttcttgtttgttctatctaaacacaccaactataaaatatagattggaaattggtttaaagagcaaaaccaaattattgtctaccagaaacccatttaaaatatgctaaaaaagataagtttaaagraaaaaggataaagaagttataccatagggaaaccaatcaaaagattggtggacataataatatcagagtaaatttcaggacaaggaaattagcagagataataaggagcatttaataatgacagaagaacaaatacaccaagaagataaaacaatccaaaatgtgtgtacatctagcaacaatgcttcaagatacatgaagcattgttttttattgaagtatcattcatacatattaaattaatctattttaagaggagagcctgggggctgtgggaagggggaagtaagtagttataatcaatgggca

SEQ ID NO: 67331 - DNA, 597 bp, Homo sapiens
agtaaagaatagttattctgataatgttggatggagtattctataaatgtttattatattaagatgttctatttcttttgtcaaagaagagagaagaaagaagtccttaactgaaagaagagagtgttgaagtctctaattataatattttatttatctctttcttgtttgttctatctaaacacaccaactataaaatatagattggaaattggtttaaagagcaaaaccaaattattgtctaccagaaacccatttaaaatatgctaaaaaagataagtttaaagaaaaaaggataaagaagttataccatagggaaaccaatcaaaagattggtggacataataatatcagagtaaatttcaggacaaggaaattagcagagataataaggagcatttaataatgacagaagaacaaatacaccaagaagataaaacaatccaaaatgtgtgtacatctagcaacaatgcttcaagatacatgaagcattgttttttattgaagtatyattcatacatattaaattaatctattttaagaggagagcctgggggctgtgggaagggggaagtaagtagttataatcaatgggca

SEQ ID NO: 67332 - DNA, 583 bp, Homo sapiens
atgagcatgaaccaagtccttaaaattaatctcttactctctctgtctgtctgtctctctctgtctctgtctctctctctcactctgtgtgtgtgtgtgtgtgtgtgtgtgtgtstgtctgtgtgttacactgattctattggcttggagaacatttagtgaaacacctagtaaagactacaatgcaaattcctttctggttttcttagctgtttgaaagaggcagaaacctccaaactacttttactttcccctgttaaggtttagagcagagtgagcgttagtcactcactccgtgagttccttcttttaagattccccatggacctgattgaccactgaaggataaaggctcacacctcatccttctaggtgaactagaactagccacctggcccctgcccagcaccagggagccaattttttgtttttgttttttatcttaggagataaatgacatatctgaatctatattataaaactcttctctactatgaaaatctaaatgattggcactgggaaattcttcccaggtaaataaagtaggaagttgaacatttatctaacagatctactttggaat

SEQ ID NO: 67333 - DNA, 2125 bp, Homo sapiens
agcaaattttcttatgtcccctctctgcttccatggcctcattaatctcttctgtcttgcatctacctgagtagttttgctgttcttcatgttctcttctggttagtcttcatcagagtaaaggaatagtaatctacacagaggataatgaatattggtcttccaatttagcctcaaaacaccaaaagtggtgtactgacttagggaaaattcaggtgtaaaaaaaaatctaatagtcatactaaaaacagcagcaagctgtgtttggtggagacttgtattcagcttttttattgtcttttttttttttcacagacttttaaagtacaattatatcatgacttgactgcttttagttccacggtcttctgaaaataacaatgtaaacattttaaagctataagggacttatactaaagcacaatggaaaaatctgtgctggcaaattggagcactttgttattctcacccacttcaattctatcaaattcacataggaatttgacagttaaaagacagtaatttgaaatatacaatttccttttgttccttcactttacctaatgaattttttagaacattactgttagtatcccatggcctatgtgttaaaagtcttctgtagccctgatagagcctctggtatttaaaaatgaaggatagtgggatcttcaaaaataaagagccagacttgatatcaaaccatataaggtaattgggcagtatcaattacctttctgtctttctgttcctctggttaattagcctttccttcccacactttctgaggcatctatgaccccatgtattaagctctctcatagttcctccaatgttgactgtgctttcctgcccagactttgaatcttgataaagtatagctatcttgaagatgcagatctaatgtgaattattccgtaaagactttctttcctgattcatagtaggaaataatcttttcctccatttagttttccaattattttttaaccattttaacacaaattgccatatacatgcatgactattaaagcagattacaaattcttttaggccagggactttgtttttatttatcttgggatcttctatatctcataatacaatatcttaygttgtattagtaagaagtgataattgattgctattaaacatgggtaggaataattttaatcaaataaatttattgggcaatcatgacaattagataaaataattgtatcaagagttatattacaaggaatatgatgataccttgtttccagtaataaaaactgattaaaagttccaatgtagtattacctgtagagacaaagaaaaacttgtcaaaaaacatgaaagcatctaaaaagacatggttatacaaaagcctgtctatgttgttcttttcttttttttcctttttttttttttttgaggcggagtcttgctctgtcgcccatgctggagtgcagtggcatgatctcggctcactgcaagctccgcctccccggttcgcgccattctcctgcctcagcctcccaagtagctgggactacaggcgcccgccaccgcgcccagctaattttttgtatttttagtagagtcggggtttcaccctgttagccaggatggtctcgatctcctgacttcatgatcggccagccttggcctcccaaagtgctgggattacaggcgtgagccaccgcgcccggcctatgttgttcctttcttaatcagcctacaacttcacctctttttagattccattcaactgtggacaaaataattacttaaatttatttgatatatcttgacatgatacatcatagcacagaccagttgcatgtcacttaattgtctaactagttccagcctcaagctttggaacttactgcattgagactctattcttctctgtttacttttctataaaaaatttaatgaacaataaaatgtctttgccatctttattgtggctcctttgaagtcttgctcttgtcattgggtttttcttatattgtgcctgactccaagtctgaagattctgtactatagattggtctcaaatagaaaagcattgtatgtgctttcaagaaagtagacttttgaaataccatttatatgggatgaactttttacaaag

SEQ ID NO: 67334 - DNA, 632 bp, Homo sapiens
ggatccagaggtcttagtgattagggygtgtttgactttttgtgttttctgtgcccgggtattgggaatggaggttccgttaaggcatcttcagagcactttcgccaacagttgtactgttagggtgtactcagttggcaggaggctggccttgctctctgctgtttcttcctattccttcctggcagctggctgaatatttttcactctttgaaaagtacacaacctaaattagagcccaagggtctacttgaatcctaccaagaaaggtagataggtcagaactttctcagttacaagagacggaaacatgacttatactttcttaagcccccaaagttttttttctcttaaatatctgaaaattccaggaattggttccagtttcaggtataggtggatctaggtgctcaaatgacatcacaaatgttctctttcttttctctagtttcttctttgttggtttctgacatgcttcctctacatgaagatctccagcaactccagggtaacatgaacctttcagcttatgatctcaaagggagaaggagttttcctctagcagcatccatatttgtcccctttccgaagatctctgattagccctgtttggatcacatgatctttcctgg

SEQ ID NO: 67335 - DNA, 632 bp, Homo sapiens
ggatccagaggtcttagtgattagggcgtgtttgactttttgtgttttctgtgcccgggtattgggaatggrggttccgttaaggcatcttcagagcactttcgccaacagttgtactgttagggtgtactcagttggcaggaggctggccttgctctctgctgtttcttcctattccttcctggcagctggctgaatatttttcactctttgaaaagtacacaacctaaattagagcccaagggtctacttgaatcctaccaagaaaggtagataggtcagaactttctcagttacaagagacggaaacatgacttatactttcttaagcccccaaagttttttttctcttaaatatctgaaaattccaggaattggttccagtttcaggtataggtggatctaggtgctcaaatgacatcacaaatgttctctttcttttctctagtttcttctttgttggtttctgacatgcttcctctacatgaagatctccagcaactccagggtaacatgaacctttcagcttatgatctcaaagggagaaggagttttcctctagcagcatccatatttgtcccctttccgaagatctctgattagccctgtttggatcacatgatctttcctgg

SEQ ID NO: 67336 - DNA, 632 bp, Homo sapiens
ggatccagaggtcttagtgattagggcgtgtttgactttttgtgttttctgtgcccgggtattgggaatggaggttcygttaaggcatcttcagagcactttcgccaacagttgtactgttagggtgtactcagttggcaggaggctggccttgctctctgctgtttcttcctattccttcctggcagctggctgaatatttttcactctttgaaaagtacacaacctaaattagagcccaagggtctacttgaatcctaccaagaaaggtagataggtcagaactttctcagttacaagagacggaaacatgacttatactttcttaagcccccaaagttttttttctcttaaatatctgaaaattccaggaattggttccagtttcaggtataggtggatctaggtgctcaaatgacatcacaaatgttctctttcttttctctagtttcttctttgttggtttctgacatgcttcctctacatgaagatctccagcaactccagggtaacatgaacctttcagcttatgatctcaaagggagaaggagttttcctctagcagcatccatatttgtcccctttccgaagatctctgattagccctgtttggatcacatgatctttcctgg

SEQ ID NO: 67337 - DNA, 626 bp, Homo sapiens
agatactgcaatgaatttctttattatcactatatttaaatatctccctgaacatagaaagtcagtaaatgtgtattaattgacttcattgaaaaatcgagaagagatttggctggaaattaaggaacaagagttcttgaccattattggaaaggcttaatgactctcagcatgtcactttacctccctggattttaatatcctccttcattaaatgaattagtattaaaatgtmtctaaagttccttccagttctaaaatgtgtgactgaacttacaggggcagaaaagacatccttcagtacacccgaaaattctcctctctgtgcagaaacactggttctttgaattacagggactggaacagattgcgcattgtcgagaagagagtcaccctcaattactcatcaatggtggaattctttgtggtttactctcactaacctagtgtttccttagtaccacccacctaggtccaaggggatatacatgtgtctgagtatgtgtgtatttttgcctctctgacgacattccaagactaatataaacaccttttaaattacccattactttgtgtcacttctctcttctaccagaaagaggttagcctatatttacatttgaatt

SEQ ID NO: 67338 - DNA, 561 bp, Homo sapiens
ttaaaaactccttcaacactttgaaaatgaggtacaataatgataaacaacttgaactagaaatgaattggcagcatacagctcaacagccttacacaaatccccacgtctttacatcttgtcttttattgggaggctaattgatgtttgagtatatcatctgaatcacacttgcaagataaatatttataagtagaaactgtgtaactgagaaatccaggaagggactccctcccttgatcttaatattcactgtactctttaaccactaactgctactacctacttatataaagtatacttttttaaaatctccacttatttycttctcttttcctttcctttcattttatttattttttgtcaaaagtttcttcagagttgttaacgctttagtaggccataacctgcagttctatttcactgatggtaaatacttgaaactgaaaatcgatctatatcctttagcaacaattttttgcaacgtccctgagcaaaaacacaggcataaggctatctgagcaatgcctttaatagttatttgttatataatgccagaca

SEQ ID NO: 67339 - DNA, 1112 bp, Homo sapiens
tttatcaaacattgactatgtgcctggcacagtattaggcattacaggtgtagatatgtgcaagatccacagtccccacagtatgggattgagtctcaactcaatatggtaagtggtgcaagatgtaatagaaacagagcatgcacagggtgaacacccttatctcagcttgagcaaggactatagttcttagcttaaaagctgagcattggctgggtgcggtggctcacacctgtaatcccaacactttgggaggctgaagcgggcagatgacctgaggtcaggagtttgagacaagcctgaccaatatgatgaaaccccatctctactaaaaatacagaaattagccaggcatggtggcatgcgcctgtaatccctgctacttgggaggctgagacaggagaattgcttgaagccaggagacggaggttgcagtgagctgagatgacatcattgcactccagcctgggcaacaagagcaaaaccccgtttaaaagaaaaaaaaaggctgagcactgagatcaagaattggagatcaaagacatgaaaccatgatgcagccagtcctttggttatggaatatatgggggtgggaagaagggtaagagaacacgaagctagaaaggcggggagcagtcagaaaataaagagtttgcgtgactttgtcctaaagtcctgatgaattgaggaattttaagaaagagggtggttagcatgattatattcatgtcctacaaaggccaccctatagcagtgagaaccatgtactataataggaaaagagaagatcagaggaaaagaaaactaccaggagaacccactgtacgggagaaaaattttcttttctctctcttaggttcagcacctggggctctgcaaattaaaccgacaaaagattaacaggaaaataaaaacagtttatttatatgtgtagtacatacagaagagctcagtgatgagtaactcaaaggggtggttagaatttggaacttatatgcctcttaataggtgaagagttggggcagaaaggcacttacagaaaaacacatgactttttggaaagataaatgtgtttttaggataacaaacaaragataagaaagtttataata

SEQ ID NO: 67340 - DNA, 512 bp, Homo sapiens
gtgaccatttcctgaatgacctgccagattattgccctaagttattgttacctaggtcatccattgaattcaggtttcagacctaaataccattacctgctgagacaaagaaagtagaaagcccagctaaaacaaaatggtctgaggcaaggcttgttacatagactcaggtctttttgccttccctattgcaaagcctctagtgacttagttattcctgtcttcctggcgtagagaggaagacacctctgtacacgggacttcctccactgacacaagtttccttcattaaagataggtcttaaaataactaaaaataggcagctgcttcccaactyaacctgtgttcttttaactaaattactgagttctgggcagagcctattaaggaataaggcagacaaagcatttttcatacaagactaggatacttttcgctattattctgagttcaaattccacaccctattgatctaacagctcaacttatataaacacccttgcccctcaca

SEQ ID NO: 67341 - DNA, 506 bp, Homo sapiens
ctcttgacaggaatcctttccaacactccaggaatggggagggggaccattgcagtgttatctgaaagggtgacctggggactttgacttaggccacagcatggctagggacctgacctcgcctcctcagctccagtcttctctgaggctgggcccctcgtctttctctctgttgttttctggttccctttgtgcccccactccccacctccacccaccccagctaggctcatcttcaggaaacaggcctggtttccatggtgaccagccggtcagctggctccttccaccgccccctccttcacccccctttcttgtagcttccagggaagggtactgtgtgtgaatggagaaggcaggggtagccttttgtctcttgggagctctagcrttggccaaaaagagctaaactgtccctcctccaaagccctttgaagtggagacaggaaggcagtgggggtgggtgtcaagaggaagattatggtgcctaaatggggagcacgaaa

SEQ ID NO: 67342 - DNA, 1461 bp, Homo sapiens
gggtgctgggattatttccatgttaattcaagcagctgtgtaaagcacagccttaagacttgtgcaaagattctcaaagcacaattttcttcagtgacaaaagatgtctttctttttcctcttgtcaaacacaatcactcccagataaagtcaatttgctcttttgccttcgagttgggctatttccttttgccagctgactaatgttttctagggcaggttggaattaatcattcagcaccctgagatttttcaggccagccagggctgaggattagaaacaataaaattcacagttcgccctctaacaaaaggatctcacacttggccagaagtggatcgtaggcctccttggaaggaacagtacgggaaattttaccaaatagctcaatcttcattctccagatgtgccaaatcttgtttacttgtcaccttcaccaggcgtcttgtgctaatttattccagaagtggtgtgtgtttctcccttccccacgaggtctcaccatcaaggctgagcacaattcattgtcttatttctgaaccctcttgggcctcctgggagcttcactgaaaaacgtcaagccctcccaagcatattttcattgcaccggctcaaagctcagtgttgattctccatccagcctcttcaagtgacctgaaacgccatgttctttccaccagggtggtgccttaattggccacttttgcagagctgaggtcggtctgcctgtgctccaaaaaaaaaaaaacaggtcacctgcccctttacgtctggagcttcaagatcacaaggtagaatgtggtccccggcgcacacccaggagcagcaggctgggaccagccagtgcttttagacgggccagcctgggtgctagaacagatgtcaagggatatttgctgcaaagaggctccagaaataacgtaaaattgttctgtccttttaaaaatggaaaatgccttggcagggtgatatattatttgcctggctgcattttctctctgtctcagtcaaggcatgaaaagtactggcacttctgccttttcaagcagagcttggtgtaactggaccacatctaatgcctgtacgatgcaaatgaagatggaaactgttgtttcctttgatgtgtgtgactaaatgctcaaaggggatattttcttttcgagcctccagtgcatagagcctctttaaaaatacctgttggctccgtctcccccttggcaactgaagcaattcctgcactggagacagcggttgggtacagtcatgatgaatgtctttctctgggaagaataccctttccgtgtttgcaatgattgttaaagttctggagggaattaagaagcgcgaaaggcacgttaatgatgggtatctgcaatsagccactcagacttgcctgaaaaagtccagagagcacattctgagagcaaactcagggaggcggatgagtcacagctgggatc

SEQ ID NO: 67343 - DNA, 721 bp, Homo sapiens
ctttcaatcccaccaagagggtggatacagagagaaaagctacaagaagactgaggcacgagcaaccaacttgagggaggcagggaaggtttccaacaaaaggtgaccatggatctgagtcttcaggaatagatggattggagtgcacatggtttatttgggaactgaccttccaaaaatattagtagggaatgaaatcatgagacagggagggaagacactgaatgaaaggtgtgttatcaacaaatgtaaatgaggctcaatcctactagggaaacgtgggagttagaacaataggccaacgagggccttagaattctcccctgaagtgcagatatttagggtacttattcaygactcccatcagtccccaacaagagccattcattcccaacagtggccatgcaggctccaacagccaggaagagcctgcaggcaaagaggtgcaggtgctacaaagaagcattgggtccatgtatatgtgcttaaagaataagggctgatgggatggcaggtgagcctcatatgtgtctgctatagactctgcagggcaagaaaggatgagcattttggggacggtggattagcatgtacaaagacccagaggagatctggaagggggcaagggcaggaaatgaaagagggggatgtcctggggaataatgcagagagattttgactgggaaggactaaatcattaggaatgatgacagaccccaaa

SEQ ID NO: 67344 - DNA, 748 bp, Homo sapiens
agtgggagaatcatcatggtgctgactgaagtccctcccagtgacccttcctgccctgcccaccccactgcccctggggccagctgggctgtggacccttctgtacttggaacatggaaggagacaaatgcttagggatgcaatgcagttggcttccaccctttccaaaagcctacagcattcatgaggcctgaaggaaaggaagcggcgggcgtcgctggaagctcagagacacacaggtcataacagaaagggaaacgtggctgcagttctagcttggtttatgtccttccggtctttttcccaggcatattaaacccatcagggaatagatggctcactgggggaggaaagtgaggagagtttgaagaaggagtttacaaggtgtggggcagggtttaaggaaaccagcaaggtagggtgcaacacctggggctagcctcagtgggtgcagttaacacccccgacaggaaggggtgaggggagggagggagcagttgccaggacctcgaaggcctaaaggtcttgtgggagcgctgcctggggagaagagtcacctcagtagggagatgtagcagcttggcagggagggcacgaatgctggcctcactctccttttctcccattggctgrgccatcaggaagccagagggcaggaagtaggttgatgcagtccacacaggcaagcctccaagggcagagagtgggtggagaggggggagcgtggatctgagagagccaagggaag

SEQ ID NO: 67345 - DNA, 696 bp, Homo sapiens
acccaggaggcagaggttgcagtgaaccgagatcatgctactgtactacaacctgggcaacagagcaagactacatctcaaaataaataaataataagttaattaaatttaaaaattgggcagagtggcatgtgcctgtagttccagctactcaggaggctgaggcaggtggattgtttgagcctaggagtttgaagctgtggtgagtgagccatgatcttgccactgcacaccagtctgggcaacagaatgagaccccgtctctttaaaggaaaaaaaaaaaaacaaaaaaaaaaaacccaccaagcaagcataggaattagaagtcttataactccctaagttctgttccttgcactgccacttacttacacttgagctgatagtctttcattcccataaaattgggcatataatctgtagagagtgccatgcaatggggttttgaaataaagctgtgaatattaccgtcttccttagaaatgtgcacaatttccagcagtcattggatttgaaaattagattgtcttggtatttattgacacctatgtggtacattgtttcrcttttctttgttggagtgcataaatcttaactaaaaaaaaaaaattagattgtggtgtagattaaaaataccatggaatggtggtttctgaccctggctgcatatgagaatcaacaggggaattaagaata

SEQ ID NO: 67346 - DNA, 747 bp, Homo sapiens
tttattcctggtgggtgcccataagagtttgcaaactatacccaaaagggcacgggaacccctraactttccaggctgtcttggcacacggctcactagaactgttaacgccgtcaaagtatctctgacacgtccttagcctgtgtttgaaaacctgcagagatgggatacgcccctttaccagagacagtgcattccgtccactgggagtgacacacggccaagccaggcttcaaagagagaggttcaccgtattccagtagtgactactgggatttagggttggatcaccttaccagagcttggaagctgctagaagttaacattaattttattgttctttaaaatgaaagtccagcaggagggccaggatttgggcatctcggtccttcacgaaaagaaagggtgatgttgattagccatgttccacatcccccgagttaaatataggaatagttctgacatctgactcaagaatgtgttttcttgcatgatattaaggcagatgcacagatccacgtagattaatccccttcactagtagcaggggcccgatgaggtagctgatgaggaagagcccccgagaccaggcccagcgtggggccacggccttgggatctggacgacaccccagcggttctgtgccgccagcaggccctgccgcatctctgggctggagccctgactgtcagcagatgaggccatgggttggggtgtctctcccaccagaacggcttcgtggggtgc

SEQ ID NO: 67347 - DNA, 747 bp, Homo sapiens
tttattcctggtgggtgcccataagagtttgcaaactatacccaaaagggcacgggaacccctaaactttccaggctgtcttggcacacggctcactagaactgttaacgccgtcaaagtatctctgacacrtccttagcctgtgtttgaaaacctgcagagatgggatacgcccctttaccagagacagtgcattccgtccactgggagtgacacacggccaagccaggcttcaaagagagaggttcaccgtattccagtagtgactactgggatttagggttggatcaccttaccagagcttggaagctgctagaagttaacattaattttattgttctttaaaatgaaagtccagcaggagggccaggatttgggcatctcggtccttcacgaaaagaaagggtgatgttgattagccatgttccacatcccccgagttaaatataggaatagttctgacatctgactcaagaatgtgttttcttgcatgatattaaggcagatgcacagatccacgtagattaatccccttcactagtagcaggggcccgatgaggtagctgatgaggaagagcccccgagaccaggcccagcgtggggccacggccttgggatctggacgacaccccagcggttctgtgccgccagcaggccctgccgcatctctgggctggagccctgactgtcagcagatgaggccatgggttggggtgtctctcccaccagaacggcttcgtggggtgc

SEQ ID NO: 67348 - DNA, 1364 bp, Homo sapiens
ataggaaactgcctgccacctaagagctggtcaattacattatatttcttgcactttgagaggtgtagctattcattttaccagatttaatacacattctagagagacagatgattttcttcatcgtgctgtctctatatgcagtctgagggcttatagaatgcctgattcatgaacatggtatcaaaagcaatgttgattcagaccaggaggcacatactatgcaaagaattggaacaataagcttaggatcatggatctcactggctttacattatgctttatcactgagaaacaaccagacygttagaagtgttgaaggcatatgtaagtttttggggaacaccttgtggagttataccaggaaagacaacatacattgaatcatttgccaatatatggtggcatgttccaataagtagattaaatgatccatggaaatgagggattcaaacagtaaaacacatctggccatcgtacccactgaatcatttgtgcaattattgtttctctttcttgcagctttaagttttgccagggatggtatcctagttcccagagggaaaacattttgttctaggggatactaatgatgatgttgaactagaagcttcacctaacgcatgtctaactgcccctgccagttggagtgttggccaaggatgaagaaagtctagaatgggtggtgatgtgatgaatggagttgcagcacaggaggctataacttttatttcattttatttttaaaattaatgttctttcttaaagattctagaagattgagattggtgtctacttagattctgcctgatttagcttgtattttacaattagtaaagaaatgttttactaagtggtgtcccatttgttggtatgggattcagatacactagtggggcacaatcacatttgaaaaccacaaataaaacagactatatagggcacatcttctgtgtttcataatatttgctaaaacttacctgtcttctgggcccttgttcacttgctccatcccagtgcccataggaaccaattctatataactgtctcacttcccagggacttcctagggctgtctcacatggctcagtgacagtcactgctcttcacaaagtggcagccagctcagtaacatatcaccatacatttgcttctcattcctcccagccgcatatcactgtgccatcactctcagaacccaaagattacacccaattaaatattgccacttaaggttttctcagtttgttttctagaatattggcctaagacagaggaaaatatgcataaattttcataatatataaaagcattgaatattataacaatttctatatcagttcaaataatggtatgtgtcttaa

SEQ ID NO: 67349 - DNA, 1127 bp, Homo sapiens
ttttttcttataaagataaataaaaagcatcatggcaatttgaaagggaaaccacagaaagaaaataatatatattttaatacctttaacagggctctttttcctgtttttaaaataagaagccctcattttgaacatgggcatccataatttatggagatacacaaattatgaagtgggccctgtacccacatcctcatgatacctactttgtagacaatctgctttttgttttatgatttttagagttaagtgctttgttaggagtatgtttttagtctaaaacagataggtatatgatttagtattcagttggctgtatgtagcaggccgttgatacggtttggatgttttttcctttccaaatctcatgttgaaatgtgacctccagtgttgcaggtgggcctcgtggggtgggaggtgtttgcctcatgggggcagatccctcatgaatagcttggtgctgtcatcgcattaatgagtgagttctcactctatgagacagcataagatctggttgtttaaaaggcctgatacctccttcctctttctcttgccatatgctggctgcccttttgccttctgtcataactgttagtttcctgaggccctcacccaaagcagatgctgacactatgcttcttgtacagcctgyaaaaccacttttctttataaattgcccagcttcaagtattccttggtagcaatgcaaaatggactaacaaaaataaatttagaagtgtttaaaaatggaggtttcattttcttatatttaacacaatttttcagactgacaggtctaggaggtattcaagaattccatcatattaaggctcagagtcaatgtctccatgtttctttttatcacttaatcactgtcaccagcatccagtcattctcaaacaatgcacaaacctgaagcaaaaggagaattatcttcacacactttatcaacacacttctgcagggccataggctgggattgtatctgtgctcaaatataattaaggctgagaaagtaccttgcattttcagctcctattattactagaggtaagctctgatagcccaaaaaaaaaaaaaaaagtgttggggagatatgggaaagaggtgtagagtagacaaaa

SEQ ID NO: 67350 - DNA, 503 bp, Homo sapiens
aaattagccatgcgtggtggcatgcgaccgtaaycccagctacttgggaggatgaggcaggagaatcacttgaacccggggactggaagttgcagtgagcggagatggtgccactgcactctagcctgggcggcagagtgagactcaatcttgaaaaaaataaaaataaaaataaagaatgtcccaaacccaaaacgctgacaacgccaaatgctggtgaggacgtggaacaggaacctcagtcattgcaggtgaggacgtggagcaggaacctcagtcattgcaggtgaggacgtggagcaggaacctcagtcattgcaggtgaggacgtggagcaggaacctcagtcattgcaggtgaggacgtggagcaggaacctcagtcattgcaggtgaggacgtagaggaacaggaacctcagtcattgcaggtgaggacgtagaggaacaggaacctcagtcattgcaggtgaggacgtggagcaacaggaatctcagtcattgc

SEQ ID NO: 67351 - DNA, 816 bp, Homo sapiens
aatatacaaggagcaaagccttatcctacacttaagcatcctgacatgtgacttctctgatggaaacaagaaaacctgatggttcaggtcttgaaactagagtaagtattttcttcttatcaacagccaaggcagtctctgtaaatctcaggtccaacccaacattcaatttatagccataaatattttcattatttttaaaaatttatttcatcataaaaataaaattctttttttttctttttgagacccaaaagagactccagcttgtcacccaagctggagtgcagtggcatgaccacggctcactgcagacttgacctcccagactcaagcaatcctcacctcagcctcctgagcagctgggactacargtgtttgccaccacacccagctaattttttaacttttttttttagagatggagtctcaccatgttgcccaggctgatctcgaactcctgggctcaagcaatctgcctgcttcagcctcccaaagtgctgggattacaggtgtaagtcaccatacccagccaaaagaaaattcttaatattaaagtatatgaactttgactcaaaagtttttttttaaagcaaaagaaaaggcaaaaataagagttataaagaaaacctacttttctaaaaaacagcgttttataagcagacatctagcaaatattatcaagaaaaaaagaagaaatacaaaatgcaagaaatgagaaattggaataggaacaacagaagtcaaaatgtggccaaaaaggccaggtgcagtggcttatgcctataatcccaacactttggaaggctgatggga

SEQ ID NO: 67352 - DNA, 816 bp, Homo sapiens
aatatacaaggagcaaagccttatcctacacttaagcatcctgacatgtgacttctctgatggaaacaagaaaacctgatggttcaggtcttgaaactagagtaagtattttcttcttatcaacagccaaggcagtctctgtaaatctcaggtccaacccaacattcaatttatagccataaatattttcattatttttaaaaatttatttcatcataaaaataaaattctttttttttctttttgagacccaaaagagactccagcttgtcacccaagctggagtgcagtggcatgaccacggctcactgcagacttgacctcccagactcaagcaatcctcacctcagcctcctgagcagctgggactacaagtgtttgccaccacacccagctaattttttaacttttttttttagagatggagtctcaccatgttgcccaggctgatctcgaactcctgggctcaagcaatctgcctgcttcagcctcccaaagtgctgggattacaggtgtaagtcaccatacccagccaaaagaaaattcttaatattaaagtatatgaactttgactcaaaagttttttttwaaagcaaaagaaaaggcaaaaataagagttataaagaaaacctacttttctaaaaaacagcgttttataagcagacatctagcaaatattatcaagaaaaaaagaagaaatacaaaatgcaagaaatgagaaattggaataggaacaacagaagtcaaaatgtggccaaaaaggccaggtgcagtggcttatgcctataatcccaacactttggaaggctgatggga

SEQ ID NO: 67353 - DNA, 568 bp, Homo sapiens
tttttttgagatggagttttgctcttgctgcccaggctagagtgcaatggcgcaatctcagctcactgcaaccgccgcctcctgggttgaarcaattctcccacctcagcctcctgagtaactgggattacaggtatgtgccaccatgcctggctaattttgtatttttagtggagacggggtttctccatgttggtcaggctggtcttgaactcctgacctcaggtgatctgcccccccgcccccctgacctcccaaagtgctgggattacaggcatgagccaccatccccagcctagaggcactttcaatgaaacaccattaacaatctttccaactagcctgggtgcataatactggctggagccctacagcagtgacctccagctgtcagcagtgactagcaagggatagtcagtggaataattttaacaacaagctaccagtgtcacacttgggccccttctccctcacactcaggggataagctacttttgctaccacctccaatagttatgatgaggaacgcatgtttttattttacttactgcagatgactcacaaccaa

SEQ ID NO: 67354 - DNA, 670 bp, Homo sapiens
tccacatggggatggaaggatgggggctcctgcatggtgcaccctatcattcctcagcctctgcaatggaaggagggcacggctttggcctggaaatgccacacatcactcatgtcagcctctaccagaaaggccttggccacctccactgcaagggaagtaggaaaatggaaatgaaatgaaatgtgagaccaggaagaagggaaggccgactttagtgactgattagccacttgtgyacagaaccaaagcacgggtcacagaagaatcctctcccagctaagatgaccctcagtgttaactcatgaggccagagcctgctgtccccagggagaaaggcctgtctggccccagacatacaccccctgccccacataaggggaacccagtgaacacagtgatgggctaggctttactttttatgtcatgagctggtgttcagactgccaggtccctgtctgggtggctacttactctttacttcattcctaagttgccctcaatcaaagtgatgacgtctacattcagccaagtgtggccatctgggaacatgaccccagctacatcggttcctttagacacacccctaaagccctgaatcaacagaaggaccccagtgaagagggtgcaggactcttccaaaggagacaagttcaagatgctccctcca

SEQ ID NO: 67355 - DNA, 670 bp, Homo sapiens
tccacatggggatggaaggatgggggctcctgcatggtgcaccctatcattcctcagcctctgcaatggaaggagggcacggctttggcctggaaatgccacacatcactcatgtcagcctctaccagaaaggccttggccacctccactgcaagggaagtaggaaaatggaaatgaaatgaaatgtgagaccaggaagaagggaaggccgactttagtgactgattagccacttgtgtacagaaccaaagcaygggtcacagaagaatcctctcccagctaagatgaccctcagtgttaactcatgaggccagagcctgctgtccccagggagaaaggcctgtctggccccagacatacaccccctgccccacataaggggaacccagtgaacacagtgatgggctaggctttactttttatgtcatgagctggtgttcagactgccaggtccctgtctgggtggctacttactctttacttcattcctaagttgccctcaatcaaagtgatgacgtctacattcagccaagtgtggccatctgggaacatgaccccagctacatcggttcctttagacacacccctaaagccctgaatcaacagaaggaccccagtgaagagggtgcaggactcttccaaaggagacaagttcaagatgctccctcca

SEQ ID NO: 67356 - DNA, 1327 bp, Homo sapiens
aaaatctaatgtgtaaacttggagaaatgacattagaaaacgaaagcaacaaaagagaacactctccaaaataatctgagatgcatgaaaggcaaacattcactagagctggaatttccctaagtctatgcagggataagtagcatatttgaccttcaccatgattatcaagcacttctttggaactgtgttggtgctgctggcctctaccactatcttctctctagatttgaaactgattatcttccagcaaagacaagtgaatcaagaaagtttaaaactcttgaataagttgcaaaccttgtcaattcagcagtgtctaccacacaggaaaaactttctgcttcctcagaagtctttgagtcctcagcagtaccaaaaaggacacactctggccattctccatgagatgcttcagcagatcttcagcctcttcagggcaaatatttctctggatggttgggaggaaaaccacacggagaaattcctcattcaacttcatcaacagctagaatacctagaagcactcatgggactggaagcagagaagctaagtggtactttgggtagtgataaccttagattacaagttaaaatgtacttccgaaggatccatgattacctggaaaaccaggactacagcacctgtgcctgggccattgtccaagtagaaatcagccgatgtctgttctttgtgttcagtctcacagaaaaactgagcaaacaaggaagacccttgaacgacatgaagcaagagcttactacagagtttagaagcccgaggtaggtggagggactagaggacttctccagacatgattcttcatagagtggtaatacaatttatagtacaatcacattgctttgattttgtgtatatatatatttatctgtgttttaagattgtgcatattgaccacaattgtttttattttgtaatgtggctttatatattctatccattttaaattgtttgtatgtcaaaataaattcattaatatggttgattcttcaaatgggtgtattttcatacaggctggctgggtagatacaataaaatatgccactaatgtaaaaatactttccttaacatagaactccattgcaatgatttgcttatttgccagaaattgctagagacaatgagaaatattgggaataatttgcattttaagatttgaaaatattattacacagtgaatatttacattacaggagacasaatagaaatatggtgaaaggacatgaacagtttgcagagaaaaaaaactacattaaaagaggttcaatctcactcatgataatagaaatacaaattaaatagcat

SEQ ID NO: 67357 - DNA, 1327 bp, Homo sapiens
aaaatctaatgtgtaaacttggagaaatgacattagaaaacgaaagcaacaaaagagaacactctccaaaataatctgagatgcatgaaaggcaaacattcactagagctggaatttccctaagtctatgcagggataagtagcatatttgaccttcaccatgattatcaagcacttctttggaactgtgttggtgctgctggcctctaccactatcttctctctagatttgaaactgattatcttccagcaaagacaagtgaatcaagaaagtttaaaactcttgaataagttgcaaaccttgtcaattcagcagtgtctaccacacaggaaaaactttctgcttcctcagaagtctttgagtcctcagcagtaccaaaaaggacacactctggccattctccatgagatgcttcagcagatcttcagcctcttcagggcaaatatttctctggatggttgggaggaaaaccacacggagaaattcctcattcaacttcatcaacagctagaatacctagaagcactcatgggactggaagcagagaagctaagtggtactttgggtagtgataaccttagattacaagttaaaatgtacttccgaaggatccatgattacctggaaaaccaggactacagcacctgtgcctgggccattgtccaagtagaaatcagccgatgtctgttctttgtgttcagtctcacagaaaaactgagcaaacaaggaagacccttgaacgacatgaagcaagagcttactacagagtttagaagcccgaggtaggtggagggactagaggacttctccagacatgattcttcatagagtggtaatacaatttatagtacaatcacattgctttgattttgtgtatatatatatttatctgtgttttaagattgtgcatattgaccacaattgtttttattttgtaatgtggctttatatattctatccattttaaattgtttgtatgtcaaaataaattcattaatatggttgattcttcaaatgggtgtattttcatacaggctggctgggtagatacaataaaatatgccactaatgtaaaaatactttccttaacatagaactccattgcaatgatttgcttatttgccagaaattgctagagacaatgagaaatattgggaataatttgcattttaagatttgaaaatattattacacagtgaatatttacattacaggagacacaatagaaatatggtgaaaggacatgaacagtttgcagagaaaaaaaactacattaaaaraggttcaatctcactcatgataatagaaatacaaattaaatagcat

SEQ ID NO: 67358 - DNA, 544 bp, Homo sapiens
tataaaatatttttcttaaatgcatatgatattaagtgtttaatatgtttacatacaaaagtctaataattacattttgttttccttgcagtcatctttataatgaatttcttgctgttaatgaacacaataatgaaggcaaattgtaattttgccatctgtgttaatgtaggtccagccatgaaaagtccttgacaaattccartaactaataaactgggttttatatttcttataatatcaaaaacatgaacaaagaaaggatgatatactgcttctgttaaagtttataaacaatatacatattggggcttttcttaaactgtttacttctaagcagaattataggtttcccaaaccttcccaacatcatggacctgattttacattgttaattatttctgaaagagataatattactttcacttatcaagtaactaaaataaaactgttgaagagtcattaatataaccctacagtatttctattaaatatgactagacaaataaatcataagctattttaaaaccagctactcctattt

SEQ ID NO: 67359 - DNA, 484 bp, Homo sapiens
gaaatgcatattgtaattttcacatatattgaaaaatggtttggttatatttctgaaattaaattataattttatttttatcagagaaagtcatttacgtaatgccaggcacactgacaggtttattctcaaggcttagtgtgtctatttaaacctatgatttttaatcattttgatcagggcaaattctcatgtgtatgtagagtaaaatatctccataaaggggttacatcaaaatctcacagggaaactgtaccattcaatccttcatcaaatatttatatgtgactttagcatcatagctttagatgactaagagctacatttgkggtcataaagcacttgaaatgtttggcccaaattgggatatgcttatcacatacaatatataacagattttgaagacttagtatgaaaagaatatatgaaatatctcattaacatcctaaaatattatgtataagttgaaatgctaatggatata

SEQ ID NO: 67360 - DNA, 1172 bp, Homo sapiens
tgcatagtgcctttattcattgtgggtttaacttaatccatgaacattgtacatttcatcatcattttttcagtttgttcctattgttgtactggagttggtgtatgtgaagacagcattatcaaaaaagagaaaagcttatatcacttccttacttctttaatatcctcttcattttgggatgacttattttccctccgtaccttttgctaaaatcacgtttagttgaaagtgagaaagcaaagactattctttgtttttcctttctggtgtcaaaagcaaaaattaaaatcaaggaagacaccaataccattaaacgtctgttatttaactcattaaaattgtttgtgtcaattgaatattcaaaaattattttctatttatgacttttatcattttttatctttctagaactaaatagttacactaacctataaatataaacacgaaaagttaactcagctaactctctcctccaaaatcttttttaagtactaaaattcactcaacagaagacaatgataagaaattcacttatgtaagacaattaaggttatttatcctacactacagtaaacctgttgatagctctctaaggtttgtagcatcttaaacttcaatgtacacaatgagaacttttaatttctttccattctttggtatgaatttaatgttcatttagctgtgaaacacgtgcaccttgtgtgttgaaatccacttcatctcttatagcaagcttgtccaaccggcccattggccacatgtagcccaagatggctttgaatgtagctcaaaacaaattcataaactttctcaaaaaattatgaggggtttttttgcgattttttaaagctcatcagctatsgttagtgttagtgtattttatgtgtggcccaagacaattatttttccaaagtcgcccagggaagcccaaagattggacacccctctcttagagagtttttctctttctcactaagcagtgtgcattctaactacagaggctcttttaaatatttagttccagttacttaagattaatttaaatattctggaacagtttccctcaaatgaagacgttttctattatgcacacaaacctacctcagagcagaagttacaaaatcaaacgctacaggaacaaacgttttgctcatatagcccctaaagta

SEQ ID NO: 67361 - DNA, 868 bp, Homo sapiens
taacttgcattctaattgtgttaatgttacatattttaaatacattgacatattaccgaaacacatttgtgtgcattttattctgaaatctctgatgcaggaccaaggcctgttcctcaagtacaggtttattgattagaattgtttcaattagctcatatcatatctttcacatacacaccatacttctttttccttatgtatttatttatttattttttgagacagggtctcatgctgtcacccaggctgcagtgcagtggtgcaatctccactcactgcagcctcaactttccaagctcaatcgatcctccctcctcagcctcctgagaagctgggaccatatgcacatgcagccatgcccagctaatttttgtagagacaatatctccctatgttgcccaggctggtctcaaactcctgggctcaagcagatggcctgactcagcttcccaaagttctggaactataggcatgagccacctttcccagcctacacaccatacttctaatgtatctcctgagatttctaatattggcttccttaaaagtgaaaaaataaaaataaaactttagcaaaataatgagaatctttatgagtttttgttttattttcctcaaagtcttctatagtttttacacacacctaatttaacagcatttaaaaaaatcgtattgtctttagagagtctttctaaaacattcaactcaattttccyagaaaaaaaaattttcttccaactcttattgcataagtttatgtaacatttaatgcaattacataattccaataacaactaaattaaaccggtttgagagcaaacataacggacatttggcaagaccccaactctgattgtggggagcg

SEQ ID NO: 67362 - DNA, 868 bp, Homo sapiens
taacttgcattctaattgtgttaatgttacatattttaaatacattgacatattaccgaaacacatttgtgtgcattttattctgaaatctctgatgcaggaccaaggcctgttcctcaagtacaggtttattgattagaattgtttcaattagctcatatcatatctttcacatacacaccatacttctttttccttatgtatttatttatttattttttgagacagggtctcatgctgtcacccaggctgcagtgcagtggtgcaatctccactcactgcagcctcaactttccaagctcaatcgatcctccctcctcagcctcctgagaagctgggaccatatgcacatgcagccatgcccagctaatttttgtagagacaatatctccctatgttgcccaggctggtctcaaactcctgggctcaagcagatggcctgactcagcttcccaaagttctggaactataggcatgagccacctttcccagcctacacaccatacttctaatgtatctcctgagatttctaatattggcttccttaaaagtgaaaaaataaaaataaaactttagcaaaataatgagaatctttatgagtttttgttttattttcctcaaagtcttctatagtttttacacacacctaatttaacagcatttaaaaaaatcgtattgtctttagagagtctttctaaaacattcaactcaattttcccagaaaaaaaaattttcttccaactcttattgcatmagtttatgtaacatttaatgcaattacataattccaataacaactaaattaaaccggtttgagagcaaacataacggacatttggcaagaccccaactctgattgtggggagcg

SEQ ID NO: 67363 - DNA, 1288 bp, Homo sapiens
ccgaatgacagttctgcagtaattctttcgaaaccgaagtctcctgtctcatttccctatttttttttcacttcagtatttggtctaaacctttaaacttcatgctatagtgtaaatgattaatagacaaagtatttttcttattaacagaactctgcattttaactgagatgatagatattttatctttaaacagaattagtttgttagggttgccgtaataaagtaccacagactaggaggcttaaacaacagaaattcattttctcacagccctggaggctgagatcaaagtgtcatgaaggttgggtttttctgaggctgctctctttggctcattgatggccgtttcctccctgtgtctttacagagccttccctctgtacatgcctatgtccaaattttctcctcttataagtgcaccagtcacactggattagagtccaccctaatgatcttatttttacttaattaccactttaaagatcctatttccaaatatggttacattctgaggtaatgaatggggattaggacttcaacaaatgaatttggagggacaaaattcagaccgtaacagtgacttttggtaaatgccattcagcaaagagtggggatggaagaaagcttccagaatgaggttgctctgcaacgcaaaaggccagtggatatggagaaaggagatagggctagaaacttcaaaccagtgaagcagctaattttcattgaacacttacagttgctaggcagtgcactgagcaaattaccatcatttgttcctcatagcaaccatattagacagttcctattatatttaccatcataatttttttcaggttatacaatgatataagcagcagagctggctgttttttcttttcctttcttttttttttttttttttttttttttgagacagagtctcactctttgtcacccaggctggagtgcaatggtgcgatcttggctcactgcgacctccaccacccgggttcagcctcctgaatagctgggattacaggcatccaccaccacccctggctaatttttgtatttttagtactgatggggtttcaccatgttggycaagctggtctcaaactcccaaactcaggtgatcccaaagtgctgggattacaggcatgagccaccacaccccgcccagagctggatttttaacccactgtatctgacttctaaacccactttctttcctctagcaaatgcaaatagaaattgggtcccacgcaaatctaagtgattggcggttgcttcaggatcatagcca

SEQ ID NO: 67364 - DNA, 1288 bp, Homo sapiens
ccgaatgacagttctgcagtaattctttcgaaaccgaagtctcctgtctcatttccctatttttttttcacttcagtatttggtctaaacctttaaacttcatgctatagtgtaaatgattaatagacaaagtatttttcttattaacagaactctgcattttaactgagatgatagatattttatctttaaacagaattagtttgttagggttgccgtaataaagtaccacagactaggaggcttaaacaacagaaattcattttctcacagccctggaggctgagatcaaagtgtcatgaaggttgggtttttctgaggctgctctctttggctcattgatggccgtttcctccctgtgtctttacagagccttccctctgtacatgcctatgtccaaattttctcctcttataagtgcaccagtcacactggattagagtccaccctaatgatcttatttttacttaattaccactttaaagatcctatttccaaatatggttacattctgaggtaatgaatggggattaggacttcaacaaatgaatttggagggacaaaattcagaccgtaacagtgacttttggtaaatgccattcagcaaagagtggggatggaagaaagcttccagaatgaggttgctctgcaacgcaaaaggccagtggatatggagaaaggagatagggctagaaacttcaaaccagtgaagcagctaattttcattgaacacttacagttgctaggcagtgcactgagcaaattaccatcatttgttcctcatagcaaccatattagacagttcctattatatttaccatcataatttttttcaggttatacaatgatataagcagcagagctggctgttttttcttttcctttcttttttttttttttttttttttttttgagacagagtctcactctttgtcacccaggctggagtgcaatggtgcgatcttggctcactgcgacctccaccacccgggttcagcctcctgaatagctgggattacaggcatccaccaccacccctggctaatttttgtatttttagtactgatggggtttcaccatgttggtcaagctggtctcaaactcccaaactcaggtgatcccaaagtgctgggattacaggcatgagccaccacaccccgcccagagctggatttttaacccactgtatctgacttctaaacccactttctttcctctagcaaatgcaaatagaaattgggycccacgcaaatctaagtgattggcggttgcttcaggatcatagcca

SEQ ID NO: 67365 - DNA, 2294 bp, Homo sapiens
ggataaggaaaaaagatgaggtaggaatgtaggttaagccaaagcaaaaagaagagatctgcagagttatctaacaagtcaatttgcagcattcaaaatgcctttttatgtgcttatgtaagtgtagttaatgcacaggaatgacagcctgtttaaaatgttcttagttagagctaaccatcatgggttaatagtgaccaaaaggaggaagaccttcagaattatgagaacaccatgagaatcacagaaacttggagttaggaataagtgtcatgggtaggtatgaagaaagctttctctgaaagacaaccaagttgtaggagcttgagactccctaatgaatctacaaacagggaagaaaaggaggcattctataacacagttttgagaaagactgtaaaacaacatctttggagagaattaagggagagtatttccagttgctcgtattagactgtcttttatttggtggtcaaggagccaacttttaagacctgtgggccaggcaaactgagacccccaaatctgctgccatcaggtcagaacaatcagagggagctcaggtcaatgtgtcaggaaatgtatgccacgctgtcatgatgtctgggatttttcatttttataaattagaagagacagaataaatgcatttctgagagctcctgarcactttaaaaataaaaatgacatcagattttagacaaggtgctggacaactggttattacagaaacagtctgattccagatttcaactttttgtatcttagccttttttttaaaaaggaatcattcttttactttcctttatatccatcctgtcttttctatttttctgagtttctttcttttccttcagtctctttactgctctttttccttattctatgagagaaatagaggttggatagtgttggggctcagaaaacaataccacaaaatgaaggcctcagaaacagtttctctttgaccttcttctgccctcctgtctctctctctccttattctcctccaaggaaacccacagaaactgaaattcctctttctcaaggtggatcatggaagccagagcctcttttccccaaagccagccacaaagcttaacaacattactcaaaccttccacagctattttgtgtaacagctagccattaacaaatttaaaaacctcatcccagaagggtctagccacaaacccaggaagagagaaatgccacacggagaagccaagaaggatatgaacagacaggccttgcggggcttccccactcagtctatttccactgactgcatggctgtccctgcttcaacaaacgtaagcatcaaatcagatcacttctctgctgtctttgaggtcttcaatctggaggctcttgtggcatgtaaagctatgattcaaatgaatttgctatgcttttattttgttagcttgtctttattttaggggtgttggccatgaccctcctctgtctgctttcctcccctacaatagccaaatgctccttatgtgttccacagacccctggatatccatcaaattcaaatatcctaaccttctagatgaatacctggccacaagcgcaggactcattaactcacatttgcatcctcattatctaaatgaacagtttagagcttctctctcagccctatccctgaaaggtgaacctcttctgccctcacatctctttctctctcttcaccctccctccctctctctctctctctcacacacacacacactaacctgctttcttgaacgccagtttttcggggcctgtcgagcatccacaggccaggtgtccttggcctagaccattctgtttaccaggaggggctgggaaagaggccaaggactcactttaataggaaggatgtattttctagtgatttatcacttcctccataaattcaggaaacgtgtctctgctgagctaatgatttattaagaagactttcaagcagtaaatcctctctcttcccattctctgggcagtaatggcaatgttcaagtctcagagaaataggagcctgaccttcgcagaggtgacaacctttctaaaaagcagttacacttgctaaagtcacagtgggaggccttgagaagagccagcaatccgtttcgaagtcgtgactctcacctctaatggagcaatatgttctagatgaacaggctgggatccagggacagagcaacagctccttagagtaactaggccaggtattaatttttccctgtcagctccaaaccagtttttctttttcctgctttgtgatagcagagctgaattctgca

SEQ ID NO: 67366 - DNA, 675 bp, Homo sapiens
ctcctgacctcaggtgatcctcctgcctcagcctcccaaggtgctgggattacaggcgtgagccaccatgccccacctggagactattattctaagtgaagtaactcaggaatggaaaaccaaacatcatatgttctcactgatatgtgggagctaagctataaggatgcaaaggcataagaatgacactctgggaactcagaggaaagggtgaggggtggtgagggataaaagactacaccttgggtatggagtacagtgctcaggtgatgagtgcaccaaaatctcagaaataacmtctaaagaacttattcatgtatccacataccacctgttccccaaaaacctattgaaataaaaaattttttaaattagaaattcataatggaggaaagggaaagtaaaggaggtgaagcagagtagagggatgggcaagagtcaagtctttttccaaggaaagaattggtacagatgcaattaggtatataggttgggagacaagaagtttgtgattgtatttttcctgttgaatagtgttacaggatctttagagtgtcgcttttctggtcagaaacctgtggctggtggcacctttgcctgagttttgcttgggcccgtggggctcattctgcccactttgcctgacagactgcgctcagctcacactactggtct

SEQ ID NO: 67367 - DNA, 675 bp, Homo sapiens
ctcctgacctcaggtgatcctcctgcctcagcctcccaaggtgctgggattacaggcgtgagccaccatgccccacctggagactattattctaagtgaagtaactcaggaatggaaaaccaaacatcatatgttctcactgatatgtgggagctaagctataaggatgcaaaggcataagaatgacactctgggaactcagaggaaagggtgaggggtggtgagggataaaagactacaccttgggtatggagtacagtgctcaggtgatgagtgcaccaaaatctcagaaataacctctaaagaacttattcatgtatccacataccacctgttccccaaaaacctattgaaataaaaaattttttaaattagaaattcataawggaggaaagggaaagtaaaggaggtgaagcagagtagagggatgggcaagagtcaagtctttttccaaggaaagaattggtacagatgcaattaggtatataggttgggagacaagaagtttgtgattgtatttttcctgttgaatagtgttacaggatctttagagtgtcgcttttctggtcagaaacctgtggctggtggcacctttgcctgagttttgcttgggcccgtggggctcattctgcccactttgcctgacagactgcgctcagctcacactactggtct

SEQ ID NO: 67368 - DNA, 675 bp, Homo sapiens
ctcctgacctcaggtgatcctcctgcctcagcctcccaaggtgctgggattacaggcgtgagccaccatgccccacctggagactattattctaagtgaagtaactcaggaatggaaaaccaaacatcatatgttctcactgatatgtgggagctaagctataaggatgcaaaggcataagaatgacactctgggaactcagaggaaagggtgaggggtggtgagggataaaagactacaccttgggtatggagtacagtgctcaggtgatgagtgcaccaaaatctcagaaataacctctaaagaacttattcatgtatccacataccacctgttccccaaaaacctattgaaataaaaaattttttaaattagaaattcataatggaggaaagggaaagtaaaggaggtgaagcagagtagagggatgggcaagagtcaagtctttttccaaggaaagaattggtacagatgcaattaggtatataggttgggagacaagaagtttgtgattgtatttttcctgttraatagtgttacaggatctttagagtgtcgcttttctggtcagaaacctgtggctggtggcacctttgcctgagttttgcttgggcccgtggggctcattctgcccactttgcctgacagactgcgctcagctcacactactggtct

SEQ ID NO: 67369 - DNA, 1261 bp, Homo sapiens
tacatatctcatatacacacacgtgcacacgtacacacacaaagcccaggggtaaaaccactctagagttagttaattcagtggcctaactgcaccagtaaagacagaccaggtttttttcaaactaataattctgctttatcctcagactaccttctttcatggcaaaaattacagcatcacaatgtccaaaagcagcaaacgaattgtctctcctcttgtcttagtggcagtagctgttgattacctatccaagatccaccatcttagtggcagtagcttagtggcagtagttgttgattacctatccaagatccaccatcctcttcttcttcactaaaagaaccttgattttgtgcccagctaaacacactttctaagacttctttttggtcaagggtgaccatgtgatataattttggactataagatgtaagcagaaagaagtttgtgtgatggttagttttatgtgtcaacttgactggaccatggggtccccagatgtttgtttaaacattattctgagtgtatcttcaagggtgtttatggatgagattaacattttaatctgtaaagcaaattgcttgccataatgtggctgggccttattctatcaggcctaaatagaacaaaaagtctgactcttccctgagtaagagagaattttccagcagatggcctttggacttcatcagaaatatcagctcttcctgactgatgacctttaaagtgggacatcagctatccttgagtccccagtctgccaacccattctgcagattggacttgccagctttcataatactgtgaaccattccttatttatatttattcatcatatatatgtacacacacatatatgtaaatatatatatttacattatattccatatatatattctgtttctctgaagaaccctgaccaatctaatatattttgctaaatggtttctgggaaaccataagctttcttgatatgaaaggacagtagcatgtggtacagacattatcctacctrtttttccttcttcttgctttgaagtgatgactggagctagaactgcagcagccatcttgcaactatgagggaaaggtcaaagaaactagagatgtatatgccctgatatcagaaatgcaacatcagcaactgcctgcctctgggctttttgctatctgagaaaactatcccccaatttttaaaggtcatttttgttttatgttattttgaattgaaaactttcctaattgatagagtagtgat

SEQ ID NO: 67370 - DNA, 707 bp, Homo sapiens
aacagtcacgtgtggctaggggctacacaactggacagtatagctcttagatataaggattcttttaaaaatttataactaaaatagaccaggccagggtggctcatacctgtaatcctagaacttcgggagacccaggtgggaggatcgcttgaggtcaggagttcaagtttacagtgagctatgattgcaatgctgcactccagcctggggaacagaaagagactctgtctaaacaaacaaacaaacaaacaaaacaaaacacaactgaaatatgtcacatctaaaaatgagtaccatttcctgaatattatcaatttycaattgcagtgctcaaaatttttcagatatatcataaatattttttgtttgctttttttgtttttgaaatgggtcttgctctgttgcctgggctatagtgcagtggtatgagcatggctcattgcagcctcagtgtcctgagtagctgggactgcaggtgcacatcaccatgcctggctttgttttgttttattttgtagagatgaggtcactatgttgcccaggctggtcttgaactcctgagctcaagtgatcctcctgccttggcctctcaaagtgctggggttacaggcatgactcattggtcataattttaatagttgctttgcttgaaactaaatccatacactttattgtttgttgatatgtttcttaagttcttttaa

SEQ ID NO: 67371 - DNA, 1107 bp, Homo sapiens
gtgcatagtaggcacttcataaaaattagcttttgttattattattcttgttatcggtagtaatactgtcacgggacctgagttaaggttgcacgtatcattcattcatttattcattcaatgagtgtttactgtacagtgtctgctgtacaggatcctgtgctgggcattatagtgtgtgtgtgggagtgatacaaacacatggatttttcctttaatggtcttattttctggttgggaaacaaataggcatatagataaccagagtagaaagtgccaaagggactaaatagtatagggcttagaaggaaggaagagtctaattttactaggagtggaggtagaggaggaagtagggaaaggcttgctggagcaaatacaactgtgaccccattccccactgggcaagttggttcttcaggtcagttagttcaaatcaaaactacctgctcctctgctctggcattctttgcctgccacatttccaatggctgctggctccctctacttctagtagactctcatattggcttaaaagaagtgaaagagacatgaaagaccaactctttcatccctctgaaggatcctatcagttttaaaagcaaccatacacctagctcttacctgcctatggcatctttattttggtttcacattataaacccgttggatgatgagatttgaggttttccacataaatacttgatatctggtcagtttcatggcagtcattttgccctccttaacagtttatatgtcawcatttacttttgaaaatactctaacgttttcataatatggctaaacttgagattacaggagatgtatcttgacagaatgaaagagagatttgtcttttcttttcctgttaccagcaatgaatgcaatataaccaaagttattctcccatttttgcttggaaactccctgtcaaacgcaaagcctagctgtaggaattacttcctgcaagtagcatgactgatgttaaaatggcacataataacttttatcagtctttccctattgaaagtctaaaaggaacagaattaagtctagaacttaaaataaaagtttatttaaaagatgctatttcctcaatatgataaa

SEQ ID NO: 67372 - DNA, 1107 bp, Homo sapiens
gtgcatagtaggcacttcataaaaattagcttttgttattattattcttgttatcggtagtaatactgtcacgggacctgagttaaggttgcacgtatcattcattcatttattcattcaatgagtgtttactgtacagtgtctgctgtacaggatcctgtgctgggcattatagtgtgtgtgtgggagtgatacaaacacatggatttttcctttaatggtcttattttctggttgggaaacaaataggcatatagataaccagagtagaaagtgccaaagggactaaatagtatagggcttagaaggaaggaagagtctaattttactaggagtggaggtagaggaggaagtagggaaaggcttgctggagcaaatacaactgtgaccccattccccactgggcaagttggttcttcaggtcagttagttcaaatcaaaactacctgctcctctgctctggcattctttgcctgccacatttccaatggctgctggctccctctacttctagtagactctcatattggcttaaaagaagtgaaagagacatgaaagaccaactctttcatccctctgaaggatcctatcagttttaaaagcaaccatacacctagctcttacctgcctatggcatctttattttggtttcacattataaacccgttggatgatgagatttgaggttttccacataaatacttgatatctggtcagtttcatggcagtcattttgccctccttaacagtttatatgtcatcatttacttttgaaaatactctaacgttttcataatatggctaaacttgagattacaggagatgtatcttgacagaatgaaagagagatttgtcttttcttttcctgttaccagcaatgaatgcaatataaccaaagttattctcccatttttgcttggaaactccctgtcaaacgcaaagcctagctgtaggaattacttcctgcaagtagcatgactgatgttaaaatggcacrtaataacttttatcagtctttccctattgaaagtctaaaaggaacagaattaagtctagaacttaaaataaaagtttatttaaaagatgctatttcctcaatatgataaa

SEQ ID NO: 67373 - DNA, 609 bp, Homo sapiens
tcctgcagatagaaatgaataagaaacaaaagtcagaaaaattgtttgttcttaaggcacctccagttctgatttatttattagaatgagcatcactgtctctgtgtatgattaggtccaataaaccataaccataatttttattcctagaaacaggccagatgaccctttcagtatattggtattctccaatcaacaacctcaagagctcatcacacagtatgaaaagagaaagggaggaggtcggagaagaaggcatagatgagcaaagagggctacaacttctccataatatgagcattggaattcctttttcctggtccaaacagaagacatagccataaaccgaatcatgttttattaaaacatatatatatgtttatatataatagttatgtatattttttataaatatatttatataaatataaatataaatacatataaatttatatatagttatatgtaatatacataactattatatataactttatatataatatatattatatattaagttatataatatgtattatatatwaagttatatataatatataaattatatattgttatatatattataaataaataaatatatatata

SEQ ID NO: 67374 - DNA, 1114 bp, Homo sapiens
tttcagagaaattgagaatataaaatctcatttctttatttctgaaatgtatctttccatttgcttgagaaagtaatggaaatatagttataaatgattagagcctttgtaattagggtgagatttagccactttcttcttgttttatgaaatcaacagtacattggtgtataagaaaatccccagtaatcactatagcaatcttctctgctgattagaagaacgacagtataatttgcaatgcaaatggaggatttggaggtgaaaatgctgagtaaaaggaagataatgattattcaactcaagttgggaaactaccttttttgtaaaattgccttcgtaggaccgagtctatcctgaactgcagcgtttcatggctgtgtctgatgtaccttctctttcggtgggcaaggaagtccaatgggagaaactgattgcaaaagcagcatcaatcagagatatatgtaagcagaggtatgatgtcattaactcttaggaatgtatatcatgatatattattttgtatttaattttttaattgcaagcaagaggcaagaaaagataggcagaggatatataagtactaataattttttaacttaagttttctgattataaaatgtaataatattgaacaatagctttgagaagtatgtcttttcttttcaggactagtcttgtatctaggttygtaggatatttatatcgttttctgattaataatttaatattgcagtaaaacatgtgatgttatgttttctatttttctgtatatgaatccctgaaaactacacagtagactgttgtcataaactattctttcttatattctccctttgtttaagtagggagataagtagttttaatggggagaccttatttttggaaatggaattatttgtaattataacaaggaagaaaatgatgatgaatttttatgtatgctgtaagcttttaggaaaacataaagaaattaggaagatgactctgctgttctagattatggattaataaacagggtggaggtgacaagactgaaataatacaagtcaagctctaccatatccaaatttttttttcttgcatgtggtaagataaaaatgtttacagaaga

SEQ ID NO: 67375 - DNA, 943 bp, Homo sapiens
aaatctgtttgcaaccttattaacagctgtagagtattctgtttaagaggagtcacattttagtcattttcctaatgacagacatgtgtttttttctcttcctctttaaaagataacacatacagtataatattgtcttttttttttcttttttgaggtgatctcactttgtcacccaggctggagtgcagtggcgtgatcatggctcactgcagccccaacctcctgggctcaagtgatcctcccacctcggtcccccaagtagctgggactacaggctcatgccaccacacttggccagtttttgtattttttgtagagatggggttttgcccagtatggtctcaaattcctgggcccaagcgattcgcccaccttgggcctcccaaagtgctgggattataggaatatcttcttttgagtatagataagggtatgtctataggatggggtcatagaagcagaatttatgggaaaaggggtataaaattttcatagatactgtcaatttgctctgcacaaaggctgaaccaacatatcaacatgaaagtgcttacttcccccacctactctttaacactgagtattatgaatcttattcttctgtgatttgtgtatctctattctctgctcagtttgctattttatgatctgctttattttgttgcttttcttgttttgtgggcatgtatgctgtaaacattttatcttagactctctcttarctttgttttcactctgctaaaaactttccctaccaactttgctgaaactatctggaattttagttacagatttttctttttgttattttttacattatttctccataaattctttcaaagcaattgctttaatctttatagtcacatttgaaaaataattgtatgttctgatattcatgcataccaaagttacttgtagtctacatgctttttatttc

SEQ ID NO: 67376 - DNA, 943 bp, Homo sapiens
aaatctgtttgcaaccttattaacagctgtagagtattctgtttaagaggagtcacattttagtcattttcctaatgacagacatgtgtttttttctcttcctctttaaaagataacacatacagtataatattgtcttttttttttcttttttgaggtgatctcactttgtcacccaggctggagtgcagtggcgtgatcatggctcactgcagccccaacctcctgggctcaagtgatcctcccacctcggtcccccaagtagctgggactacaggctcatgccaccacacttggccagtttttgtattttttgtagagatggggttttgcccagtatggtctcaaattcctgggcccaagcgattcgcccaccttgggcctcccaaagtgctgggattataggaatatcttcttttgagtatagataagggtatgtctataggatggggtcatagaagcagaatttatgggaaaaggggtataaaattttcatagatactgtcaatttgctctgcacaaaggctgaaccaacatatcaacatgaaagtgcttacttcccccacctactctttaacactgagtattatgaatcttattcttctgtgatttgtgtatctctattctctgctcagtttgctattttatgatctgctttattttgttgcttttcttgttttgtgggcatgtatgctgtaaacattttatcttagactctctcttaactttgttttcactctgctaaaaactttccctaccaactttgctgaaactrtctggaattttagttacagatttttctttttgttattttttacattatttctccataaattctttcaaagcaattgctttaatctttatagtcacatttgaaaaataattgtatgttctgatattcatgcataccaaagttacttgtagtctacatgctttttatttc

SEQ ID NO: 67377 - DNA, 820 bp, Homo sapiens
ttatatgtcttttatgaaatatatgttcacacacacacatatgaaatcctgtatagaaatatatacatgaaatgaggtataacgtctctcatgggccatttagaagacttaaataggaaagatggaatctcctaggcttaggcagtccttctgccttggcctctcaaagtgctgggattacaggcatgagctaccatgcctggccaataaaaaaaattttaaaaaacaaaataaaaaagcaagcgatgggctggatttggcctgctggccagtagcattgaattagatgggcacacctctggcagacattactgatcaatcacagccttgactgtttcttagaagtaaccaccgatccatcagagtcagatgaaaattacttggggatggccctgggaggggtgatcattaaggccctttcccactgtagaagtccgctgaaaacttatttgattttctgcctccttctcttcatttggagaatttaaatacacctctgtagtgtgtgatttttgctttggtaaacttgtgcaaaagcatcctgatttgatgtccactggttgccattctctcctgaggccattcgtggagacattgggtacttgtctctgcttctgaggtgagtcacggagacttatgcaccagartgaaatgctgagatgttcttgggcttactttttattttgtaggacttatttgtagccaaagaatttcttccccagagtgcgtttttgaagtggctgggtacccacgtttgcactcatgtcatatgtaaggagctctgtggaaatatgctgttttcttctgtgtgcttttaatg

SEQ ID NO: 67378 - DNA, 804 bp, Homo sapiens
tttgacattcattctcccagccacccaccccagccacccaaaacctaaaactataaaacttctagaagataacacaggacaaaaacctttgtgatcttaggctaggcaaagatttcttagggcacaaagagtacaaaacataaaaaggaaaaaaaaaaagataaactatatttccttaaaactgaaacatttacttcttgaaagataatgttaataaaatgaaaaagcaaaccacaggctgagaggaaatatttggaaaacaaatagatgataaaaaactgatgaccaggataggtaaagaactttcacagctgaataataaaaagacaaacaagccgtataaccccaccattctactcctggacatttacccaagaaaaatgaaaacacgagtctacacagaaacctgtacatgaaggacacattattacgcttagataggaggaacacatttcaagagatctgttgtatagcaatgtgactacrgttaagaataatatactgtagtatttttttaaaatgtagagagtggatgttaagtgcccttaccacaaagagttaactatgtgacacaatgcatttgttagagttaaccattccacagtgcctatatacttcaaaatgccatgttgtacacagtaataacatataatgatgatatctgtcaattaatttctgaaaaaagtaaaactatggagacaataaaatgatcagtagttgccacaggttggggtaagggagggaagaataggtagaacacagaaaaattctaaggcagtgaaactactctgtatgatgttataa

SEQ ID NO: 67379 - DNA, 1268 bp, Homo sapiens
tctgtgacaatgttggaatgaaagtacccatctcacaatgttgctatgaggattaaataaaacatgctctgagctaaacacatagaaggttttatggtgcactctctaaaatcccatctagttttggtattctctataatgtgatgggtgtgttaagggtaacacatccattgccttcagctaaaatgcccggtatgtatctctgcacttattttatatttttcattttggcacatgtataaatagagtttcatgtagatcttggctggtttcctgtgagcctacactctttagaatttctgtaggaaaatctcccagatgacagaatgttctaaagaagctatataattatgtgtcatagtacaaaaataaaatttaaaaaaaacccaacaactaaatagaccttagcataaaccttcctatgcccttaggtggctcggcgggggagaactgytcctgtttcaaaactcaggggatcattttcctttacaaggatgggaatttttttccccctgaatctctcctgcaagccacaatcttttcccacccacagggaaaagaaaaatcactgtaaatccacagttgtgatatgcttaaagtcgtacacacacactcacattcacacacacgtcttgagctcctaagttttgattcccagcaccactattgactagacatacctccatgggcaagtcactcaacttctgtaaacctcaattttctcatctgaaagtggagacaatacctccctgtgagtgtctcacatttcctattgcttctgtaatgaatcaccacaaacttagtgtcctaaaataacacactttattttacagttctcaaggtcaatattcttaaaatcaagacagtggcagggctgcattccttctggaggccttaggggaagatctatttccttgccttttccaactgctagggagcatctgcattcattgactcatggtccgttactctgctcccctcttattctcctctgcttctaagttgcatttcctcctctgactaacacgcttatctccctcttatgggaaacatgtgatgacattgagatcacccaagtaatccaggataatctttccagctcaaaattctttacttaatcccatcttcaaagtctcctttgccatgtcagataacctcaggtgttcgggattaggatgtgggcattttgaggaggccattattctacctattacaggttataaggagcaaaccaggtcatatatacaaaagcattccactaaactttg

SEQ ID NO: 67380 - DNA, 1268 bp, Homo sapiens
tctgtgacaatgttggaatgaaagtacccatctcacaatgttgctatgaggattaaataaaacatgctctgagctaaacacatagaaggttttatggtgcactctctaaaatcccatctagttttggtattctctataatgtgatgggtgtgttaagggtaacacatccattgccttcagctaaaatgcccggtatgtatctctgcacttattttatatttttcattttggcacatgtataaatagagtttcatgtagatcttggctggtttcctgtgagcctacactctttagaatttctgtaggaaaatctcccagatgacagaatgttctaaagaagctatataattatgtgtcatagtacaaaaataaaatttaaaaaaaacccaacaactaaatagaccttagcataaaccttcctatgcccttaggtggctcggcgggggagaactgctcctgtttcaaaactcaggggatcattttcctttacaaggatgggaatttttttccccctgaatctctcctgcaagccacaatcttttcccacccacagggaaaagaaaaatcactgtaaatccacagttgtgatatgcttaaagtcgtacacacacactcacattcacacacacgtcttgagctcctaagttttgattcccagcaccactattgactagacatacctccatgggcaagtcactcaacttctgtaaacctcaattttctcatctgaaagtggagacaatacctccctgtgagtgtctcacatttcctattgcttctgtaatgaatcaccacaaacttagtgtcctaaaataacacactttattttacagttctcaaggtcaatattcttaaaatcaagacagtggcagggctgcattccttctggaggccttaggggaagatctatttccttgccttttccaactgctagggagcatctgcattcattgactcatggtccgttactctgctcccctcttattctcctctgcttctaagttgcatytcctcctctgactaacacgcttatctccctcttatgggaaacatgtgatgacattgagatcacccaagtaatccaggataatctttccagctcaaaattctttacttaatcccatcttcaaagtctcctttgccatgtcagataacctcaggtgttcgggattaggatgtgggcattttgaggaggccattattctacctattacaggttataaggagcaaaccaggtcatatatacaaaagcattccactaaactttg

SEQ ID NO: 67381 - DNA, 832 bp, Homo sapiens
ggatccattgctggtgagctagtgtgatcttttgggggtgttaaagaaccttgttttgtcatattgccagcactgtttttctggttccttctcatttgggtagactatgtcagagggaagtttggaactcaagggctgctgttcagattcctttgtcccacagggttgctcccttgatgtggtgctctctcctttccccctgagatagagcctcctgagagccaaactgcagtgactgttgtttctcttctcaatctagccacccagtgaagctactgggctctgggctggtataggggagtgtctgcagaatcctgtgatrtgatccctcttcaggtctctccgccacagataaccagcacctgctccaatggaggtagcaggggagtgaagtggactctgtgagggtccttggttgtatttttgttaagtgtgctggttttgtgtggacctccagccaggaggtggcgctttcaagagcacatgagctacattagcacatcagcacatcagtatagggaagattaggcagggggtggggccatagggctctcaagggattatgtcctttgtctttggctaccaggtcagctagagaaagaccatcaggtaggggcagggttaggcatgtctgagctcaggctcgcctttggtgaggcttgctgtggctgctgtgggggctgggagtgtggttcccaggccaatggagttatgttcccaggggaattatggttgcttctgctgtgtcacacaggtcactagggaagtgggggaaagccggcagtcacaggtctcacccagatcccatgcagcccacagcctgaaaggctgg

SEQ ID NO: 67382 - DNA, 772 bp, Homo sapiens
ggtactctgtaagtgacatggttttggaaacaaataattgcattgccatatgatgtgtgtaggcataaaacaagaagcaattgtctcatyttggagttgggtagtttgctcttaagaagcagtagacagatgtttagacagaagcttagcaggcacaggggaagtgagtggcaagaggactccatgactggggaaaagcatatgaaaggcacgcaggtgtgaaactcaaggtctctctgtaggaaccacaggtacttttacagtgtagctttcggggtggggaggagagaagtagactgacagagataatagaggtagtttcttctttccaaaaatcttgggcactggcccccatgaagaagatgcccactttccaaaccattgctcccactttgcagatgggagaaccaaagggaggaaaggagtaccaggctagggatgggacagggcagatgcctgaaactcaggtgaaacacaatttcacaataatgaaaaaagacttctgaataaattatcacattaattttttccttggaaaagacaaaatagtgtacaacaagcagccacttcttaataccttgggcaaaggagcaggtttcaaggactcagtttaatggaaatcgcagtgctgaagtaagatcttccacagctgcaatttaatctatttcttgtgaagtataatgtttccaaaggatcacattcatttaaaaggcttaaagatgagagatttattttctctcaaacaaaactaattaaattgaaatacattcta

SEQ ID NO: 67383 - DNA, 772 bp, Homo sapiens
ggtactctgtaagtgacatggttttggaaacaaataattgcattgccatatgatgtgtgtaggcataaaacaagaagcaattgtctcatcttggagttgggtagtttgctctkaagaagcagtagacagatgtttagacagaagcttagcaggcacaggggaagtgagtggcaagaggactccatgactggggaaaagcatatgaaaggcacgcaggtgtgaaactcaaggtctctctgtaggaaccacaggtacttttacagtgtagctttcggggtggggaggagagaagtagactgacagagataatagaggtagtttcttctttccaaaaatcttgggcactggcccccatgaagaagatgcccactttccaaaccattgctcccactttgcagatgggagaaccaaagggaggaaaggagtaccaggctagggatgggacagggcagatgcctgaaactcaggtgaaacacaatttcacaataatgaaaaaagacttctgaataaattatcacattaattttttccttggaaaagacaaaatagtgtacaacaagcagccacttcttaataccttgggcaaaggagcaggtttcaaggactcagtttaatggaaatcgcagtgctgaagtaagatcttccacagctgcaatttaatctatttcttgtgaagtataatgtttccaaaggatcacattcatttaaaaggcttaaagatgagagatttattttctctcaaacaaaactaattaaattgaaatacattcta

SEQ ID NO: 67384 - DNA, 772 bp, Homo sapiens
ggtactctgtaagtgacatggttttggaaacaaataattgcattgccatatgatgtgtgtaggcataaaacaagaagcaattgtctcatcttggagttgggtagtttgctcttaagaagcagtagacagatgtttagacagaagcttagcaggcacaggggaagtgagtggcaagaggactccatgactggggaaaagcatatgaaaggcacgcaggtgtgaaactcaagrtctctctgtaggaaccacaggtacttttacagtgtagctttcggggtggggaggagagaagtagactgacagagataatagaggtagtttcttctttccaaaaatcttgggcactggcccccatgaagaagatgcccactttccaaaccattgctcccactttgcagatgggagaaccaaagggaggaaaggagtaccaggctagggatgggacagggcagatgcctgaaactcaggtgaaacacaatttcacaataatgaaaaaagacttctgaataaattatcacattaattttttccttggaaaagacaaaatagtgtacaacaagcagccacttcttaataccttgggcaaaggagcaggtttcaaggactcagtttaatggaaatcgcagtgctgaagtaagatcttccacagctgcaatttaatctatttcttgtgaagtataatgtttccaaaggatcacattcatttaaaaggcttaaagatgagagatttattttctctcaaacaaaactaattaaattgaaatacattcta

SEQ ID NO: 67385 - DNA, 772 bp, Homo sapiens
ggtactctgtaagtgacatggttttggaaacaaataattgcattgccatatgatgtgtgtaggcataaaacaagaagcaattgtctcatcttggagttgggtagtttgctcttaagaagcagtagacagatgtttagacagaagcttagcaggcacaggggaagtgagtggcaagaggactccatgactggggaaaagcatatgaaaggcacgcaggtgtgaaactcaaggtctctctgtaggaaccacaggtacttttacagtgtagctttcggggtggggaggagagaagtagactgacagagataayagaggtagtttcttctttccaaaaatcttgggcactggcccccatgaagaagatgcccactttccaaaccattgctcccactttgcagatgggagaaccaaagggaggaaaggagtaccaggctagggatgggacagggcagatgcctgaaactcaggtgaaacacaatttcacaataatgaaaaaagacttctgaataaattatcacattaattttttccttggaaaagacaaaatagtgtacaacaagcagccacttcttaataccttgggcaaaggagcaggtttcaaggactcagtttaatggaaatcgcagtgctgaagtaagatcttccacagctgcaatttaatctatttcttgtgaagtataatgtttccaaaggatcacattcatttaaaaggcttaaagatgagagatttattttctctcaaacaaaactaattaaattgaaatacattcta

SEQ ID NO: 67386 - DNA, 655 bp, Homo sapiens
ccaccactaaaacaacaaaacaaaacccagcacccaattctcattcattatttttttacagtggtaaagaaagagaaaaacccaactcaagtgtcagctttaaaaactctgggctgtcacgtcctttctgtttgttagtttttgtgaaggacctcatcaaggagaactacaaaccactgctcaatgaaataaaagaggatacaaagaaatggaagaacattccatgctcatgggtaggaagaatcaatatcgtgaaaatggccatactgcctaaggtaatttatagattcaatgccatccccatcaagctaccaatcactttcttcacagaattggaaaaaactactttaaagttcatatggaaccaaaaaagagcccgcattgccaagtcaatcctaagccgaaagaacaaagctggaggcatcacgctacctgayttcaaactatactacaaggctacagtaacagcatggtactggtaccgaaacagagatatagatcaatggaacagaacagagccctcagaaataacgccgcatatctacaactatctgatctttgacaaacctgagaaaaataagcaatggggaaaggattccctatttaataaatggtgctgggaaaactggctagccatatgtagaaagctgaaact

SEQ ID NO: 67387 - DNA, 655 bp, Homo sapiens
ccaccactaaaacaacaaaacaaaacccagcacccaattctcattcattatttttttacagtggtaaagaaagagaaaaacccaactcaagtgtcagctttaaaaactctgggctgtcacgtcctttctgtttgttagtttttgtgaaggacctcatcaaggagaactacaaaccactgctcaatgaaataaaagaggatacaaagaaatggaagaacattccatgctcatgggtaggaagaatcaatatcgtgaaaatggccatactgcctaaggtaatttatagattcaatgccatccccatcaagctaccaatcactttcttcacagaattggaaaaaactactttaaagttcatatggaaccaaaaaagagcccgcattgccaagtcaatcctaagccgaaagaacaaagctggaggcatcacgctacctgatttcaaactatactacaaggctacagtaacagcatggtactggtaccraaacagagatatagatcaatggaacagaacagagccctcagaaataacgccgcatatctacaactatctgatctttgacaaacctgagaaaaataagcaatggggaaaggattccctatttaataaatggtgctgggaaaactggctagccatatgtagaaagctgaaact

SEQ ID NO: 67388 - DNA, 655 bp, Homo sapiens
ccaccactaaaacaacaaaacaaaacccagcacccaattctcattcattatttttttacagtggtaaagaaagagaaaaacccaactcaagtgtcagctttaaaaactctgggctgtcacgtcctttctgtttgttagtttttgtgaaggacctcatcaaggagaactacaaaccactgctcaatgaaataaaagaggatacaaagaaatggaagaacattccatgctcatgggtaggaagaatcaatatcgtgaaaatggccatactgcctaaggtaatttatagattcaatgccatccccatcaagctaccaatcactttcttcacagaattggaaaaaactactttaaagttcatatggaaccaaaaaagagcccgcattgccaagtcaatcctaagccgaaagaacaaagctggaggcatcacgctacctgatttcaaactatactacaaggctacagtaacagcatggtactggtaccgaaacagagatatagatcaatggaacagaacagagccctcagaaataacgccrcatatctacaactatctgatctttgacaaacctgagaaaaataagcaatggggaaaggattccctatttaataaatggtgctgggaaaactggctagccatatgtagaaagctgaaact

SEQ ID NO: 67389 - DNA, 1125 bp, Homo sapiens
tacttaaggtcatgcatggccttagatgtaggttacagttaaaaattattttatttcctcctaagaagtttaactcacccataagaccttctgattgttcaggttcacactggcctagactttctgtggactcttttcttacctaagtcaatcaacacaaagtggtagaaaccatggtccccttcctatctgccccaacccacccgcactaaaaagggaagcaaaaacattagctgagcaccagatttgaggcaagcaaagtatttggtcttagagatttaacactgaacaaaacaatcatggtttctactcttaggacttacggtccagtaggaaagaaaatcaacaattctaaataattacattaatatatattaatacaaagggtaccaaataacactgggttatgggagcaaaagcaaggggaattaagggtgttggtttagctctcatatttgaattcattccacaaatctaccatttactcaatatctaacaatgaatacattggtttatctctatgaggttccactttttcatctgtaaattgttactatccatttcatggatgttgagaaaattaaacaacatacatgttgaagggcttagcggctcatagtttataggtgttctatacttctcttattccatcttctgtctcactttgctacctctatgttagggtcaaaaggacctgttttaggagatggctggctgtgtctcacttgtgttggttctgtgcagcaaaaccacactgacaaatcagtgtgaggatggtactgctttaagcatgtgctgtgccccgcagarcacaagatcaggccaggtgtgccaccacactcaaaggcttcatgcctactaccatggctggaagcaatcatctcatcagcttttaaataacaaattcgtagattgtgaccctcttggaaccctaaatgctcattctaatgcttcacttatattacatttgctgtccttaggagggaaccttgcaaattaaaagctcaagtcaaatcatttgtcttaaggtagagtggggaagaagacagcccagtccactctatcactttaccagacttaacaaacactgctttataagtgagtaggtaaatttaaacttgtaaa

SEQ ID NO: 67390 - DNA, 660 bp, Homo sapiens
aatatctgagttttaactgaaaaaaaaaatctaaaagctaaaaggaagatatattgtgagctttctaaatagtatctacctagatattacttaacttattcataaagcacctttcaataatagcaattcagtaattctttccaagcacacttggaatattaaaaaaaaaaatagagaaaaaagatatacccacaatattatttggattttattatatttgaaagtgtgtgtgtgtatgtattcaacattggagctaaatgtaggctcaagaattagatacaaaaatcactataataggatagtgaatctgtcaagaaaactcaaagatgtactatatcttcaattatatgcaggcatggattacatacagtgagaaagggagaagacctgcaaggccatggcaccaaaacccagagcccaacataaagtccagtggccaacccggaaccacagttccagggtggcarcaaggacaatttagacccaccatccaaactcaatgaccaggaatggaaaaatgtaaccatgatagtaagagagagaataactcaaaattttccagtatcttccaagcttcaatccacctaactctggaatcccaagggatatgtttttatgtgtgcagatgtatggagtacctgatacaatttgttatatgca

SEQ ID NO: 67391 - DNA, 655 bp, Homo sapiens
tcaaaaggcccaatgctaattatgtaatgccagctacaaagcattactactggctagcaccatgagcatggtgagggaagggcctttcctttggtagctaaagactaaaagcaagggcaactatcaactcagtagtacaaagctgggaggaaactagagagagaagagaaaaactggagcacagctgggaaggcagcacctttaaaaaacatacacagtgtgactataaaattgcaagtcttttttttttttttaataaaaccaacataacagaatgtagaaatctaaacgaacatttctycctcaaagtagttacatccttagctccaacaaaactactattgttggagacttatttagaactcctgtttgaggaaaggccttaaaaggtggtttatgagccacattagaaaatacccttctaaactttgggctgtttaaaaacagaaaatccatactcagaggatgacaccgagaaaattaaaaaggtgctgcagctctcacggaggttccctaaagacctctagcaagttctgagcaacagcatcaccattggagaaacgtgtagcctcccaggacagccactttccatgggacggcattcatttggatagaaaagttctgctgtctgtttaaaaagaaaaaagaaaaaaaa

SEQ ID NO: 67392 - DNA, 921 bp, Homo sapiens
catgtggtttacaattctgataacagtgcaagtgatgatacaatatacactttttaaagctccccagcttttaaagctgcattagctcttctgcaatgaagaaagcaagaaggaaggaaatacagtagtccmcccttatcctcgggagatcccactgcaggattcccaggggatgcctgaaaccatacagagtactgatcactaaataaataaacacacacacaaacacacacacacagttttttcctataggtatatacctataatcaagtttaatttataaatctggcacagtaacaaatgaacagcaataaccaataagaaaacggaacaatataccatacaaaagttatgtgaacatggtctcgctcattctcaaaatatctcatagtaccgtgctcacccttcttgtgttgaagtgagatgataaaacgcttataagataagataaagtgaatgacttaggaattctgatgtagctaatatcaaccttctgactatacctaagaagggggatcatcttagggtgatcctgaatcactgagtcatgctgatgtccacagatggatgtcaaaagccgatgatgtcaatgactgaccaatgggagcacgtacagcgtggttatgttgattcatatccaggacagggtggtgcaaaatttcatcacgttactcagaacagtggacaatttaaaacttaaactactatggaagggactatgactgcttcttagggtagcagatattctagatactcttcagcaaaatggactccacactgtatctgataggtttcaaaagacttcaaaaaaggcatgttagtgtacacacatgactgggattaacattctagaattttaggactcaatggtacaccactgaggtattgaaatgaattcaactgtaaatttagattatggtt

SEQ ID NO: 67393 - DNA, 495 bp, Homo sapiens
aaacccgtcatcatcttgattcctttttttgccggacaccagcatctgttgctttaccaaattctgccagtgctccctcctaagtaccaccagaatccattattcctccatctcygcggccacctgccgtgtgaactacttactagcatcctgactgtctcctctggcccctcctattttttctgactgactgtctgtaagatttcccagggcaagtaacatctcttaaaactcttattgctgtggatgaaatcaaacttctcctcctgggcacaagaactgggcctacctcctgcccgctgctcacagtgcctgggtcattcttgccgcctttctgctctgtgagcactgcaagcgcattcctacctcaggacctttgcacttgctgcctgttttgcagagatgttttctttggctcttcacgattggctccttctcatgttctcaggccacatgtcatctcctcaggggcctcccctgcccattcatttctaa

SEQ ID NO: 67394 - DNA, 591 bp, Homo sapiens
ggtggaaaacacgtgattttgagctttcgcaagtgactaccttggggaatgggtgtgttaatggcaggtaggtggggtggggagatgaggggtatggtggaaaactcccttttgctttctagaattctgtatactttacttttccttcaaatatattttttcactataaaaatttggaactttgctaattaagcaaagagtggtagctttcagttattatttgtatttgatttcacattcagccattctttgacaatttttgtgctatttaaattataagttttcagtgcatttaaaatctattaaagtcttacacccttcccctttattcccgttaattactctcttaaatttttgctcttctattcttttaggaaatattaaaatcatactgtcaagtttcccaaaaattctgttgatatactgattgawaaaacaataaactttggatttttttcagaaatattgattttttctccatttacataaatctttttcatgagtgttggtaaacttttaaatgtaaatattacacacttcttgaagcttacttgtattataaaatatagatttattgtgagttttgtaatt

SEQ ID NO: 67395 - DNA, 591 bp, Homo sapiens
ggtggaaaacacgtgattttgagctttcgcaagtgactaccttggggaatgggtgtgttaatggcaggtaggtggggtggggagatgaggggtatggtggaaaactcccttttgctttctagaattctgtatactttacttttccttcaaatatattttttcactataaaaatttggaactttgctaattaagcaaagagtggtagctttcagttattatttgtatttgatttcacattcagccattctttgacaatttttgtgctatttaaattataagttttcagtgcatttaaaatctattaaagtcttacacccttcccctttattcccgttaattactctcttaaatttttgctcttctattcttttaggaaatattaaaatcatactgtcaagtttcccaaaaattctgttgatatactgattgaaaaaacaataaactttggatttttttcagaaatattgattttttctccatttacataaatctttttcatgagtgttggtaaacttttaaatgtaaatattacacacttcttgaagcttacttgtattataaaatatagatttattktgagttttgtaatt

SEQ ID NO: 67396 - DNA, 2055 bp, Homo sapiens
aaggttgctctgaattagctaaagccaggaaagattattaaatgatcaattttttcccggtccaaagtatccattccaaagacagtataaggaaggggagttggcaggggagtaccatgataggttttctatttcatgccctggggatcaattttcctctagacctacacatgatcttctgtgccatcagattctgtttttatataacattgttgaaaagtttttgttttgcttactctagcagttgcaaataatggcctacagggaaatactgttccatcagatcggacatcagtcctcttattgagattcctgtagatagagtaaaaggaagccctattaaccatcccctttcaaagatgactgactctcatgagggccatttaaataaataaaaattaagttcataaggcaaaaccatatacacmagcatgcaaggcatgccatgacttaaaggctttaaatgttaagacataattgtgttctgcttgccagggagccagatcaggactagaagaagaaaaaaaagcctgttcattaatccagaagttcaacagcagctattccacttgggaatgtcgctgtgaccactgacaacttcatgactgcagggagggtccacagggagagaaaaactatccatgaccttcctttgccttcagtgctctagaaggacacgctctgtgtgtctgccctttcttatgagatgcagacctcaagaataggcatgggtggtgggagaaagcaaagactttggagtcaagaggacataactgtaaaatggttaaacaatggtaccaacctcagagaagaattataaaagtaaatgaggttatgtacagaaagtggccaagcatgctgactcatgcctgtaatcccagtactttaggaggctgaggtagaaggatcacttgaggccaggagttcgagaccagcctggacaagatagggagactttgtctctacaaaaatttttaaaaattagcaagacatggccaggcatggtggctcactcctttaatcctagcactttgggaggctgaggcaggtggatcacttgaggtcaggagttcgagagcagcctggccaacatggtgaaaccctgtctctactaaacatacaaaaaattagctgtgcgtggtgatgcatgcctatagttctagctacttgggaggctgagcacaagagttgcttgaattcgaggggcagaaccgaggttgtgccactgcactccagcctgggcaacagagtgagactcagtctcaaaaaaaaaaaaaattagacagatacggtgggaacacagctgtagttagagctactcaggaggctgaggcgggagaatggcttgagcccaggagtttgaagttacaatgagctatgatggcaccattgcactatagcctgggtgacaggatgagaaactgtctcttaaaaaaaaaatcagccagatatggtggcaacacacctgtagttccagctactcaggaggctgagatgggagaatggtttgagcccaggagtttgaagttacagtgagctatgatggcaccattgcactctagcctgggtgacagaatgagaagctgtctctcttaaaaaaaaaaaaaaaaaggaaagtgactatcacattgactggcatgtagtgtgatgttacttcctaccaagtgcttgatattccagtgcatccttgacatattcatatgttgattcagtaaatatttattgaatttctctaatgtggcagatcttgttccaaggattatataaattaataaacaaaacagccttgccctcaggaaccttatcacctagactttgataaaagtctgaaatttgaaaatactttgggttgaaattacatatgaatcctgggagaaaaagagggtttatcatatttcccctgaattgttcagatcagcttcttctggccgtatggaggttaaacacgcccatagcatttattacggaaacttttttccatcctaataaaactgcttgagtagaaaattccttctacataagctcatttcatatatttttaacagacagcttgga

SEQ ID NO: 67397 - DNA, 2055 bp, Homo sapiens
aaggttgctctgaattagctaaagccaggaaagattattaaatgatcaattttttcccggtccaaagtatccattccaaagacagtataaggaaggggagttggcaggggagtaccatgataggttttctatttcatgccctggggatcaattttcctctagacctacacatgatcttctgtgccatcagattctgtttttatataacattgttgaaaagtttttgttttgcttactctagcagttgcaaataatggcctacagggaaatactgttccatcagatcggacatcagtcctcttattgagattcctgtagatagagtaaaaggaagccctattaaccatcccctttcaaagatgactgactctcatgagggccatttaaataaataaaaattaagttcataaggcaaaaccatatacaccagcatgcaaggcatgccatgacttaaaggctttaaatgttaagacataattgtgttctgcttgccagggagccagatcaggactagaagaagaaaaaaaagcctgttcattaatccagaagttcaacagcagctattccacttgggaatgtcgctgtgaccactgacaacttcatgactgcagggagggtccacagggagagaaaaactatccatgaccttcctttgccttcagtgctctagaaggacacgctctgtgtgtctgccctttcttatgagrtgcagacctcaagaataggcatgggtggtgggagaaagcaaagactttggagtcaagaggacataactgtaaaatggttaaacaatggtaccaacctcagagaagaattataaaagtaaatgaggttatgtacagaaagtggccaagcatgctgactcatgcctgtaatcccagtactttaggaggctgaggtagaaggatcacttgaggccaggagttcgagaccagcctggacaagatagggagactttgtctctacaaaaatttttaaaaattagcaagacatggccaggcatggtggctcactcctttaatcctagcactttgggaggctgaggcaggtggatcacttgaggtcaggagttcgagagcagcctggccaacatggtgaaaccctgtctctactaaacatacaaaaaattagctgtgcgtggtgatgcatgcctatagttctagctacttgggaggctgagcacaagagttgcttgaattcgaggggcagaaccgaggttgtgccactgcactccagcctgggcaacagagtgagactcagtctcaaaaaaaaaaaaaattagacagatacggtgggaacacagctgtagttagagctactcaggaggctgaggcgggagaatggcttgagcccaggagtttgaagttacaatgagctatgatggcaccattgcactatagcctgggtgacaggatgagaaactgtctcttaaaaaaaaaatcagccagatatggtggcaacacacctgtagttccagctactcaggaggctgagatgggagaatggtttgagcccaggagtttgaagttacagtgagctatgatggcaccattgcactctagcctgggtgacagaatgagaagctgtctctcttaaaaaaaaaaaaaaaaaggaaagtgactatcacattgactggcatgtagtgtgatgttacttcctaccaagtgcttgatattccagtgcatccttgacatattcatatgttgattcagtaaatatttattgaatttctctaatgtggcagatcttgttccaaggattatataaattaataaacaaaacagccttgccctcaggaaccttatcacctagactttgataaaagtctgaaatttgaaaatactttgggttgaaattacatatgaatcctgggagaaaaagagggtttatcatatttcccctgaattgttcagatcagcttcttctggccgtatggaggttaaacacgcccatagcatttattacggaaacttttttccatcctaataaaactgcttgagtagaaaattccttctacataagctcatttcatatatttttaacagacagcttgga

SEQ ID NO: 67398 - DNA, 2055 bp, Homo sapiens
aaggttgctctgaattagctaaagccaggaaagattattaaatgatcaattttttcccggtccaaagtatccattccaaagacagtataaggaaggggagttggcaggggagtaccatgataggttttctatttcatgccctggggatcaattttcctctagacctacacatgatcttctgtgccatcagattctgtttttatataacattgttgaaaagtttttgttttgcttactctagcagttgcaaataatggcctacagggaaatactgttccatcagatcggacatcagtcctcttattgagattcctgtagatagagtaaaaggaagccctattaaccatcccctttcaaagatgactgactctcatgagggccatttaaataaataaaaattaagttcataaggcaaaaccatatacaccagcatgcaaggcatgccatgacttaaaggctttaaatgttaagacataattgtgttctgcttgccagggagccagatcaggactagaagaagaaaaaaaagcctgttcattaatccagaagttcaacagcagctattccacttgggaatgtcgctgtgaccactgacaacttcatgactgcagggagggtccacagggagagaaaaactatccatgaccttcctttgccttcagtgctctagaaggacacgctctgtgtgtctgccctttcttatgagatgcagacctcaagaataggcatgrgtggtgggagaaagcaaagactttggagtcaagaggacataactgtaaaatggttaaacaatggtaccaacctcagagaagaattataaaagtaaatgaggttatgtacagaaagtggccaagcatgctgactcatgcctgtaatcccagtactttaggaggctgaggtagaaggatcacttgaggccaggagttcgagaccagcctggacaagatagggagactttgtctctacaaaaatttttaaaaattagcaagacatggccaggcatggtggctcactcctttaatcctagcactttgggaggctgaggcaggtggatcacttgaggtcaggagttcgagagcagcctggccaacatggtgaaaccctgtctctactaaacatacaaaaaattagctgtgcgtggtgatgcatgcctatagttctagctacttgggaggctgagcacaagagttgcttgaattcgaggggcagaaccgaggttgtgccactgcactccagcctgggcaacagagtgagactcagtctcaaaaaaaaaaaaaattagacagatacggtgggaacacagctgtagttagagctactcaggaggctgaggcgggagaatggcttgagcccaggagtttgaagttacaatgagctatgatggcaccattgcactatagcctgggtgacaggatgagaaactgtctcttaaaaaaaaaatcagccagatatggtggcaacacacctgtagttccagctactcaggaggctgagatgggagaatggtttgagcccaggagtttgaagttacagtgagctatgatggcaccattgcactctagcctgggtgacagaatgagaagctgtctctcttaaaaaaaaaaaaaaaaaggaaagtgactatcacattgactggcatgtagtgtgatgttacttcctaccaagtgcttgatattccagtgcatccttgacatattcatatgttgattcagtaaatatttattgaatttctctaatgtggcagatcttgttccaaggattatataaattaataaacaaaacagccttgccctcaggaaccttatcacctagactttgataaaagtctgaaatttgaaaatactttgggttgaaattacatatgaatcctgggagaaaaagagggtttatcatatttcccctgaattgttcagatcagcttcttctggccgtatggaggttaaacacgcccatagcatttattacggaaacttttttccatcctaataaaactgcttgagtagaaaattccttctacataagctcatttcatatatttttaacagacagcttgga

SEQ ID NO: 67399 - DNA, 2055 bp, Homo sapiens
aaggttgctctgaattagctaaagccaggaaagattattaaatgatcaattttttcccggtccaaagtatccattccaaagacagtataaggaaggggagttggcaggggagtaccatgataggttttctatttcatgccctggggatcaattttcctctagacctacacatgatcttctgtgccatcagattctgtttttatataacattgttgaaaagtttttgttttgcttactctagcagttgcaaataatggcctacagggaaatactgttccatcagatcggacatcagtcctcttattgagattcctgtagatagagtaaaaggaagccctattaaccatcccctttcaaagatgactgactctcatgagggccatttaaataaataaaaattaagttcataaggcaaaaccatatacaccagcatgcaaggcatgccatgacttaaaggctttaaatgttaagacataattgtgttctgcttgccagggagccagatcaggactagaagaagaaaaaaaagcctgttcattaatccagaagttcaacagcagctattccacttgggaatgtcgctgtgaccactgacaacttcatgactgcagggagggtccacagggagagaaaaactatccatgaccttcctttgccttcagtgctctagaaggacacgctctgtgtgtctgccctttcttatgagatgcagacctcaagaataggcatgggtggtgggagaaagcaaagactttggagtcaagaggacataactgtaaaatggttaaacaatggtaccaacctcagagaagaattataaaagtaaatgaggttatgtacagaaagtggccaagcatgctgactcatgcctgtaatcccagtactttaggaggctgaggtagaaggatcacttgaggccaggagttcgagaccagcctggacaagatagggagactttgtctctacaaaaatttttaaaaattagcaagacatggccaggcatggtggctcactcctttaatcctagcactttgggaggctgaggcaggtggatcacttgaggtcaggagttcgagagcagcctggccaacatggtgaaaccctgtctctactaaacatacaaaaaattagctgtgcgtggtgatgcatgcctatagttctagctacttgggaggctgagcacaagagttgcttgaattcgaggggcagaaccgaggttgtgccactgcactccagcctgggcaacagagtgagactcagtctcaaaaaaaaaaaaaattagacagatacggtgggaacacagctgtagttagagctactcaggaggctgaggcgggagaatggcttgagcccaggagtttgaagttacaatgagctatgatggcaccattgcactatagcctgggtgacaggatgagaaactgtctcttaaaaaaaaaatcagccagatatggtggcaacacacctgtagttccagctactcaggaggctgagaygggagaatggtttgagcccaggagtttgaagttacagtgagctatgatggcaccattgcactctagcctgggtgacagaatgagaagctgtctctcttaaaaaaaaaaaaaaaaaggaaagtgactatcacattgactggcatgtagtgtgatgttacttcctaccaagtgcttgatattccagtgcatccttgacatattcatatgttgattcagtaaatatttattgaatttctctaatgtggcagatcttgttccaaggattatataaattaataaacaaaacagccttgccctcaggaaccttatcacctagactttgataaaagtctgaaatttgaaaatactttgggttgaaattacatatgaatcctgggagaaaaagagggtttatcatatttcccctgaattgttcagatcagcttcttctggccgtatggaggttaaacacgcccatagcatttattacggaaacttttttccatcctaataaaactgcttgagtagaaaattccttctacataagctcatttcatatatttttaacagacagcttgga

SEQ ID NO: 67400 - DNA, 2055 bp, Homo sapiens
aaggttgctctgaattagctaaagccaggaaagattattaaatgatcaattttttcccggtccaaagtatccattccaaagacagtataaggaaggggagttggcaggggagtaccatgataggttttctatttcatgccctggggatcaattttcctctagacctacacatgatcttctgtgccatcagattctgtttttatataacattgttgaaaagtttttgttttgcttactctagcagttgcaaataatggcctacagggaaatactgttccatcagatcggacatcagtcctcttattgagattcctgtagatagagtaaaaggaagccctattaaccatcccctttcaaagatgactgactctcatgagggccatttaaataaataaaaattaagttcataaggcaaaaccatatacaccagcatgcaaggcatgccatgacttaaaggctttaaatgttaagacataattgtgttctgcttgccagggagccagatcaggactagaagaagaaaaaaaagcctgttcattaatccagaagttcaacagcagctattccacttgggaatgtcgctgtgaccactgacaacttcatgactgcagggagggtccacagggagagaaaaactatccatgaccttcctttgccttcagtgctctagaaggacacgctctgtgtgtctgccctttcttatgagatgcagacctcaagaataggcatgggtggtgggagaaagcaaagactttggagtcaagaggacataactgtaaaatggttaaacaatggtaccaacctcagagaagaattataaaagtaaatgaggttatgtacagaaagtggccaagcatgctgactcatgcctgtaatcccagtactttaggaggctgaggtagaaggatcacttgaggccaggagttcgagaccagcctggacaagatagggagactttgtctctacaaaaatttttaaaaattagcaagacatggccaggcatggtggctcactcctttaatcctagcactttgggaggctgaggcaggtggatcacttgaggtcaggagttcgagagcagcctggccaacatggtgaaaccctgtctctactaaacatacaaaaaattagctgtgcgtggtgatgcatgcctatagttctagctacttgggaggctgagcacaagagttgcttgaattcgaggggcagaaccgaggttgtgccactgcactccagcctgggcaacagagtgagactcagtctcaaaaaaaaaaaaaattagacagatacggtgggaacacagctgtagttagagctactcaggaggctgaggcgggagaatggcttgagcccaggagtttgaagttacaatgagctatgatggcaccattgcactatagcctgggtgacaggatgagaaactgtctcttaaaaaaaaaatcagccagatatggtggcaacacacctgtagttccagctactcaggaggctgagatgggagaatggtttgagcccaggagtttgaagttacagtgagctatgatggcaccattgcactctagcctgggtgacagaatgagaagctgtctctcttaaaaaaaaaaaaaaaaaggaaagtgactatcacattgactggcatgtagtgtgatgttacttcctaccaagtgcttgatattccagtgcatccttgacatattcatatgttgattcagtaaatatttattgaatttctctaatgtggcagatcttgttccaaggattatataaattaataaacaaaacagccttgccctcaggaaccttatcacctagactttgataaaagtctgaaatttgaaaatactttgggttgaaattacatatgaatcctgggagaaaaagagggtttatcatatttcccctgaattgttcagatcagcttcttctggccgtatggaggttaaacaygcccatagcatttattacggaaacttttttccatcctaataaaactgcttgagtagaaaattccttctacataagctcatttcatatatttttaacagacagcttgga

SEQ ID NO: 67401 - DNA, 715 bp, Homo sapiens
tagccaggatggtctcgatttcctgacctcatgatccacctgccttggcctcccaaagtgctgggattacaggcatgagccacctcgcccagctgagagtcaatattcttaaagccactgattaagtactaagtctcttccaccaaattggaatgctacttttataatgtaataaaatatacactttaatcagcttcytgactctctcttccctctcattgttctacctgcttattcatggaccaaaattgtgctcttttgatcacgtttgcttaattcatttgtatactgaaataacaattattgagtgcatgctattcttctggcattgtgtaggttctgggaaacatcatagacaaaacccttccctctggaatcttacattgtcaagtcttagtgtctggtatggaaaggatccctcttccattattctcatacgttatagatttcttggcaatcaccatacacttattttctaaatgaatctttaaatcactttgtctaattctaataaaaataaccttattggactcattcaatttctttattaatatgaaaagaaataattttattttaaagtatatctttggatcccaggacacaggatgtcctttgatgtattcatttggtatccaatcatattatcaaatctcttattaatgctgttagcctttttcagtcttttgagttaccagatacgcaattatatcatatg

SEQ ID NO: 67402 - DNA, 1285 bp, Homo sapiens
ctatcttatgtcatcaaaacaacattactaaaaaatagatactgttatctccattctgctgaagataaactgatactcagacagtctaagttatgagcccaaggtggagctgtgatccaaacttaagttggctaaattatgagcattaaattgatgttaatatttaattataatacacttacaaggtcctatcatgaactttattttataaatgagaaatttagggaacagagcttagtaagtttccaataagaggcaaagttgggttcaaatctacaacttttctcatcaataccatactgcatgtttcagttaccactttagcaagggacagttaacaatctaatgagtataagaatcctttctataggatgaactcctcaaaagagacattgatagctaggggttagaatgagagactagaagagaggaaaggggtctgggggataagaaggcttcaaagacaacttagtcctgtcccagtattggctgaaggatagtgatcatagagaggtaatttttattctctatgaaaatccatggagacatgtgaggcccaaagagagatgaaagtatctgggtgaggactgttcattgcaggaccttcaatgtggaagactcgcctacaataatagagaagagttcaggtaggctttgcatgagctgtggtaggatccacacattttatgtggcattttaaaagcatcatctttttacagtttctatatcttatagcattatctaaaaacttacatgaattatctaaaaacttaaatcatttgaaaaataagatgtccaataaaaacacaaaggagaagagatagagattcatggtaaaatatggtaaaaattcaataattgtactctctatgaagtagtatagagctatttgaaagtggacttggattagctataaatatatattgtaaattctagggcaaccactaaaaaaatttaaaacgaagcataattggtatgttaaaaaaggaaaaaaacttgaatcatacaaaacgctcagtgaaagccataaaagggaaaaaattgtgraagacaaaaacagtaataaagaataatggcaaccattagaacacagtaacagataatatagatattaattcaaatatattgataatcactttaaatgtcagcagcctaaatacaacaaacagaagacagagattgtcagagtggatcaaaaacatgacccaactatatgttgtctaattagaaacctactttaagtatgaagacatacaaattaaaataaatggatagggaaagatat

SEQ ID NO: 67403 - DNA, 608 bp, Homo sapiens
tggtatctccaagcttttgggcaccacmacattccctagtgcccacagcagaagccacttgcagtacacctggtccagccacagcctcacatgaagccagcaccagtgttggtgcctggagctgcctgccctgccacagctgtgtgcctggctgtgtgcagtggctgaaccccatgctcaattgctcacacagcagtcactgctctgtgcctagttcacccttggcaaatgtgggattcaggccagtagcaagaggtgagtgcagcctgccaagcctagtcagtagaaggagcccagtagaagtgagcaaaacccaagcaaagatgccaccggagacagaggtttctggctggccaagtgaagccctaaggacactgtgacaataccttttacaattaagcatacatacctatgataaagtttaatttataaataaggcacaataaaagattaacaaaaataataaaagagaacatttataacagtttaagaaactctatagatatggcttccctctatctctcttaaaatatattattgtactataccatgggtaattgaaactatggatagcagaactgcagataagaagggattactgtacacac

SEQ ID NO: 67404 - DNA, 608 bp, Homo sapiens
tggtatctccaagcttttgggcaccaccacattccctagtgcccacagcagaagccacttgcagtacacctggtccagccacagcctcacatgaagccagcaccagtgttggtgcctggagctgcctgccctgccacagctgtgtgcctggctgtgtgcagtggctgaaccccatgctcaattgctcacacagcagtcactgctctgtgcctagttcacccktggcaaatgtgggattcaggccagtagcaagaggtgagtgcagcctgccaagcctagtcagtagaaggagcccagtagaagtgagcaaaacccaagcaaagatgccaccggagacagaggtttctggctggccaagtgaagccctaaggacactgtgacaataccttttacaattaagcatacatacctatgataaagtttaatttataaataaggcacaataaaagattaacaaaaataataaaagagaacatttataacagtttaagaaactctatagatatggcttccctctatctctcttaaaatatattattgtactataccatgggtaattgaaactatggatagcagaactgcagataagaagggattactgtacacac

SEQ ID NO: 67405 - DNA, 413 bp, Homo sapiens
tctaatctgaaaaaagcttaagacaaaattctattcatatggccattccttctctcttctgccccatctgagtaaatggtacaactatctacctagttacttatgttccaaatttccagggtgtcctgaattcctccacttagtctcactctgccgtcttccataaccaggtctttctagttctgtcttcaaagtaacactcarctccttctgttctttgcaacctgtactgccacaaccctaactgaagttatcattcattattttcttgtttgaaccccctgcattacctactagccggtctcctgcccttcattcttgccactctcagattcagaaaattattattttttaatattctagcttaaaatacttactagtctttataaaggccagtttaagctggtttacac

SEQ ID NO: 67406 - DNA, 1331 bp, Homo sapiens
tggaggtcttgccttaaggggtcatgattattttagttccaaccttctgtagtatcagccacggcataagaagtgaaaatgcctagagttgaggcttttttttttaatgacattaaaaacatacacggtataaaactgtaaagtacacaaggcatgaactctaaaatgtgaaaaaaaggtgtgtcagaactatgataaaatgtaatggagaagaaacgtagaaagcttgatcttgtgtgaacaccggaacaccactttactttaattcccttactatttctttagaatatatttatttactattccttcaggttactcatactgcctacttaatgtcaaagcagcaacactgaaaaaaaaagttagattgataaaattccatctattttatccagacccaggatgggtgtttgagctggtctatctttgtgtaacagatgcagtaagagaacattttcagtgagcaaaatttgggcacagtaccgtaaatttgtaaggaaatgctcctatttacgtgtatttaggtctttagcaaactaytaggttttcagtaattattttgtaatgggatccgtctttttgtagaggcattatcattctacatatataaattttcacatgctgagagttcttacagtgagggagggctgagttttatcatcttattacttctgattggcttgatttttgtaagagtcttgtacaatttgtactgctagtataaaacataactatacggggcctgaccccataagtgagaagagaataaattggaggccactggggtacaattctgtatattaactcacccctgatttaaattccagcctaatggaatgaagccatagctgggtggagagaagaacggtttcctgccagtccatggggctgcccaggcaggacgaaaagtgagaggaccggagcatcctgggcaatggctaaggctgagcatgcgcggaagagttaaagcgctccatgctcacctagagccacacaggcgcgcatgtgcaccagctggattgtagtgcttagcgtagaaatttagccgtgggcaacaaagatccaaaaagaatcagagttttcagaaagaaatttatttctcacacataaacaggcaattcaagattgtcgggtagctcctcctttatctgggactcggggtgcttctgtcctttctctcctccgtcactgggacatgattaccaacctcatggtccaggatgtgataccagcaatcattccactttcgaagcagtattacagaagaaagtctatgggaggaactttagactgttttatctgttctcctttcccaagctaatggaagctgc

SEQ ID NO: 67407 - DNA, 1331 bp, Homo sapiens
tggaggtcttgccttaaggggtcatgattattttagttccaaccttctgtagtatcagccacggcataagaagtgaaaatgcctagagttgaggcttttttttttaatgacattaaaaacatacacggtataaaactgtaaagtacacaaggcatgaactctaaaatgtgaaaaaaaggtgtgtcagaactatgataaaatgtaatggagaagaaacgtagaaagcttgatcttgtgtgaacaccggaacaccactttactttaattcccttactatttctttagaatatatttatttactattccttcaggttactcatactgcctacttaatgtcaaagcagcaacactgaaaaaaaaagttagattgataaaattccatctattttatccagacccaggatgggtgtttgagctggtctatctttgtgtaacagatgcagtaagagaacattttcagtgagcaaaatttgggcacagtaccgtaaatttgtaaggaaatgctcctatttacgtgtatttaggtctttagcaaactactaggttttcagtaattattttgtaatgggatccgtctttttgtagaggcattatcattctacatatataaattttcacatgctgagagttcttacagtgagggagggctgagttttatcatcttattacttctgattggcttgatttttgtaagagtcttgtacaatttgtactgctagtataaaacataactatacggggcctgaccccataagtgagaagagaataaattggaggccactggggtacaattctgtatattaactcacccctgatttaaattccagcctaatggaatgaagccatagctgggtggagagaagaacggtttcctgccagtccatggggctgcccaggcaggacgaaaagtgagaggaccggagcatcctgggcaatggctaaggctgagcatgcgcggaagagttaaagcgctccatgctcacctagagccacacagscgcgcatgtgcaccagctggattgtagtgcttagcgtagaaatttagccgtgggcaacaaagatccaaaaagaatcagagttttcagaaagaaatttatttctcacacataaacaggcaattcaagattgtcgggtagctcctcctttatctgggactcggggtgcttctgtcctttctctcctccgtcactgggacatgattaccaacctcatggtccaggatgtgataccagcaatcattccactttcgaagcagtattacagaagaaagtctatgggaggaactttagactgttttatctgttctcctttcccaagctaatggaagctgc

SEQ ID NO: 67408 - DNA, 771 bp, Homo sapiens
gaaagatgtggggtgggggcagctggtctcctgccatacccccaagctcaggcaataacccttgagttcctccctcccctcatgccttccctcctccctcccttccccttctgcaggcccatccccctgcaccctctcagtgcctcaataactgcttcagctctcgcaaaccctctgcccgcaacaagggcccctgccaagtgatggagacactgacagtgcaggaagaggcaaacccagggacagaagggtgcaggactcgggccctggcacacaagaaggtagctggtggtcaaggcaaagaccccaatcacatggaaaaaaggcttgttcctacacacagaaaattaaactggccaggcagtaagaagaaacacagggtcttcctcctgttcttggtgtgaggatggcctttcccaacacagagccctgaggggcagcctgggcgrgcatcttggcccccagagtttgggtcctcaggggctgtccagaggccaggggcaggccaacgttcctgggtgcactgagtgagcagcagtgatgactcttgaagcctggggtgtgggaactgacgctgagggaccttcccagcagcccatagaaggccctggaggaaaacaccccacttacaacgcaccaaggagaatgcacaaaagcccaagataaacccagtgagagagcagaacttgcacagtcagagctcaggcccggcattcaactccttctggttgctcaggtgtagaccaaggcctgcagcagctgggcctcctg

SEQ ID NO: 67409 - DNA, 1168 bp, Homo sapiens
atggtacaaacaagcattccctgcttccttgagtgggcgacattgatggctagtccaaccacttcaggcacacccttgcaaacacggctggtttctctttgagccagcttggccttgcctggcatacacaagcctcaatgcaacaactgtgctaaaaatggagccacacagaggaaatgagcagcaagctcagaagcagggtgtgcactgcctttggggctccagtccatgcctcagggcttgtatgggactgcaggattcttggttgccaagaggtagaccatagaccagctgaggaggactttatgtttaagggcagaaagcagccaggattaccacccaggggactcggccttctgtggccccggccagacttagaatttggctcagggcaggaccagctcactcggagcagtgtgtcagtagctggggcctgtacatgctaggcaaggctaagctggctcaaagagcaaccagccaccactgcaagggtgctcctggatgaggtggagcagccagcaacttcagctacacaaggaagcagggatggccatgttcccacagcatgagtggccaccacttgatggctgatcaagcagaggcctgaggaaaagcagatggcagttgggccctacctctagggtagaagaactgatgaaccctgaccggtagtgagtgaggttggtggtgggtccaccggctcctggcacacccttgcagaggaggctgtttgctctttaaggcagcttgaccttgcctggcatgyacaggccccaggtacagacacgctgctcccagtgagcttgttctgccttggaccaaattctaagtggcttagaatttgcccagcatgcacaagcctcagtgtaataactgtgcaacaaatggagccacacagacgaaatgagcagcaggctcagaagcaaggtatgccctgcctttgggcctccagtcgatgcctcagggctcctatggcactgcgggtctcttggttgcctagctgcagaccacaggctgtattgaggaggactttatgttcaagtgcagaaagtagtcaggattaccatccaggggactctgccttctgtggtcctctccagacttagaatttggcccaaggcaggacaagctgactcggagcagattgtcagtacctggggcctatgca

SEQ ID NO: 67410 - DNA, 656 bp, Homo sapiens
tgcatctgatgcctgtgagagtgatctctaggagccactgcacagggggcagatgagggaacccagacatgagacagctgagggcgaccccaacacggagggggcagctgtgtccaggctccactggattccgcagaggacagaacacagctctgrctctaggatgtgggctcactgagggtcaggacaggctggggttgggagagggctatgctgcagctgggccacatcccacctgcacccctcagatggcagggcctggacgtccccatccccaccctgacccggtcagtaacagccacaggccagcagcccccagcaaccgctccctccctgaactgccggggacaggaggtaccatagtctcttctaggcgagagctgctggagccttctttattcttgtgctagaagcccagggtggggagaggagcctgagaacagcccagtgtgggcatccaccttcctgcccactttggaggtctgaatcacctccggccactctcccaatccccaggagccaagaggcttcctggagcaagccgcacctgatctccaccatgggtaggagttcaaggccaggtcaacggggactccacagaggggcctgtgggttagcagcagctgccagtgtccagatggcctcaggggtggggg

SEQ ID NO: 67411 - DNA, 662 bp, Homo sapiens
  misc_feature (1)...(662): n = A,T,C or G
tatcttaatggtttccaaaaggcagggaaacagagaatataagaaaggggatatattcaacataaaattatgagatagaattggtaggaatttgagaattgactgaatttgtggagtaagaaggaagagtcacagatgactaagaatacaaacatatgtgacttggtaaatctttcattaaccaaaatagaagacagctccagttatttatggctgcataatgatttaccccaaaacttagcggcttaaaataacacaatcattttattatcatctcttatggtttgaaaattgattgtgcttatgagaggtgacaacgtgctagcagccctcgattgctcttggcgcctcctcggcctcggcatccactctggccacgcttgaggagcccttcagcctgctgccgcactgtgggagcccctctctgggctggccgaggtggccggagacggctccctctgcttgcggggaggtgtggagggagaggcgtgnccgtgaactggggctgcaggtggcgctcatgggccagtgcgagttccrggtgggcgtgggccccgcggccctgcacttggagcagccagccagcctgccagccccctgcagagagggacttagcacccaggccagcagctgcagagggtgtgccagatccccaagcactg

SEQ ID NO: 67412 - DNA, 653 bp, Homo sapiens
ccaattcaaaatacatttagtgtgaatccagtctcttagcttcattatgccaagattctcccgccatcaaacaatggggctagtttttgtagattttctaatttccaggaatcctatatgattttatagtaagatgatctgtgtttcttcaccccagctctttaatcccagtgttgataactttatctcatatgtcatcctaagcccatagtgaaatgtcttgaagatgctgagactgaatagtcatttttgtctccccatcccttttcctggaaattcttcttgaccacctttccatttattaaaccactgtttttcagcttaatgactttattttgataactactgcatgcccttaggaaaagtcagcrgtggtggtgccagcaggaactatttatagtaagcaaactgtttatgaaaaatgtaatctttaagagaagacttgcttgtagacttacttcatctctttcatttcattttgctaaatttttctcaacagtttcaacacccacaagaacatctctctctagctgtcttatcgaactcagactactcattgagaaagtgaaattcatctcatttcttttttcctgtctccttgattctcctttacttaaaagcaatttctctttttctgatccattcatcttaaa

SEQ ID NO: 67413 - DNA, 1599 bp, Homo sapiens
ttttttcatcaaatttatgtaatcaaagtcagtcttttgcaaattcattctcttaacagtgcaaaacatctgacattattatgaatgccatagtaaatccaattaaaacatttaacattaaaggtaaaattatatgtttttgcaatgataatacagcacagattttggtgaaacaatgttcttaataccttcagaagcttatggagcagagatgaacttagaattggatatggtcatatatacttcataattatgtccaaataagctatgatattcaaccaattgatatggaaaccatggtggtcaaattgtacaactacatttattaatacacagagtaactgaactccaaaattttgtaacaaagctgatattaaattttaagagattacttcggtatgtagtatgtacattttctgtttgctacttgaaatcagcttttaaaaatgtttgtgcttttgaagaactactttgtaaagcaacccatgtgtcctacaaaaaaaataaacatttttgtaagaggtttctaacaataggatttgaattcttaaaaaactccattggatatatttagtaaaaatatttgataaatggaatagtaaaagtactttagcctttgaagtttatagatattgtatatactgaactatgttgaatatctatgtgtgtgtctcgatgtacacatacacacaatatattaaaaacaaacttgcaaagagaaagacattgaaatgtatccctacaaaagcaatgaagaaactgatcaaattaaataatgagagtttaaatgacatacttgataaacttttaactctagcaggccttagtaatattgacactaatcagtaagggttagctttgtgccagcagctaagtaaacaaagcatttcatgacttctcttaatggtctcaactacaaaggagatacagttattatccctgtgattttttgttttgctttgtatttttgtttttcagtttagtttgtttgtttatattaagaatctgtagctgaaaacartgagatggcttaccaaggtcactgagcaggtggtcatgacactcagtgcagcatggctatctatcctgtaactgctcaaccttgaaaacctatgccttgccaccaaaacaatggtaccaagctttattttgcattagacttttttttttttttcaaattaaaagtactagcctcttctgggtaaaataataattcaccctttaggagagatgaaactttctgataactttaactccttcattttataaatgaggaatctaaaattccaaagtatactcaatggtatcttcaaagatacagtgcaactgaaagcaaagctggtcccagaagccctgaggcttagctctctcctctaatgcaagtccctacctcagataaacctttaaatctccccatacatcttagtgtagatctgaatcttcactctaacacccagagagcttgatagtgcttctgtacaggtagaaaggccctatggcctaagggtgttcagccagaaaattataatgacgttaagaagagttggcctagtaagaaagaaagatcttgggagagcatggactgagggaaaacatgca

SEQ ID NO: 67414 - DNA, 554 bp, Homo sapiens
tacatttccagacagcttatcattaatgacagcagtatgagcacatacgcatttaaatttacattccaaagctccagacagataagggaacatggataaaagctcttgctcctatattcagaccatatgactccaatatatatatagacatattttattccacaaccacttaactgtgaggtcatgatgctgatgagccacatggatttcttcttataaaccaagagccatccagcaaatcaggatcactgagatattactacctggacagcacatgaactttcagccaagtgctaaagaccataggcagaagttctggcagctggagccccagaggatgaaagtgggaaactgaaaggagatggagtctagtgcatcctttgtcccagatacaaagacccaagtatgagccctgtggaaagaaagatcactagcgaaagctgaaggagcctctcttcttagacattcagyggcataaggcaactcagtgtagctttagagcacaggagatgagatgtggtatatattacattaaaaggtcactgttttccttt

SEQ ID NO: 67415 - DNA, 941 bp, Homo sapiens
  misc_feature (1)...(941): n = A,T,C or G
ctttacattagttaagctacatggacagctcagctaatggctacagcctcaatcaccatagacggtatagtccaaggtgccctgacatcaggaatagtatatgaatttgtatggstcatattgaaacaagggtgtgccagtccatgtgtttgtacacttacaagagaatttggtggggtgtgggtcaggagttgttcacatttgggaacagctattgatggtgtcaggcgtgagcctttttaaaatctggctcctgtcaactctctgacatcatcctctgcgcctacccacgctcatcgtttactctcaccacgtggagcagcctgtgccctggacagctcctccattccttcgcacactcagcacttccttctgcaattctcttcctcggtcttccctttagaacttttatttgatgatcacctcaaatgacttttctaccaattgttctttcctgatctactgctcctctctaaagcccgggtttcttcttcttttgacatctcacttaagtcaaaaagtcatttttcttaactgtaattcaactatttgcaggaaggaaggaagaaagcaggggggatggtaagaggggaactggaacaacaggcggaaggaagtggggagggaaagaaggaagctaggcgggaagcagggagggaggaaaggtggagagaaatagtttaggtgggggataaagactattttaagtgtaattcgtgaggctggtttctctacgggtagatcagagggtcagtttctgagctgactctcgagagcggcttatagctccccagggnnnnnnnnnnnnnnnnnnnnnnnnnnnnnnnnnnnnnnnnnnnnnnnnnnnnnnnnnnnnnnnnnnnnnnnnnnnnnnnnnnnnnnnnnnnnnnnnnnnnctatagctcttcactgtccagaagtccataaagtttcctctagaa

SEQ ID NO: 67416 - DNA, 941 bp, Homo sapiens
  misc_feature (1)...(941): n = A,T,C or G
ctttacattagttaagctacatggacagctcagctaatggctacagcctcaatcaccatagacggtatagtccaaggtgccctgacatcaggaatagtatatgaatttgtatggctcatattgaaacaagggtgtgccagtccatgtgtttgtacacttacaagagaatttggtggggtgtgggtcaggagttgttcacatttgggaacagctattgatggtgtcaggcgtgakcctttttaaaatctggctcctgtcaactctctgacatcatcctctgcgcctacccacgctcatcgtttactctcaccacgtggagcagcctgtgccctggacagctcctccattccttcgcacactcagcacttccttctgcaattctcttcctcggtcttccctttagaacttttatttgatgatcacctcaaatgacttttctaccaattgttctttcctgatctactgctcctctctaaagcccgggtttcttcttcttttgacatctcacttaagtcaaaaagtcatttttcttaactgtaattcaactatttgcaggaaggaaggaagaaagcaggggggatggtaagaggggaactggaacaacaggcggaaggaagtggggagggaaagaaggaagctaggcgggaagcagggagggaggaaaggtggagagaaatagtttaggtgggggataaagactattttaagtgtaattcgtgaggctggtttctctacgggtagatcagagggtcagtttctgagctgactctcgagagcggcttatagctccccagggnnnnnnnnnnnnnnnnnnnnnnnnnnnnnnnnnnnnnnnnnnnnnnnnnnnnnnnnnnnnnnnnnnnnnnnnnnnnnnnnnnnnnnnnnnnnnnnnnnnnctatagctcttcactgtccagaagtccataaagtttcctctagaa

SEQ ID NO: 67417 - DNA, 510 bp, Homo sapiens
tcacggccaaataacacagaagtagacataaatactcatctggagggagagtaaaacccactgactgcaaggaggtctgaagaaagcctgggagattaataatagaggactacayaggttccaatttgcataggcaatccaaaacaaccagcagcacccactagatcagagagctatgggggtagcctaggccctcaggacctcagaaataaaataaaagttattttaaaatcttctaaaacatggagatgaattcaaagtttgaagaattgttattaagcagagtcagcccaggttaaaggaaagaaaagattcagatacagccaaagaaccaggaccaggggcagtagagggcagatcacaaactgttatttggaactccttaaattacgcgtgtgtgtttactcatattgtaagtatacagatcaattaatatcacaaattaaacacatctgctgctatgggctaaattgtgtttccccacaattcatatgttgaagttctaacacc

SEQ ID NO: 67418 - DNA, 510 bp, Homo sapiens
tcacggccaaataacacagaagtagacataaatactcatctggagggagagtaaaacccactgactgcaaggaggtctgaagaaagcctgggagattaataatagaggactacacaggttccaatttgcataggcaatccaaaacaaccagcagcacccactagatcagagagctrtgggggtagcctaggccctcaggacctcagaaataaaataaaagttattttaaaatcttctaaaacatggagatgaattcaaagtttgaagaattgttattaagcagagtcagcccaggttaaaggaaagaaaagattcagatacagccaaagaaccaggaccaggggcagtagagggcagatcacaaactgttatttggaactccttaaattacgcgtgtgtgtttactcatattgtaagtatacagatcaattaatatcacaaattaaacacatctgctgctatgggctaaattgtgtttccccacaattcatatgttgaagttctaacacc

SEQ ID NO: 67419 - DNA, 510 bp, Homo sapiens
tcacggccaaataacacagaagtagacataaatactcatctggagggagagtaaaacccactgactgcaaggaggtctgaagaaagcctgggagattaataatagaggactacacaggttccaatttgcataggcaatccaaaacaaccagcagcacccactagatcagagagctatgggggtagcctaggccctcaggacctcagaaataaaataaaagttattttaaaatcttcyaaaacatggagatgaattcaaagtttgaagaattgttattaagcagagtcagcccaggttaaaggaaagaaaagattcagatacagccaaagaaccaggaccaggggcagtagagggcagatcacaaactgttatttggaactccttaaattacgcgtgtgtgtttactcatattgtaagtatacagatcaattaatatcacaaattaaacacatctgctgctatgggctaaattgtgtttccccacaattcatatgttgaagttctaacacc

SEQ ID NO: 67420 - DNA, 694 bp, Homo sapiens
cattggaaaataagaaaattatacatatttttaaatacctaatatgattttttaaactgggggaacatgcactttattcctgtttattatctctggttctatataactgagttgatttttttcacaacttatagaaaaatcatacattgttcaatagaaatatataaaagcaaactgagtaatttaaaatgctttaggatgcttgataatacaaataaaaaacaaaacaraaacacttcaaataataatagctataagatgaatatttaatttttctgatatagaaaaataatatttctaattttgtattcattgtcattgataatttcttaaatattcatagtttaattatacattctttaagttattctagttttactgagtggaaaacataatactgtaaagatatcaatttcctcctaggtgatttatagtttcattgtaatcaaaagctgtaagtaggtttttgtggatattggcaagctgtttgttgattttctgtcaaaaagcaaaatactataaagagtcgaggtaaccataaaaaggaatgaaagctttaggatttatactaacacatatcaagatttattatcaagcaagtaaaattagggcagtgtgaaatttgcattaactatatagacaaatggagtgatgatgcagaatagagaatctggacagatagctactaatacat

SEQ ID NO: 67421 - DNA, 694 bp, Homo sapiens
cattggaaaataagaaaattatacatatttttaaatacctaatatgattttttaaactgggggaacatgcactttattcctgtttattatctctggttctatataactgagttgatttttttcacaacttatagaaaaatcatacattgttcaatagaaatatataaaagcaaactgagtaatttaaaatgctttaggatgcttgataatacaaataaaaaacaaaacaaaaacacttcaaataataatagctataagatgaatatttaatttttctgatatagaaaaataatatttctaattttgtattmattgtcattgataatttcttaaatattcatagtttaattatacattctttaagttattctagttttactgagtggaaaacataatactgtaaagatatcaatttcctcctaggtgatttatagtttcattgtaatcaaaagctgtaagtaggtttttgtggatattggcaagctgtttgttgattttctgtcaaaaagcaaaatactataaagagtcgaggtaaccataaaaaggaatgaaagctttaggatttatactaacacatatcaagatttattatcaagcaagtaaaattagggcagtgtgaaatttgcattaactatatagacaaatggagtgatgatgcagaatagagaatctggacagatagctactaatacat

SEQ ID NO: 67422 - DNA, 694 bp, Homo sapiens
cattggaaaataagaaaattatacatatttttaaatacctaatatgattttttaaactgggggaacatgcactttattcctgtttattatctctggttctatataactgagttgatttttttcacaacttatagaaaaatcatacattgttcaatagaaatatataaaagcaaactgagtaatttaaaatgctttaggatgcttgataatacaaataaaaaacaaaacaaaaacacttcaaataataatagctataagatgaatatttaatttttctgatatagaaaaataatatttctaattttgtattcattgtcattgataatttcttaaatattcatagtttaattatacattctttaagttattctagttttactgagtggaaaacataatactgtaaagatatcaatttcctcctaggtgatttatagtttcattgtaatcaaaagctgtaagtaggtttttgtggatattggcaagctgtttgttgaytttctgtcaaaaagcaaaatactataaagagtcgaggtaaccataaaaaggaatgaaagctttaggatttatactaacacatatcaagatttattatcaagcaagtaaaattagggcagtgtgaaatttgcattaactatatagacaaatggagtgatgatgcagaatagagaatctggacagatagctactaatacat

SEQ ID NO: 67423 - DNA, 694 bp, Homo sapiens
cattggaaaataagaaaattatacatatttttaaatacctaatatgattttttaaactgggggaacatgcactttattcctgtttattatctctggttctatataactgagttgatttttttcacaacttatagaaaaatcatacattgttcaatagaaatatataaaagcaaactgagtaatttaaaatgctttaggatgcttgataatacaaataaaaaacaaaacaaaaacacttcaaataataatagctataagatgaatatttaatttttctgatatagaaaaataatatttctaattttgtattcattgtcattgataatttcttaaatattcatagtttaattatacattctttaagttattctagttttactgagtggaaaacataatactgtaaagatatcaatttcctcctaggtgatttatagtttcattgtaatcaaaagctgtaagtaggtttttgtggatattggcaagctgtttgttgattttctgtcaaaaagcaaaatactataaagagtcgaggtaaccataaaaaggaatgaaarctttaggatttatactaacacatatcaagatttattatcaagcaagtaaaattagggcagtgtgaaatttgcattaactatatagacaaatggagtgatgatgcagaatagagaatctggacagatagctactaatacat

SEQ ID NO: 67424 - DNA, 694 bp, Homo sapiens
cattggaaaataagaaaattatacatatttttaaatacctaatatgattttttaaactgggggaacatgcactttattcctgtttattatctctggttctatataactgagttgatttttttcacaacttatagaaaaatcatacattgttcaatagaaatatataaaagcaaactgagtaatttaaaatgctttaggatgcttgataatacaaataaaaaacaaaacaaaaacacttcaaataataatagctataagatgaatatttaatttttctgatatagaaaaataatatttctaattttgtattcattgtcattgataatttcttaaatattcatagtttaattatacattctttaagttattctagttttactgagtggaaaacataatactgtaaagatatcaatttcctcctaggtgatttatagtttcattgtaatcaaaagctgtaagtaggtttttgtggatattggcaagctgtttgttgattttctgtcaaaaagcaaaatactataaagagtcgaggtaaccataaaaaggaatgaaagctttaggatttatactaacacatatcaagatttattatcaagcaagtaaaattagggcagtgtgaaatttgcattaactatatagacaaatggagtgatgaygcagaatagagaatctggacagatagctactaatacat

SEQ ID NO: 67425 - DNA, 587 bp, Homo sapiens
aaatgtattattttatcttatgttttttacatgaagggaaaaatcattttttaaatttcaaaaacaatttcaaattttgaacaaagtgcttctctaaaccatgcaagctgtatgatgaaattaattattttcatttgcacatgaaaagaatattctgttttctaaagaggttatcaacggatcaagatacttttccatattgtcaaatctacctacaatttcagtgaggaaatctgaatagtgctattattataaactaaaaaattaattttataattgataattatacaaagacaaagacgtttataataaaagaaaatttattttacaatcttttagaaggaactcaatgaaaaatagttgatgagaatcccggcactttgggagaccaaagcaggaggaatgcttgaggccaggagttcaagrttacaatgagttatgattgtgcgaccgcactccagcctgcgtgacacagcaagactctgtatccaaaaagtaataataataattaaattgaaaattaaaagaaaggaagaaacaatgagaccactaaaaaatccgcactgagttgagtgaaatcagaccca

SEQ ID NO: 67426 - DNA, 983 bp, Homo sapiens
caaaataatctattttaagaaaattttgcaaaatgccccctatcatatgaatacttagctgggcaaaggatttttatttgttgaagattttttatgtttaattattattaatgggcataaaatggttcatgcactccagttcttcttgagacaggtttgagaagatatgttctagaattgccttcatagattcacactaaattagaattactaaatgaacagtgtacacaggtacaaatcaaatagaaatgtctgaactcaaaaggatttttaaaaagaaaaataatctaaaatgttagagcaaagtaattagaatagaatttaagaaatggaatttggaaagattaattttaccatagtacatatagtgttgagtatgaggagaaaataattgtggggaataaaattaaaggtactagaatatttctgacattatgtcttagtcagtttgggctgctataacaaagtaccattgacgggggctttataaacaacagaaaattgtttatcacagttataagactggaattctgagtccggaagacagcatgttcagactcttgtgagggcccgggtctgggttgcggactactgactggacttttccttttrtcttcacatggctgaaaggaagctagctagctctctggccttcccctaatcccatttatgaagactacaacctggtgacctaattatctcctgaagtctctatggatattagggtttcaacttatgaatttaaggaagacacaacattcactgtatgccaaacagtttccccaaatgtactttacccaaaatataaacttttagtgtagactatatttttttccaaaagtaggaccacagatatcctttatggtatacagtcttctcattttggctattcatcatattcctctgcactgcacagtaaacaatggtatataataaagcactggaaaatatcattgacacacttatttcacattaacaatatt

SEQ ID NO: 67427 - DNA, 1016 bp, Homo sapiens
attgaaataacacgagggttgggatttgtttttcagttacttaagaaaataaagttgaatggatatagatgaaagaagattggcccctccccctgcccccccccccactttttttttttttgagacagtcttgttctgtcacccaggttggcatgcaatggcatgatcacggctcactgcagccttgacctcctgggttcaagcagtcttcctgcctccacctcctatgtagctgggactacctgcaggcgccaccatgcctagctaatttttaaaatgttttttgtaaagacagggtcttcctatgttgcccacgctggtctcaaactcctgggctcaagcgatcctccctcttcagcttcccaaagtgttgggattacaggtgtgagccactgtgcccagcccagcaaaatatttataattgaagctagttgacagactggtgttttaaatacgtatatgtttgaaatagtaaaaataaaagttaaaaaaatagcctttcctcattctgcatctgaatttttactagtataagtaatctctatgttgagaatgtattgtttattaaagtagtatatgtacatgtaggaaaatggaaaaatacagaaaaacgtgaagaagagaataaaaaattgctcataaggttatcaaacaggaataacctttttttttttttttttttttgagacagagtctcactctgtagcccaggctggagtgcagtggcgctatcttggctcactgcaacctgtgactccttggtttaagctattctcctgccacagcctcccaagtagctgggattacaggcacgtgacaccatgcccagcgaatttttgtatttttagtagagacggggtttcaccatcttggccaggttggtctcaatctcctgaccttgtgatctgcctacctcagccttccaaagtgctgggattacaggtgtgagccaycgcaccctgcccaggaatatcctttttatgatttccttttggtctttctgttttatgtgagtg

SEQ ID NO: 67428 - DNA, 638 bp, Homo sapiens
aggtttgccctaagcagttcctagcttcagtcttctctttagcttagtgatttttggggccccaagttttattttcccttcgcaagcccatatggagaactgaggcccctgcctgagagtcctagctgagcttacagaacaactttcagccttgggagtgaggccatttggaccttctttgttctatayttcagagaatggagttatttttgagatgtagtccatgagtgtggtttgagaaaaacagctactagctggtatgttgcagttgggtgggaatgaatggcaagccagaactgacagaaagggaagaatagccatggtatctctgtgaagtggacattccagagagagaagtgggtattccaaaagtgagtgggtttgtgaggagcaacgaagacatccatcatgatgaaacaacaataagaccaagttttgagctggggtggagaacaattctctgggtggcctcagaccccaacccagttcttcttttcatgcttgtggtttaattattattactatttttttttcagacagagtctcactctgttgcccaggctggaatgcagtagcacaatgtcggctcactgcaaactctgcctcctgggttcaagtgattttcctgcctcagcctc

SEQ ID NO: 67429 - DNA, 638 bp, Homo sapiens
aggtttgccctaagcagttcctagcttcagtcttctctttagcttagtgatttttggggccccaagttttattttcccttcgcaagcccatatggagaactgaggcccctgcctgagagtcctagctgagcttacagaacaactttcagccttgggagtgaggccatttggaccttctttgttctatacttcagagaatggagttatttttgagatgtagtccatgagtgtggtttgagaaaaacagctactagctggtatgttgcarttgggtgggaatgaatggcaagccagaactgacagaaagggaagaatagccatggtatctctgtgaagtggacattccagagagagaagtgggtattccaaaagtgagtgggtttgtgaggagcaacgaagacatccatcatgatgaaacaacaataagaccaagttttgagctggggtggagaacaattctctgggtggcctcagaccccaacccagttcttcttttcatgcttgtggtttaattattattactatttttttttcagacagagtctcactctgttgcccaggctggaatgcagtagcacaatgtcggctcactgcaaactctgcctcctgggttcaagtgattttcctgcctcagcctc

SEQ ID NO: 67430 - DNA, 638 bp, Homo sapiens
aggtttgccctaagcagttcctagcttcagtcttctctttagcttagtgatttttggggccccaagttttattttcccttcgcaagcccatatggagaactgaggcccctgcctgagagtcctagctgagcttacagaacaactttcagccttgggagtgaggccatttggaccttctttgttctatacttcagagaatggagttatttttgagatgtagtccatgagtgtggtttgagaaaaacagctactagctggtatgttgcagttgggtgggaatgaatggcaagccagaactgacagaaarggaagaatagccatggtatctctgtgaagtggacattccagagagagaagtgggtattccaaaagtgagtgggtttgtgaggagcaacgaagacatccatcatgatgaaacaacaataagaccaagttttgagctggggtggagaacaattctctgggtggcctcagaccccaacccagttcttcttttcatgcttgtggtttaattattattactatttttttttcagacagagtctcactctgttgcccaggctggaatgcagtagcacaatgtcggctcactgcaaactctgcctcctgggttcaagtgattttcctgcctcagcctc

SEQ ID NO: 67431 - DNA, 638 bp, Homo sapiens
aggtttgccctaagcagttcctagcttcagtcttctctttagcttagtgatttttggggccccaagttttattttcccttcgcaagcccatatggagaactgaggcccctgcctgagagtcctagctgagcttacagaacaactttcagccttgggagtgaggccatttggaccttctttgttctatacttcagagaatggagttatttttgagatgtagtccatgagtgtggtttgagaaaaacagctactagctggtatgttgcagttgggtgggaatgaatggcaagccagaactgacagaaagggaagaatagccatggtatctctgtgaagtggacattccagagagagaagtgggtattccaaaagtgagtgggyttgtgaggagcaacgaagacatccatcatgatgaaacaacaataagaccaagttttgagctggggtggagaacaattctctgggtggcctcagaccccaacccagttcttcttttcatgcttgtggtttaattattattactatttttttttcagacagagtctcactctgttgcccaggctggaatgcagtagcacaatgtcggctcactgcaaactctgcctcctgggttcaagtgattttcctgcctcagcctc

SEQ ID NO: 67432 - DNA, 638 bp, Homo sapiens
aggtttgccctaagcagttcctagcttcagtcttctctttagcttagtgatttttggggccccaagttttattttcccttcgcaagcccatatggagaactgaggcccctgcctgagagtcctagctgagcttacagaacaactttcagccttgggagtgaggccatttggaccttctttgttctatacttcagagaatggagttatttttgagatgtagtccatgagtgtggtttgagaaaaacagctactagctggtatgttgcagttgggtgggaatgaatggcaagccagaactgacagaaagggaagaatagccatggtatctctgtgaagtggacattccagagagagaagtgggtattccaaaagtgagtgggtttgtgaggagcaacgaagacatccatcatgatgaaacaacaataagaccaagttttgagctggggtggagaacaattctctgggtggcctcagaccccaacccagttcttcttttcatgcttgtggtttaattattattactatttttttttcagacagagtctcactstgttgcccaggctggaatgcagtagcacaatgtcggctcactgcaaactctgcctcctgggttcaagtgattttcctgcctcagcctc

SEQ ID NO: 67433 - DNA, 922 bp, Homo sapiens
catagaagtgaaaaaagcaggacgaaacaatttaggctgtagactaactttgttatttgatgcaacttacacactgttgttatacctctagaattaaaatgacaattttttaaataattttggggggcctagatttgctatttaacctatcaaaraattgtgtcttacagtattattcaaatgtagtgtgtaaagacttatactattggtcctaagcactactggttgttttaggctttttctctttctctgtagctactttgcaagcattatcttcatgtttacagcattcaatctaattagcccatgcacaatataatttcaattcaaaaggagaaaagtgaattttgacccacgttttattattaaatggattccctgccctgtatcagcctaaggtagatctgttctcatttgtctttattcttcatgataagaaaggagagagaaaaagaaaggtgaaaaacggggctcaagaaaatagaggagggaaggactgatcatcccttccaatagtggaaactgaaagttgtctgttaactgtagcccttacatctgtggctaagccaacacctcaggccctgtcctgtggcatctccttcaccgtgattgatgcaattctcctttagtcaaaaaattctctttaattcagtacatgtctacaatgactcaggatcctcagatgtgatcatggcctcttctccttctagaaaaatctataatgataaaaagccacagagtctgacttctatcaggcaaacttatctctggaaacaccacagaaagaaagccagtgtggcatgcacaggatgtggcataaacagcccaatagctcaaaccagccagtgacctttcacaaagaagacaaaggcaaatactcggagaagcagccaatatattggtgccaacattccacaagtag

SEQ ID NO: 67434 - DNA, 2416 bp, Homo sapiens
tgtgtatatttatatatgtgtgtgtatacatttatatgtgtatatgtatttatagtaaatatatcacatgtatttatatatagtaaaaaagaggggactataatatatctttatatgttagcatttattttaaaaagaaaacacaggaatatctaaaagaaactattacttataggggttatgggaaatgccatgggcaagaattttttttttttttatcaccatgctttctgaaacaacacgatatgtatcacctttataaaaataaaataaaataaaaaatgaaaaacaaagtccacttgtaaccacatgtcagtagcatgtttgctttcagggtacatcaaatgcattctatagcacaggatgttccagtcactctaacaaaagatgtcctgtttggaacaccaactctgtatcagttacttcagacactttctctcattgagtcccttcagcaagcccttttaggtttatgttcttagatgaggaaaccaagtcttagaaacattaactggccaaactaagatcagagagttagaaatgtcagagcccagaactggcatcttctgacttcagatcccatgtactttcccctacactgtgctgaccacacctccattactacagatgtgttgattacatctaggggccaaagtacacattcatccaataaatgcttactgaatgcttaccgtgttcagggcactgtggcaatcttttgtaatgcaagaaaaataagagtagtgaagacagtcaaggaaacaaagaagcctaatactaggcaagaagtgcttttgatggaattaagcacaatgagggtgttagtacagaaaggacatttaattgaactgggaaagttcatggcagttttcccagagatgagtcttgaaggacaaatggtatttagccaggaggaaagggggtcaagtgtattccagggagagggaacaacatgtacaaaagcacagttttgaaagaacactccatttttgaggaatagccaatagctgggcacgtctagagcatagggtagtagagagaaaggaggccggaaatgggaagagacttgaatgccacattcagttatgtggacttcatcttgtagcaatgggagcctacaaaattttaagtagaggaataaaaagattccatctaaaacttagaaaaattactttggcaggataagagacaatgaattgacggggagctgggtttgatagcaagaaactgtttgggagactgttctaattacatattttcttgtttttagatgcacatatacgtacttttttagctggtcatttctttctgaaattggaatgaatcttacaatcaatggcatgttataatttcattggcagcattatttgtctcttaagggcccccaaataatagtgtgtcacataactgatagcatctcaaattagatgaaatacagtagtccaggcaagaaatactgagatggtggggtggtaaagagggaaaagatttgagccacatttagatcctgatgtggtattaattattaagtaaaaaaaaggaatgtgcagtacatattcagtatgccacaagttgtggaaaaaaggtgtgcatggatagatgcacatgtatgtattcataaagttaatgtggatgcataaagcgtctctagaatgatacacaagaaacaaataacacccgtggcttttagtggggggcattgggtggctgagggagaacagcggtaggaaaatttttcattgtgttctattttgtacatttgatagtttgaactagtcgtattatgcacttcaaatatgtaaaaagataaaaagtaagagatatttagaaaggagcattgacacatttgttgacagattggttatgggataaaggcgatagtattttattgactatattttattcttttaattattcctctaatttcttaaaacaactttattgaggtataacttccacgstataatttcacccattttaagtgcatgaattcagtgatttttagtagagtcattgagtagtgtaaccattcctacaatggttatagcacatttttatcatcctaatgagatccttcatgctcatttatttaatctccattcccatctccatccccaggcaaccataatcttccatgtttttaaaatagctttgcctatttttggatgtttcatacaaatggaatcatacaaaaggtggtgttctgtgtctagcttctttcccttaggataatgttttctggtttataaatgttgcaaatgtcagtatgatacttcattcctttttatttgtgtctacaaaatactctattttatgtatataccaccttttgtttttctgttcatcagttgaagaacattgcagccgtttttgctttttgacttttatgaataatgctgttataaacgtttatgtt

SEQ ID NO: 67435 - DNA, 497 bp, Homo sapiens
cagatctgacaagtggatcttaccctgtttaaaacaaaatgagacatccaacagcctgcgtagtaccgcttgaaaggctgatgtggcaggaaataatccatcatgaatgttttcacaacaaccatcatctgaagaatgagttaagcagtttacacactcttccttttccactacccatatgtacctggttgcctgtttttctttctttytttttttgagacggagtctcgctctgtcgcccaggctggagtgcagtggcgggatctcggctcactgcaagctccgcctcccgggttcacgccattctcctgcctcagcctcccaagtagctgggactacaggcgcccgccaccacgcccggctaattttttgtatttttagtagagacggggtttcaccgttttagccgggatggtctcgatctcctgacctcgtgatccgcccgcctcggcctcccaaagtgctgggattacaggcgtgagccaccgcgcccggcc

SEQ ID NO: 67436 - DNA, 1548 bp, Homo sapiens
gcatcctctctcagctgctgaaactggcttgaggtgtgcagtagcttatcaggagagaatgtttgtaaggccagtcctckgtccagtcagagttgtagcggtctgggttataaatcagaattttggtcccactcaaacccgtaagtgtgttacttattcctgggccatagagctgcctttgctgtcagagattcagttgtgggtatctcagctctggaacatggcatattgatttttaaagttattattattattattatagagtaagggtctagctctgttaccccagcaggaatgcagtggcatgatcatggcttactgctgccttgacctcctgggctcaagtgattctcccaactcagcatcctgagtagctgggatcacaggtacgtgtcaccacacctggctaatgttatttttattttttatagaagcagggtcttgctatgttgcccaggctggtctcaaactcctcacctcaagtgatcctctcgcctctgcctctcaaagcattaggattacaggtatgaaccactgcgggttggggggctggtgtcccattgtgtgttgagaagcatcttcccagccaggtcagcccaggctgcctggagcagctcagccaggtgctctctggactctgcagagccctcagaaaaacacagagcttgaggagaccctgatgtgtcatctccagcatcccccagggtggaaggtaccaaactggcagctctggctcagctcctcattccactgctggtccacaccttttgggggtcctcttgcttcctaaaagcaatttacagacgtttcccacacagtcctgcaaggcacaggcacagtgctagtaacaggctcaactcctgctctgcaatggaaatgcatgaccccaccgctcctaccttgtaggatcccacacaatttgcatggtggcctctaaacccacagtcctcaaagtggggacccaggaccagtagcttcagcatcacctgggaacttgttggaaatgcaaattcttgggccccaccccttacctattgaatcagcactttggcagtggagcccagcagtcttgccttccaggcaagcaagccctccaggtgaatccactctcaacctcacttgtgtaggaaatgggtatcatcaatgtttggaagccaaccgttgttttggggctgaaaggaaatagtgcgtgttcctggcaggaagataaaggccagtatgtagcagctgctgttatctcaccagtaacgcatcatcattcatggccatggctttctgagcttaagctgtttgccaagaatggagccacataccctccttctttccctcttcccctcagctgagcagggtctcatgcttccagatcccctgtgtttcacttcagctcctttagctaaccgagtctcgctgcccaaggcccatattccttctctcatgagctgctggctctatctggtccaggagggtgagttctttcttccctctggtcttcaggttccccctcccaagacccagcttttctctctaggttttcagaccaacagcacc

SEQ ID NO: 67437 - DNA, 1548 bp, Homo sapiens
gcatcctctctcagctgctgaaactggcttgaggtgtgcagtagcttatcaggagagaatgtttgtaaggccagtcctctgtccagtcagagttgtagcggtctgggttataaatcagaattttggtcccactcaaacccgtaagtgtgttacttattcctgggccatagagctgcctttgctgtcagagattcagttgtgggtatctcagctctggaacatggcatattgatttttaaagttattattattattattatagagtaagggtctagctctgttaccccagcaggaatgcagtggcatgatcatggcttactgctgccttgacctcctgggctcaagtgattctcccaactcagcatcctgagtagctgggatcacaggtacgtgtcaccacacctggctaatgttatttttattttttatagaagcagggtcttgctatgttgcccaggctggtctcaaactcctcacctcaagtgatcctctcgcctctgcctctcaaagcattaggattacaggtatgaaccactgcgggttggggggctggtgtcccattgtgtgttgagaagcatcttcccagccaggtcagcccaggctgcctggagcagctcagccaggtgctctctggactctgcagagccctcagaaaaacacagagcttgaggagaccctgatgtgtcatctccagcatcccccagggtggaaggtaccaaactggcagctctggctcagctcctcattccactgctggtccacaccttttgggggtcctcttgcttcctaaaagcaatttacagacgtttcccacacagtcctgcaaggcacaggcacagtgctagtaacaggctcaactcctgctctgcaatggaaatgcatgaccccaccgctcctaccttgtaggatcccacacaatttgcatggtggcctctaaacccacagtcctcaaagtggggacccaggaccagtagcttcagcatcacctgggaacttgttggaaatgcaaattcttgggccccaccccttacctattgaatcagcactttggcagtggagcccagcagtcttgccttccaggcaagcaagccctccaggtgaatccactctcaacctcacttgtgtaggaaatgggtatcatcaatgtttggaagccaaccgttgttttggggctgaaaggaaatagtgcgtgttcctggcaggaagrtaaaggccagtatgtagcagctgctgttatctcaccagtaacgcatcatcattcatggccatggctttctgagcttaagctgtttgccaagaatggagccacataccctccttctttccctcttcccctcagctgagcagggtctcatgcttccagatcccctgtgtttcacttcagctcctttagctaaccgagtctcgctgcccaaggcccatattccttctctcatgagctgctggctctatctggtccaggagggtgagttctttcttccctctggtcttcaggttccccctcccaagacccagcttttctctctaggttttcagaccaacagcacc

SEQ ID NO: 67438 - DNA, 2019 bp, Homo sapiens
cactggtttaaaataggaattccgaaaaggtctgattaatgagtttggggtggaacccaggaaactgggcatttatttaaaacaatctctcctgtgattcttagaaagtaaatttataatggggaggggtcaaagataagcatctgaaaacaattttcacgcaatgtggagctttgagacagcgttagtcttcaggttcttttgttgaatggaatttgtggcatctgggagtggagcagagaccacttcccaaactcctgttcttatttttttaaattccagcaattcagaaggaattaaagtaaaagacgtaagttctctggttgctgatatctggtacctgagatcaaggcaagatcgcttaaaccagtaaagtgaggattatgggagcaaactcaggaataaagagggtgaaccaggcctggaaggggacacaggtttggcgaccagacgggtcaccgcttggcccggcctaatccaactgcgcacgtcggtgggccacagcatcgcagcgctggatccccgggtcggcagaggcggatggagttcagcctctttttcaaaactgccaaagccacccggtctgccaaactcccccaccagccagctctggggcagccccccggagcccgcccgctccggtccccgggacaagggcgcaattgaccagcgcgggccgcctctggcccacccagatgacggccaactttttttgtttttaagccatcaaattcaatatttacaggaamaaccccatgcttggttctaaaactactggccactcaagaaacagtttacttctcacttctgcccataacaagaaaaacatagacttgtgccttactcttaaaaaaataataataataaatataggttttttaaaatttatatataatttttaaaaccccgtttgttgcatgtggtccctttccctcctgttgttgagcagaataaaagcccattttgccagggcccgcagtcctggcggcccccgcagctgcggccctgtaactttaaacctggcctgagatcatcgttttggcgccggccaaacagagcccgagggcgggcctagcgcgcccggacggagaccaccttgcggccgaccccgctcccccgcctcctcgggagagataaatgctgactccgctcggaaagttctcaactgcaaagtttgctgtccggctgcctagggtctgggaagctcgggcaccctccctctccggggctcctgctcccacccctccggcccccccaccgtcgcgctcctccaggctgggcctgtggccgcggtgctttttaattttcccccagctcagaatcttgctgctcggcccccaggagagcaacaactcaacgggaacgatgtggaaggtgtcagctctgctcttcgttttgggaagcgcgtcgctctgggtcctggcagaaggaggtaagacccagcgcaagtggcttcctgccgtcgctgatggggacgagcgagcagagacttgctggaatgcccgggcctggtattcgaggttgtccaggggagcgcgggggagctgagggtgtgtgcgtgtcaggcggctgagcgccggaggaggagaggcagcggcttagtcggtgccaggtcccaaagacgcagctgcgcgggtgtgccgggaggagccccggaatccacaggctgcgaggtgggcagcacagggggcctccctccgagtcggcagcaccagagagatcgggtggaaggttcacagtaggcagccccgcttgctggcagcagtggctggggtttccttcccatagagcggtgtgttggaggaatacgcacgcctcgggagaagctggcctcgtagaatcaggagggacgttcaggagggcttgggccaaggggagggttccccgccctgcggtggccctggtcccccttgggactacctagtctggcgccctgcctgttggacacactcagcaccccgtcactggactggaagaggcctcctttatcctctttagagaggatagtgtgtgtggaaa

SEQ ID NO: 67439 - DNA, 646 bp, Homo sapiens
ccagctactagcgaggctgggccaggagaatcgcttgagcccggaaggcggaggttgtagtgaagatcgcaccactgcactgcggcctggcgacagaggctggtgcaggcacttgcatgcgggaggcagaagttgcagtgagccgagatagcgccaggcggtgtcaatgttgttggtctgaggatcccactttaaataaaagtttcccgtaatgtgctagctgtgcagtaaatgctagtctctcctcctatgtgcccgttaggataattccatgtggagtgggtaycagagtaaaattaagaaaaaaagatgcaattctgattctctctctcactctcttttctcctctcaagccctgcccttagtgcctgtcactacatgtgacaaatggctctgtttttctgagctacacacacccacctccagtgacatctgccttcttccgaagatatcagaggagagaaggcaggattactcatgatagtcacgatttgctctgtcccacagtgcagatggaaaaactgaggcatgaagaggccgcttcataaactatgttgaactagaaatgaatacagcatgaagcatcaccatttaccaccaggatagtatgacattagaatctaggtatgttggccagggtattttt

SEQ ID NO: 67440 - DNA, 661 bp, Homo sapiens
cagctcctcggggagtggccggtgacctcccacgcagtgggctgagccaggcctggctgagagggggccgcagccagcaggcccggatggcctcccgcgcctgcaggggacatccaggaaatgggtgcagtgtgcgggacccgcatgctgcccgaggagtctttgcagggtggacaggcttgggagtctctaccagcaatgcaataaataagcaaatccaagcggagaaagaccaagcacaaaccccactggcacacaaggcccagcccggttcctgcgggcgtcagcggctcttcacagaccaggagtctccaagttggcggctccggtgttcccgacgtgccatgggaggcggcgggtgggtgggacacgcctaacgcccacgtctagcagcctcggggggcagtggcactgggcctggcagggtcccatcggcaggacccttccagctctgctgcgckgcggtgaggtggggatggcggagcggtctccagtggcaggtgggggcgagggcctagccctcccgcacgctcacacgtggctcagccagggtgctgatgatggactccaggccgctgccctccaggagtgtgcggtggtcaccctcgatgacgtggacggacaacttttcaataaatggtgctgggaaaattgaatagtc

SEQ ID NO: 67441 - DNA, 523 bp, Homo sapiens
ttcttcagtactttaaagggaaacatgagctgtgaaagtagaggcaatttttgaatattatacgcaattgtaataatagtgcttctgcagattgttaaaaacaagcaaacaacatgcctgttaaattattggcttttcaaattctaacaacctcactggaaaaagaaaatttgatcttccttgaatttcccctaagtggatatttttctttaggttaaaaaaaaaaacagatcagtcatcagacatcatcacaacaaaaagtgtctagaggatrggctagcttaggaacactttaggcttgatgatcattccaagatatttttcaaatatctgtggctccaccaaacccaaaacacattttgtgttttaccaaacaccaaataagttttgccaaccactttttacatttaatttttttaaatcatgtgtattttaagtgaaatttaattcacatctttctgatttagatatatacaaataatcaaaattttgttttgtaagaactattggtgtccacagaagc

SEQ ID NO: 67442 - DNA, 733 bp, Homo sapiens
gagtttcttatgtcttccttttctacatagacacagtaacaatctgatctctctttcttttccccacacgtgggccattgatctccccaaaaactcacatgctcagtgttacagccagtaacttttatcccagcacaaagggcgttggctgctctctcgttattaaacacccggaactgaacgaatcctgcaacaaattcccctgaaaaagaagaggtgaagaaacagccaagtagtcaaaggatgaactagaagcagcatcccattggccagtccagggaytccctaagccaaaagctgaggctacagccaaacaccccaggctgtaggggtgcagcccagtacctttatggccagtggctggtgcacgtcagtcctaaacttgtccccaaggaaacctctgttcatagggggcaagaggacaaaggctgggactcacaaaaggacccaggtctgcttacagcttacaggagaaactagactctacaaaaagattaccaaaaagatctgagaaggcccagcaggaataagcaatgatcagatgtggctgcctattgctgtttacacacttctcatccaattaccatgggttagtttccctgaccatcacctgctttcatcaaaatatcaaaggcaaacagtgatgtctttgatttttttatccacaacttaacttctgtgctcttattatactgaaaactgtcttttgtaagataattaaagttatccttca

SEQ ID NO: 67443 - DNA, 1403 bp, Homo sapiens
acattggcagtagagagaaaaaaatacaggaaatttactttatcagtatagtgattgaatcattaytgatgcttctcacaactttgtttttgtttttcattgttttcttaaacattctgacagcaaaggaaattattatatgtgcaaattgggtatcacttcttaaacttttgaatcagctggaaactgcactcaactgaaccagagaaatctaaaacaaataaaataccatttatgagaaagcatttaagaaaatcataagcacgacaagcattttttcccaacccatacagctcaaatataaatgattctaaaatgtatgtgccatgtttacaaatgtgcccttattgagattcatacctgcattacttgtttgttcagagccctaaaacattataataaaattgaaactctcactctcaattagcggattcatttcaattaagaaaggaaagcaaaagaataattttcatcagcttccacttacttcttagtaaatgctgtgataaaatatattttaaggaacccgacattacattaagaggcattatattaaggaaagaatagggatctgggttatcagacagaacattgtttgaaaatcaatactgccatttactagttttagattttgggctgtttttcttatctttcaaaaataacaattgtgaagattaaataaaataatgaacataaaacatccctcatactgtctggcacaaagtgcgttctcagtaatcatattttctttttcctgtcattctattttttaattatttccttctaagtaatataaatttcccaatattggtattagtctggtgtgttagagactttttatatcatgcaatgtattgcaaaatatattaaggccttttaaaagatcagtatttatcaagaatataagagactgaactttctttcatcaaaacttagacacaattattgaagtataacttttctgaaatgtgtctttattctagaatattcttatctgacaaagatagatgagtaatattctcatattatgctttcttattttaatataaagacaaatatatgtgtgctgagcttatctcagtatactgttcctacaatatttttataaagtcaggggtattctatgataatattttatgcacctgccactcctcttgcatatataatctaaaacaatatccaatagcaagctttaatatatcttcatcattgaatgtattacattggaattaggtaattttttatgcatatgaatattttattttaccttgagtttctccaaatctggaactgtttgcttgggccactcctagtaacatggtccagtaacctgacatggaaatcatttaccacttcaaatatgcagtattaaattaaatataattaaactaattcaagaccag

SEQ ID NO: 67444 - DNA, 1403 bp, Homo sapiens
acattggcagtagagagaaaaaaatacaggaaatttactttatcagtatagtgattgaatcattactgatgcttctcacaactttgtttttgtttttcattgttttcttaaacattctgacagcaaaggaaattattatatgtgcaaattgggtatcacttcttaaacttttgaatcagctggaaactgcactcaactgaaccagagaaatctaaaacaaataaaataccatttatgagaaagcatttaagaaaatcataagcacgacaagcattttttcccaacccatacagctcaaatataaatgattctaaaatgtatgtgccatgtttacaaatgtgcccttattgagattcatacctgcaytacttgtttgttcagagccctaaaacattataataaaattgaaactctcactctcaattagcggattcatttcaattaagaaaggaaagcaaaagaataattttcatcagcttccacttacttcttagtaaatgctgtgataaaatatattttaaggaacccgacattacattaagaggcattatattaaggaaagaatagggatctgggttatcagacagaacattgtttgaaaatcaatactgccatttactagttttagattttgggctgtttttcttatctttcaaaaataacaattgtgaagattaaataaaataatgaacataaaacatccctcatactgtctggcacaaagtgcgttctcagtaatcatattttctttttcctgtcattctattttttaattatttccttctaagtaatataaatttcccaatattggtattagtctggtgtgttagagactttttatatcatgcaatgtattgcaaaatatattaaggccttttaaaagatcagtatttatcaagaatataagagactgaactttctttcatcaaaacttagacacaattattgaagtataacttttctgaaatgtgtctttattctagaatattcttatctgacaaagatagatgagtaatattctcatattatgctttcttattttaatataaagacaaatatatgtgtgctgagcttatctcagtatactgttcctacaatatttttataaagtcaggggtattctatgataatattttatgcacctgccactcctcttgcatatataatctaaaacaatatccaatagcaagctttaatatatcttcatcattgaatgtattacattggaattaggtaattttttatgcatatgaatattttattttaccttgagtttctccaaatctggaactgtttgcttgggccactcctagtaacatggtccagtaacctgacatggaaatcatttaccacttcaaatatgcagtattaaattaaatataattaaactaattcaagaccag

SEQ ID NO: 67445 - DNA, 1403 bp, Homo sapiens
acattggcagtagagagaaaaaaatacaggaaatttactttatcagtatagtgattgaatcattactgatgcttctcacaactttgtttttgtttttcattgttttcttaaacattctgacagcaaaggaaattattatatgtgcaaattgggtatcacttcttaaacttttgaatcagctggaaactgcactcaactgaaccagagaaatctaaaacaaataaaataccatttatgagaaagcatttaagaaaatcataagcacgacaagcattttttcccaacccatacagctcaaatataaatgattctaaaatgtatgtgccatgtttacaaatgtgcccttattgagattcatacctgcattacttgtttgttcagagccctaaaacattataataaaattgaaactctcactctcaattagcggattcatttcaattaagaaaggaaagcaaaagaataattttcatcagcttccacttacttcttagtaaatgctgtgataaaatatattttaaggaacccgacattacattaagaggcattatattaaggaaagaatagggatctgggttatcagacagaacattgtttgaaaatcaatactgccatttactagttttagattttgggctgtttttcttatctttcaaaaataacaattgtgaagattaaataaaataatgaacataaaacatccctcrtactgtctggcacaaagtgcgttctcagtaatcatattttctttttcctgtcattctattttttaattatttccttctaagtaatataaatttcccaatattggtattagtctggtgtgttagagactttttatatcatgcaatgtattgcaaaatatattaaggccttttaaaagatcagtatttatcaagaatataagagactgaactttctttcatcaaaacttagacacaattattgaagtataacttttctgaaatgtgtctttattctagaatattcttatctgacaaagatagatgagtaatattctcatattatgctttcttattttaatataaagacaaatatatgtgtgctgagcttatctcagtatactgttcctacaatatttttataaagtcaggggtattctatgataatattttatgcacctgccactcctcttgcatatataatctaaaacaatatccaatagcaagctttaatatatcttcatcattgaatgtattacattggaattaggtaattttttatgcatatgaatattttattttaccttgagtttctccaaatctggaactgtttgcttgggccactcctagtaacatggtccagtaacctgacatggaaatcatttaccacttcaaatatgcagtattaaattaaatataattaaactaattcaagaccag

SEQ ID NO: 67446 - DNA, 1062 bp, Homo sapiens
gcatatggaactgcctaagagaaatcagatgatctcatggtctctattatgagtggaagtaaagaagccaatttgtttgagataagatagtatgatggttctcgaattggtatcagataytcattcaatagtggttaacaatgttagaaaaattcttagaaaatagactattaaaaatggaagcactgaatgtggagttagacgacctggtcgacatcagattatattgattagcattggcatattacttaacttctctaagcctccattttctcaaccttaaggttaggataattgtacttctacctaactctcatggttggttcaagaataaaattagatgataagtaaaaaagatttgattaaaccaactcagtgaactttgtaagcattattatcgatttaacaaatcatatgaagtcttgtctttgtcttttttaaaataaaaccaatgattttttctcatcgtgataaaatacagagtaatgatttggatggtataattaggaaaatcttattcaaatcttgctctataatacaatagcaccttcacaaatacatcattctgatatattctggccatagtaaagtgccctagggtattcaaaataccctaatgttgcaaaaaaaattgtaaacagtaacttaaaaatttgagtgattccttcagactagcactagtaatttattttcttggaaggtttatatattatttttaaaaacctaacagaatagacatttttaaaaatcatttaactcaagtaaatgtgcatacagaaatactgtggaatatgtcaaggtgcaaatcttggttttagctaggtctccacactttctaaatgactcactcttacatgcttacatgccagtatagtagtacctgttcaaattttcacctcaacaaaagtacagattactagatgtcatagacccttgaagtctctacaaaacggttgaaaccacaagtgctaaattccctcataccaaggatctagagtgttcctgtagcattgcactgatttactcatttaataaaacagggcagtgatccaagtcatgtgg

SEQ ID NO: 67447 - DNA, 667 bp, Homo sapiens
ccatcttgcaatcaacaccatcttcttagaaatccaatcttgttatcaatgacaacaaacacttgcctgtgattactatttgccaggtcactacccctcacaaccagcatgtaagatggatttactgaatttcacagatgaggaaacaaacacagrttactaatgtattaataactctttcaaagtcacacagcaactgcttgaccaagtgaggaaattcagaacttgataagactgtgcctgctgtcctccttaaaagcaacactaagtctgcttcagttgatcatgtaaagcatctgtgactgtactaaaagttgtaatgagatctacttgtccaagagttatctccttgatctcttacctcttttacctgtcctaaggcaataataacaataataacacatttttaaatttttaaaattattttcttcttttctcttactctcttatcttttattgtttctatgaatactttaggacattagatagctgttcagagggcctggagaactgcaagacagaatctaccattgactgatagagtggacgagtatttcatggagcccaggaatttgttttcccatttctcttaataagtatattaaaagtaaaaatctaagtacttctgtattctaattcacataatctttgctcaaaactctccaat

SEQ ID NO: 67448 - DNA, 1092 bp, Homo sapiens
gaccctgcaagcaagagggacctgtggaatcacttagaccaaccctgtcattttacaagtgaagaaactgaggccaggaaaaggtcagtgaaggatgccagggccacatagtgaatccatgtcttatgaccacattcacgggatctttctgctatgcctagatgtctgagccagcagagtagaaaaaagcgattatacagccaaattttatgtaaaactcaattttatcccaaatcatatatagcactttttttcttttcttttctttttttggccagaattacctagagtcagtttctgttttacaaacagacaaatgacccacttttatattttaataattaygccttatttcaaatgataataaattcgctttttgtaaatttggtatttgtggcaagtgacaagtgtaatatgataccacactgcatctcaaacacccatgcctactgaaattgttgcctaattttctatgtatgtagcttcctgtcacttgactttacattgccagcactgcagccactgtggttgccttcccagcatgcagcccatacaggtctgggcacagatagagactctcatcccccaaggccattataatctcagtctgttctcttctttagtaatctccctttcacatttcctacagttactttcccagcctcaggccactctcctcaaggccctcatctcatcccagtcactacgcgaaggggtttagactctcactccaccaactccaactttcatcccaaatttgtcttcatacacacctctcttcgctctattaaatatatttttacttgtatttgtttttctcagagtaccttatggaattctctgttctcatgcgccatcccccaaaagagtagctctcttttggcacaaaatttcacatttttgataagacagtctaataaattatgggctctggtgaaccaatatgttagcaatttctggggcactttttgtactctctcaagaacttctgaacacagtgtcttaaaacagatgaataaatctcactaaggatatttcagaggaaagatcaatggagggatatagttttggcagtggaacttagcagtccac

SEQ ID NO: 67449 - DNA, 1092 bp, Homo sapiens
gaccctgcaagcaagagggacctgtggaatcacttagaccaaccctgtcattttacaagtgaagaaactgaggccaggaaaaggtcagtgaaggatgccagggccacatagtgaatccatgtcttatgaccacattcacgggatctttctgctatgcctagatgtctgagccagcagagtagaaaaaagcgattatacagccaaattttatgtaaaactcaattttatcccaaatcatatatagcactttttttcttttcttttctttttttggccagaattacctagagtcagtttctgttttacaaacagacaaatgacccacttttatattttaataattatgccttatttcaaatgataataaattcgctttttgtaaatttggtatttgtggcaagtgacragtgtaatatgataccacactgcatctcaaacacccatgcctactgaaattgttgcctaattttctatgtatgtagcttcctgtcacttgactttacattgccagcactgcagccactgtggttgccttcccagcatgcagcccatacaggtctgggcacagatagagactctcatcccccaaggccattataatctcagtctgttctcttctttagtaatctccctttcacatttcctacagttactttcccagcctcaggccactctcctcaaggccctcatctcatcccagtcactacgcgaaggggtttagactctcactccaccaactccaactttcatcccaaatttgtcttcatacacacctctcttcgctctattaaatatatttttacttgtatttgtttttctcagagtaccttatggaattctctgttctcatgcgccatcccccaaaagagtagctctcttttggcacaaaatttcacatttttgataagacagtctaataaattatgggctctggtgaaccaatatgttagcaatttctggggcactttttgtactctctcaagaacttctgaacacagtgtcttaaaacagatgaataaatctcactaaggatatttcagaggaaagatcaatggagggatatagttttggcagtggaacttagcagtccac

SEQ ID NO: 67450 - DNA, 1092 bp, Homo sapiens
gaccctgcaagcaagagggacctgtggaatcacttagaccaaccctgtcattttacaagtgaagaaactgaggccaggaaaaggtcagtgaaggatgccagggccacatagtgaatccatgtcttatgaccacattcacgggatctttctgctatgcctagatgtctgagccagcagagtagaaaaaagcgattatacagccaaattttatgtaaaactcaattttatcccaaatcatatatagcactttttttcttttcttttctttttttggccagaattacctagagtcagtttctgttttacaaacagacaaatgacccacttttatattttaataattatgccttatttcaaatgataataaattcgctttttgtaaatttggtatttgtggcaagtgacaagtgtaatatgataccacactgcatctcaaacacccakgcctactgaaattgttgcctaattttctatgtatgtagcttcctgtcacttgactttacattgccagcactgcagccactgtggttgccttcccagcatgcagcccatacaggtctgggcacagatagagactctcatcccccaaggccattataatctcagtctgttctcttctttagtaatctccctttcacatttcctacagttactttcccagcctcaggccactctcctcaaggccctcatctcatcccagtcactacgcgaaggggtttagactctcactccaccaactccaactttcatcccaaatttgtcttcatacacacctctcttcgctctattaaatatatttttacttgtatttgtttttctcagagtaccttatggaattctctgttctcatgcgccatcccccaaaagagtagctctcttttggcacaaaatttcacatttttgataagacagtctaataaattatgggctctggtgaaccaatatgttagcaatttctggggcactttttgtactctctcaagaacttctgaacacagtgtcttaaaacagatgaataaatctcactaaggatatttcagaggaaagatcaatggagggatatagttttggcagtggaacttagcagtccac

SEQ ID NO: 67451 - DNA, 1092 bp, Homo sapiens
gaccctgcaagcaagagggacctgtggaatcacttagaccaaccctgtcattttacaagtgaagaaactgaggccaggaaaaggtcagtgaaggatgccagggccacatagtgaatccatgtcttatgaccacattcacgggatctttctgctatgcctagatgtctgagccagcagagtagaaaaaagcgattatacagccaaattttatgtaaaactcaattttatcccaaatcatatatagcactttttttcttttcttttctttttttggccagaattacctagagtcagtttctgttttacaaacagacaaatgacccacttttatattttaataattatgccttatttcaaatgataataaattcgctttttgtaaatttggtatttgtggcaagtgacaagtgtaatatgataccacactgcatctcaaacacccatgcctactgaaattgttgcctaattttctatgtatgtagcttcctgtcacttgactttacattgccagcactgcagccactgtggttgccttcccagcatgcagcccatacaggtctgggcacagatagagactctcatcccccaaggccattataatctcagtctgttctcttctttagtaatctccctttcacatttcctacagttactttcccagcctcaggccactctcctcaaggccctcatctcatcccagtcactacgcgaaggggtttagactctcactccaccaactccaactttcatcccaaatttgtcttcatmcacacctctcttcgctctattaaatatatttttacttgtatttgtttttctcagagtaccttatggaattctctgttctcatgcgccatcccccaaaagagtagctctcttttggcacaaaatttcacatttttgataagacagtctaataaattatgggctctggtgaaccaatatgttagcaatttctggggcactttttgtactctctcaagaacttctgaacacagtgtcttaaaacagatgaataaatctcactaaggatatttcagaggaaagatcaatggagggatatagttttggcagtggaacttagcagtccac

SEQ ID NO: 67452 - DNA, 498 bp, Homo sapiens
catcttcatcatctcttagatacactgtgttgcaagattagaaccatcatatcaaattacatggaagaaagttttgacaggacaatttaccctcaagaatttcagaatgtgagactcaaacctaaaataattctttaatcaacaaatacttaccaggtagctatcatctcccaatcttttatttcccatgaggcactgagaataagacaggcatgctccctttttctatggagttgaatggaaagagggagagacatgaaagaaatagaaacacataaaatttaaaagataattacctgctggccaacattatgggcatatgacstatgtgatcacacagggctctgactttagaagggccacacacttggcttaatgctttacttttgccttcctgaaactctttataacttttaacgagaggactgcattttcattgcattttgaactggacctaattacgtacttgtttattaagtattgtgtaattatgtagtc

SEQ ID NO: 67453 - DNA, 498 bp, Homo sapiens
catcttcatcatctcttagatacactgtgttgcaagattagaaccatcatatcaaattacatggaagaaagttttgacaggacaatttaccctcaagaatttcagaatgtgagactcaaacctaaaataattctttaatcaacaaatacttaccaggtagctatcatctcccaatcttttatttcccatgaggcactgagaataagacaggcatgctccctttttctatggagttgaatggaaagagggagagacatgaaagaaatagaaacacataaaatttaaaagataattacctgctggccaacattatgggcatatgacgtatgtgatcacacagggctctgactttagaagggccacacacttggcttaatgctttacttttgccttcctgaaacwctttataacttttaacgagaggactgcattttcattgcattttgaactggacctaattacgtacttgtttattaagtattgtgtaattatgtagtc

SEQ ID NO: 67454 - DNA, 625 bp, Homo sapiens
tcccccaatgcatgattcggcagagcctggaagtaatgaagaaatggctaatgacagccactgaaggcactgttaaatggcttattacattttgtaaagaaaaatacatcaacatccatcattgcaaacactttagtacacagaaagcccttcaaaatttccttcttctaagtagaaataaagrtttatacatgtgtatgccacataaacatatgccccgatataataacctccgcatgtaacgtcctctatatagaaagaagcacaggtatatgcctggctggagagacaaaggcgcattgtctggacacagtcactcagtattacagaagtgtgtgcatgcacacacacactccctcagaccagatgcccaaccacttccagatgctacagtctcggatatccttggttaaggaagaggaagaaaaagctcgcccttcacgtccagatacttgggttcgggttacatgaaacaggattagttcagaaaatcgtgccacttcacagccaagacaaaaacccaagaatgaaaaccatgtatacagccaacacaatagcaagactgaagacagtgacaaagagagttttctggttctgctctgatgcctctccctccacaccacac

SEQ ID NO: 67455 - DNA, 761 bp, Homo sapiens
ctgtgcctccactccctaaccagagccaaggaagtgacacgctcccaggggtccttgacaagagctccaaaaaggccacataagcctaaggcatccctctgtctgccctggcttagggagaaagataaaaaaaacggacttgctcccttgtcccacagccaaagctgccactcaacaagggccctgagagggcgtcaagcgcatcagagagtcagattcagtgcccacaggggaccagaggggacaagtaaagtgtgtcactgctggcactcgggtcaggaggggagtaagcaaacatgcacgcacacacacgcgcgagcacacacacacgcgygcgcctcctcccacgcagcattgttcccctgtgtcactgtcagcagttctgctgcgcttgacaaccagggcttcctaatagggccaggctggacctggcaaacacctggtcacttcccctcctgtggtccgcagggaccatcaccactgaacacaccactgcttgggggtggggaatgtccaggaaagctgaccttgtcctcaacaaagccctgggagccagccagctacgtgggtgtgcctggagaccttgcataccccacagaatacggaaaggattttcataacctcatagactctcgggagagaagatggtctcctgcatcctcccgcctcctctgcctattcctggccatttggtgtgcagagtcaggagagcagatgcctctcccatttatacagccatgctcaggctgtagctctgccct

SEQ ID NO: 67456 - DNA, 766 bp, Homo sapiens
agcttctgggagctcctggaccagatgttccatcagatccctcctcagttctgtctctaccctgaccccagcaggggaaacagatcccaggttctggggatggctgggccagatgcgcaggcctcttctgccccctcatgctccccaaccagtctcctaggaggcctgcaggaagcctccgggtgcaggtcagggcttcaacagctgcccaaacaggtatgggcccagatttaattggcctcttggttaagctttctaatctcattaaagctgcctccatcaagcagaccgaggctctgaattgaatcacagaagagcgctgccctgccccactgtaagctgattaggtctggggaggcctagctcggacccctctctgcactaccatgccgtacggtcacacggaaggcacgaacccagrctcacgaagaggggcacactgacgagggggcagcaggaaggaagttcagcgaagcagtcccagcaagggtgtggtaccagacctgcctactcccaccactctggggagccagtgctgtccccaggattttcagtaaatacaaaccacagagtaatctgatttcctatcttatcagtgtgcagtgccagaggccacccggctccaggagaaagctgcccttctaggcagagcgtgggactcacaattacctctccaacttcttttcgtagctttagagctctacttcattcagatggaaaggaggcagcagaggggtgtggtgtggggcccaaacacctgctttcc

SEQ ID NO: 67457 - DNA, 1676 bp, Homo sapiens
ctctgttaacggatatttagattgtttctagtgttctggtgccacacacgatatgttatattcttgcatataatgttgtagggtcctccagtcgccccctttctttctctgtcctgatggaaaatcagagtgccttgattgctctctgacctagccagcggcaggtttccctagcaggcttgaccataaaccaggggccttgaacattcacaggcctgataaaggtacctaggttgttgcccaaaacactggaagaaactggcctcaaccctgagccaaattcctttaaactctcatctgaactccataccctgaccccctcactgcggacatacccaggaacacctttctcccggtgtccgtcttgacaatttctgcagccctctgcaggtttccccctaaacgcttttggactgatcgccttggcattcagtgcttctttttctgtcatcccaaccagccacatctcgggaaggtttgaagcactccctcgtgggaactctcttgccgctgcttttggggcgattccagcctcgggttcgaaagaacaaagtaactgcacattttgtgcgcgtatacttgcattaaatttttttaacaagaatgactggatgaaaaagcatgtgaatttaaaatgctgatggttcttgccacattgccaggataggatccttttagaaggggaaacaaatcaagaacctgtacaaagagatgtggaatgctccttgtaagtggacagctttgctttcctcctttaatttctatttgatgaagaaggcagtgcctcactgctcagaggcagcgaggccaggcgacgggagaaaacaccctggggcactctcagaggctgaacctgaaccccatctcctgcctctgaacccaggatccttccttctctgcaaatttcggctactttccacctcccctgtgactgggaaaagcgctgttcttgccctcaaccactctcatgtccatatttaggggtgcccctctcctcggctcaagcccccggggtcctctcacctatggttctcgttaagcagggagaagagcgggccgaggcgcagctccgccgcttgctggcgaagctcgttgagcggcactgcctgcagcacggagtgaagcgcgcgtagctcctccagcggcgcttccagcctcgctacctctctcagcagcgccaaagcctgggctgccatcttgccccccgacgcaggggctggcccagcggcccagttcccggggcgctttcctgaacctcgcgagatctgatcacagcctccttgtccctgagatggctatggggctgccaagcctcgcgagaagcctccgttagggccgtgtcaactgtagccagtggttgcggctccctcagtctggcgtcatctaggtcgctgctcagggaaatgcggaggccagtaggcttacgtgtttaccgcgtagggcaaagccttgccaaattcccggccagcggagcggcgagggtggggactcacgggaagttaaacagcctcgtcggcgtcctcgaggctccaaaaccaggctctaggcggggacsactgcagccgttatggaggccaccgcggctacggccgcggctgaggcctccccaggtggagcggtggcctggaggggaatcttgatcctgggccagccacctgtcaagaggaggcggagcg

SEQ ID NO: 67458 - DNA, 1676 bp, Homo sapiens
ctctgttaacggatatttagattgtttctagtgttctggtgccacacacgatatgttatattcttgcatataatgttgtagggtcctccagtcgccccctttctttctctgtcctgatggaaaatcagagtgccttgattgctctctgacctagccagcggcaggtttccctagcaggcttgaccataaaccaggggccttgaacattcacaggcctgataaaggtacctaggttgttgcccaaaacactggaagaaactggcctcaaccctgagccaaattcctttaaactctcatctgaactccataccctgaccccctcactgcggacatacccaggaacacctttctcccggtgtccgtcttgacaatttctgcagccctctgcaggtttccccctaaacgcttttggactgatcgccttggcattcagtgcttctttttctgtcatcccaaccagccacatctcgggaaggtttgaagcactccctcgtgggaactctcttgccgctgcttttggggcgattccagcctcgggttcgaaagaacaaagtaactgcacattttgtgcgcgtatacttgcattaaatttttttaacaagaatgactggatgaaaaagcatgtgaatttaaaatgctgatggttcttgccacattgccaggataggatccttttagaaggggaaacaaatcaagaacctgtacaaagagatgtggaatgctccttgtaagtggacagctttgctttcctcctttaatttctatttgatgaagaaggcagtgcctcactgctcagaggcagcgaggccaggcgacgggagaaaacaccctggggcactctcagaggctgaacctgaaccccatctcctgcctctgaacccaggatccttccttctctgcaaatttcggctactttccacctcccctgtgactgggaaaagcgctgttcttgccctcaaccactctcatgtccatatttaggggtgcccctctcctcggctcaagcccccggggtcctctcacctatggttctcgttaagcagggagaagagcgggccgaggcgcagctccgccgcttgctggcgaagctcgttgagcggcactgcctgcagcacggagtgaagcgcgcgtagctcctccagcggcgcttccagcctcgctacctctctcagcagcgccaaagcctgggctgccatcttgccccccgacgcaggggctggcccagcggcccagttcccggggcgctttcctgaacctcgcgagatctgatcacagcctccttgtccctgagatggctatggggctgccaagcctcgcgagaagcctccgttagggccgtgtcaactgtagccagtggttgcggctccctcagtctggcgtcatctaggtcgctgctcagggaaatgcggaggccagtaggcttacgtgtttaccgcgtagggcaaagccttgccaaattcccggccagcggagcggcgagggtggggactcacgggaagttaaacagcctcgtcggcgtcctcgaggctccaaaaccaggctctaggcggggacgactgcasccgttatggaggccaccgcggctacggccgcggctgaggcctccccaggtggagcggtggcctggaggggaatcttgatcctgggccagccacctgtcaagaggaggcggagcg

SEQ ID NO: 67459 - DNA, 821 bp, Homo sapiens
ttttccaatacactggatggtaaaaagagtttctttaagtctaaagaaacttaatagaaatctctgccacctactagctttcggactttgaagaggctaacatagcgaaaccaccatggttttccccatctttcccgggatggatcacttcttcttatcctttcctagggcatgtatatgttgccaactttctgtgagaaattaatttatattaatgtaaaaacgacatagtaggcaagttttgacctttaagaaaagaatagcttctcatttgcttcttctctcgcccatttcattctactccaaggagagattgtgctaacctgctttgatcagctttcccaacaatgagtgggtgaaattccagggctggtcggaaccctgaatgggttccagggcagtgcatggactggtgtgtgtctctctttactaatttyctcctggctggaaaggtaaaactgtagtgggctgcttgggattgcatcagccatgtctttttttctcctccttaatgttctttcttctattgcagcaagcaggcctgagagggttgtgtggagggtcaggtggggagtagggagacagctctaagcattcccaaattcccttccctctgtcattggagataggtggcttttaactgggatgctaggctctgaatttcatatttagacaccaggcatggtggtgcacgcctgtagccccagctactcagggggctcaggtaggaggatcacctgagcccaggcgattgaggctgcagtgagctgtgatcagccactgctctccattctgagcaacagagtgagactctcaaaaaa

SEQ ID NO: 67460 - DNA, 665 bp, Homo sapiens
tttccgactgcaggaagagcgacgcagagctgaggcgtgggcaagagctcctgaggctgggctgggtgggcattccctgggaaagaactttctgagctggggatgtgaaggatgcaccacaaggggtgggtcctgggccctggaagcctccaggggaaacgtccctgtccctgtccctgagctgaggcccagctgcctgggagctcagggagactggctacccagcatgctgcctggaggaggagtggcagggctgccttgtggggctgggggctcagccaagcatgcgtgatggctgcagagaatttctactggtccccttccaggattgggtctcccggcgtgggttttgagaaaaacgaatctgactctggggctcaggcccaaggtgtcagggctcacggccccgtacagcggggcgcccggggctgaggattgtttggtggggggtgcactgatcagttcttgtcccctggtgactgtgcccctggccagcgacctggcctccctgarccctggagtagggtctcacttcaaatgctggccggagcctgctgccactgagtgctttaagcagcagtcagagaggtgggggcggggcacagaggcagggaagacccccactcgatgtatgccagggtgcacactaatgggcctagagacga

SEQ ID NO: 67461 - DNA, 665 bp, Homo sapiens
tttccgactgcaggaagagcgacgcagagctgaggcgtgggcaagagctcctgaggctgggctgggtgggcattccctgggaaagaactttctgagctggggatgtgaaggatgcaccacaaggggtgggtcctgggccctggaagcctccaggggaaacgtccctgtccctgtccctgagctgaggcccagctgcctgggagctcagggagactggctacccagcatgctgcctggaggaggagtggcagggctgccttgtggggctgggggctcagccaagcatgcgtgatggctgcagagaatttctactggtccccttccaggattgggtctcccggcgtgggttttgagaaaaacgaatctgactctggggctcaggcccaaggtgtcagggctcacggccccgtacagcggggcgcccggggctgaggattgtttggtggggggtgcactgatcagttcttgtcccctggtgactgtgcccctggccagcgacctggcctccctgagccctggagtagggtctcacttcaaatgctggccggagcctgctgccactgagtgctttaagcagyagtcagagaggtgggggcggggcacagaggcagggaagacccccactcgatgtatgccagggtgcacactaatgggcctagagacga

SEQ ID NO: 67462 - DNA, 1414 bp, Homo sapiens
  misc_feature (1)...(1414): n = A,T,C or G
tctctcaagctagtcagtcagtttaatgtgaggtgcttaggaaaggacccattctactgcaagtgacatacctgccagagcctggtttgaatgctggtaagtcatggcagtggaaaagctctggggttcattagtgtagggactagggctggtaattttcttgtgtagtcagtttcctcaagtgttctcttcaaatttaaagatttcagggtatgagaaatttagggaaaatataaaaacgtattcttaagccagacaaagattaattttagattttgtagtatttggtagtatctcaggttttgtccctccaaataattaggagtggactgtatacaagatgcttcagtcttccttcatccaggaacgtctcagtggtttttaagttttattcatgtcttggatattcttcaatatttacaatagaatccagtttgagaataatgaagatcaagatgtaaacccgctgaaactaggccttctcacttggattgaagaagacgtcttcctggctgtaagccacagtgagttcagcccccrgtctgtcattcaccatttgactgcagcttcttctgagatggatgaagagcatggacagctcaatgtcaggtattgcagtttttccctgtactccacatgttaagcaaatggagttaggtttttgtcttttatgagcatacaacttttgacttctattgatcaaggttgaggagcagtagctttcttgttagacacacttaacaagaaggttaagtctagttatgagccatgtcaaaataacagaccaaaaatatatcaaaaagtggtgaaaaataggataaatattagtagatgaagcaactttttaaagatatgttaaatattttaatttagcatctacccacatttttccagcgtgattgttatatgttataattgattttaataactgtcaagcataattagagtggctaattctcatgggctaatgtgatgggaagaaattttgtataaatgcagtcatgcgcatatnnnnnnnnnnnnnnnnnnnnnnnnnnnnnnnnnnnnnnnnnnnnnnnnnnnnnnnnnnnnnnnnnnnnnnnnnnnnnnnnnnnnnnnnnnnnnnnnnnnnttaatgtgatgggaagaaattttgtataaatgcagtcatgcgcatatgtgtgtgtgtgtgtgtgtgtgtgtgtatacataccttttctatgtttagatacacaaatacttgacatggtattacaattgcctgtagtattctgtaaagtaacatgctgtccaggtttgtagcctggtagcaataggccataccccataggctaggggtgtagtaggctacaccacctaggtttgtgtaagtactctatgatgtttgcacaatgatgaaatcacctaacaacacatttctcagacgtatccccat

SEQ ID NO: 67463 - DNA, 680 bp, Homo sapiens
cagtcctgatgaaatggaaagagaattagaagtcagaaagaaagtgggacatgaggctagatatgggagatgtggcctggattgcccgggctttggcatacagctaattgctttgcctttaggctaaggcaattccttgatagaagaaatgttagaatggaaaatgctaggcaagttaatactactgacattgtctgctaccagttgtaatgttctttactgcttttacagactaaaactactagctatcttaaggcggcggtgggttgggggactagcagggtatttgaggaattatgtggctttttcataaatgctttatttccattgattgattgattgattgattgagacagagtctcattctgttgcccaggcttgagtgcagtgctgtgatctcagctcactgcaatctctggctcctgggttcaagcgattctcgcacctcagcctcccaagtagctgggattayaggcatgcgccaccatgcctggctaatttttctatttgtagtagagacagggtttcatcatgttggccaggctgatctcgaactcctgacctcaggtgatcttcctgcctcagtctcccaaagtgctgggattataggcgtgagccaccatgcccggcccttatttccttttaaaagtacaggagatgagaagaaaaagaaacttgct

SEQ ID NO: 67464 - DNA, 784 bp, Homo sapiens
tcctgcctcagcctcccaagtagctgggaccacaggcacatgccatcatgcccagctaattttttttttaattttgtttacttatttgttcatttattttgtagaaatggggtcttgctttattgttcaggctggtctcaaactcctggtctcaagcaatcctcccgccttggtctcccaaagtgctaggattacagatatgagccaccatgcccagatacaatgtccataaactaataacattcttttcattagtagacctgaaacattatactcagttattcttgtattttgaatttcatcagtaacaatgttgtggaaatctattctcttttgtcctaaagacatatataattgcctcaattttgcctcttktcccctaagcctaaatatttactatctgaccctttacaggaaaagtttgctgacccctaacatacaggcaaacagctcattataacatggggtactctctcacacaggtgccagcaaacttaggaagtcagagaaaggagcaatgggacccagtgggaggattagacactggtctatggagagcacaatgtttgagctggaaactaatacaagcggttacctttgggtacatggggaggagcacaaattgggtggatgaatacaggaagagaagtgaagattttcactgtatacctttgtacatttttaaaaatttctaaccatatgaaaacatacccatttcaaaaaacaaagcttggaggttgggctacaccagacttattggttggccggccccagggagaaagtt

SEQ ID NO: 67465 - DNA, 1791 bp, Homo sapiens
taaggtttcgtgggaacaagtacatacagtgtcataacactaacaaatgatcgaattaaactctgaccagcaagtctcggggcgataatccaggctcaagcatcagagagcttgcctcttgacctgttgaatcataacatctgctgtgagtatctgctgttaactctggggtaagtcagcatcacatcaggttctacaccaatcccatccatgccaggagagaagcagctgctatggtgcgtaacagggcaccggatgattattatttcagatgaaatagacatctaatatactgcttaaacaattgcattccggcctggaaaatctacctgctgatttcactgccaggcaaggcgtcctcagaggcagctgccgctttccacaatagcactggtgatttcatgaaattgcatctcctgattttattcccacttaaacttcacttgctcatgccagtgacggtggagagacaattgtcgcctcctaccccaccttcagcttagtcatctcaagtgatttacttgtatatgcgtaatcaccctcttctcaaaatgaaataaaataggaaatctggattctattgttgaagtgtctccttactacctcgccctttctggtttcttttcttttcagatgaatgcattgcttcttattcttttcctcctactcaaaaaagtccacgcttgtgttcctttcagagtttccactagaaaccatacttgttttccagagcaacacttctcccattttttttttttttttttgcccaaatgcctgagcatttgattaagccagaagtggttccaggattaaaaatgaaaggtttctgggtttcaatcagagactaagttgttcacttttttttttttttttttgagacagggtctctctgtcacccaggcacgtgcagtgtcacggtcatggctcactgcaacctctgccttgtgggctcgggtgatcctcttgcctcagcctccccagtagctgggaccaaaggtgmatgccactatgcctggttaatatttttttaaattttttgtagagacagtgtcttgccatgttggccaggctagtctcgaactcctggcctcaaggaatcctcccaccttggcctcccaaagtgctgagattacaggtgtgagccatttcactcggcccctaaatcttaagaaaattctgagttcttgttttagagttacttgtttaactatttgtgttgttttgttgctgctataaagagtttttatagcagttgaaacacaagtaactagaaacagctaagtttactaagctattggagagtggcttagtaaagcagagtataagtataccaaagagccaatgacactaaatagccattaaaaagtgtggatgtgaaagttgttaaacattttttttttttttttggacacagagtcttgctctgtcgcccaggctggagtgcagtggtgcaatcttggctcactgcaagctccgcctcccgggtttacgccattctcctgcctcagcctcccaagtagctgggactacaggcacccaccaccacgcccggctaattttgtttttgtgtttttagtagagacggggtttcaccatgttagccaggatgatctccatctcctgactttgtgatatgcctgcctccacctcccactcccaaagtgctgggattacaggcgtgagccaccgcgcccagccaacatttttaaaagtcagattagataacctgatctcagttttgttgatatgtgactagatatatatatatgtatgtgtatatatatatatata

SEQ ID NO: 67466 - DNA, 570 bp, Homo sapiens
  misc_feature (1)...(570): n = A,T,C or G
ggcacatgccctgagcatcgccttggggctggcacagcatgccacacggagatgcccaaaaaacatctgaaagatggccgggcacagtggctcaygcccataatcccaccactttaggaggccgaggtgggcaaatcacctgaggtcaggaatttgagaccagcctggccaacatggcaaaaccccatctctactaaaaatacaaaaaattagctgggtgtggtggtgcgtgcctgtaatcccagctacttgggacgctgaggcaggagaatcatttgaacctgggaggcagaagttgcagtgagccaagatagtgtcattgcactccagcctgagccacagagcgagactccatctcaaaaaaacaaaacnaaacaaaacgaaaaaaatggaaagaaccaacctgaagcccttacatgcaggtttactccattgtcaccgctaccataagcaaatgtctttctgtggcagtcgctgagggaggcgaagtcacgggtaagacaaccacctgcttacgcacaggattccttgtcacaaacgatcccatgggaggacaggctcccttccaga

SEQ ID NO: 67467 - DNA, 570 bp, Homo sapiens
  misc_feature (1)...(570): n = A,T,C or G
ggcacatgccctgagcatcgccttggggctggcacagcatgccacacggagatgcccaaaaaacatctgaaagatggccgggcacagtggctcacgcccataatcccaccacttyaggaggccgaggtgggcaaatcacctgaggtcaggaatttgagaccagcctggccaacatggcaaaaccccatctctactaaaaatacaaaaaattagctgggtgtggtggtgcgtgcctgtaatcccagctacttgggacgctgaggcaggagaatcatttgaacctgggaggcagaagttgcagtgagccaagatagtgtcattgcactccagcctgagccacagagcgagactccatctcaaaaaaacaaaacnaaacaaaacgaaaaaaatggaaagaaccaacctgaagcccttacatgcaggtttactccattgtcaccgctaccataagcaaatgtctttctgtggcagtcgctgagggaggcgaagtcacgggtaagacaaccacctgcttacgcacaggattccttgtcacaaacgatcccatgggaggacaggctcccttccaga

SEQ ID NO: 67468 - DNA, 1194 bp, Homo sapiens
tgtagagcccaacttgcccgttactaatttcctcaagamtgatctgatttttctactagataattctttttttgttttctgttccttctactgcctcttcttttgtcaaattctagaaaccctcttgactgtctacattttttatttttaaggaacacaagacttgtagtcagcaaaaacttatttgaaccccaactttgatacctttgtggtttgggcagaattacttaactcagagctgatttctcatatgtaaaaaagggataacactgactatctcagaatcttgtgtgaaagaattaagatgcaatttgttaaatggaccatggtgtttgtgtcctagaagacataaagcaaatactattttattttaaaagccctgacttttgactcctgtaattttggaagttcaggggtttactgcaatcacattgtaatccaaaaactaaatgcacaacccaagaaggttcgatctgaagacttcaggtgattttatactatgtaaggatacaatactaaatgtttaccattcctagcatcaaaactgacaatgaaaaaatgtgttggttttggagccaaaattattgtgtttttgaaatcttctgctacttagcctaggctggtcatttcctctaagtctctctctgtgtgtcaaagtagataattatgtccataggcggggttgttgcagtgcaaatgcgatataatatctacaaagtggctaatatataggtattcaatcaatggtgatactttgattacctctcagtgcatttccagatataagcgcatatgaataatttgttaaaatgttgtttaagtcaagtgatttagatgaatgtaaactggcacatattctgtggcagatataattaaaatgtaatgattattgacagtattatttatttatttagagataggtcttactatgttgtccaggctagagtgcagtggctattcacatgattaatcatggtcctccacagtcttgaactcctgggctcaagtgatcctcctgcctcagcctcctgagtagctagaaataaaggtgcacaccactgcatctgactgacggttttattgttaatgcaagaaatatctacatttattttataaaattagtttccaaactattggagaggtagtgatcagctaggttcatagtttacaagaggactaatttctaataatcta

SEQ ID NO: 67469 - DNA, 1203 bp, Homo sapiens
atatgaatagaataggactaacaggacactaaataaaaataatagctaaaatataaactgatataaaccataaaattatgaatacaatattgatgctatagactttatgatacaaattaatatgaattttattatagtaaatatttcaagtaaaaagtcccacaagagtatttcccttatatttaatggtttcggtttttaagctgaaaatcagtaaaatattttaaagaaaataaacattttcgatatttcaaatttatgaagagtaataaatactaacaaatcacctagacaattgtaaggcattaattttaaaataatcaagcattttgttgtgcttcttttgacaggaaatatttgaatgaatatttatcaaagcatgaagtcagtctacatcttatttttgccataaataaaaaaatatgtccaaaatgtgaacatattttattgttactgtggaatgtaacataaaagttttctaaaattgtttttcctaaataggaagataatttcattatggcaaatatttttaaaagtcagcatccctctcctctggcagagaatctatgtaagtgatcttgaaagacagtgtaacattactcacaaaacagccagaatgaatgaaataaacaatgttctcctgcatcatccttcactccacttcttcactctactctaggtacagctgggaatcataactgtgcagcattaaacaaactgtttaaattgggtgtgagggcagtcgcttgcatatatgaaataaacctttgttatgggtttgggagagttaagaaataaaaaaaggttataaatcttttattctaatatcacataactgaatatgatgaccaagccaaatacttaaaacagaataattagtaattcattctgtcatttattaatctatgaacactttattgaatgtctactgtctttgggcactaagtgggtattacgaattgtagagatactgcttttccttctgaaatgttcctattttcaggttgcaaggaaggcatagaagacatcgagcataatatcatcaatactaaagtaaggatatttagaaagatttatagacactcaaaaaggctcacagayaggtaacatttgagctggattttgaaggatgaaaaatatgtagctagggaacaaaaatcgaaggtcatttttggaagagagaatcaacaaaagaatagaacc

SEQ ID NO: 67470 - DNA, 1146 bp, Homo sapiens
aacgaattcccacattcttacttagagaatttttactttgattttcccacacttcagcctggagtagttttcaggttgcccagtcgaaaattgatcagaataagtacctataaaatggcagcttctttgacattagcaagtagaggcaaatagtgagggacaagacttcaaaactataaaaagatttctgccataattttcatacaggccaaaaatgctattaatatgagtgtttaaaaatcctaaacttacaaccagatgtcaaagtataataactggggtctattctgaagttctgagttattaagaaaaaaaattctatatattatattttgtataaaaatgagataatacacaacatgttagatttttagccaaatgattttcatcagaatttattacattacaagcaagaaaatgttggcacttacaatttagctgttcgaaataatctattattagcactaattttatccccaatctccttggatgacagactttcttacatattcattcattgtcttttctgaaaayggatggccaagattctaaaacactcaattcacacagtcagcacacagaggcatcaaagactgatgctgcttttatttcctgagatattaataattttttcttaacacaagaagctgtgaaaattaaaactcttcctctagagtttaaagtgctagacagagacatattggcaacaatagtcaatgaagaaatgataaaacataagtaaaaccaaaatgataaaagatgaaaaaatacattaaaaaaattaaaatgcttcaatacaacaatatctattatattttaataactagtacagcttcctaggcatttgaactttaatcacacaatcagtgctatgtgaataatatttttggaaatatttgttggaccagatgaatgtcaaactgtataagagataaaaatgaaatgcaatcaatcaatattatttaaattgttttatcaagttttatgtcaaatattcctttcattaaaatagttaaaatcaaacaaaatgattttattttgtatatgtttgcctaaatattatcgaagtagtacgtccctttccccacctccaaaggagctagctactatttcttttttctttccccatatagcatttaccttcat

SEQ ID NO: 67471 - DNA, 1146 bp, Homo sapiens
aacgaattcccacattcttacttagagaatttttactttgattttcccacacttcagcctggagtagttttcaggttgcccagtcgaaaattgatcagaataagtacctataaaatggcagcttctttgacattagcaagtagaggcaaatagtgagggacaagacttcaaaactataaaaagatttctgccataattttcatacaggccaaaaatgctattaatatgagtgtttaaaaatcctaaacttacaaccagatgtcaaagtataataactggggtctattctgaagttctgagttattaagaaaaaaaattctatatattatattttgtataaaaatgagataatacacaacatgttagatttttagccaaatgattttcatcagaatttattacattacaagcaagaaaatgttggcacttacaatttagctgttcgaaataatctattattagcactaattttatccccaatctccttggatgacagactttcttacatattcattcattgtcttttctgaaaacggatggccaagattctaaaacactcaattcacacagtcagcacacagaggcatcaaagactgatgctgcttttatttcctgagatattaataattttttcttaacacaagaagctgtgaaaattaaaactcttcctctagagtttaaagtgctagacagagacatattggcaacaatagtcaatgaagaaatgataaaacataagtaaaaccaaaatgataaaagatgaaaaaatacattaaaaaaattaaaatgcttcaatacaacaatatctrttatattttaataactagtacagcttcctaggcatttgaactttaatcacacaatcagtgctatgtgaataatatttttggaaatatttgttggaccagatgaatgtcaaactgtataagagataaaaatgaaatgcaatcaatcaatattatttaaattgttttatcaagttttatgtcaaatattcctttcattaaaatagttaaaatcaaacaaaatgattttattttgtatatgtttgcctaaatattatcgaagtagtacgtccctttccccacctccaaaggagctagctactatttcttttttctttccccatatagcatttaccttcat

SEQ ID NO: 67472 - DNA, 640 bp, Homo sapiens
tcagtttagaaatgggcccctcccagagtctgtcaacttgctgcatcaggccgcccaacagggtaatattgaaatgtgcattgcttgacattaaatctcctacactctcgtgaatgtgctgttctcgcctcccccttcccagaaatttctcaatgtgccagcagtgtctcccttattactgccagtctcttcctacaacaatctaagaggaattgagaaaatcagataaccagttttgttaaatcagtaacttaatgcactcaagcttcagtcaggggcaaagattcagtcaggggcctctggctgaaggaatttcaggacacttgctccatcaaaagcatggaaagaactctctatrctgcttggtggccaagttttacttctagacctgttcaaaagagcttaggtttctagacatgtcagggtcaaaatatccaggcaatttggcaaaataagaataaaagccaggaaaacagagaaacctacactcaaatctcacttgagcaagttaatctctctgagccgcaatttttttatccataacagttcaatatacgtggaaggaatctaccaaataaatgtgaaaatacataccaaacagtcaaagaaaacattttctgtattccccactcatgcacat

SEQ ID NO: 67473 - DNA, 966 bp, Homo sapiens
ttttggaaattatttacaaagtttatcgtaattatatatagttttcaatcactttgagtatcagaggccatatttttgagatctcaaaactagaccaaggatattcaaatatataattcattgtcaatttttctaattgtggaaacgctattgagattatgtaataccattatgtttgcaaaatattgttaatttgtcatatatttgttttttgttttgttttgttttgttttgttttttttggtagagacagggttttgccatgttgcccaggctggtctcgaactcctgggctcaagagatccacctgccttggcctcccaaagtgccggaattacaggcatgagccactgtgccctgccctctatacttaatgctagtaagtagtgacatcaaagttaatgtaaattaacaacattaatgtcaataaaatatactgagcccaatgaacataattatatttttttctctctgtgagttcattgagggggaaagacatgtactgagaatattaatcatcaagatgagtctaagcaattcaatttccagaagaagatttggaaaggattaaatggagagagaatttattataaaaatgttattttcttcattctactgcctttaaaaaataacaataaaccacaaggcaggaatgtattcattataatttttttatttagaagttaaagtaaggatatagttgaatatgagaaaattattcatgtaaatgagagctcatcttacaataattcacaaaggtactggaagctatattgatctggtatcgtcctagtgatagagattcatagaaataaagtattacatcttgagtatgatttctttgttgytgttagttcctcttgcatacttattatctaacctattttacttttctatgttattgaaattgaactcacatatttatttggatatgtttgctctgcaaaattaaaatgaatagggtgt

SEQ ID NO: 67474 - DNA, 1060 bp, Homo sapiens
gtcagagtctataacagtgtgtgggatcaatgccatgaccttcacagtgtaattttatcaggactgacatccaaaagtttcataataataatgactggtatttatattcaatttcagcattatgcataccctttattatctcagttctttcttatccatgattcttggaaaaatacatgaatttttattttagagttgaatttaagttttcctaccaataatatttttagcttgagactggtgtttgaatgtagctcacccaaaatacaggctaaaatgaaaatacacacgcacttacacacatgcatgcacacatcagttctgcaggtgaattatgattcaatcaaggttaagactcacgatagagaatgaaaaaactaatttattttattttttcatttagttaattttattaataatactatcaaataaagaattaggtagagaacagcattttatttctcattgtcaaagtacagaaygtcagtgacaatagggattagtggacaaaacagaagctactggagaactttgaggaagagggaagataaaaataaattaagcttactaatatctatttcatttaatccagataacttccacaaatgtaaaccacagaagttcattttaaaaagagttacactacacaaaaaaagagacatattttagtcagcactgtaattaagagatggaggaggtaagggatatttgcattaggtaatctatttctctatccacaaagtgatgaaatcaacacttaccaaggaatggctgagaagttaagaatgaaagcattggtgctgagaaagatcttttgttaacttttatgacctctttcaatctcttggatttgaaataagtatataagaatttatgttagggaagtctagacagattttaaatatgtttaaaatgtaaatagatttaataaataaaatttaaatatttacaatggaatctaaaaacactcacagggagaaagacacacacacacacacacacacacacacacacacacacacacacgtagagaagaaagagagagagagagaacaacttt

SEQ ID NO: 67475 - DNA, 843 bp, Homo sapiens
aaattatgatttatcaatcaaaaataatatcaatagtaaaaatgtacagtatatctttttgtccatcaaaaaactttaatataaaaaccattgtataccaactgctatcacagcaccatccatagaacattatgacaaaaagasatagcaggcagtgaaggaaaactggaggggaaggaattccgattcctgacttatttcttcattcataatcatttttgatgcttgtaagagcacatagatagagggaaaatcaagttgcagacagaagtgagcttgaagtttccactgagaagaccagaatcggagcaaagtaggtctctccaatatgacacacacacaccctcatcccatcatctggagaaacgcaagcctagttaggagatgatcaaaaggttactgaaattattatcaagaacaacttcaagcagaccagggaaatctgtgagaaggtggtcctggtcatcagtactcatgaagaaaaagtggaataatgcctttctgtcaaatataaaaggtatgtggggagtaaagaaagcactgaagtttgaaagaattaagaactaacatgcttttgtaggtctatgaagtagaaatgaggtgatcttttggggctgagtttaagagattctcaacatcttctcttccttcaaaactatcttgagtatagataatatgcctaaagtcctgcagatggtaccctacagctgttaagcaggcttgattatctttttctccagatgtgacaagagacttgctgaggtcccactacagcccattgccaggacctagattcccacagtcagatgaaatctatgagcttcctgggaaggaggctgggta

SEQ ID NO: 67476 - DNA, 730 bp, Homo sapiens
atggctcgatagacttttttttggaactaagatttagtttcctgaatctaccaccgtttgtttatctatttacctattgaaggatatcttgtttgcttccatgttttgacagttgtataaatctgctataaaatttcatctgcaggtttttgtgtgarcataaattttcaacttatttagacaaatacaaaagagcatgaatgctgcataatatggtaaatgtatgcttagttttgtaagaaactgccaaattactttgcaaagtagctgtatatttgcatttccaccagcaataaataagaatttctgttgcttcatatcctcaccagcattttagcaattctaataggtttgtcatgttgtcttttggttcttttaatgtgcagttccctaatggcatgtgatagagagtatcttttcatatgtttatttgccatccatatatcatctttgatgaggtatctgttcaaatattttatacattttcctcctcccaataaggtttttcatgaattgaaagctggaaaaaatagcatttcttcatgagaaagttaaaaaaattacattttattgtgatgcaatcacctgacgaagaaaaaaataataattttgttttatataaatatttaaatctttattttcaatttacttaatatctttacattttgttttactttaccattttcttcaattttctttgatttaatagaaaatcaatgtgtttatgatt

SEQ ID NO: 67477 - DNA, 599 bp, Homo sapiens
tgaataaagctacagttggtttcacattttggcgacactacttagacactgctcaagcatccatgctctcattttgtctggacctcttctctcttttactctggtttccatcatgtttctctattccttgcyagtccgtactggattagtcattattgccaaagtgtcagtcacgattgtcactgttcggcagtcactgtggttaaattcttggactgtatgtctgcaacagtcaaacttcagttgaataattaatatttatttatgaactgatattattagttgttaaaatttcttttctcaggctgggtgtggtggctcacacctgtaatcccagcactttgggaggccgaggcgggcggatcatgaggtcaggagattgagaccatcatggacaacatggtgaaaccacgtctctattaaaaatacaaaaattagctgggatggtggcatatgcctgtaatcccagctactcaggagactgaagcaggagaatcgcttgaaccagggagtcagaggttgcagtgagccgagatggcgccactgtgctccagtctggtgacagaacgagactccatctcaaaaaaaaaaaaaaaaaa

SEQ ID NO: 67478 - DNA, 552 bp, Homo sapiens
caagtttggggaaaagaaactatacctggaacagatggtcctgcattacataggtttaagaaacttcaatggcgtggggttaaaaaaagggggaaaacagaaattacatggcatgggaaagaatatctgaataatgtaaagaatcactcagaatgcstattattaaaaagtcaaaaaacaacagacgctagctagtaaggttgtggagaaaaaggaatgcttttacactgttggtgggagtgtaaattagtgcaaccactgtggaagacagtgtggcaattcctcaaagacctagaggcagaaataccactggacccagcaatcccattactgggtacatacccacaggaatataaatcattctattacacaaaaacacgcacgcatatgttcagtgcagcgctattcacaataggagagacaaggaatcaacttaagtgcccaacaatgatagactggatcaagaaaatgtggtacatacacaccatggaatactatggtggagatggtcaaggatagactaaattaagaaaatgtggtacatgaagacca

SEQ ID NO: 67479 - DNA, 622 bp, Homo sapiens
acttcccagcccactcatgtgattgaggactttagattaaaggcctcagttccttgcaggatattgaggccactctcagttccttgccatatgggccccttcacagggcagcggaaaatatggtggctttcttcattacastaaggaagaaaacaacaacaacaatgaaaaaaagtgggaactagatggaagtgacagtttttaaataatctaatcttcaagtggcatccatttatctatttttcttggaggcaagtcactaagtccagcccacggtcaagaagggattatacaaggatgcaaatatcaggaggtgaggataagtggggccatcttaagtcgttcatttatctcatcttacttaaaactaaaggaacaggtgcgtggactggcagtgggaaattccttgagccagttagaacagagtcatgaaaaacacagaatatgggaatgagcagagaatctatcaagttatatctgcagaatgcattctgtgtttggcaaatgtgacaaattgtgttaatggcccaattctgcacccttgtatccatgctcttcttcatgcaacttttcagttactctcactaaaaaggtacaggtcttttcctcgcctttgggatct

SEQ ID NO: 67480 - DNA, 818 bp, Homo sapiens
aggtttgtttgcagatacrcagcattaaacagaatttagctacctgtcatttctctgacagcgcaccccaaggttgtgaacccctcagacatgtccagttcttctcttactaccaaacctgtcttcccagacacttctgaatgaggaggcctaggaagaaagaggaaaagagagagagaaagtgtgcacgcacaggcgcacaaacacaaaatccggcttccacggaggacagcagcagcctgctgcacagtggggaccaagagatacaaggctgcccatgtaacagatgcaagtttcccgtgctccggttcagctgggaatgcaggctgtaaagctgaaataaatcacatggaacttgctgtcatctctctaccttcctgctaaacccttcgacactgccgcttgactggctggagtcgtcgtagtttttaaatgaaggctggaaactggcattggcagcactgcctaatttttagctaatacctttgtgggttctgcgctcgcatctggccagtgccatcatgctggggatgattataataggctgctgctctttcccaagcaggaagctggagtcctgtaactgacaggctaaacagaagcttgttccaaacacaacagcacatcacagccagagaagggtctgcggtgcgggacttctcccaaggcataaaaaagagagagagagagagagagaaatgtgttaactgtgctaacagtgccaagtaatatgcttcgttaaaaatttaatcacctacaagtgcaaaacaagtgcaaagcaatcatgttgtaattagcacagcaattaacacctccct

SEQ ID NO: 67481 - DNA, 702 bp, Homo sapiens
ttctgtaccatctcatatcaagcccaagtccaataactggtctagmtagaacgtggcaccagagctgcctggtattaagcgagaagtacctattccagcatgtactgcctattaacctgatttataggtaccctagagctcatctcaatacatagagatttgtgggtaaaacagttgggaaaatagagcaagcagtcttcaatcccctactggagagttaatctttaacttgccaatctcttgtctctatcccagacagatgaaagcctgtcagagtatgcagtctgagatgccactgactagaaattcatctaaggccccaaagtccttggcacagttttagaaatgactcattatgagaatgaaacctagttagcaactcgaaaactctgaatgtctttgaaaaaagttatataaggaaattttctttaagtatgaaacatctaagaatttaagaaacaatatgagggaaaagcaaataaaatctttaggatgaatttgttttattctcattggccattgatcatggaatgaatatgttttaaggagcagaggaaacatttggagtgtgatgtttgaaggctagaaagcaattacctatgctttacatttcttttttcttttctttttttttttttttttggttttttttttttgagatggagttttactcttgttgcccaggctggagtgcaatggtgc

SEQ ID NO: 67482 - DNA, 702 bp, Homo sapiens
ttctgtaccatctcatatcaagcccaagtccaataactggtctagatagaacgtggcaccagagctgcctggtattaagcgagaagtacctattccagcatgtactgcctattaacctgatttataggtaccctagagctcatctcaatacatagagatttgtggrtaaaacagttgggaaaatagagcaagcagtcttcaatcccctactggagagttaatctttaacttgccaatctcttgtctctatcccagacagatgaaagcctgtcagagtatgcagtctgagatgccactgactagaaattcatctaaggccccaaagtccttggcacagttttagaaatgactcattatgagaatgaaacctagttagcaactcgaaaactctgaatgtctttgaaaaaagttatataaggaaattttctttaagtatgaaacatctaagaatttaagaaacaatatgagggaaaagcaaataaaatctttaggatgaatttgttttattctcattggccattgatcatggaatgaatatgttttaaggagcagaggaaacatttggagtgtgatgtttgaaggctagaaagcaattacctatgctttacatttcttttttcttttctttttttttttttttttggttttttttttttgagatggagttttactcttgttgcccaggctggagtgcaatggtgc

SEQ ID NO: 67483 - DNA, 702 bp, Homo sapiens
ttctgtaccatctcatatcaagcccaagtccaataactggtctagatagaacgtggcaccagagctgcctggtattaagcgagaagtacctattccagcatgtactgcctattaacctgatttataggtaccctagagctcatctcaatacatagagatttgtgggtaaaacagytgggaaaatagagcaagcagtcttcaatcccctactggagagttaatctttaacttgccaatctcttgtctctatcccagacagatgaaagcctgtcagagtatgcagtctgagatgccactgactagaaattcatctaaggccccaaagtccttggcacagttttagaaatgactcattatgagaatgaaacctagttagcaactcgaaaactctgaatgtctttgaaaaaagttatataaggaaattttctttaagtatgaaacatctaagaatttaagaaacaatatgagggaaaagcaaataaaatctttaggatgaatttgttttattctcattggccattgatcatggaatgaatatgttttaaggagcagaggaaacatttggagtgtgatgtttgaaggctagaaagcaattacctatgctttacatttcttttttcttttctttttttttttttttttggttttttttttttgagatggagttttactcttgttgcccaggctggagtgcaatggtgc

SEQ ID NO: 67484 - DNA, 820 bp, Homo sapiens
taacatatgctgagaaattgaagcaggaatggcactgccttgtatgcaaacacagctatcagctcctccccatcacacccctcattgaagagagattgaatcttctccagcttaaatatctctgaagctgcttgcccatggggactgcaaagcttccaaggctgtgcagccacaaaacctgcagaaagattgttgcccattgggaacctgaggagtagtactgactggctgccaatcccactagaatttatttagattttagcattataatttggacactgcatgcattcttagaaagatgtgtgtttmagagaagtagatcaacatgagaaaaatctacttttttttttttttcatctgaattaaaagacaacaggctaggcgccgtggttcagcctgtaatcccagcactttgggaggctatggccatggcgggaggatagcttgaggccggaagtttgagaccagcctgatcgatatagtgaggcctcatctctacaaaactaaaaaaaattagccagtcacagcggcaagtacctgtagtcccagctactcaggaagcttaagcaagaggatccttgagcctaggaattcaaggttgcagtgagctatggtagtgccactaaactccagcctaggcaacagagtgagaccctgtctctttaaaaaaaaaaaaaaaaggcaggtcatactgaaaacaatgtagattcctaggtgttcaacagatttccttcattgcaagcctttttttggtagaaaaaaatgcagaaaacattaaaaaatttttattcttggtaataatatgaagtatctcttacag

SEQ ID NO: 67485 - DNA, 642 bp, Homo sapiens
gatcctgccccggggccacaggcggagctgcccaccagtcctgcggcatgcacctgcactcctcagcccttgggccctcgatgggaccaggcgctgtggagcagggggtggtgctcgtccggctgtgcaggagtccacggcaggggtgaggctcaggcatggcgggctgcaggtcctgagccctgccctgcagggaggcagctgagacccagtgagaattcragcacagtgccggtgggccagcactgctgggggaccctgcgcaccctccacagctgctggcctgggtgctaagcccctgactgcccggggctggcggtgccggctggctgctcagagtgtggggccctccgaacccatgcccacccagaactcacgctggcctgtgagtgccgtggggcacagccccggttcccgcgtgcacctctccctccatgcctcccagcaagcagagggagccagctccagcctcagccagcccagagaggggctcccatagtgcagcggtgggctgaagggctcctcaagtgcggccagagtgggcgccaaggctgaggaggcacccagagtaagcaagggctgccaacatgctgtcacctctcaaaaatatgaagaaaatagtgtttctggagatcagaactt

SEQ ID NO: 67486 - DNA, 642 bp, Homo sapiens
gatcctgccccggggccacaggcggagctgcccaccagtcctgcggcatgcacctgcactcctcagcccttgggccctcgatgggaccaggcgctgtggagcagggggtggtgctcgtccggctgtgcaggagtccacggcaggggtgaggctcaggcatggcgggctgcaggtcctgagccctgccctgcagggaggcagctgagacccagtgagaattcaagcacagtgccggtgggccagcactgctggggraccctgcgcaccctccacagctgctggcctgggtgctaagcccctgactgcccggggctggcggtgccggctggctgctcagagtgtggggccctccgaacccatgcccacccagaactcacgctggcctgtgagtgccgtggggcacagccccggttcccgcgtgcacctctccctccatgcctcccagcaagcagagggagccagctccagcctcagccagcccagagaggggctcccatagtgcagcggtgggctgaagggctcctcaagtgcggccagagtgggcgccaaggctgaggaggcacccagagtaagcaagggctgccaacatgctgtcacctctcaaaaatatgaagaaaatagtgtttctggagatcagaactt

SEQ ID NO: 67487 - DNA, 1389 bp, Homo sapiens
aaatgggagccaaatattgttggatgaatgtactaaattgtaatactcattttcaatgaaattctctgattgaacctatatttctcttgaaattatcttagtaaatttccaacttcctgatgtcactcagttgttcaaacgaacaaatcacaaagtgttacattccaatattttaacaaatgaatttaaaactcactaaatggcctcatttggaatattgttttaacaagtcagaaaatttggatttcaagtttgtgtggaaatgagaggcattgtaatagacatgcattgttttggtaataaaattttaacaacggaaatgttttcaaatattgatttttcaaaatttttttttaaatcctagcacaagttttttctcttgaaaattagtttttccctctcatttctcaaaaatcatctttatcatgaaggaacaatttaactgcgtttttttgtataagtttttctcagacaacaatttyagaacactaaacttgtcattacaaaatggtcaaatatttaatattcttggattttggtggaagaaaaatatgtcaattcatatataaaatgttagcaaggcttaattttgggtaatttctggatgttacctaaatatataaaagttccatcatttcttcctgtgctctaatgaatcgtaagggttgtgcacagactattttacagccactcctctaatagttgagagaagtgcaactttccctacctgttgggaagccaggaaatttctacaaataagacggcatgcaatggccaggtttggatcctctcttcttcctctgatgaggaaagtatgtcacaaaagatgatgggtactcaaccttctctctccagcctgcgtttatctcactgaacacccaaactccagtccacaatgaggtcatttccttcttaccgtctacaacacttactcccatcctatctcttccccttccctgcgccttgtcccccaacccccaattctacttaggttctcaagatctcaatgcgttggaaataccttcccaaactttcatttgctcttcacattcctttctaattgggagcataagtcacacaattttgtgagtctaagttttctcatctgtaaaaaggatcaaactatatttcaaaggcctcttctgtctttaagactgactaaaaagaagtataattaacaaggagaaaaacaacaacaaaaaagaatctgactaaattctctgactctccctgagctaagatgtaccagttcgtaattaacttgaatgcttgcgttagtttctctatattctcaatataaatatttaatgcactgtaagttaatgttataattatttgctgaaaatatttactgaagagcatgggaaacctatgatcttctttcactta

SEQ ID NO: 67488 - DNA, 1389 bp, Homo sapiens
aaatgggagccaaatattgttggatgaatgtactaaattgtaatactcattttcaatgaaattctctgattgaacctatatttctcttgaaattatcttagtaaatttccaacttcctgatgtcactcagttgttcaaacgaacaaatcacaaagtgttacattccaatattttaacaaatgaatttaaaactcactaaatggcctcatttggaatattgttttaacaagtcagaaaatttggatttcaagtttgtgtggaaatgagaggcattgtaatagacatgcattgttttggtaataaaattttaacaacggaaatgttttcaaatattgatttttcaaaatttttttttaaatcctagcacaagttttttctcttgaaaattagtttttccctctcatttctcaaaaatcatctttatcatgaaggaacaatttaactgcgtttttttgtataagtttttctcagacaacaatttcagaacactaaacttgtcattacaaaatggtcaaatatttaatattcttggattttggtggaagaaaaatatgtcaattcatatataaaatgttagcaaggcttaattttgggtaatttctggatgttacctaaatatataaaagttccatcatttcttcctgtgctctaatgaatcgtaagggttgtgcacagactattttacagccactcctctaatagttgagagaagtgcaactttccctacctgttgggaagccaggaaatttctacaaataagacggcatgcaatggccrggtttggatcctctcttcttcctctgatgaggaaagtatgtcacaaaagatgatgggtactcaaccttctctctccagcctgcgtttatctcactgaacacccaaactccagtccacaatgaggtcatttccttcttaccgtctacaacacttactcccatcctatctcttccccttccctgcgccttgtcccccaacccccaattctacttaggttctcaagatctcaatgcgttggaaataccttcccaaactttcatttgctcttcacattcctttctaattgggagcataagtcacacaattttgtgagtctaagttttctcatctgtaaaaaggatcaaactatatttcaaaggcctcttctgtctttaagactgactaaaaagaagtataattaacaaggagaaaaacaacaacaaaaaagaatctgactaaattctctgactctccctgagctaagatgtaccagttcgtaattaacttgaatgcttgcgttagtttctctatattctcaatataaatatttaatgcactgtaagttaatgttataattatttgctgaaaatatttactgaagagcatgggaaacctatgatcttctttcactta

SEQ ID NO: 67489 - DNA, 1389 bp, Homo sapiens
aaatgggagccaaatattgttggatgaatgtactaaattgtaatactcattttcaatgaaattctctgattgaacctatatttctcttgaaattatcttagtaaatttccaacttcctgatgtcactcagttgttcaaacgaacaaatcacaaagtgttacattccaatattttaacaaatgaatttaaaactcactaaatggcctcatttggaatattgttttaacaagtcagaaaatttggatttcaagtttgtgtggaaatgagaggcattgtaatagacatgcattgttttggtaataaaattttaacaacggaaatgttttcaaatattgatttttcaaaatttttttttaaatcctagcacaagttttttctcttgaaaattagtttttccctctcatttctcaaaaatcatctttatcatgaaggaacaatttaactgcgtttttttgtataagtttttctcagacaacaatttcagaacactaaacttgtcattacaaaatggtcaaatatttaatattcttggattttggtggaagaaaaatatgtcaattcatatataaaatgttagcaaggcttaattttgggtaatttctggatgttacctaaatatataaaagttccatcatttcttcctgtgctctaatgaatcgtaagggttgtgcacagactattttacagccactcctctaatagttgagagaagtgcaactttccctacctgttgggaagccaggaaatttctacaaataagacggcatgcaatggccaggtttggatcctctcttcttcctctgatgaggaaagtatgtcacaaaagatgatgggtactcaaycttctctctccagcctgcgtttatctcactgaacacccaaactccagtccacaatgaggtcatttccttcttaccgtctacaacacttactcccatcctatctcttccccttccctgcgccttgtcccccaacccccaattctacttaggttctcaagatctcaatgcgttggaaataccttcccaaactttcatttgctcttcacattcctttctaattgggagcataagtcacacaattttgtgagtctaagttttctcatctgtaaaaaggatcaaactatatttcaaaggcctcttctgtctttaagactgactaaaaagaagtataattaacaaggagaaaaacaacaacaaaaaagaatctgactaaattctctgactctccctgagctaagatgtaccagttcgtaattaacttgaatgcttgcgttagtttctctatattctcaatataaatatttaatgcactgtaagttaatgttataattatttgctgaaaatatttactgaagagcatgggaaacctatgatcttctttcactta

SEQ ID NO: 67490 - DNA, 1389 bp, Homo sapiens
aaatgggagccaaatattgttggatgaatgtactaaattgtaatactcattttcaatgaaattctctgattgaacctatatttctcttgaaattatcttagtaaatttccaacttcctgatgtcactcagttgttcaaacgaacaaatcacaaagtgttacattccaatattttaacaaatgaatttaaaactcactaaatggcctcatttggaatattgttttaacaagtcagaaaatttggatttcaagtttgtgtggaaatgagaggcattgtaatagacatgcattgttttggtaataaaattttaacaacggaaatgttttcaaatattgatttttcaaaatttttttttaaatcctagcacaagttttttctcttgaaaattagtttttccctctcatttctcaaaaatcatctttatcatgaaggaacaatttaactgcgtttttttgtataagtttttctcagacaacaatttcagaacactaaacttgtcattacaaaatggtcaaatatttaatattcttggattttggtggaagaaaaatatgtcaattcatatataaaatgttagcaaggcttaattttgggtaatttctggatgttacctaaatatataaaagttccatcatttcttcctgtgctctaatgaatcgtaagggttgtgcacagactattttacagccactcctctaatagttgagagaagtgcaactttccctacctgttgggaagccaggaaatttctacaaataagacggcatgcaatggccaggtttggatcctctcttcttcctctgatgaggaaagtatgtcacaaaagatgatgggtactcaaccttctctctccagcctgcgtttatctcacygaacacccaaactccagtccacaatgaggtcatttccttcttaccgtctacaacacttactcccatcctatctcttccccttccctgcgccttgtcccccaacccccaattctacttaggttctcaagatctcaatgcgttggaaataccttcccaaactttcatttgctcttcacattcctttctaattgggagcataagtcacacaattttgtgagtctaagttttctcatctgtaaaaaggatcaaactatatttcaaaggcctcttctgtctttaagactgactaaaaagaagtataattaacaaggagaaaaacaacaacaaaaaagaatctgactaaattctctgactctccctgagctaagatgtaccagttcgtaattaacttgaatgcttgcgttagtttctctatattctcaatataaatatttaatgcactgtaagttaatgttataattatttgctgaaaatatttactgaagagcatgggaaacctatgatcttctttcactta

SEQ ID NO: 67491 - DNA, 882 bp, Homo sapiens
ccagtgaagccaagtggacctgaacatttctagtggcaataatttttgtttattctttatttaaataactccttcagttagtttagggcagtggttttcagcagagatagttttgctcccaataggacatttgtcaatgactggagacatttaggtcacaagctggggagctgatagtggcatccagtggatgaaccacggatcctgctaagcattccataacgcacaaaatatccccttcaacacacacacacacacacacacacacacacacacacaccccaaatgagatgcatcagaacccccaccaagcatggaaataaaggaaaaattctgaggcccttcaagggagagagaccctgaaaaggctattatccatgtacggagagtggataacaaataaatattgaaaacaaccatatgccagtaaaattggcattgacaaataattctacactaggaattctccactttggcgctgctgacatttgaggcagtgctttgtgttactgaactggactcaggtccgcttgcctggcacagtcaagccaaacaccaacgcttaggtttgcagcaagaaaaagaagggtgtttatttacaggcacaatctgataagaagaatatagtrataatttaaaaaacagcctcccaagcaagtcagagtcaccaggtgttttggttccctatagaaattaaaaggtgggccaggcacggtggctcacgcctgtaatccctgcactttgggaggccgaggcgggcggatcacctgaggtcaggcgtttgagaccagcctggccaacatggtgaaaccccgtctctactaaaaatacaaaaaattagcggggtgtggtggtgggggcctataatcccacctactcggg

SEQ ID NO: 67492 - DNA, 1166 bp, Homo sapiens
caaacctcagtgtcagtgtttggctttactgtgccaggcaagtggacccaagttcaattcggtaacgcaaagtactgcctcaaatgccagtagtgccaaagcggagaatccctagtttagaacggtcaacgtcaagtttattagcatatagttatttataatatttattatccattttgtaatatttgtagtaatatcttctctttgatccttcacgatattggtaattttctcttcctccctccctccctcccttcctttcttccttcctgccttcctagtctaactgaaagtttacaattttactaatttttacaaagagccactcagctcttgggtttcattgattttcttttgagttcatggagtttctgtattgttttatttccctgggttcattgatttttctattgcattttggttttttatttcattgatttttcctcttttctttgttatttcctttttctacttattgcaagtttaatttgctctttgtctccaaacttcataaattggaagcatagaaattgacgtgggattttttttttttaaggtggaagctcagatatggttgggacccatattcttttcttacgtaagcatataaagctatttattttatttaagtacctctttagctgcgtctgcaaatgttatgttattttcattttcatttaggtcaatgttttttaactttctctgtgccctgcacaagttattcagtaatgtataactgaatttctatgtatttgggtatatttctaatatctttttgatttgatgtataattttttgtcagatagcataccctgtttgatatcagccctattctatttattgggacttgttttgtggttacttaaaaggaacatgtattctgctgttttggatagcatattctataaatgtcgataaggtcaagttgattgatagcagtaggcaaatcttttgtatctttacttttcttctacttaaaaaaattatttcatgagacagttgttgaaatctccaaccwaattggggatttgtctatttctccttcccatcctgtcagtttctatttttgtgttttgagaatgtcttagtatgtgtttgtgaatgtgttttgagaacgtcttagtaggccgctacacatttaggattgttatatcttattgatgaat

SEQ ID NO: 67493 - DNA, 715 bp, Homo sapiens
ggaagttgaatataagggtccgaagcttaggatactgatgcaaaaatgtagaagtttgacaccatgcaaggtcacaccaggagtgtacataacatgacaatactaaacaggaataccaatatagaaaaagacaagcagagaaattggagtacaaggagaatgagcatgaattcatcgaggtggagatgttaatttatttgagatgtttgtaatcataaatcaaagtattagacattgatatagatttatagatgtgtaggtatctctacatgcatatctgcagcaaattttaacatcacctcaggtcagtgatgaatgaagaagaacttaaagttggaaaactaagataatcgtatgaataaatgtggtaaactaaatatggtataaacaacttatttttctgggatttgtaggaagtgatggtcaatggatatgcagtttaggaggttatcagtgatcaatgatttaggagattactctgtgatcttatacactaagatcacctaaggttttaggtttaaggttttaggttttagcactgtgtataattctcgctttctgatacctaagacagcactgcatgtaaagaagccattagtgcctactcatgccccatgctaataatatctgcaagatcatgtctatttcagactctactgcattttctaagtggagacaccrtctccaaatgcaatggatgcttttacaaagagga

SEQ ID NO: 67494 - DNA, 1129 bp, Homo sapiens
tttgttgagttatatgatattattaaaaaagaaatttgaatagcttgctgtcattaaagaattgggacatttcttataaaatatgaatatctggcttcctttgaaaaattagaaatttagaaacgctgatatcacattctagcatgaaaccaatttgctggagaggaataatggcagtcaccttagctggtgcctgctgaattcatttctctatagtctccctgtctcccttagaaccttactcatgccatcttcttggcctggtaggcatttgagtttattacctcagaactggagggccatcatttccttctactcttgagggcagggaccatggtcttttaaaaaaattttaaaaatatttttagtagagacagggttttgccatgttggccaggctggtctcaaactcctggccttagatgatccacccacstcgcctcagcttcccaaagggctgggattacaggcgtgagccaatgcccctggccaggaaccatggttttttgctgtcatattcttggtgtctagcactgtccttggcacattatagatattgattaaaacgtgtatgaaatctaggaagtgagctaaagattatgtgagttaacaggaggcctctagctttctagtaggcattggatcaaggccaaattcgtggtgctgtcaggctcatctgtagagctattcagtgaggacttgaaactctcagttctcccacttagcattaaggtgacctggaaagaaggtcatcttaaccatcttaactgaaggtttcagtgctgtagtcaatttacttgtaatcttgtaaagaaatctgacagttttgctgggaagttaccaacattagtagggaaggaaggatgctatgcacagtaagaagtttaaacaggctccttgctccagatatctttttaggaagaaccaagatggaattacaacaaaagggaattaagatgtaacatcagcatatgttttgagtctgtggaagcagcatcattggaagtatttaaatatacagaacctaatgctaaaatgtaaattatacaatacagaatgaatatactggctttttatgagtcttcttctgtcatgttatgtttatgtaaatttcctatcccacagcaaa

SEQ ID NO: 67495 - DNA, 570 bp, Homo sapiens
ttcctgcaacacgttgcacatccatcttggagaaatatcattttttaaatcatgtattttgtaaggaactttttaattttaggacgaaaaaggtttcctttctgagaaagtcagtcttgagtttttaacccttaaacracattggcattttaacagaagtattggatttccttttggagcagccactgtctttgatcaaaggataaaatggtaatggattgaccgttaacaaccttggttaaaaaaacattcaaggctgggcgcggtgcctcatgcctgtaatcccagcactttgcaaggctgaggtgggcagatcatgaggtcaggagttcaagaccagcctggccaacatggtgaaaccccgtctctattaaaaatacaaaaattagctgggcgtggtggcatgcacttgtagtcccagctactcaggaggctgaggcagaagaattgcttgaagccgggaggcagaggttgcagtgagctgagagtgcaccattgcactccattctgggcgacagagcgagactctgtctcaaaaacaaacaaacaaacaaaaattacaggtaaact

SEQ ID NO: 67496 - DNA, 515 bp, Homo sapiens
tagccaaaagtcacaagagggaagtcaatgggcaccagaccccatacgcagtggtggaagagacagctgattgtatgccattgtccttcctcttcttcaacagtaatttttagctgtgcacaagaatgctcacaatagtgactacaattgccagcttcctttgcggcaakatatgaccatgtgagtaagtttggccaacaggataaaagcaaaagtactgtgtggcagcttctaccctggagaccactgtaaggtctttgccccgttttcttaattccttctcctatctgcagcctagaatatggatgctgccaacatggttggtaaggacaaagagacagagttttgctcttgtcacccaggctggagtgcaatggcatgatctcagctcactgcaacctccacctcccaggttcaagcgattctcctgcctcagccttccgagtagctgggattacaggcatgcaccaccacgcctggttaatttttgcatttttagtagagacggggtttca

SEQ ID NO: 67497 - DNA, 592 bp, Homo sapiens
ggccaattggagggtgaagggtgggaggagggagaggatcaggaaaaataactaatgggtgctaggcttaatacctgggtgatgaaataatatgtacaacaaacatgcatggcacaagtttacctatataacaaacctgcacatgtacccctgaacttaaagttaaaaaaaacaagatgtgttatgagtgtaccctcagccctgacatgccaggatctccctaattttataggtggagcccctgaaaggacacagaagttacctccaagtgtaataaaacacatactactgaaacgcacatgtctctttactatcaagtaatatggactactaaaaagcaaagtagacccagctcacaccaaaactgtattcattrattgaaatacaattatgactcttaactctgttattctcactagcctaaacacttttaaatcatatttttcgaatatggaacttgagacatgctcacaagtgtatagagcattgtaccatctgtccaaaaatgaaactggtaaagaaaaaaaagtgacaaagtagactactgacctccttaacagacagaacatttcagacactttaggaataccca

SEQ ID NO: 67498 - DNA, 683 bp, Homo sapiens
catttttaaatggttggaggaaaaaagaaaacttatgacatgaaatttatatgaaattcagatttcagtgtccataaataaacttttattgggacgttgccatgctcattcatttacgtgttgtctgtggcactcttacgctacaagggcagaactgattagcttcaacagagactgtatggcctacaaagaccatatggcctaaaatttcaagtatctggccatttatatatagtttgctgatccctgatctaatagcactaattctaatagcaactattcctttcaattcacctaaagacagacctttagcctttagacagacttgtaagtggaaaggaacatgggtttctgtgctcatttcatagcgtagactagtaatgatctaatgactagaatggggcctattttgatcactaaatgccctatttccacaatatagtatagtaaagcagtcaatactgcactttctgatggagtcttaaggagtcacagtatttataaccattttgagctaataagctatacctcactctctgctttctctctcwctctttttgatagtgtgttagggtgaaaaatcagttatttaacccaatttacttgtgaaagaaaagttttatctttatggactatgatgacttttgacatcaccatttcttgaagaccttggtattaaatgc

SEQ ID NO: 67499 - DNA, 1478 bp, Homo sapiens
tacatgtgcacaacgtgcaggttagttacatatgtatacatgcgccatgttggtgtgctgcacccattaactcgtcattcacattaggtatatctcctaatgctatccctccccccctccccccaccccatgacaggccctggtgtgtgatgttccccttcctgtgtccaagtgttctcattgttcaattcccacctgtgggtgagaacatggagcatccctttttcttattagcttgatctctttagcagcccctaagtggctccaggtccccacagtggtgttcttgtcctgagtgtgtctagccaggagtaactggaacagagttggacccacatctgaagattgtcctattgtggctgcagtgttggggggcctttcaccatcttgggtacctccttatttatttaggttttactatttctatgagcttagaacagaaaagagaggattcttagccacctcatccagtctctctttctggccagtctttgctgtgcagtcttgaatctggtttcttgtcagtatccgagtttacaaatcactttagatccctcccatgcttcctcctgatcccagtcttgaggatgccctgagcctgtagccctggtgtgtaaaaagracgaggggttacaaccttctctggaatatgctagctaaataaaacgttaaataaatacattaattgatgtagagagagagaaaaaaagaggattagtgaagatttgggttttcaggtgactgtgagatagctgaggttaactcgtgtaaatgtgcaataggcagagggaaaatacaatgcaacaactcaaggaaaagactgagagttgatgtgcgcatttgagacttgttagtattttgatacttgttgtagccaagggaaggcatatgatttccaagaatagtgcattgggataagaaagaaggagagtccagccagatgtctacgaaaatacagggcttaggaaaatacgtgccagaaaaaacatattttgggatttaaaattctgaataaccttctctaacagagtaagactagactgaaatataatgtgcctaagaagaaaaggacaggggaatggaattcctggccgtttttctgtggctcttagagacatctagaccaatgctgcccagacctttctgtgatgagagaaatgttctccatctgtgccatttagtgtgagagccctcagccacatatggccactgagtacctgaaatgcgatgagtgtaactgaagaaccgaatgtttaattttacttaatttttattaatttaaatttaaatacttatatgtggttagtggctgtggtttgttctgtgctgccctaaagggaagtttttgtgttgctaatatgacacttgactgcctctcacttaacagagttctcaacaatggagaggccagagtgaagctaaaccatgttcacacacatcacacatagatacacttactttcttagaaaactaatagt

SEQ ID NO: 67500 - DNA, 1478 bp, Homo sapiens
tacatgtgcacaacgtgcaggttagttacatatgtatacatgcgccatgttggtgtgctgcacccattaactcgtcattcacattaggtatatctcctaatgctatccctccccccctccccccaccccatgacaggccctggtgtgtgatgttccccttcctgtgtccaagtgttctcattgttcaattcccacctgtgggtgagaacatggagcatccctttttcttattagcttgatctctttagcagcccctaagtggctccaggtccccacagtggtgttcttgtcctgagtgtgtctagccaggagtaactggaacagagttggacccacatctgaagattgtcctattgtggctgcagtgttggggggcctttcaccatcttgggtacctccttatttatttaggttttactatttctatgagcttagaacagaaaagagaggattcttagccacctcatccagtctctctttctggccagtctttgctgtgcagtcttgaatctggtttcttgtcagtatccgagtttacaaatcactttagatccctcccatgcttcctcctgatcccagtcttgaggatgccctgagcctgtagccctggtgtgtaaaaaggacgaggggttacaaccttctctggaatatgctagctaaataaaacgttaaataaatacattaattgatgtagagagagagaaaaaaagaggattagtgaagatttggrttttcaggtgactgtgagatagctgaggttaactcgtgtaaatgtgcaataggcagagggaaaatacaatgcaacaactcaaggaaaagactgagagttgatgtgcgcatttgagacttgttagtattttgatacttgttgtagccaagggaaggcatatgatttccaagaatagtgcattgggataagaaagaaggagagtccagccagatgtctacgaaaatacagggcttaggaaaatacgtgccagaaaaaacatattttgggatttaaaattctgaataaccttctctaacagagtaagactagactgaaatataatgtgcctaagaagaaaaggacaggggaatggaattcctggccgtttttctgtggctcttagagacatctagaccaatgctgcccagacctttctgtgatgagagaaatgttctccatctgtgccatttagtgtgagagccctcagccacatatggccactgagtacctgaaatgcgatgagtgtaactgaagaaccgaatgtttaattttacttaatttttattaatttaaatttaaatacttatatgtggttagtggctgtggtttgttctgtgctgccctaaagggaagtttttgtgttgctaatatgacacttgactgcctctcacttaacagagttctcaacaatggagaggccagagtgaagctaaaccatgttcacacacatcacacatagatacacttactttcttagaaaactaatagt

SEQ ID NO: 67501 - DNA, 1609 bp, Homo sapiens
tgcatctgaaagagtcagacagacctggattcaaatccttactctcccactttttaactggatggagttgggccagttacggagtgctctcaactgtaggagaaggtacatattcaaaaagaaacaaaaaccaaaacaaacaaaaaccacacacttaggtaacatttattaggtgccaggaactgtttcaagtgtattgaatagtataagctattgaatcatcacaacaccataatgttggtactgtggttatccatgttttacagataagcaaacagaggcacagaaaagataaatctttagcaaaggtcacatagctggtaagtggcagggcccccaggcagtctggttccagtgtccatgttcttaacctctgcacttgctgcttctatcaagatgatatagaaaaagcatgaacttctgaatcagaaggcattcaagggtgctgatatctaatcttctgcttcctagatgtgactttgggctgattacttagtctctctgagctaaataccttcttcattttattataaggataacaaaatgagataatgaatgaaataaataaattacatagagctttaaaataaaactacgatgtggttgttaactgwtagattccaaagaaccttgaatgatacaatgagatacttgtcttatattccgtgggtctacagaagcaatgggaagtatttttttttaaatcaaaacaggaaaggctggatggatggatgtagagacaatttatcaatattttagaatagcagtccctaatctttttgacaccggagaccagtttcatggaaaacagtttttccactcaccctgagtgagtccttgtgacacagcagacacccagcatggggcaacaaggggatgtggcaagaagaaaccctcacagctctgggctcaagtaagcagaggcaaaacttggcttgaaactgctataatgcatagcagtttggggtggggcggggtgagggatagtttcaggataaaactgttccaccttagatcatcaagcattagattctcgtaaggagtgtgcaacgtagatctctggcacgcagttcacaatagggttcgcgctcctatgagactctaatgctgctactgatctgataggaggtagagctcaggcggtactgctcactcacctcatgctatgcagcctggtttctaacaggccacagattggtacctggccatggtccgggggttggggacctctgttttagaagacatacttcaattagaggacacttaaaggaaatgtataataagcaatatattgtcatctcttggatttgggaatagctaggagataggaattcggatctagccctgggagttttgtattctagaggtttgaacttgggcctgcaacctcacttgtttgaacctcagtgtctttctctggcaaataagtgataataaacctttctcactggcttgtaatgagaattaaatttgaacctataagaaaagcatcagacaggtagggggcactttagaaacgctggctccctctcccccaactggctgagccccttgatattccccattgtatccaaatgataggaaattgctagatgcctacttttgcgga

SEQ ID NO: 67502 - DNA, 1609 bp, Homo sapiens
tgcatctgaaagagtcagacagacctggattcaaatccttactctcccactttttaactggatggagttgggccagttacggagtgctctcaactgtaggagaaggtacatattcaaaaagaaacaaaaaccaaaacaaacaaaaaccacacacttaggtaacatttattaggtgccaggaactgtttcaagtgtattgaatagtataagctattgaatcatcacaacaccataatgttggtactgtggttatccatgttttacagataagcaaacagaggcacagaaaagataaatctttagcaaaggtcacatagctggtaagtggcagggcccccaggcagtctggttccagtgtccatgttcttaacctctgcacttgctgcttctatcaagatgatatagaaaaagcatgaacttctgaatcagaaggcattcaagggtgctgatatctaatcttctgcttcctagatgtgactttgggctgattacttagtctctctgagctaaataccttcttcattttattataaggataacaaaatgagataatgaatgaaataaataaattacatagagctttaaaataaaactacgatgtggttgttaactgatagattccaaagaaccttgaatgatacaatgagatacttgtcttatattccgtgggtctacagaagcaatgggaagtatttttttttaaatcaaaacaggaaaggctggatggatggatgtagagacaatttatcaatattttagaatagcagtccctaatctttttgacaccggagaccagtttcatggaaaacagtttttccactcaccctgagtgagtccttgtgacacagcagacacccagcatggggcaacaaggggatgtggcaagaagaaaccctcacagctctgggctcaagtaagcagaggcaaaacttggcttgaaactgctataatgcatagcagtttggggtggggcggggtgagggatagtttcaggataaaactgttccaccttagatcatcaagcattagattctcgtaaggagtgtgcaacgtagatctctggcacgcagttcacaatagggttcgcgctcctatgagactctaatgctgctactgatctgataggaggtagagctcaggcggtactgctcactcacctcatgctatgcagcctggtttctaacaggccacagattggtacctggccayggtccgggggttggggacctctgttttagaagacatacttcaattagaggacacttaaaggaaatgtataataagcaatatattgtcatctcttggatttgggaatagctaggagataggaattcggatctagccctgggagttttgtattctagaggtttgaacttgggcctgcaacctcacttgtttgaacctcagtgtctttctctggcaaataagtgataataaacctttctcactggcttgtaatgagaattaaatttgaacctataagaaaagcatcagacaggtagggggcactttagaaacgctggctccctctcccccaactggctgagccccttgatattccccattgtatccaaatgataggaaattgctagatgcctacttttgcgga

SEQ ID NO: 67503 - DNA, 657 bp, Homo sapiens
tttattgaagtgatgacttccaaatgtgatttttgggggcattatacacttgcttcgaggtttaatcttcaatccacatgggggggcaccataatcactggtgcccagggccctcgtctagcccctgtgaggccctttgcagtccctcccttgccagcccctccagcctccgccatttgccccgtgggctctccaggttccacttgaggagctgccccctgccccagcccagctctactgctgtgtgacctrgcgtaagtcccttaaccgctgtgtgcctcagtttcctcatttgttaaaagaggaggttccagtggtaggtaccccctgacgatgtgcaagcatcacagaaatgacacaagacacacactgagaacatgcctcgcgcgtggcaagtgctgactgttacctgccattattaggctcccccgccggggtctcagggccttggcacaagctcttccctctgcttggagcactttcctccactgacctttcctggcgctccaggtcaactccaggagccttcccagtacagtctaggtgccttctccttccgcagcgcctgaaccacacaggaataagtaaggcgagagcgcgcccagagaagagcagagagtgcagaaaggggctgagttagtagaggcatttccgcgg

SEQ ID NO: 67504 - DNA, 1491 bp, Homo sapiens
gatcccttctctttaggttctttgttatggtctggggaaacactctgactttctatggtgttgacagcatctgagtccaatcttcttcttttcttcagttggttcaagtgggatttggattttatgtgcgctgataagacaaaatcaaaccaaacaaacaaaaaaactcattaggaattttctagaattaatcctagaagcaagtaaaattaactatacaatgcttttcttcaacaataaacagcaagatcaacacatgtactggtatagctgcttagcatttttaagggaagaataaattatatggccagccagctagcaaaatagagtgagctaccacatatcaagtgctccctgttaggtactttacatcaccaatcctcatggcagtcttgtaagatggtactattctgctcattttatacaagggaaactgaagttcagagaggtcttacaaaatgtccaaggtcacacagcaggtaaactcttctacttagacctatagctccaaaaagagatcccactttccagaatcaggtctctgtagtatggggcttcctgttatagatgcatttttaacttgtaaggttgaaaagttagaaattcaaatcctcatctgtattgcagggcattgcctgttgtccttcctggtctggcatccctgtgcctgggtcaaaaaggtcatgtgaacgactctctggcaagattcctattctctaggcacacactgctccagggagacaggaaggtgcatttatcaccgacgatctcttctgagggtccaagaaggaagtcaagctttagggccactgttgcctgctatcaactgctgacctgtcacccctaagacagttcccaccttctgactaactcatacagatttattttcactatcctgttcttttttcaaggaaatctcatctgggaacactgaaagagatggacaactagtttaaattctcttttatacatattaaaaacatcatttttaagagtttagaagcaagaataagtaaggtagaggttagaattaagagaaaagtttacttggggaagaagtcagctttgttttccagctagagcctaaggcaaaaaacgggcttctgggctggctctccatggcagcaggagatgggagtaaggacttgacagatggcactacagaagggcttacacaagctaagctcacaaaggctcacacatgttgcttctctaaggctatccctgaagaacattcaacaaatcgaaccactaagtttcctttagaaaaaaacaatcagacactctctttctcttcccctttcatcattataaaccaatgacaatcgaggcttcttctgctggttgggcaatcacagccgtccccagtctctgacaatggagttcattttgccagttaccagttaatagacctaatcatcctattggttgctttggggagaaaaatctacttctctgagaaycccatgcaaaacagtactctgaacagaa

SEQ ID NO: 67505 - DNA, 536 bp, Homo sapiens
  misc_feature (1)...(536): n = A,T,C or G
tnnnnnnnnnnnnnnnnnnnnnnnnnnnnnnnnnnnnnnnnnnnnnnnnnnnnnnnnnnnnnnnnnnnnnnnnnnnnnnnnnnnnnnnnnnnnnnnnnnnnctccctttagttagaggtttctttgagactaaccctatgctttcccagaatttaaagtcatccacctgagtgtataaaatattttttgcaaagagacaaatgatagaacaggctgaaaggctttgttgtgtatttaaagtgatcccaacagtttgaagaaggcatcttaggaaccggctttggttcagatgaaaacttatgaagcattcactaaccagctttcctcaagacagcctgctggcccgccctactgatkctaccctgcagcatcaagtctgacctggatttcctggacttctgccctgccggcaagccgtacaaaaacttccaggctgccagtccctacaagtggtgtgagctaatcccttaaatttatatttcaaatcagaccagcatattctgaagtgaaaattaagggaggaggagaaatgggca

SEQ ID NO: 67506 - DNA, 1110 bp, Homo sapiens
aactgcatatttacacatactaatatcagatgcagttatgctaagccaaaactgtcttatttaacaattactatattccaaatatgctaggcttctaaaatatatacaaaatacaccttatgctttttagccacaagcccatatttaggaaaaatatatattattcttttgaaaatttgggtagaaatattagtttgaccccactgccagagaaaaggctgaactaacagaataactagcagagatactaagtcagagtcctaatcaaataatctttgaggccttccctgttttctcatttacatggaacaataaagtctctttattatttaaaccagtttaaaaataaatttctggctgggcgtggtggcttatgactgtattcctagcactttcagaggccaaggtggaagactgcttgagcccacgagttcaaaaccagcctgggcaacatggcaagaccctgtctctacaaaaacattaaaaaaaattagctgggcatggtgatgggcacctgtggtcccaggtgcagggagggtaaggcgggcggattgcttgagtctgtgaggttgaagctgcagtgagttgtgttcatgtcgctacactccagcctgggagacagcaaaaacctatcttaaaaaaaaaaaaaaaggaaaaaagaaaaagaaaaaaatacagatttttgccacttgcaaccaaaataataatagctattatatattgaacagktacaacacttatgagcccttctcatttgagattcccaaaggattaagccctaacgtctaaagcatcattgtatgtgtatgatttcatgcctgtgcatctagagtactaccaggtaccatccttggaagaactgagaaaatacagttgacccataacatggctttgaactgtgcaggtccacaaatatgtggactttcgtctgcctctgccaccctgagacagcaagacaaccccttctcttcctcctcctcctcagcctaatcaatgtgaagataagaatgaagactgtcgccatgatccacttccatttaatgaataatatattttctcttccttatgattttcttaataacattttcttttttctagcttattttaaga

SEQ ID NO: 67507 - DNA, 1110 bp, Homo sapiens
aactgcatatttacacatactaatatcagatgcagttatgctaagccaaaactgtcttatttaacaattactatattccaaatatgctaggcttctaaaatatatacaaaatacaccttatgctttttagccacaagcccatatttaggaaaaatatatattattcttttgaaaatttgggtagaaatattagtttgaccccactgccagagaaaaggctgaactaacagaataactagcagagatactaagtcagagtcctaatcaaataatctttgaggccttccctgttttctcatttacatggaacaataaagtctctttattatttaaaccagtttaaaaataaatttctggctgggcgtggtggcttatgactgtattcctagcactttcagaggccaaggtggaagactgcttgagcccacgagttcaaaaccagcctgggcaacatggcaagaccctgtctctacaaaaacattaaaaaaaattagctgggcatggtgatgggcacctgtggtcccaggtgcagggagggtaaggcgggcggattgcttgagtctgtgaggttgaagctgcagtgagttgtgttcatgtcgctacactccagcctgggagacagcaaaaacctatcttaaaaaaaaaaaaaaaggaaaaaagaaaaagaaaaaaatacagatttttgccacttgcaaccaaaataataatagctattatatattgaacaggtacaacacttatgagcccttctcatttgagattcccaaaggattaagccctaacgtctaaagcatcattgtatgtgtatgatttcatgcctgtgcatctagagtactaccaggtaccatccttggaagaactgagaaaatacagttgacccataacatggctttgaactgtgcaggtccacaaatatgtggactttcrtctgcctctgccaccctgagacagcaagacaaccccttctcttcctcctcctcctcagcctaatcaatgtgaagataagaatgaagactgtcgccatgatccacttccatttaatgaataatatattttctcttccttatgattttcttaataacattttcttttttctagcttattttaaga

SEQ ID NO: 67508 - DNA, 745 bp, Homo sapiens
ggatccagtttcattctcctacatgtggctagccaattatcccagcacacggatacaagacttagatcaatttcccaccatattaaaagataaaaaggatacagggtagcccagtatcaaacttctctggagagttaccaagagatccaaaatgaggccgtagggaaagctccctagataaaaaggtaaactgaggtaacactgagatttcaaggcctgattctatgmaattttctatctctaaatatttcacggtacacatgcaaatttttgctcatagggatgatggaatgaagttattctcaccaattacactttcttataatggactttaaatattttctcaattgaaaaccaaaaatttactgcatattcatttaaaagactgctggaagcagaaaaaaagaggatgctgcaggaagaaattaccataggaagcatgctacctttcaaattcctttctactttataacatgaaaaacaacacagccacttacgaaatccatttttgaatggaacccaaatacacttctatcaaatattcaaaatctttctaattgtaagacacagattctgctctaaatcatgtaacccagaatacgcctaagttaaagaccaaatattctgttagccatttctttcagcattcttgctggctttttttctcaacaaatcgagataatacattatccagaaatataaaaataggaaggagctttctagcaaaattattccattactgatt

SEQ ID NO: 67509 - DNA, 745 bp, Homo sapiens
ggatccagtttcattctcctacatgtggctagccaattatcccagcacacggatacaagacttagatcaatttcccaccatattaaaagataaaaaggatacagggtagcccagtatcaaacttctctggagagttaccaagagatccaaaatgaggccgtagggaaagctccctagataaaaaggtaaactgaggtaacactgagatttcaaggcctgattctatgaaattttctatctctaaatatttcacggtacacatgcaaatttttgctcatagggatgatggaatgaagttattctcaccaattacactttcttataatggactttaaatatyttctcaattgaaaaccaaaaatttactgcatattcatttaaaagactgctggaagcagaaaaaaagaggatgctgcaggaagaaattaccataggaagcatgctacctttcaaattcctttctactttataacatgaaaaacaacacagccacttacgaaatccatttttgaatggaacccaaatacacttctatcaaatattcaaaatctttctaattgtaagacacagattctgctctaaatcatgtaacccagaatacgcctaagttaaagaccaaatattctgttagccatttctttcagcattcttgctggctttttttctcaacaaatcgagataatacattatccagaaatataaaaataggaaggagctttctagcaaaattattccattactgatt

SEQ ID NO: 67510 - DNA, 874 bp, Homo sapiens
tacctatgtaacaaacctgcacattctgcacatgtatcccagaacttaaatttaaaaataaaataaaaataatagcataataaaataacaaaaaagtctttacatctgaaataagtgtacttaaaattaaaaataaaattaaagtacaaaaacttaaaataaaaatcattttagatatttcctcagatttaaatggaggtcattgaagctcaaacacctggctgcaaagtgatttgtaagacgaacacctacactctacaaaaagacttatgaataccctgcattggttgatgaacaagaacagtgagttataccttctgaatagtgaattaaataaaatactattaaagttttaaataattgccaattgctccatatttctctgcatgttagagtttagctagtgtttccagggatgatttttctgtattcctcccagtcaggaatagccagtcagtattactccatcagccacagcacaaatgtctgattgctctcttgaggtcgttagcccagatacttgctagaaaggtatgattgctggccaaatgagctctggcctggtgcagccgtcttgccaatgtgcctaatgagagcgcggaaagacattttattccaggcataagcaggccagatcacagctgcccaaagctctctggctttgattaagtttgttgtgctattatgtaatgggtacttgaaccatattycgtgaatgaccgttttccttcctctttcgccactattctaagtatgttgtctgtatctaatgttgccttgcagttagttgttaaaatcaagcagaaaagaaaacaggcaaatattaaaacgtaaatagaaaaagttgttggtggggaaaatgacttataatgca

SEQ ID NO: 67511 - DNA, 610 bp, Homo sapiens
gaatgttgatagaattatgaatgaaaaaccaagaacatgatttatttatcttcatcataaatgggtatatcagatattttgtgaaagatgattttcagtggtgtggcagactgagggagggtaaagctgaggctatgacattcaaagaggacacaatatcctcaatgcaaacaaaggcaaaagactgtgaggctgcggacagtaaaggcaaacactgggatggcctgccctagatcatgctcattttaaaaagtctatccatctgaagtcttatccatctgataggaaggatcaataccatgaaaatggccatactgcccaaggtaatttatagattcaatgccatcgccatcaagctaccaatgactttcttcacagaattggaaaaaactactttaaagttcatatggaaccaaaaaagagcccgcattgccaagacaatcctaagccaaaagaacaaagctggaggcatcaygctacctgacttcaaactatactataaggctacagtaaccaaaacagcatggtactggtaccaaaacagagatatagaccaatggaatagaacagagccctcagaaataataccacacatctacaaccatctgat

SEQ ID NO: 67512 - DNA, 610 bp, Homo sapiens
gaatgttgatagaattatgaatgaaaaaccaagaacatgatttatttatcttcatcataaatgggtatatcagatattttgtgaaagatgattttcagtggtgtggcagactgagggagggtaaagctgaggctatgacattcaaagaggacacaatatcctcaatgcaaacaaaggcaaaagactgtgaggctgcggacagtaaaggcaaacactgggatggcctgccctagatcatgctcattttaaaaagtctatccatctgaagtcttatccatctgataggaaggatcaataccatgaaaatggccatactgcccaaggtaatttatagattcaatgccatcgccatcaagctaccaatgactttcttcacagaattggaaaaaactactttaaagttcatatggaaccaaaaaagagcccgcattgccaagacaatcctaagccaaaagaacaaagctggaggcatcacgctacctgacttcaaactayactataaggctacagtaaccaaaacagcatggtactggtaccaaaacagagatatagaccaatggaatagaacagagccctcagaaataataccacacatctacaaccatctgat

SEQ ID NO: 67513 - DNA, 970 bp, Homo sapiens
gtctagtaagattttaaccatgtaggattcttgagaaggaatgaagactgaggagattagagaagtaaaagtatccagatgttgtgaaaactgagttattttaagggttttgggtctctgtgggtgaagactcagtgttagaagtggaggtgttttcaggaaatagtaacttagtttaaaaacataggaaggcagaagctcaagatagggggaaaagtgtgagaaggcacctttactatactatggaagatatgactgtaagagggtaatataaattaatttttaggcagggaagaatgcttttgaattgttcacattaatcttacattctagctgtataaattcacacaggatgtatatatataggtaatgataatgctgatgtgtttattttcaagattttcaaggactgtgtggaataggatgctcatatgggctgccacatcgtaaacaagctggattattcctccttgccagtttaaaacaacccactgggttttcagggaacacagtcaaatcttaggaaacaaaaaaaagtacatttctctccatgtgtgcattcatgaatayttacagttttattccactgtcttgattcaggtcatataaatataatttaatttttagcttttaccctaaaatcatgagaattatttgcatgtcaatcattttataatcgtaaaatatatcagaaatagatttagcaaaaaatcataaacatttatttttctcattgtagtagcaattactttctgatcctctattttataatggcattatggtagattttgatttcgaggcacatttccagactttgtcagttcctgatattaatgaacaactcattgcacatgctttagcatattctgaaataacaatgtactgaagataatgacttagattgcatgtgtttccttttcactagacaattttagattttgaaagttctgaaaatgcagcagaagtactt

SEQ ID NO: 67514 - DNA, 1087 bp, Homo sapiens
gagggagagccctccacacccttgtacctccrctataccatgcctcttcagggacattttctgccgtcttttcttcttccccctcacatataattgaaaacttaattcttcacctttacctcaatctaaactaaacagtttaggatttccaacacagtcatcacattttcatttagtttttgctaatataaattgtccttatatcatcttgaaatatgatatttctttttcatttctatgacctaaaaccctttcaatgaaagtggtggaagatagtaagagacacagttatgttaatggattgtgctatctctttcttccttcttttatcaattgtctagatatgctttctaaattatatcatatattttatccttgtcattatgccaccttcaatttgtaatgaaaataaaataaatatatatatatatatatatatatttgacaataaatctgacttaattcattcactggtatatattttagtttctcattgtcattgtttgtatatttaaactcaggaaataatttctggtaccccaagtagtcttgagattgagcctaagaacttcagagaacatatggacatgagtcatgatccataccctaagcagctaagaaactgtcctaacacaaccctgggagaagaatggttagttctttccagagggtaactaagaatgactccacactcatagaaaacaggaaaggatacaggtaagagaacaagtaataaacatctacaaacagaaaataagatcaacagtcctctttggtagattattttattaatggcatacatttcctgcttctctctgggaaaggattattcttccctggccatcaagaaaggctcggtcatgttacttgattggatctataaaatgtgaaggaaaatgagatatttaacttctgagcaatgcaatttaaagctttgccatgggaagttagatcccttgcttgggttctagaataaagacgatatggaaaggatatgtactgatccttcaaaaataagtaacataagagcaaaataaaaatttgtataaatcatgtagatgttgggatcatttttactacagcataa

SEQ ID NO: 67515 - DNA, 627 bp, Homo sapiens
ggaacatatcataaagtggcaagtgattcacgatgggaacacataaaatatattgaatagaggatttgcataaatacatctgcaatttagaaaaatcaacctggaagtggaaaagagacatgattaaggagaaacaaagcttatggcaaaactggaacgtaaggggcagttagaggaatgatcyacagagagatcatgggaacccaaatggtggcagtggggctggctctaaggaatagacaagaactaggagatattaacaaaatagaacctacatccatggtaccaagagatgtcttcggccaaagagaaggctgattttaaaggtgaattcctaacaggaaaaaaaaaaaattgtggaatttagtagcatcttcttttactgtaatatatgacccttgctttttaaatttaatatgacattaatatttaaagtgggtttagtaagatttattttatttcaactatgaatctacatttttagaaagttaaatatattttataaagacaatttgtaagaatttttttagattataaatttcataatagtgttttatctcaagagatgtaaggttctgaaacaaagaaattctcatctcttaagagtggactgtggtactctgggtg

SEQ ID NO: 67516 - DNA, 627 bp, Homo sapiens
ggaacatatcataaagtggcaagtgattcacgatgggaacacataaaatatattgaatagaggatttgcataaatacatctgcaatttagaaaaatcaacctggaagtggaaaagagacatgattaaggagaaacaaagcttatggcaaaactggaacgtaaggggcagttagaggaatgatccacagagagatcatgggaacccraatggtggcagtggggctggctctaaggaatagacaagaactaggagatattaacaaaatagaacctacatccatggtaccaagagatgtcttcggccaaagagaaggctgattttaaaggtgaattcctaacaggaaaaaaaaaaaattgtggaatttagtagcatcttcttttactgtaatatatgacccttgctttttaaatttaatatgacattaatatttaaagtgggtttagtaagatttattttatttcaactatgaatctacatttttagaaagttaaatatattttataaagacaatttgtaagaatttttttagattataaatttcataatagtgttttatctcaagagatgtaaggttctgaaacaaagaaattctcatctcttaagagtggactgtggtactctgggtg

SEQ ID NO: 67517 - DNA, 914 bp, Homo sapiens
tgtcatatatcctgtgtccaagtatggccaatatgagatagctgtcactgagagcccttgtggaaaattaatggctgactacagagggcaaaatgataggacagatggctctgtcactacggccagcctggaggctgaaagaaattcagagtctgggcaaataacgctgtgtttcatacacttgctcctttgttaatcccgtctccctgtcagcagctgtccttcattgtttggttgagtggaaaggttgtttcattttctacaggcgttttctacttttttccaatttgttaatgattcaaaggacacatttcagaaattccttgagacccccttcatgccagaaaggagtcttccctgtcatttatttaaagaaaagcagtgaaatttgttttgtacaatgccaagaaaatactggtctgtatcctgttatggattgctgaatttaaatgcttttaagaaattctgaaaaataaaaaaaattcagctaaggatacttaatatcctaaggttacatcyagctaataccaacacataattaggttaatacagagaatgggggggaatggtcaatattgtaaaagttagtcacattagcatgactggatgattcataaattttgcacttttcaacaatgtctcgaagtcattaattattcttgttttccggctgaacttccaggccagaaaaagacaacataacatgaagttttaagaagttcacaaaaccttttcccttttcttccaccatcttggccagtcttaaatctcattttccctttgtcaggacacctctggtgctaacagctagcttcaaaggaagcagagtggtttagcttctccatgtcaaggtcattcccaaattgagcaactcaaggcgatgactcagaagctcacctgctttctagttcctt

SEQ ID NO: 67518 - DNA, 576 bp, Homo sapiens
tactgtaaactgcagctactctttctgaagctggtaaattttactactacattgcaggggccaaacatctgaacctggaatcaatatttctgggtttccttaagcaggaaaagaatgggattcagataagaaagacctctggatcttttgataaacacattatcagttatcacgatttatcytagctattatttacatttatatgctaatatttatgttatttataaatatgcttattagccaagtgtcagaaaatatctagccagaaaagtcatattttttatgggtttacgtaaggaaatataaaagttaaaggcaagtaggctgtgtgtggtggctcatgcctggaatcccagcactttgggaggctgaggcgggcagatcacgaggtcaggagattgagaccatcctggctaacacggtgaaaacccatctctactaaaaatacaaaaaatcagccaggcttggtggcaggcgggcacctgtggtcccagctaccggaaggctgaggcaggaaaatggcgtgaacccgggaggcggagcttgtagtgagcctaaatcgtgccactgcactcc

SEQ ID NO: 67519 - DNA, 576 bp, Homo sapiens
tactgtaaactgcagctactctttctgaagctggtaaattttactactacattgcaggggccaaacatctgaacctggaatcaatatttctgggtttccttaagcaggaaaagaatgggattcagataagaaagacctctggatcttttgataaacacattatcagttatcacgatttatcctagctattatttacatttatatgckaatatttatgttatttataaatatgcttattagccaagtgtcagaaaatatctagccagaaaagtcatattttttatgggtttacgtaaggaaatataaaagttaaaggcaagtaggctgtgtgtggtggctcatgcctggaatcccagcactttgggaggctgaggcgggcagatcacgaggtcaggagattgagaccatcctggctaacacggtgaaaacccatctctactaaaaatacaaaaaatcagccaggcttggtggcaggcgggcacctgtggtcccagctaccggaaggctgaggcaggaaaatggcgtgaacccgggaggcggagcttgtagtgagcctaaatcgtgccactgcactcc

SEQ ID NO: 67520 - DNA, 1251 bp, Homo sapiens
agaaggatcagtatcatagtatgagggaacaggggcctcatctgtgttcagaggcaggtgtacagaaagcactcagtaaatgtctggagattaagacagagccacagacctgtttggagaaggcawttagcttcaggatgcaccctccaacagcaagttaaacttacacaaattcctgctttgatggagtcactgggaacttcagcttgcagaaagagtgaccaagaccagctaatgctcagctctcccccacaattcccgtctctttttgccctcattgtcttcattagctgaaataatgtataaatgcatcttgaataattttataaattagaggatatactcactgcagccagtgagtaaatcagcaaatactcattgagcatccatagcatgcactacagggaaacaaagaagtaaaagtatacactagccaccaccagttaaaattatcctatagactgacatcttgtttagctaatgcacccatacagtacaaagatctcaccctgagatcaactgcaactaagagcaggaatgtgaaaatatgaaaaggtatctgtcgggagctagactttctctggtcatccctttggacacgggtctggctgccgacacagactgcaattgcaacgtatgggaaagcagttgactctattcagagacgtggtgtcctgaatggtcttaagaatatcatattgcatttaaaggcaattaaggggaaagttttattatgaatcgacacttgcatttgtggttgtatctgaaaatcttatacttccatctgcatattatttatcagttgattgtatcactcacagacatctaaaacctaccctatcattgacatgaaagagaagagactcacagcagcacttccttttcttttcttttttccttttctttctttctttcttcttttttctttttttccaagctgatggaatcccactctgtcgcccaggctggaatgcagtggcacgatcttggctggctgcaacctccacctcctgggttcaagcaattctcctgcgtcagcctcccgagtagctgggattacaggcactcaccaccacgcctggctaatttttttgtacttttagtagagatggggtttcaccatgttggccaggccggtctccaacttctaacctcaaggtaagatctttgtaccatgttggccaggttggtctccaacttctgacctcaggtgatccacccacctcggcctcccaacgtgctgggattaca

SEQ ID NO: 67521 - DNA, 1251 bp, Homo sapiens
agaaggatcagtatcatagtatgagggaacaggggcctcatctgtgttcagaggcaggtgtacagaaagcactcagtaaatgtctggagattaagacagagccacagacctgtttggagaaggcatttagcttcaggrtgcaccctccaacagcaagttaaacttacacaaattcctgctttgatggagtcactgggaacttcagcttgcagaaagagtgaccaagaccagctaatgctcagctctcccccacaattcccgtctctttttgccctcattgtcttcattagctgaaataatgtataaatgcatcttgaataattttataaattagaggatatactcactgcagccagtgagtaaatcagcaaatactcattgagcatccatagcatgcactacagggaaacaaagaagtaaaagtatacactagccaccaccagttaaaattatcctatagactgacatcttgtttagctaatgcacccatacagtacaaagatctcaccctgagatcaactgcaactaagagcaggaatgtgaaaatatgaaaaggtatctgtcgggagctagactttctctggtcatccctttggacacgggtctggctgccgacacagactgcaattgcaacgtatgggaaagcagttgactctattcagagacgtggtgtcctgaatggtcttaagaatatcatattgcatttaaaggcaattaaggggaaagttttattatgaatcgacacttgcatttgtggttgtatctgaaaatcttatacttccatctgcatattatttatcagttgattgtatcactcacagacatctaaaacctaccctatcattgacatgaaagagaagagactcacagcagcacttccttttcttttcttttttccttttctttctttctttcttcttttttctttttttccaagctgatggaatcccactctgtcgcccaggctggaatgcagtggcacgatcttggctggctgcaacctccacctcctgggttcaagcaattctcctgcgtcagcctcccgagtagctgggattacaggcactcaccaccacgcctggctaatttttttgtacttttagtagagatggggtttcaccatgttggccaggccggtctccaacttctaacctcaaggtaagatctttgtaccatgttggccaggttggtctccaacttctgacctcaggtgatccacccacctcggcctcccaacgtgctgggattaca

SEQ ID NO: 67522 - DNA, 1202 bp, Homo sapiens
tacctataatattctcttcatcctgcctcacaattaagcttaactcattaaaagttattgggaaatggagaatcatacttaagggactattcaagagaatttcagcttatactctcaaagcctarataaaagtattctatatttgtacaagctaccctcaggcagttgtttatgttcagcaaagagttatgtaaccttttgatttcagttacctctttcattaaagaaacaattctgaataccattatttatttccttttggaatctcaccaggtgaaacgatcattctaattctatgtatgttggctaccagaaaactttggcattggttttgcagtttatacatcctgtttgtgttctctcacattgtgagcagtcttcctatttgcttatacaatagctctctccacatctacactcccccttgtttttcttgtgtaatttcttatgtcattagagcttacctattgaaaatttttaattaacgccacaatgcagccaatgcgtttagttttttggcgatgtgctttggaggaatcctttttacagtaacataaataatcaagtattaatttgaatccccccaaaactattttcatacatgagaaatcaatttcaacgaaaagagaaagttaagaagttttcacaaaaacaacctcaatacaactaaaaggacttgctattggaaattaaggtacaaataatcgaactgtacaatcacaggagtttatagagcaaaaagacaatgctgagtgctatcatacttgattgacataagtgcattgatgtgatgtgagtagtagttgcaattaggagaactattgaatgatacaatgcgaactcatcttctcccccgacaaacaggagacaggaacacttgccacttcggtggaagtcaagggcagattgtcattgcagaagtgctcaatcatttccttctgtgggaggactcatgcttccacttcttactgctttatagaagaatgtgaaagattggagatttttattagcttttaagaaagaatcctcagtacattgaaaagatgatttaataatatctgccatcaaaattgtaataattagctgatgatgatatgacattaaaaatacaagaacttgaaaacataggcacagctccatatatagaatgctatggtgccattatttttcagttttgataaaagtctgcagagggtatagga

SEQ ID NO: 67523 - DNA, 580 bp, Homo sapiens
agaaatggacattactttttcttcttctttttttttttaagattggtggagatcacaaatttccagaaaatgtgtctgaaaaataagccagcatcatattttatctggggcctttatggtctttttttatccagggacaggaattagcacttgccagtatttcttagtcatctacttctcaaatctggagtccaaaacctgtcttataatactagacacagcaggttcccacgtagaattacagaagtgctttaattgtaccagtcgtcttgcaataaccatgatcttatacaagaatgtctgtgtacttggagtttatgacaaatgtccagttaggyttctcagggttcacagtcagcatttgggccagccatgtgaatgagatagaaaaatcaggaaattcattcccagaaacagactgtacactgccagtgttattatgtcatgtttttagactcaaccctgtcttttatttttatttttttgagacacagtcttactctgtcacgcaggctggagtgcagtggcaagatctcagctcactgcaacctccacctctgagttcaagtggttttcttgc

SEQ ID NO: 67524 - DNA, 855 bp, Homo sapiens
tttttatcttcgtcacatctcaacggattctaatgcttgttggggggcaccccttagtccctgtgtcaccaaggaggggctgcctggtgagattttcacatggcataattctggcagtacctctggggattccaccatccgacccaagcctggtctcagagttttcaaaatgtctccaattttataaatgcactttcaattaaagatagtcattccccagtagttaattaaggaagtttgtattttgtcattccctgcttggaacaagtgaacagctcagtttcagcgtgggaacaggaggaaaaagaggaatgcaakaagggcttgtgagggtacatctgcaactagaactgaagattggacagttcccacataggcaaattctgttaaggcaagtatgtgatcacatgaaatcaagcaatactgttatattaaagaatacaaataaagagacttctccagagaatattttgttgggaaatgtaaatagatagggaaaaataagtttaagtcttgcaaaattttaggtttgattttctgggaatttgccacatgataaagcctaacagagaattctagatattattctaaaaatatactgagtttacacagttttatttgctttttgtacttaaagggggtaataatacttatttataaaattctgaaagtgagacatgctttcaagaattgacagatttcagaagataattgcaagggctatttgtaaaagttcaagtttggctgaaaggtcattggttgagaattgcatctttatgctgcttctttatagcatttataactatatagtatattgtttctatatctatatattatatgtagatatcttcaaat

SEQ ID NO: 67525 - DNA, 801 bp, Homo sapiens
gcatgataacaaaaattcaaaaattccattggcttaaaatattaagtttattttgtagtttctactacactgtcaacttggcttggtaggggctctgctcaactagatcactggaggatacttgggcattttcacacatgcttccaacgtttccacagcaggggaggaagaagaacaaggatatgtgaaaactggcttttaatgctaaatgcaaacacatatcatgtttgttcccatttctttggccaaataggacatatatctaagcctaagtcagaggggcagagaggtcaattctttcaggtaccagaatgtctacacccatcataagctacagtaggatttttttggtaattttatctttttgtgtatggcgtgatagcccaggcgaatatagaaaagctatgaaagcacaaaagtcaggttcaaactaaaatacaaattaaattctcccttccttcacctagattttttttaagtaatttcaacttttattttagatttaggggttatacatgcaggtttgttacatgggtatattgcttgatgctgaggttcagggtatgattgctcctgtcacccaggtagtgagcatagtacccaacagttagtttttcaacccttgctcctctctctccctacccccctttaggagtgtccagtatctattgttgccatctttatgtccatgagtatccaatatctagctcacacttatragtgactaccattttacctagcaattcagttaatgggtatatatccaaaagaagataaatcattctgccaaaaggacacatg

SEQ ID NO: 67526 - DNA, 868 bp, Homo sapiens
attgttttactcctcccagtgtttactgctcctacattattcacttcttaaactataagcttagacatacgaattaaactaagctccttaaatgtgtcatgttctcttatctctggaacattaagcatttaattttcatcacctgaaatgcattctccttccctttttctttggctaaatcttaattctcttttgtatattagtttagaaatatttttcttgatcccacttacattgtgtacttagcctcattttctatcttccacacttccacaatggttgtacaatttttacactcacactagtaatgaatgacccttcctattgctccacatcctctccagcatttggtgttttccgtgttctgcattttggccattctagtcttttatcgctagactataagctgtataaaggaagagatgtggccttccttaaccactagtatctctaatctcaacsgagtgcccaatgcaatagcagataataaatattttaacaaatgaatgaatcatctgagtaacttttaagtcaccagaaaaattgacttcctcttaataatttctgcaaacaagaacagagagctgactgcatatggacttcacaattgaagttaattttagtccagtaatcccataaagaagtgacaaaaataacaaaagcaaacaaaaaaccctaaaacacagttgcagaattgcctaatgaggaatttatattattttgtttattttatctttttccaatcctggctctctcctaaaagtcatatgaagcatccctaaaatcatacattcagcaacgccacaccagatgtatgatttatgatgactggaagagtagataggtaatttaagccaccccttgaaat

SEQ ID NO: 67527 - DNA, 724 bp, Homo sapiens
ggatccctatacgtttggccaattgatctccacccctcacctgatacaacagaagggaaagactcaggttcttccatagatcagtgctggaggaagaaccattctcttctgtttccatggttgtgacataaagaagcagatgctttttggggaattacatatgcagacatacagtcacccacagacagaaaagacttagcctttggctttggacatgattcaaacattacatcacctatctggggattatattaaaacatagcccagtaatgattcagtcacctactaggtttaatttctgactaaatgagagtattccagawtctatggagctcctatttctacattgatctctcttttttttttgatatggaatctcattctgttgcccaggctggagtgcagtggcatgatcttgggtcactgcaatctctgcctcccgggttcaagcagtccccctgcctcagcctcctgagtagctgggattataggcacatgccaccatgcccaggtaatttttgtatgttttagtagagacagggtttcaccatgttgaccaagctggtcttgaactctggacctcaggtaatccgcccgcctcggcctcccaaagtgctgggattaaaggcatgagccaccgcacccagccctctacactgatctttaatagatgattcaagtcttgcccttagaaatttctctaggacagaaaaaaaaaaaaaaa

SEQ ID NO: 67528 - DNA, 724 bp, Homo sapiens
ggatccctatacgtttggccaattgatctccacccctcacctgatacaacagaagggaaagactcaggttcttccatagatcagtgctggaggaagaaccattctcttctgtttccatggttgtgacataaagaagcagatgctttttggggaattacatatgcagacatacagtcacccacagacagaaaagacttagcctttggctttggacatgattcaaacattacatcacctatctggggattatattaaaacatagcccagtaatgattcagtcacctactaggtttaatttctgactaaatgagagtattccagattctatggagctcctatttctacattgatctctcttttttttttgatatggaatctcattctgtygcccaggctggagtgcagtggcatgatcttgggtcactgcaatctctgcctcccgggttcaagcagtccccctgcctcagcctcctgagtagctgggattataggcacatgccaccatgcccaggtaatttttgtatgttttagtagagacagggtttcaccatgttgaccaagctggtcttgaactctggacctcaggtaatccgcccgcctcggcctcccaaagtgctgggattaaaggcatgagccaccgcacccagccctctacactgatctttaatagatgattcaagtcttgcccttagaaatttctctaggacagaaaaaaaaaaaaaaa

SEQ ID NO: 67529 - DNA, 587 bp, Homo sapiens
ggatcctcccacctctgcctccttaagtgctgggattccaggcgtgagccaccgcacccagccctagctccatttctgygccacaaccttctggctgcaaaactcagcctctcccacctcaaatcccagcccaccagacatttctagatctccatagtgacagagagggggacccatgggacacttctgttctggctggctctcctggcctgcactctcgtggtggaggcagggagaagtggctcacagcaacctttgcagggcagttttagagacgagtggggaaacaggactgatagaaataaagtgaggaaacggagacagggagcatagatcattctttccgaaagctggggcgaaagggaagccatctggcaggagaagggaggggacacggccagagaaggattcgtggttttgtttttgttcttttagaatgaagagacttgagggaaagaggccagtgcgcatggaaggggaaaggagggggatgggaatgcctgataaagtgaggcctgtggggtctgaagaaccgggcaggggaaggaagaggggtgaaggttggagaccctcttctgagtggacgg

SEQ ID NO: 67530 - DNA, 750 bp, Homo sapiens
agaagcgggtggggcagcgactggagcactcttctaagagggagaggctcaggggagagaccctagagtagatggcacttgaattgtgctcagaggagaagtgggaagacaaagaaggcagaaaaggaaggaagggccttccaggaggagggactgagaagagcagtagggtctgaaacacaagggtgtttctagaagagaaacaatccattcaggaattcaggaatgttaggagtcaagaagggtgtgaagacgaatggggctggatggcttggccacggccaagttggtgaaaatgatgtctaaggagctggatttttgtcctgaggtcactggagaaccaggagagtttcagcagaggagttagagaggagtctgttgtaaaaaatcaccctggctgctgggtggaggagggacaagaaagggtgacrctggaggcagaggagccttgtgaggcccctggaggctaggaccagggcagtggcagtgggtgtggggagaagcggactgggttaggggatgaggaggagatggactgagcaggacttggtgatttactgggtggctggtggagcatgaagaagagggcacttctgagctttctggcgtgggcataggctctcgtggtgccggccctaggtctcatcactgtgcatggggctcattgatgtgagctgagcagaggtggacagagagaggtgacacagccctcatgtagtgctgaggcccctgacacattcatgtccccca

SEQ ID NO: 67531 - DNA, 763 bp, Homo sapiens
ccaggaacaaacaaacaagttaacatattttggaaaataaaagccaattttctcactgttagaagttacaaagaaggaaaagctagaataaactcagtggtgttagagtggaatcaaaggcaacagtaagaactcacagtttttataagtaggtaggtaggtacacagtcagataggtatagacaaatgtcaatgcatgtgtgagtacaccaacatagagttcttagctctgtcaatggagagatcctagagtaaatgacattccagtgctaatgagcacacctagtgctcagatcatggtttctagtaccattctccagttaatgatgaaccagggctccctagaaatagggttaatttcagggctgaggtcagagaagatgcatgataagcctggaacactttgtgatgccaaaaataaggaagaactcaaaaatgatgaaggcatatcaaaaggaaacaggtgccaacctgaaggggctctcaatggccaatgttgagtgttgggagaaaagctgagtgttgggagagaagctgaggcagggcttggaacacgtccagggtctaggattaaaacccctcgtggtctttggaatgtgtctagacttgctggctccttgcttctagcactccctttatctcaagtagccrtatgtttcaaagaaaatgctaaaccgtcacagctgtagctcattcacttgatacaccgcttcctttcaacccccacatcttcactgcctgtttctttgtttgatcatcaata

SEQ ID NO: 67532 - DNA, 986 bp, Homo sapiens
gcatatatatttataattggtataattttgttggtaagttgatgattttatatggtcaattacatatataatatatacacatatcataaatatggccattttatataattatatataatgttcttttttgtctcttggtaacagtttttgacttaaactctattttgtccggtattagtatagtcacccttgctctcttttattcttgttgcatgaatatattttttcatccatccttttactttctttttctttttctttttttttttaatattgtgcgacctgggcttctgccctgaccataggccacggcgcctgcccacttacccgcctgttgctgcctgctcctggcctgcccaggggcccagcaggcacgagggacatgctttcacgtttatcctctgcatgtccttatatcaaaagtgagtctcctgtaatcaggatatatttggatcctctttattttttgtaaattctgccaatctatctctttttagaagtgggtgtaaattaaagactagggactttaatctatttatatttaaagcaattactaatagagaaggacgtactattgccttttgttgttttctgtgtgttttataactttttttgtctctaatttcttcccattcctacttctgtgtttagttgatttttccatatttactcctatccccaatccctagcaatcatcattctacttcctatctctatgaatatgaatatgctaagcactttttttttttttttgaggcagagtctctctctgttgcccaggctggagtgcaatggtgtgatctccgatcactgcaacctccrcctcccaggttcaagcaattctcctgcctcagcctcctgagtagctgggattacaggcgcctgccaccacgcccagctaatttttgtatttttagtagagacgtggtttcaccatgttggtcaggctggtctcgaactcctgatgaggtgatccacccgcctcg

SEQ ID NO: 67533 - DNA, 545 bp, Homo sapiens
acaaattatctgagtacctcaatacgcatagaatcccagggtttatataccaattaacctaaacagatacttgaaatcttaattttgtamaggcaggccagatgattaatttgtagatgttccataaactataccttgaggcatactgttttttgagccatccttaaattagcagctgattctgtaatattgcaaaacaatatttatttttaattgcttcaaatctaaagatttggtggctgtttctttcacacaaaattcaagatgagagagtgtcataaatggtttcattctctagaaatttgccaataaaaatttacttacatgaaatagattaaactcttatggatgttgcaggggtcaagtaatcccaccacttcatctattgccaatgccttgtattgtgtactgatcacaggttttattccttctttttaatatttttttttctaatcaagctgcattcttaattaagtctctaaatctgattagtactaatgattaggtgcttagcttaggagatcaacaaaaaaagctgcagtctc

SEQ ID NO: 67534 - DNA, 545 bp, Homo sapiens
acaaattatctgagtacctcaatacgcatagaatcccagggtttatataccaattaacctaaacagatacttgaaatcttaattttgtacaggcaggccagatgattaatttgtagatgttccataaactataccttgaggcatactgttttttgagccatccttaaattagcagctgattctgtaatattgcaaaayaatatttatttttaattgcttcaaatctaaagatttggtggctgtttctttcacacaaaattcaagatgagagagtgtcataaatggtttcattctctagaaatttgccaataaaaatttacttacatgaaatagattaaactcttatggatgttgcaggggtcaagtaatcccaccacttcatctattgccaatgccttgtattgtgtactgatcacaggttttattccttctttttaatatttttttttctaatcaagctgcattcttaattaagtctctaaatctgattagtactaatgattaggtgcttagcttaggagatcaacaaaaaaagctgcagtctc

SEQ ID NO: 67535 - DNA, 744 bp, Homo sapiens
cctttacacatttctccttgtgaggcttctgcactcgcaaatgtgattatttctccttctgaataaacatcaagatcatacatctttcaacaaaatttcctttcacacagccacctgatgtttgtgaaacaacaatcctgtccctatatgattcttctattgaccaaccctgcagcccctattcacccagaacatctccatcatcctagacagccctgttccttggctaaaattataacaggcatctcctccctcagagtcccatgggcctctggcattttctgctctttgtgtttcccagtcctcrtgtaggtggttctgtcccaaagtgatgtgatctcattaaaatcttcgaggctcctctgtacccctcctttctgtccagccgcatgtgcctgcccccagcttcatcacaaactgagccccatcccctctcctgggcctctccaccttctgcagctccgttgcacttccaattggcctgctaccttttctgctttagtctgcctcgtctctttctctgaaagctcatctctctcctttctcttctcccttgtgtgcttcagacaaagacagaccttttggaagtgagctcagctttctattctcacagctcgtttccccttctggttttcttcttatccctcttgtttaccccacattactttatcactctcctactccatgaccctaaatctctcttcttaacagaatactgctccctctcacaaactcctcctcttg

SEQ ID NO: 67536 - DNA, 989 bp, Homo sapiens
tgacagcctccgtttgctcaggtctccatttgtacggaagctgttattatggaataagtttaatgggtcgtgaattttgtggagaaagggagggtctcttgatgactttgtatgtaccagccctggacctactggctccacaaggagtgcattaggctaaatatttttagcccattgactctggaggtaacaaccctaaatgcttcattaaattttcatgggtgagtgtcagaagctacgagaaaaaaaaacaccccaaaacagaaaagcacaaatccatcacattatctttgttattatacagctggaagacaggagtgtagccccaaaaagagtaacggtaaactttttaaggaagggttgcctgcctcttgctttccttttctgcacctgggtccaacagggtggtttgtgtgctgtgcgaatctacatattatgcacttgatttgattcaccaggctcctctcttctcctgcatttcaggcctctggagacaggtatgccacacaacaggaatttyctggagttgaatctagtctcaaggtggaagaattttcagaatgacccaatattttctgcgacttggtgtttctaggatctttgtgagctaggaccctaagcaaggagcaactgactgtgtactcgctggagccgcctcccgcacagcttcgaatcggaggattgtttactcccagtcattctaagagccgagtaggggagtcgcggggagtaagccggagttaaccgtggtctgcgtgctctcaggggcacgggtctctcctgaggactgacggaaacttgacacgtgccagccttctccctcccaacttgccgaactttgcctgggaaacctcagtcaaaacaggagccgccgaacctgcactggcggctgggagcgagcgccccctcctgccaaggggcgtgggggcaacatgccctcgcggagactcccctcgtggtttcgcccttcctggcactccatatatttg

SEQ ID NO: 67537 - DNA, 989 bp, Homo sapiens
tgacagcctccgtttgctcaggtctccatttgtacggaagctgttattatggaataagtttaatgggtcgtgaattttgtggagaaagggagggtctcttgatgactttgtatgtaccagccctggacctactggctccacaaggagtgcattaggctaaatatttttagcccattgactctggaggtaacaaccctaaatgcttcattaaattttcatgggtgagtgtcagaagctacgagaaaaaaaaacaccccaaaacagaaaagcacaaatccatcacattatctttgttattatacagctggaagacaggagtgtagccccaaaaagagtaacggtaaactttttaaggaagggttgcctgcctcttgctttccttttctgcacctgggtccaacagggtggtttgtgtgctgtgcgaatctacatattatgcacttgatttgattcaccaggctcctctcttctcctgcatttcaggcctctggagacaggtatgccacacaacaggaattttctggagttgaatctagtctcarggtggaagaattttcagaatgacccaatattttctgcgacttggtgtttctaggatctttgtgagctaggaccctaagcaaggagcaactgactgtgtactcgctggagccgcctcccgcacagcttcgaatcggaggattgtttactcccagtcattctaagagccgagtaggggagtcgcggggagtaagccggagttaaccgtggtctgcgtgctctcaggggcacgggtctctcctgaggactgacggaaacttgacacgtgccagccttctccctcccaacttgccgaactttgcctgggaaacctcagtcaaaacaggagccgccgaacctgcactggcggctgggagcgagcgccccctcctgccaaggggcgtgggggcaacatgccctcgcggagactcccctcgtggtttcgcccttcctggcactccatatatttg

SEQ ID NO: 67538 - DNA, 652 bp, Homo sapiens
taatcaaattggttataaaactttcaggttcacggtcaattgtaaagtccggtctagagagggagaaggacccatagttgcatcataagcaaatccaatgaaggagaccaaaaaacccagaaccagcagaaaagagwcccaacaaagaaatgactgttggtgcaagtggaagaagccggcctcacatctccaattatctttgacaatgtgacgttcttctagcacattatgatcattgaagcataaaatgatgattctgaataacacaagtgaatagttatagtaaagagattctgtttaagaaaacagggaggtaaaattttagggggacacaagttctatcaaaatttaaatttagtttttaatttgtaaacttacaaacaggcatttaatttttaaaaaagtctgctaatataaactttatttcataaacactggattattatgttactatagatgacaggtttaaagcagaaattcactttgtcatatataaaagcaccaatcatgctaacagaagcttacatgtatgggctgttagatgatatactttttattgaatggataaaagctacactaaaatcttatatcaatttgatgtatgtaaatatcatgtaagttgacagattaatgactaagcaccagcgtctaa

SEQ ID NO: 67539 - DNA, 652 bp, Homo sapiens
taatcaaattggttataaaactttcaggttcacggtcaattgtaaagtccggtctagagagggagaaggacccatagttgcatcataagcaaatccaatgaaggagaccaaaaaacccagaaccagcagaaaagagacccaacaaagaaatgactgttggtgcaagtggaagaagccggcctcacatctccaattatctttgacaatgtgacgttcttctagcacattatgatcattgaagcataaaatgatgattctgaataacacaagtgaatagttatagtaaagagattctgtttaagaaaacagggaggtaaaattttagggggacacaagttctatcaaaatttaaatttagtttttaatttgtaaacttacaaacaggcatttaatttttaaaaaagtctgctaatataaactttatttcataaacactggattattatgttactatagatgacaggtttaaagcagaaattcactttgtcatatataaaagcaccmatcatgctaacagaagcttacatgtatgggctgttagatgatatactttttattgaatggataaaagctacactaaaatcttatatcaatttgatgtatgtaaatatcatgtaagttgacagattaatgactaagcaccagcgtctaa

SEQ ID NO: 67540 - DNA, 1515 bp, Homo sapiens
ggtcttgagcatccccaagtactgataaagcactttaggttgtttctagaaaacactgaaaaattaacccttttgctaaaagtgtagaaacaagccctcccctgaaccaaattcctgaaactctcaggttaaacttcgtaaccccatcccttcactgcagactcccaatagaaaagttacaggtgcaaggatgagatgactttggtcaaactcagaccccacagggccaggaaggcctgaaggagaggaggcccatgcttccacgtctcagataagaactgtttctaaggacttttaaaaaacccataagaaactcttccatgtccttcagccccttctgctttgacaaggtttatcactagatgttctttaggacgtcaggaattcagataagatgctctcaagagaaccattgaccagcaacagcatctcctccaatggactgacagcaactctggctttgaacctgtggaaccagggaactctgtttccaggcagctctgtcaggctctcccttgttgctgataagaacttcctttacctctctatgtacagagagctctctctacggtgcttttcctctactctcacgtcacaggaatcatcaacacagaaaaagacttctaggaccagatgtatggggtttttttccccagacgcagtagcgaacagcagctgggtgtcctctaagtcagctctggtgctgtctacccagagacagtcccggatcccacagattgaaggcccattccccaaaactgcccccaacaccattcccaagtccagacctccagaacttctgactgactggcttcaagttggggatcccatgccccactctttgggtttgattaatttgctgtagcagctcacagaactcaggaaacactgacatttcctggttgaatacaaagcacactgcagaggacacagatgaagaaactcataggaggaggcatgggggaagaggcccggggcttccataccctccctgggcgtcgccctccaggagccttagcatgctcagccacccagaaactcatgaaacccagtcctctggggctttyatgaaagcttcatgacatcagcatttcctcccacaaggaacagggtgagactgtcttctgggagggtcttaagatccactatcagaaaggcagggaacattcgagtcttactttgggttaggtgaaggaagggcaggaggaggtcagaggcctcccctgaggcccagcacagccaatgttataacaaaagactataacaagggctatgggagttacaagccaggaactgcgggtgaaaaccagcatatatcacaacatcacacttccctctctggacacactgtggcttgccatgccatgcactccatattgtaatccttgcttctcactcccaaataaactcaaaatccaggcaaccctcgagcaatgcagccttgaattccaggggtctcttatatgcacactttttccaaacaaacggggatcaaaactatagcatttgtgagaa

SEQ ID NO: 67541 - DNA, 500 bp, Homo sapiens
gggcaatcttggagaatgggccttcaatctgtgggatctgggactgtgtctgggtagacagctcggagccgacttagaggacacccacctgctgttcgctattgggtctgggaaacaatcccacacatctgatcctacaagtctcctgtgttgatgactgttgtggtgtgagagtagaggaaaaacatcatagagagagctctctgtacatagagaggtaaaggaarttcttatcagcaacaagggagaggctgacagagctgcttagaaacagagttccctggttccagaggtcaaagccagagttgctgtcagtccattggaggagatgccattgctgggcaagtattctctcgagagcagcctatctgcattcctgatgtcctaaagaatatctagtaataaaccatgtcaaagcaggagaggggtgaaagacatggaagagtttcttatggggtttttaaaaaagtccttagaaacagttcttatctgagacctgg

SEQ ID NO: 67542 - DNA, 500 bp, Homo sapiens
gggcaatcttggagaatgggccttcaatctgtgggatctgggactgtgtctgggtagacagctcggagccgacttagaggacacccacctgctgttcgctattgggtctgggaaacaatcccacacatctgatcctacaagtctcctgtgttgatgactgttgtggtgtgagagtagaggaaaaacatcatagagagagctctctgtacatagagaggtaaaggaagttcttatcagcaacaagggagaggctgacagagctgcttagaarcagagttccctggttccagaggtcaaagccagagttgctgtcagtccattggaggagatgccattgctgggcaagtattctctcgagagcagcctatctgcattcctgatgtcctaaagaatatctagtaataaaccatgtcaaagcaggagaggggtgaaagacatggaagagtttcttatggggtttttaaaaaagtccttagaaacagttcttatctgagacctgg

SEQ ID NO: 67543 - DNA, 1440 bp, Homo sapiens
aatctattggaacaattgtgaaattagcaaagagtacatacagtaaaatttatataacatgacttgctaatgagaatctgttaattcttttgttaggggaaaaatattatttaaagacaagtgttaactttatgagtaacccatgtgctgtacagaactaaactaattctcaaattcaaattaaattctcaaggcttataaaataaattattttttctggctatctgaaatgaatgtatgttaaaaagaaatatgggctgggtttacttatgtagtacttctaatataaagttgggatttatagcctacattaattatataagctataaaacaatagttctgtgctctggctttaaaawtcacttctactccatagtagcaagagtttcttgttgttgttggttctattttttgttaaatacataaagagaaaggatgaatttgagattcccatattttcccaatctgagacttacttactactttacactatgtagtgcaatttaatttcaaaaatttttaaacacattccttggttaatcctaatctggggacacatagtatagctatttgtatcctgtgttaaagctgagtgttttatagattccagcagagttgtatgggtgccacggtaaatcacgattgcaattctatcttctaaatagcactctgagttctccaactcctgccgttcccattaccccatccttcaaggctccgagatctccgggaaagtgtcctaatggatcctgcaattagttttgttgtctcaataattggagtgactattttttgatacatacacctattcctcctgatggaagctgggaacaattcactctgtattaaagagaaataggaaaaggaataatattgaagtgagttaagaaatgaaagtaaaagaaatagaggtaatgagtgtagattgaattttcaacaaatttggccaggaagggaaagaaaatgagagattaagggaaccaaggaaccaagagaaaaatgtgccacttgtgtcttagaagaggatcttagaagggtctaaaggaaagggacagaaggcatagatgaaggccttagtctaggagaatggatagttaggctgaacatttatcctgctgttagatgagaaaagggagagaagtggtagacgatacggagacagtggaaatttgaaaaataacaacattaggaagaacatattggatggctttttactttcccatttatctcctagttaggagataagattatctacaaaaaaaaatgaaaattaaaatatatgacctctatgacaaagcgggtgttaaaatctcactacctttattctatgaactgaagaaaatacattattttattgtaaggccaatatcaaacaacttcttcagatgcctccccagtaaacctaagccaaaatgagcaaaaaccattaacataattcaa

SEQ ID NO: 67544 - DNA, 1440 bp, Homo sapiens
aatctattggaacaattgtgaaattagcaaagagtacatacagtaaaatttatataacatgacttgctaatgagaatctgttaattcttttgttaggggaaaaatattatttaaagacaagtgttaactttatgagtaacccatgtgctgtacagaactaaactaattctcaaattcaaattaaattctcaaggcttataaaataaattattttttctggctatctgaaatgaatgtatgttaaaaagaaatatgggctgggtttacttatgtagtacttctaatataaagttgggatttatagcctacattaattatataagctataaaacaatagttctgtgctctggctttaaaaatcacttctactccatagtagcaagagtttcttgttgttgttggttctattttttgttaaatacataaagagaaaggatgaatttgagattcccatattttcccaatctgagacttacttactactttacactatgtagtgcaatttaatttcaaaaatttttaaacacattccttggttaatcctaatctggggacacatagtatagytatttgtatcctgtgttaaagctgagtgttttatagattccagcagagttgtatgggtgccacggtaaatcacgattgcaattctatcttctaaatagcactctgagttctccaactcctgccgttcccattaccccatccttcaaggctccgagatctccgggaaagtgtcctaatggatcctgcaattagttttgttgtctcaataattggagtgactattttttgatacatacacctattcctcctgatggaagctgggaacaattcactctgtattaaagagaaataggaaaaggaataatattgaagtgagttaagaaatgaaagtaaaagaaatagaggtaatgagtgtagattgaattttcaacaaatttggccaggaagggaaagaaaatgagagattaagggaaccaaggaaccaagagaaaaatgtgccacttgtgtcttagaagaggatcttagaagggtctaaaggaaagggacagaaggcatagatgaaggccttagtctaggagaatggatagttaggctgaacatttatcctgctgttagatgagaaaagggagagaagtggtagacgatacggagacagtggaaatttgaaaaataacaacattaggaagaacatattggatggctttttactttcccatttatctcctagttaggagataagattatctacaaaaaaaaatgaaaattaaaatatatgacctctatgacaaagcgggtgttaaaatctcactacctttattctatgaactgaagaaaatacattattttattgtaaggccaatatcaaacaacttcttcagatgcctccccagtaaacctaagccaaaatgagcaaaaaccattaacataattcaa

SEQ ID NO: 67545 - DNA, 877 bp, Homo sapiens
ggccaggccgtggcttctcaggatcttttgtccccagtgccctgaactaaaaaagggctacccttccttcctttcatgccccagctatcaaaaccttctggtggtttccttaagggcagaaggtttgcagagcttgggatttcccaaaccaagccccacagcacatgcggagccccagttgggctcttggagagaaaggcagttttccaggccccccacacacatgtcatagctgtgtggctgcattttagaggcatttgttgtctgccttgctctgtagggtaaggtcatgctttagactctaacgttcagagaaacagccccgcttttgctgttggcgaggtatgagcacaggaagtctcctttctctaaaagaaaatcgagccctcagggaagttctggaggagagggctcctgcgcctgcagccccgccctgaggcgcctgtcctgaagacacagttctcactgtgaagtcatctccttaccatcagtgagtgctcctgagccagcctcggttagtttcgggtgaaacaggaagccggtacctactcacggctcctgcttcccagcaggactgcactcgggacttgagggcgggcagcgagtgttttctccactgctgtgctcagtatctcgttagctaaaaggaaatgcaccctgcctgggaaggccgcataccgcacaacctggaggggccaatgtgtcttgcggaagtggaactgagcagaattcagaggccttggagccaaacagtcctaaggctcccggaagctctcagataagccatgccacctctcctgacctctgtgtcctcatggggaaagtggggctaacargaaaatgccctttgctgcatgtccaggggattaaggaaatg

SEQ ID NO: 67546 - DNA, 784 bp, Homo sapiens
cctgagaggacagggctcttacaaggtgagggaagcgggaagagaagaaagtcgcaatgctgagcagggctggggccagctcrctccagaggaaggtctgagaggcctcgctgcctgggcagcgtcagccggctggtggagcagcgctggctgggcggaagcctgtgtgtagcgtgaggaatgaatgggagggacaatggaggcaggggtgcatgcttttcttttaagagatttcaaaaaggaattggagactaggtatggtggctcacgccagtaatcctagcactttgggaggctgaggcaggtggatcacttgaggctgggagttcgagagcagcctggccaacatggtgaaaccccgtctctactaaaaatacaaaaaattagccgggcgtggtggcggactcctgtaatcccagctacttgggaggttgaagcaggagaattgcttgaacccgggaggcagagcttgcagtgagccgagatcgcgccactgcactccagcctgggcgacagtgagactccatcttgaaaaaaaaaaagagggattgggggtggtgaggccattaacccccatgtagagagctgtggggtcaagggggatcttttattttccagtgggaaggttcgattggggagggcggggccagtgtgggaagcagcgctcttctgagctttgggcccctggtgactttgctgttcgtctgcatagaggtgcacttctggggctgataggaaagtgaatttgcttctcctgatcgtgcacctgcagggagccgggttc

SEQ ID NO: 67547 - DNA, 784 bp, Homo sapiens
cctgagaggacagggctcttacaaggtgagggaagcgggaagagaagaaagtcgcaatgctgagcagggctggggccagctcactccagaggaaggtctgagaggcctcgctgcctgggcagcgtcagccggctggtggagcagcgctggctgggcggaagcctgtgtgtagcgtgaggaatgaatgggagggacartggaggcaggggtgcatgcttttcttttaagagatttcaaaaaggaattggagactaggtatggtggctcacgccagtaatcctagcactttgggaggctgaggcaggtggatcacttgaggctgggagttcgagagcagcctggccaacatggtgaaaccccgtctctactaaaaatacaaaaaattagccgggcgtggtggcggactcctgtaatcccagctacttgggaggttgaagcaggagaattgcttgaacccgggaggcagagcttgcagtgagccgagatcgcgccactgcactccagcctgggcgacagtgagactccatcttgaaaaaaaaaaagagggattgggggtggtgaggccattaacccccatgtagagagctgtggggtcaagggggatcttttattttccagtgggaaggttcgattggggagggcggggccagtgtgggaagcagcgctcttctgagctttgggcccctggtgactttgctgttcgtctgcatagaggtgcacttctggggctgataggaaagtgaatttgcttctcctgatcgtgcacctgcagggagccgggttc

SEQ ID NO: 67548 - DNA, 633 bp, Homo sapiens
atccagtttgtagttttgtatatggaaataattatcttaattgcaggtacacatcaggggccagtcagaatctggcatgagaatgtccaaaatgtagtcttctggtcaaatagtgacagrtacatatgtgcaaacccatttaaaataatcaaaagctgacttcctgaaactttacctgaaactttgttatcttttaccagaatatataatgataaggagttgggaagatagttgagaatgatgtcgtggccatttgtatcattaatcaaaaaggtctaggaattcacattgtttgactgactttgtcttctattatctttatcagttgacgtggagattgcagtatacctccccaggaactggtagacggtgggaatgtctaaaccaaatgactttttatgcacgtgagcaaatgtgtaagagtcataatatatctgtctggaacatagtagattcttaataaatattggaatgaaagtttaatgctttgaaaaaggcttcttttacgtctactaaagttctagctcaggatactgtagtgtttttatttacttttttttcctcttcatgaaaatctagactcttaaaatccagtatctttagtagataatttgcatttatttattatccaag

SEQ ID NO: 67549 - DNA, 832 bp, Homo sapiens
tgcttcttccaaagtttattagacatttcagcaatatgacatcattcttttggctagatatcagtacacagtaccattttactttagttccaaatcctttccatctccttcatgtatttttctagtgaatgacctataaacaaacatgtatagtgaaaagactgccacttaaagggcttctttgtttaatctcaacacacagattgttttgaaagttgagttttgtcatctaatacattactatggtaaaatatggctttcatatgcttgattttctaaagcaygtattcacctataagatattctcattcttgagtcctacttggtctactgatgcttggtccactggttttagtataaaactaaagacattaggtattattaaaatataataataccaacttattgaaagataacgcctgccctcccctcttctctcctctcctgcccttccttccttccttccttccttccttccttccttctttccctccttccttccttcttgtgagggtggggtattgaagggataaaatgcccagaggaaaactccaagatgggatgggagacataggtccaatatatcagaaggttaaattgagtgggcttatgagagaagcaggagaaagggaggctagagagccaataaaacaaagttcatagtgataactggaacagaatagacctcaaaggcttaaagatgtcaaagtccctgcattttttcctaccttcagaatctaccaccttcagtcatggagaagtcttgatgaagttacccaatctataacaattctatgctgtgcatgctgattgaattatcttcatcaatgca

SEQ ID NO: 67550 - DNA, 743 bp, Homo sapiens
tgggattcacatcccctgagaacacattaacccaaaggaacatggtgagtgagaagcattgggaaaagttctccccgctgcctccttttgcctgctggccattgtaaacacaaacaactttcttcaaggtacatttcctgaaggttttggtccccaatgaccatgggatrttttgtccaggttgcagggtagaaacaaaggtcataggattctatctctaccagcagttaaaagagccatgagctcaaagaattcatggtggtgtactagatttttgtccttatctacaactcttgctgttaaatatttctttataaacatcctgaaaatctgggtagggtctagcttttcctgcatgtaaatccatatttccttgtgggaaaacaccgagttggtgaaagcaccattatatgtaatgaaacaagatgatatagggatcatgtattttctttcaatatttgctaagatgagaagaagcagcatgagagatttaggaatgaacctacagaaggctagtgctagaaataaaaattaaaaagaggtcacatctcctatagagagctgatgatatgaaaggcagagggaaagctgacgagcttcaagctggggcaaggagggatgtagagggactgtacagaggtaaaatcagtttgatgaagcccagggagatttgggaaagttttttgaagttataatatacatatggaagaggatacattcataaatttacaacacaaatgttt

SEQ ID NO: 67551 - DNA, 710 bp, Homo sapiens
taccctggcataaggtacctccaataggtttaagccaaaatataaaccaattttgtgacacagaaacctaaagaggctagtaccttggaaactctttttctattttttcaggccaaggctgaacttttagaatattacatagttctagggcaaacagattctagtctgcaaaattgctggtgggtccaaaaaaaccagacaggtttaagcttgttgttgtaagaaaaacatgttacacagtccctaaatacagcctaaagcctgtggaaataatatgggagtgctgggaagggaagagcgtggtccctttaaataatacggaagtggggaagggaagtgctggctagaggagggcatggtccctgggtagggctccacccccatggacctargtaaggatgggcactcctgccttcgcgcccaaatgttgcatttcccaagaccatcctggcctgccacacccccatcctgtgcccctaaacgccccccgagacgctagcaggcagacacacaggaggccagacgtcaagagcagcacattggcagaagaagattcaagaggcaggttgtctagagtgggcatccagaagaacacacttgtcagcaccagcatgcagtcaggccatccaccagtgggatgaggcagagtttggccagggcagtcagaggagagctggggcccaactccacaggaagaccatctcccttgt

SEQ ID NO: 67552 - DNA, 1169 bp, Homo sapiens
gtaaataaacaaatgagtagaattaatgccagaaaacaaaggagaccattgaatatagatatggttgtcattaatttataatataacttttccttttaattttgaaaaattaaaagctgctaaagagttgaaagaataagacaatgaacacctatataaccttcactcagatttaccaattgtcaacatgttctaagatacaattttcctcactctatatgtatttatttttctaaaacatttgaaaacacattgtagatgtcaagacacttcactcttaaatacgtgggcacatatgtcctaagaaaaagacattctcctttatatctacagtgtaattaccatacccaagagggttaataacaattcaataatatcatcaaatacatggtcaatatttaaagtttcccattttttaaacagtatgcgtacttgcactttttaaatcgagaaattaataaaagtttatgcactgtatttggtattcatctgtttttagccttaaagtaattttaaaataaatagcaatatggttaatgctcacaattttaaggctgagcttcttagagtggttatatagtacagtatattgattgaagaggagtcactatgttccagaatttgattaacatatttgcaagttcagaaacttaacattatctatcatcaaaagatcatgctctgagatataaagtacctacttgtcaacttacctccttattttctactgtatctagatgctaccttccacaaggcaatctatttttgctgataaacagttctgttactgttatgtaacagtgggctcactgcagcctcaacttcctgtgctcaagtgagcctcgtgcatcagcctctcaagaccacagacatgcgccacaccaccacacccagtagtttttgtattttttgtagagacagagtcttgccatgttgctcaggctggtcttgaactcctgagctcaagtaatccccctrctttggcctctcaaagtactgggattagaggcatgagccactgtgtttggcccaaaattttgaatcaccactgagcactgagacatacccacctggtgtttgtcttccatgagttgactcatttaaggaagatgactctgcctaagtgagatgacattataatattatggtcacctatccctaaaagagga

SEQ ID NO: 67553 - DNA, 1169 bp, Homo sapiens
gtaaataaacaaatgagtagaattaatgccagaaaacaaaggagaccattgaatatagatatggttgtcattaatttataatataacttttccttttaattttgaaaaattaaaagctgctaaagagttgaaagaataagacaatgaacacctatataaccttcactcagatttaccaattgtcaacatgttctaagatacaattttcctcactctatatgtatttatttttctaaaacatttgaaaacacattgtagatgtcaagacacttcactcttaaatacgtgggcacatatgtcctaagaaaaagacattctcctttatatctacagtgtaattaccatacccaagagggttaataacaattcaataatatcatcaaatacatggtcaatatttaaagtttcccattttttaaacagtatgcgtacttgcactttttaaatcgagaaattaataaaagtttatgcactgtatttggtattcatctgtttttagccttaaagtaattttaaaataaatagcaatatggttaatgctcacaattttaaggctgagcttcttagagtggttatatagtacagtatattgattgaagaggagtcactatgttccagaatttgattaacatatttgcaagttcagaaacttaacattatctatcatcaaaagatcatgctctgagatataaagtacctacttgtcaacttacctccttattttctactgtatctagatgctaccttccacaaggcaatctatttttgctgataaacagttctgttactgttatgtaacagtgggctcactgcagcctcaacttcctgtgctcaagtgagcctcgtgcatcagcctctcaagaccacagacatgcgccacaccaccacacccagtagtttttgtattttttgtagagacagagtcttgccatgttgctcaggctggtcttgaactcctgagctcaagtaatccccctactttggcctcycaaagtactgggattagaggcatgagccactgtgtttggcccaaaattttgaatcaccactgagcactgagacatacccacctggtgtttgtcttccatgagttgactcatttaaggaagatgactctgcctaagtgagatgacattataatattatggtcacctatccctaaaagagga

SEQ ID NO: 67554 - DNA, 580 bp, Homo sapiens
cattaaaaataaatggtaaaaaaaaaaataagatctggtgaggatcacatgacaagataattcattctttctagtctctctgttccagtwtggttgaccttcagtttatcctccatattgtttccacccaaaatttctaagcaacttttatgtcttaagttctttatttatttctaattgatctattgtaaagtttggacttgaatgagtccttaatattctggttccagccctcctttctagccaatctcttgtcatatctctacatacagtctagtccagcccttttgatctgtttatccctttgaaagccaagttctctgagctgtccctttgcctggaataaacttctctctcactgtgacttttgaaagacctagttcaagaatcaccaccttttagaagttgctcaacaaagttaagtgtcctcttcagagcatttcttttaagctttcttaacattttgggcacatttttatgtaaatgtatcacacaatattatgattattgttttacttccatgtctcccttagaatattctgatattcttgaggtcagagattctgttctgatattaatt

SEQ ID NO: 67555 - DNA, 561 bp, Homo sapiens
tactacctaataatgatgttgataatggaaagactagaaagattataataaatagaggaagacagatgtgcatttctaatatttgtagggtaaattctaaggtcatacattactttgtgttaccacacacaacataatagttaagagatagtgtataactcatacarcaattagtttgttaattttgcaaagtaataatatctataacattcaaagttaaaaactggtcaagaaaggtattttgcatatactttttttttgttgagcacatatcactcagttggaaaagtaactaacacattttctcttatcattcagcaacaatttacttcactaaacatttattaagttcaaaatttatgtaaatgtgatgaatggggtataaaatgagcatcaggggaggtcaggccaaatgcaagaagataattaggaaggtttgaaagcgtgtgatgaattccatttttcagaatatgattctctgaaaggtagagaaatacctgtcattgtcaaacgtataaaaatgaaaggtaaatatataaaacatcttttttaatattgaga

SEQ ID NO: 67556 - DNA, 561 bp, Homo sapiens
tactacctaataatgatgttgataatggaaagactagaaagattataataaatagaggaagacagatgtgcatttctaatatttgtagggtaaattctaaggtcatacattactttgtgttaccacacacaacataatagttaagagatagtgtataactcatacagcaattagtttgttaattttgcaaagtaataatatctataacattcaaagttaaaaactggtcaagaaaggtattttgcatatactttttttttgytgagcacatatcactcagttggaaaagtaactaacacattttctcttatcattcagcaacaatttacttcactaaacatttattaagttcaaaatttatgtaaatgtgatgaatggggtataaaatgagcatcaggggaggtcaggccaaatgcaagaagataattaggaaggtttgaaagcgtgtgatgaattccatttttcagaatatgattctctgaaaggtagagaaatacctgtcattgtcaaacgtataaaaatgaaaggtaaatatataaaacatcttttttaatattgaga

SEQ ID NO: 67557 - DNA, 561 bp, Homo sapiens
tactacctaataatgatgttgataatggaaagactagaaagattataataaatagaggaagacagatgtgcatttctaatatttgtagggtaaattctaaggtcatacattactttgtgttaccacacacaacataatagttaagagatagtgtataactcatacagcaattagtttgttaattttgcaaagtaataatatctataacattcaaagttaaaaactggtcaagaaaggtattttgcatatactttttttttgttgagcayatatcactcagttggaaaagtaactaacacattttctcttatcattcagcaacaatttacttcactaaacatttattaagttcaaaatttatgtaaatgtgatgaatggggtataaaatgagcatcaggggaggtcaggccaaatgcaagaagataattaggaaggtttgaaagcgtgtgatgaattccatttttcagaatatgattctctgaaaggtagagaaatacctgtcattgtcaaacgtataaaaatgaaaggtaaatatataaaacatcttttttaatattgaga

SEQ ID NO: 67558 - DNA, 1302 bp, Homo sapiens
atgtccatttaggtcctttgcccgttgttttatcgggttatttgttttcttgctattgagttgtttgagttccttatatattttggacattcaccctttactggatgtatggtttgcaaatattttctcccaatgcatggattatgtccttactctgttgaytgagagaaaactaagttttgaacagcctcaattagtaaattgtgcaagagctcacatctatccgttgaaaaagctgggctttatgctgcctgaactccaaagtgcatttttccccagtgtcccaaactgatttccagcagaacagagccccagtcccagggaggcatagattctgagtcgtgaggtgctgatccacaggttatccaaaggttgaaacattcccagaatttttgtggttgaacagtgactcctgcatcagctagtgagtagtgtgtccactaaccatctacataataccagactgttaattcagttaaaaacattgtattgcacatgtgtgcctgacactattctggatgctgctagtttcttttccccatcaagttcaacctttttttcccatcaagtgcaagtcaaatggtcctaaaataacaaccaggtttcccacttactgcattcaggctgcaaaatgctattgagacacttctttctccttcatattcactttaacctgctgtttttggaatcacatggtgctgggaaaactgaatactagagtttaaaatcccccttctccttacagcaggcacaatagcccatttgtccagggctgtcacacacagaggccctcatgctgccttgtgagttcagtgagggcaggtgggacctcttcctcccaatggatagagaaccaatgtcaccacatcaaggtgaatactcatactgtgttccttttcttggaaacaattatgacgtgaggagaacagggatggttgaggctttaattgcaccaggaaatttgtacgatgcaagggaaaaagaataagtattgggcctttggggtttttaaaaaaattattgatattggtagttgtaggagtttgaaaaattttgtgaaaaggaacctatcgtgttgaagagatttaacatgaaatggtggttgtgctgggtattgtggggaggtccctagagggaggcagtgggagaagagaatggttctgttgtggcataaaggaaatctttagtaggacatcatgtgagctatgagaaacccttcaaaatatagtccttttggtatttttatgtaaaatgttcccttgtggttaacaatgaagagaatcctgatagatactgctatgc

SEQ ID NO: 67559 - DNA, 508 bp, Homo sapiens
tggaaaccatcattctcagcaaactatcacaaggacagaaaaccaaacaccgcatgttcttactcataggtgggaactgaataatgagaatacttggacacagggcggggaacatcacacactggggcctgtcgggggctgggggcctgggggagggatagcattaggagaaatacctaatgtaaatgacgagttggtgagtgcagcaaaccaaaatagcacatgtagacctatgtaacaaacctgcacgttgtacacatgtaccctaaagcttaaagtgtgtgtgtatatatatatataaaagataaaaaaggaatactttacagagcaggaaatacattgtactgatgatgttcatggttgtctgtytatttataaattatgcatgattacagaaggacaacatgaaagtatatgaagaacatgacagattttaataaattaaaaatgaaatttggaaactattttgtaaaaagagacaaaaaaaactttccaggagcataaagta

SEQ ID NO: 67560 - DNA, 1999 bp, Homo sapiens
tgaaaggcgtggagttcgcaagctgcgcagaaagcaattttgctttcatacctggtgttcttgtgcaccctggctagaggattccaagtgcataagttgtaatctttccaagagcagtaggttgatatcaaagactcttcagtgaagcagggaattgtggcagtacttcaaggagcgggattgcaattaactcttaagtacagattgaaggaatgccctgcttggttgctacaggctttgcttgtgcttcagagatgaatgaatgggaagcacagagcatgcagagatgataacctgccagcctgcagagagtgtgggcagagagaaaagtcacagagttggtgggaacatgtactcgttgaaatgggttttgaaatcggtcatacaaaatattttatacaatgtgataaaccaaggttctgttttccaattttaatgaccagaaaaaaaaattcaaaatccttttcatattatttttcctgcgtgaatgtgtgtgtggagtaagaggagtgtatgtgtgtggaatgtgtgtgtgttggcggggaggggagaggaatgtggttctgctaacaaggtgactctgacccggttacgtgtgggtagcaagatgtgaataaatgtcacctagtagggaactgttagtgacttcccttagcacaaagtgggtgtagtggcactatttgggggactgtagacttgtaggatagagagaaattaagctaaggaatatattgtctagtaggaaatgcattccagctttttgggaacaggtgataacaataataacaacaccacacagcattattcttccataaagagtccaattggctaaagagagctttcctaaactcacaacaggaactgaaccttttcagaaagcaaacttgattgcatataatcaactcaaattactttcttaattaataaccacttagaaaagcaactcagtagacataaaccactgtaggtcactttctctctgtctcaggctttgcagttttcaaccatgacaacatcatccagttcactgcagttgtcttatgttgccctgtcttcttgtgtctggccagaagtggtacttaattaagggggaatagcttcttttgggggccattctatccttgtgccagggatatagcacgagccaagagctgtttttttttttttatatcattttctgggtccaggcacctgtttctgccttagccgtaaatcccaggtaagaacattctgtgtgtgggcacatatgtatgtgtctgcatacggggttaagagcaaagcactccgtgtagccattccactaacacgtccaggcaagtgataacaaaaatacacccaatatagaagaaaaagaaataggaaatacaatttaaaagtcatcttgcattctgaatggtgtgtagagatagcgagcatgtctttctaacccacaattgggtgttacggacagccagaatgtatcatrtgattttggaacagtgtattttatgttttgaaagtattctaaatttgtaattcatgaccattgaatatataaaaatggggtgtgtgtcctagtgccccatttagtttttctctatcaagctaatatgataattgtatgagaatttttattgccaaagctgggaaaactgcctttttttctccgctggctgctttttgcagttccagtgatgggtgttggaagcaccggttttctcacagaactcactgtgccttctatctcaagttcatcatgaggatgatgttccattcctaggaaaggtattccgactctagtggtgtcaggactaggcttggttctgtagtaacagagactcaggtatagtgacttaaataacatcaaagtttgcttagttctcatacaaaagaagtccagtagagataataatgtaaatttcaaggcagtaaccatcttacagatagcaattttaaatgactaaaaaaattgaaaagaataaagcaattattttgaggtgttggaaagagaccaaatgca

SEQ ID NO: 67561 - DNA, 1999 bp, Homo sapiens
tgaaaggcgtggagttcgcaagctgcgcagaaagcaattttgctttcatacctggtgttcttgtgcaccctggctagaggattccaagtgcataagttgtaatctttccaagagcagtaggttgatatcaaagactcttcagtgaagcagggaattgtggcagtacttcaaggagcgggattgcaattaactcttaagtacagattgaaggaatgccctgcttggttgctacaggctttgcttgtgcttcagagatgaatgaatgggaagcacagagcatgcagagatgataacctgccagcctgcagagagtgtgggcagagagaaaagtcacagagttggtgggaacatgtactcgttgaaatgggttttgaaatcggtcatacaaaatattttatacaatgtgataaaccaaggttctgttttccaattttaatgaccagaaaaaaaaattcaaaatccttttcatattatttttcctgcgtgaatgtgtgtgtggagtaagaggagtgtatgtgtgtggaatgtgtgtgtgttggcggggaggggagaggaatgtggttctgctaacaaggtgactctgacccggttacgtgtgggtagcaagatgtgaataaatgtcacctagtagggaactgttagtgacttcccttagcacaaagtgggtgtagtggcactatttgggggactgtagacttgtaggatagagagaaattaagctaaggaatatattgtctagtaggaaatgcattccagctttttgggaacaggtgataacaataataacaacaccacacagcattattcttccataaagagtccaattggctaaagagagctttcctaaactcacaacaggaactgaaccttttcagaaagcaaacttgattgcatataatcaactcaaattactttcttaattaataaccacttagaaaagcaactcagtagacataaaccactgtaggtcactttctctctgtctcaggctttgcagttttcaaccatgacaacatcatccagttcactgcagttgtcttatgttgccctgtcttcttgtgtctggccagaagtggtacttaattaagggggaatagcttcttttgggggccattctatccttgtgccagggatatagcacgagccaagagctgtttttttttttttatatcattttctgggtccaggcacctgtttctgccttagccgtaaatcccaggtaagaacattctgtgtgtgggcacatatgtatgtgtctgcatacggggttaagagcaaagcactccgtgtagccattccactaacacgtccaggcaagtgataacaaaaatacacccaatatagaagaaaaagaaataggaaatacaatttaaaagtcatcttgcattctgaatggtgtgtagagatagcgagcatgtctttctaacccacaattgggtgttacggacagccagaatgtatcatatgattttggaacagtgtattttatgttttgaaagtattctaaatttgtaattcatgaccattgaatatataaaaatggggtgtgtgtcctagtgccccatttagtttttctctatcaagctaatatgataattgtatgagaatttttattgccaaagctgggaaaactgcctttttttctccgctggctgctttttgcagttccagtgatgggtgttggaagcaccggttttctcacagaactcactgtgccttctatctcaagttcatcatgaggatgatgttccattcctaggaaaggtattccgacwctagtggtgtcaggactaggcttggttctgtagtaacagagactcaggtatagtgacttaaataacatcaaagtttgcttagttctcatacaaaagaagtccagtagagataataatgtaaatttcaaggcagtaaccatcttacagatagcaattttaaatgactaaaaaaattgaaaagaataaagcaattattttgaggtgttggaaagagaccaaatgca

SEQ ID NO: 67562 - DNA, 869 bp, Homo sapiens
atggcaactccattctcctagtagatggttggtttaagatgggtcaatggtataattccagccaataaaatccaaagcgaatatgggagggctttcctgaaagtttcttcacycttaaaaggggaacccatggaaggaatgagccctgctatcccctttctgaaatttgaaattgttgtttgaccatgtgagtttctgcagcagtttgtctgacaatgaggaggcaagcctgcgggtgaagatgagcacactgaggatgaaagagcagggggacagaaagaactttgttcttgtttgacattgctcagctcccaacctaaccaatttctggaacctccctatctctggatgtcttgttgtatgagatgaaacattttccctatttccttgtttgatctggctgagtcaggttttctgttaactgcagtccaaagcatgataactgttacacgtgggcagagagaagacctattattatcattcagtcttcagtgtgattttaggattttaggccaattattatctcttccaagggcgtttgtattttaggtcctctattagtgaatgaaataaattatctgttctactacaggaaatagaagcatcagactggaaataggggaattccatggcagtgattacacgtgcacgtgtgcacgtgtgtttgtgtgagtgtgaggaaggggtgattcgtagatggtcattaaggcaggtctagtagtactctctagtgctaagcattttcaaggatgaattctatatccagggctcaagaagaagtttatattcttaacacacaaaaattgcttataatatgtcatttagaaaataaaaaataattctagctgttaaaaaatgattttcccttt

SEQ ID NO: 67563 - DNA, 869 bp, Homo sapiens
atggcaactccattctcctagtagatggttggtttaagatgggtcaatggtataattccagccaataaaatccaaagcgaatatgggagggctttcctgaaagtttcttcacccttaaaaggggaacccatggaaggaatgagccctgctatcccctttctgaaatttgaaattgttgtttgaccatgtgagtttctgcagcagtttgtctgacaatgaggaggcaagcctgcgggtgaagatgagcacactgaggatgaaagagcagggggacagaaagaactttgttcttgtttgacattgctcagctcccaacctaaccaatttctggaacctccctatctctggatgtcttgttgtatgagatgaaacattttccctatttccttgtttgatctggctgagtcaggttttctgttaactgcagtccaaagcatgataactgttacacgtgggcagagasaagacctattattatcattcagtcttcagtgtgattttaggattttaggccaattattatctcttccaagggcgtttgtattttaggtcctctattagtgaatgaaataaattatctgttctactacaggaaatagaagcatcagactggaaataggggaattccatggcagtgattacacgtgcacgtgtgcacgtgtgtttgtgtgagtgtgaggaaggggtgattcgtagatggtcattaaggcaggtctagtagtactctctagtgctaagcattttcaaggatgaattctatatccagggctcaagaagaagtttatattcttaacacacaaaaattgcttataatatgtcatttagaaaataaaaaataattctagctgttaaaaaatgattttcccttt

SEQ ID NO: 67564 - DNA, 1022 bp, Homo sapiens
aaggacaaaaacrtagagcaaacatcttactttatgataataatactgaccttgatagtgtagtgaaaaaataaaagaaaataaataatatgaagtctgaaaaggatgaaatgaaaataacataaatttttatcataaaaaaggatagatttttaaaatttataaaacatctttattgtgactagattgaaaaatcatgtacaaaaatcagttatatttctgagcaatcaacataagcagcaaatgtatttgctacctcttctaatagctttggatattaaaataacctcggaattaatcttacaaaatgtttttgaaacactttatctaaaaaactttatgaaagaatgttttccctttaggaaaaagaaagccccagaaacatggcagtttccaccaaaattaatataaacactcagtgcaaacttaatcaggacaggtttgtgcatgtctctgtgtgcatataaacttaacaagctgattctgaaattgatatgggagagcagaaagccaagagtggtgcagacagttctgaagaagaactaaaaggtggaggtaatttaccctccagatgtcaagattaattttgaagctatagtaattaagactattatattgattaaggagtagattaattgatcaataggacaaaatacagaatacagatacagatccactaacatggaaacttgatttatggcaaagctgttattacagatcactgcagattgatggctcttttattaaatgaggctgggagaattggctattaatactaaaaaaaaaaaaaaaaaaaggacccttgtctcacatttcacaaaaattaattccagagaaataaaagaccattatgtgaaaggtaaaactataaaactttttataaagtacattttataaaatattagaaaatattttcagaaatatttgtgaccttgggatagaaaatgatttactaaacaagaagcaagaagtgcagtcaataaaagaaaaaaatgataaattttaacacataaaataacatc

SEQ ID NO: 67565 - DNA, 1022 bp, Homo sapiens
aaggacaaaaacgtagagcaaacatcttactttatgataataatactgaccttgatagtgtagtgaaaaaataaaagaaaataaataatatgaagtctgaaaaggatgaaatgaaaataacataaatttttatcataaaaaaggatagatttttaaaatttataaaacatctttattgtgactagattgaaaaatcatgtacaaaaatcagttatatttctgagcaatcaacataagcagcaaatgtatttgctacctcttctaatagctttggatattaaaataacctcggaattaatcttacaaaatgtttttgaaacactttatctaaaaaactttatgaaagaatgttttccctttaggaaaaagaaagccccagaaacatggcagtttccaccaaaattaatataaacactcartgcaaacttaatcaggacaggtttgtgcatgtctctgtgtgcatataaacttaacaagctgattctgaaattgatatgggagagcagaaagccaagagtggtgcagacagttctgaagaagaactaaaaggtggaggtaatttaccctccagatgtcaagattaattttgaagctatagtaattaagactattatattgattaaggagtagattaattgatcaataggacaaaatacagaatacagatacagatccactaacatggaaacttgatttatggcaaagctgttattacagatcactgcagattgatggctcttttattaaatgaggctgggagaattggctattaatactaaaaaaaaaaaaaaaaaaaggacccttgtctcacatttcacaaaaattaattccagagaaataaaagaccattatgtgaaaggtaaaactataaaactttttataaagtacattttataaaatattagaaaatattttcagaaatatttgtgaccttgggatagaaaatgatttactaaacaagaagcaagaagtgcagtcaataaaagaaaaaaatgataaattttaacacataaaataacatc

SEQ ID NO: 67566 - DNA, 662 bp, Homo sapiens
ttttcgttaattcaattactgttcttttcactgttatagcccaagtatctaaaacagtgtctagcactaagtagtcaccaggtaagtctttgctgagtgaataaatcttaggaggaaaggagagagaaaatctagatcctttatagtatccatggttttctacaaacagstagaatgtaatattttattattttgcaccatgtaagttagaatcattgtggaacatcacatttatgcaattcttattagactatatctagatctcttttaaaataagcaagcaagcaaacaaacaaacagcaatgaagatacgctgaagaagttttgggaggaggacctacatctttacagtttcacccccaacttacccataccctccttcaatgaattcctagggcttcttagaaaatagtggatgcaattcaggaagtgtttgttttaaaacaccaagaatgatgactgtccaaattcagaatgtgttcatgtattccatagacaatgactgaatatctactaggttctgaaaaatgtactagttgctgcggtggataaaataataatacactgtaagacagtcaggggaagaggttggtttggtttaggatgcatgataagatatctcatgaagtatctatatactcaattttagaaaatggatccca

SEQ ID NO: 67567 - DNA, 662 bp, Homo sapiens
ttttcgttaattcaattactgttcttttcactgttatagcccaagtatctaaaacagtgtctagcactaagtagtcaccaggtaagtctttgctgagtgaataaatcttaggaggaaaggagagagaaaatctagatcctttatagtatccatggttttctacaaacagctagaatgtaatattttattattttgcaccatgtaagttagaatcattgtggaacatcacatttatrcaattcttattagactatatctagatctcttttaaaataagcaagcaagcaaacaaacaaacagcaatgaagatacgctgaagaagttttgggaggaggacctacatctttacagtttcacccccaacttacccataccctccttcaatgaattcctagggcttcttagaaaatagtggatgcaattcaggaagtgtttgttttaaaacaccaagaatgatgactgtccaaattcagaatgtgttcatgtattccatagacaatgactgaatatctactaggttctgaaaaatgtactagttgctgcggtggataaaataataatacactgtaagacagtcaggggaagaggttggtttggtttaggatgcatgataagatatctcatgaagtatctatatactcaattttagaaaatggatccca

SEQ ID NO: 67568 - DNA, 662 bp, Homo sapiens
ttttcgttaattcaattactgttcttttcactgttatagcccaagtatctaaaacagtgtctagcactaagtagtcaccaggtaagtctttgctgagtgaataaatcttaggaggaaaggagagagaaaatctagatcctttatagtatccatggttttctacaaacagctagaatgtaatattttattattttgcaccatgtaagttagaatcattgtggaacatcacatttatgcaattcttattagactatatctagatctcttttaaaataagcaagcaagcaarcaaacaaacagcaatgaagatacgctgaagaagttttgggaggaggacctacatctttacagtttcacccccaacttacccataccctccttcaatgaattcctagggcttcttagaaaatagtggatgcaattcaggaagtgtttgttttaaaacaccaagaatgatgactgtccaaattcagaatgtgttcatgtattccatagacaatgactgaatatctactaggttctgaaaaatgtactagttgctgcggtggataaaataataatacactgtaagacagtcaggggaagaggttggtttggtttaggatgcatgataagatatctcatgaagtatctatatactcaattttagaaaatggatccca

SEQ ID NO: 67569 - DNA, 662 bp, Homo sapiens
ttttcgttaattcaattactgttcttttcactgttatagcccaagtatctaaaacagtgtctagcactaagtagtcaccaggtaagtctttgctgagtgaataaatcttaggaggaaaggagagagaaaatctagatcctttatagtatccatggttttctacaaacagctagaatgtaatattttattattttgcaccatgtaagttagaatcattgtggaacatcacatttatgcaattcttattagactatatctagatctcttttaaaataagcaagcaagcaaacaaacaaacagcaatgaagatacgctgaagaagttttgggaggaggacctacatctttacagtttcacccmcaacttacccataccctccttcaatgaattcctagggcttcttagaaaatagtggatgcaattcaggaagtgtttgttttaaaacaccaagaatgatgactgtccaaattcagaatgtgttcatgtattccatagacaatgactgaatatctactaggttctgaaaaatgtactagttgctgcggtggataaaataataatacactgtaagacagtcaggggaagaggttggtttggtttaggatgcatgataagatatctcatgaagtatctatatactcaattttagaaaatggatccca

SEQ ID NO: 67570 - DNA, 662 bp, Homo sapiens
ttttcgttaattcaattactgttcttttcactgttatagcccaagtatctaaaacagtgtctagcactaagtagtcaccaggtaagtctttgctgagtgaataaatcttaggaggaaaggagagagaaaatctagatcctttatagtatccatggttttctacaaacagctagaatgtaatattttattattttgcaccatgtaagttagaatcattgtggaacatcacatttatgcaattcttattagactatatctagatctcttttaaaataagcaagcaagcaaacaaacaaacagcaatgaagatacgctgaagaagttttgggaggaggacctacatctttacagtttcacccccaacttacccataccctccttcaatgaattcctagggcttcttagaaaatagtggatgcaattcaggaagtgtttgttttaaaacaccaagaatgatgactgtccaaattcagaatgtgttcatgtattccatagacaatgactgaatatctactaggttctgaaaaatgtactagttgctgyggtggataaaataataatacactgtaagacagtcaggggaagaggttggtttggtttaggatgcatgataagatatctcatgaagtatctatatactcaattttagaaaatggatccca

SEQ ID NO: 67571 - DNA, 1615 bp, Homo sapiens
gggcaagcagatatattaaaagcaaagatacagcaggttaacattaaattttgctcatcccaggacaaacctggccacaggaggcctttgccagtattctgaaaagtgttgtgaccatctcctttaaagctcagttaaaggtttctggctggactccaggctgcttcaagctctttgcttgtctttatcattctttaaggagggacccagacacagtgtgcagaggcctgaatcctccagaccattctctctccaccatgagtcctgccgtggggacctttccggctccctttggccttatgagccagaaaatcaggctagagcctaaagagaacagaaatttcataatcaggcctgttctgtgactgtatgggggagctgaaggacacaatgggctttctatattggagactacccatcatactctctctgaccagggagaaaggacagatgctgtgtgattttgcagtctgtgatttggcttcttattctcgctgctctctacacctcattatttacttcactcccctgaaaaaaatgctccctaacaggctcagtacccaacttctgggtattgctgcccacatttgccttggttctaccttttcagattgcaggatcctgaggttttgcttggagcaactcagattctccactagatctaagatctcacctagtcctgaggatttccttaaagggaaggggaaattagatagatagatagatagatagatagatagatagatagatagacagacagatagttgctgcctttgctctacagcatctgcttggtgaagaggctcaggatctggatcctggcctctcagctctcaggaaccccattcccccctgacaggggtggcaagttcatcctattattcattaagaaatttgaaaacaatcattcaggaattttaggtcaagagctggaaaaccccaagcctccgtcacctgagcaaagggagatactgtgagmacctgcaggatacacccatgttccaccacctgcccgaagaagcctgtggttcttgtcagcttctcaagggtgaagcgcagatcattttctgcttgagcagaagagcagaccaaagagctcattgactcaaggagcatcacggcaactgagctgcacctggaagagaagaatccagggtgtgatccatagccaaggcctgaagcaatggggcccatacttggcctctccagggtgagttgtgacccaagtgctgggctttagcccatgagtggtccctcttgccattttgtttcctcccaaagagaagccagtgttggtgatttcatttctcataatctccttaggagcacaggttttggtttgtgccttttttggatcaggttccctgcattgcagctgctataattaaaactattaacaacaacacagcaccacagaagcaagttagttgctaatggaatttgctgataatgctatcttctagagaccactctagtaactggagagccttggtgtagagctgatgataaaacctgttcctgcttttgtcagccatgaggagcatttcctttctagacagaggaactgaaacccacatgccagcccaaatttaccaaaagcagtcactggaatact

SEQ ID NO: 67572 - DNA, 2018 bp, Homo sapiens
ccacctcctgggttcatgacattctcctgcctcagcctcccaagtagctgggactacaggcacctgccaccatgcccggctaattttttgtattttgtttagtagagacggggtttcactgtgttagccaggatgatctcgatctcctgacctcatgatccgcccacctcggcctcccaaagtgctgggattacaggcgtaagctaccatgcccagccaagtattctattcttaatgaacacatatatgcataatatatctattttttataatatatatatttagaattgaatgtcagagtacatatcagtgttggaggaagggaataaggaggaagcacagaaagtaaaaaggaaaaataggcaccaaaaaagatttggagaatggcagatggccaaggagatgcagctgggaagtgcctcttccatggagaggaacataatatctagtaaaccttcacattttaaacagatcttttgagagaaaacactgaaagttgacacagaggtgacacagacaccatggttgaagagggaagaaatggggcagtctgctcagagtcactagacaccaggactggcccatataccctgaacaaacccaaggaaggggtgagtgaagaaaccctgggacactacatacccataatgtatctctgagatcctagttacaggagtttctacgaccctcatagatctttggactggtaggagagctgcctcgagcacatgcagaggcacagtttgaacccacacagagcccagaaggctttgttgtgctgtgcagctgcagcaaaatgcaaccctaggtgcccatcccacaagtctccatttcatactgagtggctaagttcctgctgtctgccaggctgggagtgaaccacgcctggccggctcacatgcccaagataggccccatcaccaatgctgtgtgattaagttgcatctggtccacatgcccccttgcctgtcaaccccttcccagacctcatgcctggtcacgcctgcaagagggtgtccacagcacagcatccactgcatagcttgagtgttttgttgacagcctgggaaaagctcaccaccctgtccccaartcacagccagtgcttgaagcttagaggccagaggacaaatccgtgagcccagtcccaactccccaagactcaagtataccacccagggacattgagctgagatttgtaacctaatctcaagtgaaggaggatcctccatagtcagaatgcagagaagggtgtggtatgggttctcatgggggcatgggagctggacgcccctccctttgcaagaccagaccatgaagggtatggcctgatggtggtagcttctttcccagggagtgtccttgcacagaatgcctggagcagctcaacaatgtgggagcagatagcttggggaaagcctagttggttgggcttgccgccagggcgagtgtctgtgggagatctgctgggtcaggggagtgtaagctaggcagactccatggttgcctgctgggctgaaaatcatgggctgcagactccatactggtgttgcacccattgtgccactgccctgcctggagatcctctacccttgaaatactgcatcatcagagcaactgcagacataccctaaaacctgctctgactttggtaagcacagtggactggtgggtctctggagagttgtgtgtccctagagatgtaatcctcagtgtggaccatccctaggggaagggggagtgcagcctgccaaagcacaacatgagacaaagaaaatgcgaccatggcataagccactgaaaggagcaccaccaaggcccagaaccagacttggagaaggaattatgtctcacctccatctcccctccccagtgcactgttgcagatgcaaaaatagctcttcccataggggcccagaaagcatgcactgaaagaagttgtttctcatgattctccagtgagggcaagcatgcaccaagaccccacctgccagctcttactcttaagtccatctacc

SEQ ID NO: 67573 - DNA, 1353 bp, Homo sapiens
ggatccccaagcaggaaacctgttctctctctcctgtgaatatgcttcctgggaaagagaagggaaatagaagcggtagtgtaccttttcatgattggaaaggatctagtgatctgactgcttcttaaataaactttcaacgcatcattctcattttagtctstcctcttcaccacacttccagaagaatctgatgctgccaattcctgacacttgaaggctcttgagtgtaaaacaagttgcttcttggctttcctgctgctggtttagtactttaatttgggagttctgctaagtcttttctcactcatccaattttccaaaattgtgttattattgtttattttcccatggcccaggacttaaaaaaattcactgacaaattaactggatttggggaggaccaaatttgatgcatgtgtttaatttactccctacatctgggagctccattaaatttttacaagtataacttgacataataaaatctaaatttaattaatgtatttacccttcacctcaaaaatacaagggctttagaaactttcaatactaattaccccatattccttattaatgtttattgtttaaattctgccttttaaataccctccatctccaaattagccattgttccccattattgttgtgtataagagtgcttattcagatatagccagatgtttatacatttcttggtccaccatttcttcttgcatgtgactccttctttctgggttcagtgtccttaccattgaagtacatctttactgaagatgctgttggtgtcctgtccagaatctcttcaatgagctggcgtactcatcccttagctgctgagagtgttggctgctaatagttcacactctttccctgaggattccattcaagccaacaatttcagaaaatgcctggaaggtaacagccttcccccgtgggtagctcacagccaatgactgattgatacgggtgtacagaactgaggctccagaactccctgtgggatcagactgaggctagacttcagctaaacccatatctttcccagcttcttttcctgtcctattctgcttccttcctcgctgttcagatttcttctgagagcactccctcaggcaatcacttggacaggaatctaattctcagggtcagctgcaagagcccaatctaagacagttgatagcagtagtagttatatacacctgagtctaaggatgggattctggagtttgctcactcaccagtggtcccatcagaatctcttccctgaagatagtctcagatgtgctcctgcagtgaaattgctaacacttttacttgtagtgaaccaggacagcatataagtagaagcga

SEQ ID NO: 67574 - DNA, 534 bp, Homo sapiens
tacaaacacttttttgctgtggtatataaagtatttgctttaaaattgtatatgtatatatttactgttatctccctattttcgtgtacagtattctatatttgtaagtattgtattagtccagacaattgaatcctgactctgccacttacggctttgtgaatttggacaaattctttcatcacatgtttcggtttccttttctgcaagggtagtagagttgttgtgaaacttgaatgaaattatacatgtaaaatacgtgggatagtgcatgatgcagagtaagccttgaattacttttgttgtaatttttattagacttgccaaagtatgttcatcttattttagtcctttgtcctcatacgcrcacacacacacacacacacacacacacacacacacaatctaagaaaatgttcttagatacttctgttgcttttatcgaatttaatttattgctgcttttctttttattatgttctcctcctactttcattagggctgttttatgccttctttttttttttttttttt

SEQ ID NO: 67575 - DNA, 764 bp, Homo sapiens
ctatttcagaataatacaatcttagaaagaatctcaaagataatttaatccagtggttttcaaaaagttgtagtaaaagtacccttttggctgggtgtggtggctcacacctgtaatcctagcaggagctggagaccagcctgggcaacatggcaaaaccccatctccactaaaaatcaaaaaaaaaaaaaaaaaaaaaagaaaaaagaaaattagccaggcctggtggtacacgcatgtagtcccagttacttgagaggctgaggcacgagaattgcttgaacctgggaggtggaggttacagtgaactgagaytacaccaccgcactccagcctaggtgacagagcaagactctgtctcaaaaaaaaaaaaaataaaagtactctttaaaaaaataaaatcttattccacgttcaaatacatgaaacaggtaagtatagcattgtattagtacatttattactgagctcaaattataacaggctatttcaataaaaaatgaaatttgatatttaggtttgttggtaacagtttagtcatatattaactttgcatccagtgtttgtgttttttttatgataaatcaataaagagctgatagttgtgaattaccttgtctgcaatgtcagatattaattcattgaactgaccaagaaaaatgaaagataaagttagggaacattacagaaacttttaagttaaaccattactataatgatgcttatatttaaagaaaactaccctgattttatgcaaataatta

SEQ ID NO: 67576 - DNA, 580 bp, Homo sapiens
tattattgtggtccaagtaaatcaaaatagaaaatgtgttggtttagtagataaatatcccccatatatttaattattttcatgtatatcctagcatttttcttagaaaaacattttcttagctagaaaatgttcttttgtgacaaaatataatggagaatttaagtgaattctgcaatactttcaaagtcgaaatgtatttgctcttgctttgactttagtaagactgtaattttttcatttttttcaatgaccaacttatctgtagaaattaaaatgaattttaccactgttactgaagcttaaattttaaaaaattggtattttttaagtttattttttgtaaatacatatatttatttctaaatataaakatataactgccaaagccagttcagtatacataacacaaataatcattagtcttggaaagactaaactttctacattttctggtgagatattgtacctagtgccccttctcactttgcagtatggtctttagggaattcatatagtggacgatatagctcacagagagcagttaatattctttattgagcactactaatgaatatca

SEQ ID NO: 67577 - DNA, 597 bp, Homo sapiens
ttggccctgaggaattcttaaagcatatccattttccttgcctctacaagtgcattgttggcaaaagcaactttatttatattttcttgctcattccctccttccttgtccccctccttttttctccctccctatttctaacccatatagagtggttacttgagggaatggttttatgaataaagattgtatcctttgctcaggagccttggtgtgygattatagattaaagctttcattttgaaagtcagagcaatatacagccataaaaatagcaatagcagaattattttaattatcacatgtggaagttccagaaagattcaagacaaatacagcactgtagcttgtaggcttcaagagctaattattgagagtagggtattagaatatctgattatactgtggatgtctaatttcttcttgtactctaattatactgatgttcatgctggggctgaacaaccacctcgtggagaaagccatagagattattcctgtgtcagatattgggttgcacctgattctacacttctcaccattcttctttctgtctgtttggttttgttttagatcctatacttactcatttcacca

SEQ ID NO: 67578 - DNA, 597 bp, Homo sapiens
ttggccctgaggaattcttaaagcatatccattttccttgcctctacaagtgcattgttggcaaaagcaactttatttatattttcttgctcattccctccttccttgtccccctccttttttctccctccctatttctaacccatatagagtggttacttgagggaatggttttatgaataaagattgtatcctttgctcaggagccttggtgtgtgattatagattaaagctttcattttgaaagtcagagcaatatacagccataaaaatagcaatagcagaattattttaattatcacatgtggaagttccagaaagattcaagacaaatacagcactgtagcttgyaggcttcaagagctaattattgagagtagggtattagaatatctgattatactgtggatgtctaatttcttcttgtactctaattatactgatgttcatgctggggctgaacaaccacctcgtggagaaagccatagagattattcctgtgtcagatattgggttgcacctgattctacacttctcaccattcttctttctgtctgtttggttttgttttagatcctatacttactcatttcacca

SEQ ID NO: 67579 - DNA, 597 bp, Homo sapiens
ttggccctgaggaattcttaaagcatatccattttccttgcctctacaagtgcattgttggcaaaagcaactttatttatattttcttgctcattccctccttccttgtccccctccttttttctccctccctatttctaacccatatagagtggttacttgagggaatggttttatgaataaagattgtatcctttgctcaggagccttggtgtgtgattatagattaaagctttcattttgaaagtcagagcaatatacagccataaaaatagcaatagcagaattattttaattatcacatgtggaagttccagaaagattcaagacaaatacagcactgtagcttgtaggcttcaagagctaattattgagagtagggtattagaatatctgattatactgtggatgtctaatttcttcttgtactctaattatactgatgttcatgctggggctgaacaaccacctcgtggagaaagccatagagattattcctgtgtcagatattgggttgcacctgattctayacttctcaccattcttctttctgtctgtttggttttgttttagatcctatacttactcatttcacca

SEQ ID NO: 67580 - DNA, 717 bp, Homo sapiens
ccatttctttkctgtttcccgaaaaactcctttcatgtttccttctcatcactgtgttctgttgatccttgctcctcaattctcctgccagccattttccctggaaatgttctaccattaacaagtgtctgactgtttaatgttctctctgaaagttcagaaaatgacatagacaatgtctaattattagcttgcacagtatgaccagcgtcaacattgttacattttgcataattttatggacagaatctgttttacttaaatatcatcagactaatttactctggatcaatgggcaggctgataacaattataagatgattgtgcagacatagcctattataggggcatatccatttcatcctaagtgatcaaaaaagaagtggcataatgttttgatgtattaactggtgcgttttattacactattttttgagatggggtctcactctgttgcccaggctagagtgcaatggcatgatcacagctcagtgcagcctcaaccttctgggctcaagtgatcttcccacctcagtatcctgagtagttgggaccacaggtaatgtgctaccacacttggctaatatatttttatgttttgtagaaatggggtctccctacattgcccgagctgatcttgaacttctgtgctcaagtgatcttcctgccttggcctctggaaatgctgggattacaaggtgtgagccaccgcacccg

SEQ ID NO: 67581 - DNA, 1104 bp, Homo sapiens
aggcagccttgataaaccaccagtcaggaacttctatttgttcagctccctggaagctctccaaaccctgtcctcttgggtctttatggagacctcattggataggcatgactgaaaatggacaacctgttaaaatgcgattggacaaagggtatgatctaatactaacagactgagtggggtaacccagcagggactgtctgttcagattcttcttggtctctctgtgcaccatgccttcctccatggtatggggcaggaacccttctgaaatggaggtgttctgacctatgatcagacaaggtaggtcagaaaccagctccagaaaccaggaaaaagttcctgccttggggagagaaagaaataggtgaaaggagggcagaaaaggtaagagagaaaaaaagaaattctgttttctgaggcctgcttctgaagcctaaagcaccctaacattgtaacaagggctatgggagtcatgagctaggaaccgtggataacctagatagacaaacagacagagagatagagagatagattgatagatagagatagagatatgtataataatattgcagtcgttttcttcccccctttttgtttcagttagtaaagtggtcaggagtggttgagtcacacagttccctcacctactagctgtgtgatcttctgcaaattatttatcaatggagtacccacccatagcttttgagagcatgaattgaaagcgaggaagcataaaaagtgcttagcacagtgcctgggtagaaagctgtcaatacattgatctatgtgatgctgaccatcttgggaggccagagataaagctgaataattttcaaagcactaaattttttcctccaagttactgcagcttgaaattctgtgtttgataatttaactgatggctgttttatctcctgagattgcaggagccctgcctgttttgctcgttgttgcctcactagcccataccagagtgcagggtgcgctgtaagccrtgaccgcatcacagatcatcagcatgcagaggtaatgtaagttccaatagtaaacacaagggagtagtgttctcccacctgtcctcacactggttcaattcagaaa

SEQ ID NO: 67582 - DNA, 510 bp, Homo sapiens
attccattgtagattgtgtgaccatgctctgtggtgagtattacttactaggatagggaattactggccactcttgaactgtatatgacaatgacattccactgactttgattactagttttcctaagtagaagggctacattaaaaactggctaggactatataatataaagaaaagatcaatcctatcttcagccaaagccaaccagacttgctcttgtaattaatggtcttggctgatgtcaggtagaacagttagataatacactcaaaagaacacgtaagatttggttcttccatatagagataggacgctgagcattctagaacaygtcctgattttggaagcaatttatagtatatgcttggcttctctcttccaaatgctatggccttctcattctcaagttgtgtaaatagttattgatagtaccatgagccatttttacatagtcataagtgccaacagtgttgtatcacatctcaagtcttggattgcattctgttcct

SEQ ID NO: 67583 - DNA, 755 bp, Homo sapiens
cagcagcctctaactcagcagggtctggccttttctgctcccaccggaaggcaggctcaaagatgctcagcaaggatggcctggaacccaggtgatcccctcccaccaccctcagtgcacccttgcacacctcactgtccatgaggaccaccccagcaaccaccctcagctagcactccttggggctcctgctgcagcaggtgggggcaccaggccatcctrggctgccgggacagagagagatgccgggggacctgcagctccaggccttggcttcctctgtgcctcctgcccaggttcccagacaagtggagcaggcctcttcctctgtgctgcgttcgccccctggaagctctttcctccccatgagaggggctccctgaagtctccagctccttgagaaacctccaccatcctgccagccccaccaggctgggtaggttgtcattcctgaagtctcccaggtcggagatgggggcatgagagtccagaaaactgggtgaagctgcctttcacataatagatctatccagaacactgtcccctccacccacctcaggctgccagacgcccgagggcagtgcttgggcagcaacaaggggagcggcaatggcagagcagcaggagtaaggaagtggggagctaccagtggccgggtctgctctgtgccaggggctgccaggccaatctgagagaggggagaagaggacagagagatccacagtgtttggcaactgggggagtgagccccttgg

SEQ ID NO: 67584 - DNA, 755 bp, Homo sapiens
cagcagcctctaactcagcagggtctggccttttctgctcccaccggaaggcaggctcaaagatgctcagcaaggatggcctggaacccaggtgatcccctcccaccaccctcagtgcacccttgcacacctcactgtccatgaggaccaccccagcaaccaccctcagctagcactccttggggctcctgctgcagcaggtgggggcaccaggccatcctgggctgccgggacagagagagatgccgggggacctgcagctccaggccttggcttcctctgtgcctcctgcccaggttcccagacaagtggagcaggcctcttcctctgtgctgcgttcgccccctggaagctctttcctccccatgagaggggctccctgaagtctccagctccttgagaaacctccaccatcctgccagccccaccaggctgggtaggttgtcattcctgaagtctcccaggtcggagatgggggcatgagagtccagaaaactgggtgaagctgcctttcacataatagatctatccagaacactgtcccctccacccacctcaggctgccagacgcccgagggcagtgcttgggcagcaasaaggggagcggcaatggcagagcagcaggagtaaggaagtggggagctaccagtggccgggtctgctctgtgccaggggctgccaggccaatctgagagaggggagaagaggacagagagatccacagtgtttggcaactgggggagtgagccccttgg

SEQ ID NO: 67585 - DNA, 532 bp, Homo sapiens
caggaagtgtcctcatccccttccacctccacccctccccaggggctcgcagaggaagctgagcccaggcctgctcaagaaggcrccccgacatggccttggtgtgaccccatcaggtctcccgactcaacacacatcacatgcaccgggggcatttcaaatgcttctccacctgacgtcccaaggcccaccctcaaagcctgccactctgcctccactccttcatagccctgagtccacttcacacctgcctcagcccccatacccttcctgtgcccactctggccaggtcaccggcccctgctctccacccacccacttcccaggagctaattccagcctccagtccagattagaactgccaggatctgctggtgaggtctggaggggccagcttcctggcagaggagtaattacaggccgctttgccaaggagggaaggaggcctctcttctgacctagaggtgccaaggtggcagctctgcctctaaaacaactgagtgcaagaagagccaggaggccaaacagagag

SEQ ID NO: 67586 - DNA, 751 bp, Homo sapiens
tgcagtgtgaaaatggctaatacaataagcatgttatttagaaatatatagacaaatactaacagcatctcatcagtgtagtataaagtgggagagaaagaaataagcccctaacatattttatgctccttggaaaatagtttctaaaggaaggaccaccttctcagcagaaggaacttctctatgtgtcatagtcatgtgtctacatccttttctaaagacctatcaatcttttctcaagaagttacagagccaccacactaccatcactctagtctcaagaattccaatgctacttacatatgggtattcatttttgtctagtttatatttgctgccagtcctttcctgaagaatttggtctttccattttcacattcaaatttccttttttactgtggtccccagagctacggcctacatgtgctactgcaacatgatggccttcctgttaaataaatgtcgaacacacgcactttctgttcctcaggctgatgtggctgtgctgactgattaccacttttatcaatattgatggcctgattagattcccattacagcaccyttcactctggtacctaattgaattagagtctggaggcttaaactacacaagctactcctgctcttaaaatatgcagatggtctttaaggaaagatactccactcccaactaaattatatacacaacagacatggtctattatggtattaagctctaatataggtgtgtctgctgtgcaggcagctg

SEQ ID NO: 67587 - DNA, 1271 bp, Homo sapiens
tcctgaaattcaacagcatgtgtctgcttggcttcctgcccctcactccccagagcccccaaatggtgaatttccttttcctggccccctgccggcttcagcagtcaacttatactttagtaataagcagtgaagaacacagctcctgtgatrtggcatttgtgcttcttcagcaataaaactattccagggccctcagttgggaacagtggaagaatttggaggtcagtttcctgttgtggatcagagaggagggctcagaatgtacatgaatcttcatctgcaccctgaggttgcacagcaagaataaggacagtaagtaccaaaagcttaggtggctcaggttgagcaaagagtctcccagtctcccagaatcctgccaactcagcgatgattttacttttgcccgtttccttctgggcttcgtgcacttgcatgcagctctctggaagctgtgattgtggcaggcccacgggacgtctctcgccactcacctaggctgtgtttatgcatttcaacatgtgcccagccagcatgtgctgcctcagtgctgggccctgggcggacactgagtagggaccggtgatgaaaggtgcgcagagctgacgttctcgtagggcagagagaggcaaaattaagcaacagctccggcttctgggcattttgtcgtgtttgctgaggagcccttacatcatcgcattccgtgttcacattccatgcagtgagtggaagtactgtttctcatgctgttgctgtgtgtagcacgcgcggcccttcacattctttcctgtcgtcttctgggatggggggtgatgtggacctcgtagcgcatgtggcttttccgttgtgtggattatttttgtaaagctgatacttagaagtagaattactgaatgagtcaaaacttaggaacttatatttttaagtattttggaatgtttcaaacagaaaatttcaaagcagagagcataatttcctcagccctcatgtgcccacctcccagctgcagtaagtacccatctcagccagtcttattttatctcaagccctccgagctctcactgaattattttaaagcacatcgcagtcctcatgttacttcttctgtgcatatttcagtacgtacctctaaagaagggggatcttttaaagaaggcagtcacaccgccatgattgcctcttaaacaatggacagtcgctacttaccagcaaacatctggtcaatgtttagatgtttccactaatctcacaggctttttgcagctggatca

SEQ ID NO: 67588 - DNA, 718 bp, Homo sapiens
tggagaggagccaaggactgacatccaacctaagccacattgaaaagacccagccacacactggagacccagtcacagaaaccagtccaatcatatgaatttcgactttggtccaagacagattcccaacctcaatcagttctcttgtacattgcaagcacataaaactccccctccagacttgagtccccagctgcaaatgagggggctggaaccgtgatttatttgcagctttcagcatggagagtctcagccctgatcccacaagctgttcagtcyctgacactcagtggcatggcctggtgtgtcagaggtgtttgaaccagagcgactccatcttgaatagggcctgggtaaaatgaggctgagacctactgggctgctttcctaggaggttaggcattctaagtcacaggatgagataggaggtcagcacaagaaacaggtcacaaagaccctgctgacaggacaggttgtggtaaagaagctagccaaacccatcaaaaccaagatggtaatgaaagtgacctctggtcttcctcactgctcattatatgctaattataatgcattatcatgctaaaagacactcccaccagcgccatgacagtttacaaatgtcatggcaatgtcaggaagttaccctatatggtctaaaagggggaagaaccctcagatccaggaattgcctgcacctttcccagaaaactcatgaata

SEQ ID NO: 67589 - DNA, 718 bp, Homo sapiens
tggagaggagccaaggactgacatccaacctaagccacattgaaaagacccagccacacactggagacccagtcacagaaaccagtccaatcatatgaatttcgactttggtccaagacagattcccaacctcaatcagttctcttgtacattgcaagcacataaaactccccctccagacttgagtccccagctgcaaatgagggggctggaaccgtgatttatttgcagctttcagcatggagagtctcagccctgatcccacaagctgttcagtctctgacactcagtggcatggcctggtgtgtcagaggtgtttgaaccagagcgactccatcttgaatagggcctgggtaaaatgaggctgagacctactgggctgctttcctaggaggttaggcattctaagtcacaggatgagataggaggtcagcacaagaaacaggtcacaaagaccctgctgayaggacaggttgtggtaaagaagctagccaaacccatcaaaaccaagatggtaatgaaagtgacctctggtcttcctcactgctcattatatgctaattataatgcattatcatgctaaaagacactcccaccagcgccatgacagtttacaaatgtcatggcaatgtcaggaagttaccctatatggtctaaaagggggaagaaccctcagatccaggaattgcctgcacctttcccagaaaactcatgaata

SEQ ID NO: 67590 - DNA, 456 bp, Homo sapiens
aaaagtaatgtcattactcttaatgccaaaaaccacaattacttacttttaatggcaaaaaccacaattgcttttgcaccaacctaatacttatccccattttagaaacaaagtagcccagaaagctctggtttttcccctcacatgtgcctgraacttcctccagcagctgcactgcaggacgcctgaacgcccacggtgtgctccttgcagtctcccctaacgccatcccttcctggtccccacagccatcttcaacacagtggctggaaaggactcactttaggggaatgtccttggggggccatctccccaagctaccctgacacttgtttttttgaaaatctgataagatatacacaacacagtatttttcattttaaccattttaaccattcataagtgtacaattcagtgatgttaaatgcattcaccactatctacacctaaaatttt

SEQ ID NO: 67591 - DNA, 656 bp, Homo sapiens
ggtgcacacctgtaatcccagctactcgggaggctgaggcaggataatttcttgaacccaggaggcggaggttgcagtgagctgagatcgcgccactgcattccagcctgggcgacagaacaagactccatctcggggaaaaaaaaaaaaaaaaggaaaagaagaaaagaaacatcccaaacacacagagaagttagaaaataatgtaatgactgtccaaaaacccctcaaatttagaatcaacatttttaaatatttagggccatgtaaactttcttccgtgttgtatcaccaatagagctaggtaatagggktttgttttctatgtttgaggtacgatactacctttagtgggtggtggtaggaacgcctgaagcagagacctcaaagggaatcaaagggtaactgccacgtgatgatagcaaaaccagagtgcagcagcaatcttttccccacctgaagacagttgctctgagacagttgacccagaccaaccccagctaactttgtagggcaaagttagcccctgaaagttcacttgggagaatgaccactacctagattgccactagagaaagcttcattgttcacattgtgggactagttcaagccagaatcatccagatgctcttggtatgggccggcatttacggtct

SEQ ID NO: 67592 - DNA, 656 bp, Homo sapiens
ggtgcacacctgtaatcccagctactcgggaggctgaggcaggataatttcttgaacccaggaggcggaggttgcagtgagctgagatcgcgccactgcattccagcctgggcgacagaacaagactccatctcggggaaaaaaaaaaaaaaaaggaaaagaagaaaagaaacatcccaaacacacagagaagttagaaaataatgtaatgactgtccaaaaacccctcaaatttagaatcaacatttttaaatatttagggccatgtaaactttcttccgtgttgtatcaccaatagagctaggtaatagggttttgttttctatgtttgaggtacgatactacctttagtgggtggtggtaggaacgcctgaagcagagacctcaaagggaatcaaagggtaactgccasgtgatgatagcaaaaccagagtgcagcagcaatcttttccccacctgaagacagttgctctgagacagttgacccagaccaaccccagctaactttgtagggcaaagttagcccctgaaagttcacttgggagaatgaccactacctagattgccactagagaaagcttcattgttcacattgtgggactagttcaagccagaatcatccagatgctcttggtatgggccggcatttacggtct

SEQ ID NO: 67593 - DNA, 986 bp, Homo sapiens
agaaaacatcagacaaacccaaatagagggacattcaacaaaacggctgatcaaccaacattttttgaagaaaactcgagcctctgcttttgtattctattgttcctaaaatagcttggggaaaactgcctgctgaggtagaaaattagggttttaaaatgcaacctcatgagggagaaatggtgcttctctctggccatggagacagtcttgagcaagcagttgaagatgtgaattctgatctcagctccctcatgtcacacagagggctccccaatgycttcctgtaaaatggaatgaccctttcttatgtctcccaaaggatggtctaaggacctggtgatgctgtgtggaggggcttagtgattctcaaggggtgatgctcatggagggtcttatctctcaactccaccagcgatccaacaagatgagaagctgggagacccaggcaagccagagccttgttggtcaatcaactccccatcactcttaattagctgtcatcttcatgagaaaccaggaaggagaggagagagaaaaaatgttccagatttctaccccagccttttctaaaagcctaaaagaaaagatcttgtagaatttcattcaacaagtatttttgaccacccactgtgtaccaggcacattcaagggttgggcacctgtgagtgaaggaatagactaaaatatctggcccttggaggtaatatgttagtgaaggaggcagacagtaaacaaaataagtacataaattaagtaaatatttgaaggtgatgaaattccatctttgaactgatgaaattccatctttgaactggtaaaagttgaaatgctttctgataaaatccctgctgggaggcagatggtctctgctgatgaatggggatggttacaaaataacacatagcatacattaggggtgggagtatgggtgttgccaaatgtctcacccacttgagctttctcattttaagtttcaaatcaaa

SEQ ID NO: 67594 - DNA, 986 bp, Homo sapiens
agaaaacatcagacaaacccaaatagagggacattcaacaaaacggctgatcaaccaacattttttgaagaaaactcgagcctctgcttttgtattctattgttcctaaaatagcttggggaaaactgcctgctgaggtagaaaattagggttttaaaatgcaacctcatgagggagaaatggtgcttctctctggccatggagacagtcttgagcaagcagttgaagatgtgaattctgatctcagctccctcatgtcacacagagggctccccaatgccttcctgtaaaatggaatgaccctttcttatgtctcccaaaggatggtctaaggacctggtgatgctgtgtggaggggcttagtgattctcaaggggtgatgctcatggagggtcttatctctcaactccaccagcgatccaacaagatgagaagctgggagacccaggcaagccagarccttgttggtcaatcaactccccatcactcttaattagctgtcatcttcatgagaaaccaggaaggagaggagagagaaaaaatgttccagatttctaccccagccttttctaaaagcctaaaagaaaagatcttgtagaatttcattcaacaagtatttttgaccacccactgtgtaccaggcacattcaagggttgggcacctgtgagtgaaggaatagactaaaatatctggcccttggaggtaatatgttagtgaaggaggcagacagtaaacaaaataagtacataaattaagtaaatatttgaaggtgatgaaattccatctttgaactgatgaaattccatctttgaactggtaaaagttgaaatgctttctgataaaatccctgctgggaggcagatggtctctgctgatgaatggggatggttacaaaataacacatagcatacattaggggtgggagtatgggtgttgccaaatgtctcacccacttgagctttctcattttaagtttcaaatcaaa

SEQ ID NO: 67595 - DNA, 654 bp, Homo sapiens
ttttgccccaggtggctgcaggttcttcatctgtcttacaatatttccaataaatgatcactgtcttttccaccctgagtgagttccaaattaggctaaacaaagacaagcaccttgcttcagtccttcatgtagctccgagacaggatagaagagacaaacacagttctttgtgagtaaggtctgctctcctccctcagaaccagggactagggccccataccgggaacacagaactaatgtcttcaagatcgctgccaagctggggagagggtggagcaagcacaagtaaaaagtcacgaagctggctgggtgcggtggctcatgcctgtaatcctagcactttgggaggctgaggcaggcrcatcacctgaggtcaggagtttgagaccagtatggccaacatggcaaaaccctgtctctactaaaaatacaaaaattagccaggtgtggtggtatgtgcctgtattcccactactcgggaggctgaggcaagagaatcgcttgaacccttcagcctgggcaacagagtgaggctccgtctcaaaaaaaaaaaatcacaaaggctttctgcaactttaaaattgcctttctctttattccacatttacctgattgctataaagtttggagtgtttttcaacattctaacaa

SEQ ID NO: 67596 - DNA, 963 bp, Homo sapiens
tgcatgaagagctggtctacaagctagaggtggaccataagaagataagaatacattgggaaagagctgcttttccactgggagcagagcagaaattgtgtttcccatggcatatacgtgtgctacatggragggaaccagcccaggttcatgacaaaaaggacctctcaaagagggcttcttgaaaagggtgaggcaactctgtagacagtggagtatattagatatctaaaactgagagtatattttaagcaatgttgttctcataaatgtttaatattcagctcttttttgaaaaaaactacgactcatgtgaaaaatatgtatgaggcaattcacaaataattatgaaatatgcaatatttatattgtaaatttaaatagccaaagcattccctagcaaccttttctttccttgatttttcctgaattcttgaatccctagccaacctatcattccaatggataaattagtataaatctgaaatgatggtggttgatatttttgtctacattgatgagcaaaatgaaagtaaaacagcaaagacatacattgggccctcatttgctcttaataacataatgacttccttgctgattaaataatcgttttcaaatactggaaaagagagccttagttgtttgtgctattcacagtgtaatggttgcaagcagaacatacttttattaatatttctctcataattttattgagtctatacaaccaatcaaacaataaataaggcctttatttatagtatttgccctatggtgttcatacttccaccgtggccaatttaaacctaccaatatgatgtcactgaatgcagaattagaaagcattttacattgttcagtttttcaccattacacagtcaatcttcaatatttgtgtattctatacgtgtgaattacacttctggttaaaaatttatttgttaccccaaagtaatgtttatggtc

SEQ ID NO: 67597 - DNA, 963 bp, Homo sapiens
tgcatgaagagctggtctacaagctagaggtggaccataagaagataagaatacattgggaaagagctgcttttccactgggagcagagcagaaattgtgtttcccatggcatatacgtgtgctacatggaagggaaccagcccaggttcatgacaaaaaggacctctcaaagagggcttcttgaaaagggtgaggcaactctgtagacagtggagtatattagatatctaaaactgagagtatattttaagcaatgttgttctcataaatgtttaatattcagctcttttttgaaaaaaactacgwctcatgtgaaaaatatgtatgaggcaattcacaaataattatgaaatatgcaatatttatattgtaaatttaaatagccaaagcattccctagcaaccttttctttccttgatttttcctgaattcttgaatccctagccaacctatcattccaatggataaattagtataaatctgaaatgatggtggttgatatttttgtctacattgatgagcaaaatgaaagtaaaacagcaaagacatacattgggccctcatttgctcttaataacataatgacttccttgctgattaaataatcgttttcaaatactggaaaagagagccttagttgtttgtgctattcacagtgtaatggttgcaagcagaacatacttttattaatatttctctcataattttattgagtctatacaaccaatcaaacaataaataaggcctttatttatagtatttgccctatggtgttcatacttccaccgtggccaatttaaacctaccaatatgatgtcactgaatgcagaattagaaagcattttacattgttcagtttttcaccattacacagtcaatcttcaatatttgtgtattctatacgtgtgaattacacttctggttaaaaatttatttgttaccccaaagtaatgtttatggtc

SEQ ID NO: 67598 - DNA, 963 bp, Homo sapiens
tgcatgaagagctggtctacaagctagaggtggaccataagaagataagaatacattgggaaagagctgcttttccactgggagcagagcagaaattgtgtttcccatggcatatacgtgtgctacatggaagggaaccagcccaggttcatgacaaaaaggacctctcaaagagggcttcttgaaaagggtgaggcaactctgtagacagtggagtatattagatatctaaaactgagagtatattttaagcaatgttgttctcataaatgtttaatattcagctcttttttgaaaaaaactacgactcatgtgaaaaatatgtatgaggcaattcacaaataattatgaaatatgcaatatttatattgtaaatttaaatagccaaagcattccctagcaaccttttctttccttgatttttcctgaattcttgaatccctagcyaacctatcattccaatggataaattagtataaatctgaaatgatggtggttgatatttttgtctacattgatgagcaaaatgaaagtaaaacagcaaagacatacattgggccctcatttgctcttaataacataatgacttccttgctgattaaataatcgttttcaaatactggaaaagagagccttagttgtttgtgctattcacagtgtaatggttgcaagcagaacatacttttattaatatttctctcataattttattgagtctatacaaccaatcaaacaataaataaggcctttatttatagtatttgccctatggtgttcatacttccaccgtggccaatttaaacctaccaatatgatgtcactgaatgcagaattagaaagcattttacattgttcagtttttcaccattacacagtcaatcttcaatatttgtgtattctatacgtgtgaattacacttctggttaaaaatttatttgttaccccaaagtaatgtttatggtc

SEQ ID NO: 67599 - DNA, 618 bp, Homo sapiens
ttcttcacagcccttcaatgacaccgaataagaccaggtagtgccctttcctccaaggaaagaatcattgagtttagaggattggaaggatgcagaaggctgaacaggsgctaccaaaccaagcaaagtaacctcacaactagacagagggtttttgttttttgcatggcttctggaaggactaaagagtacctaagcctcccctccctatggaatattcccttatgacaggaaagatggaatgacttgagtacttttttgaggaaactgtatatagtatcctctgcaaagaccactaacatcagactgaacaaggtctaactggagtagtgattaaggataatttctatgccaacatacacttcgataaataagatctctgcctctactttcctgtatctctggccccgacttttgaatagttaaatccagaaaaggaaatgacccagagcctggctgagatctctctccaggccaaggtactaaagtaggaagaggaaaggaagtagatcccatcccctgcccaattctaagcaccttcaacctgtcccgggggaatctgtattgagtatgagatggaatttaatatggactggactaagtttaattcagccatgt

SEQ ID NO: 67600 - DNA, 618 bp, Homo sapiens
ttcttcacagcccttcaatgacaccgaataagaccaggtagtgccctttcctccaaggaaagaatcattgagtttagaggattggaaggatgcagaaggctgaacaggggctaccaaaccaagcaaagtaacctcacaactagacagagggtttttgttttttgcatggcttctggaaggactaaagagtacctaagcctcccctccctatggaatattcccttatgacaggaaagwtggaatgacttgagtacttttttgaggaaactgtatatagtatcctctgcaaagaccactaacatcagactgaacaaggtctaactggagtagtgattaaggataatttctatgccaacatacacttcgataaataagatctctgcctctactttcctgtatctctggccccgacttttgaatagttaaatccagaaaaggaaatgacccagagcctggctgagatctctctccaggccaaggtactaaagtaggaagaggaaaggaagtagatcccatcccctgcccaattctaagcaccttcaacctgtcccgggggaatctgtattgagtatgagatggaatttaatatggactggactaagtttaattcagccatgt

SEQ ID NO: 67601 - DNA, 618 bp, Homo sapiens
ttcttcacagcccttcaatgacaccgaataagaccaggtagtgccctttcctccaaggaaagaatcattgagtttagaggattggaaggatgcagaaggctgaacaggggctaccaaaccaagcaaagtaacctcacaactagacagagggtttttgttttttgcatggcttctggaaggactaaagagtacctaagcctcccctccctatggaatattcccttatgacaggaaagatggaatgacttgagtacttttttgaggaaactgtatatagtatcctctgcaaagaccactaacatcagactgaacaaggtctaactggagtagtgattaaggataatttctatgccaacatacacttcgataaataagatctctgcctctactttcctgtatctctggccccgacttttgaatagttaaatccagaaaaggaaatgacccagagcctggctgagatctctctccaggccaaggtactaaagtaggaagaggaaagraagtagatcccatcccctgcccaattctaagcaccttcaacctgtcccgggggaatctgtattgagtatgagatggaatttaatatggactggactaagtttaattcagccatgt

SEQ ID NO: 67602 - DNA, 2137 bp, Homo sapiens
gaaaactgaggtttataccttgagaatgccaagtcattgtttcaatccaattgaaatctgaaatagtcattctgaaagagaactgaaaggcattttttgaaatttgggcaaacatatgcgaaagtataaacatattcagttgaaaggtacttaaaacacgtatattgatatgtgtgagccattgtgtgctacaattggcttatacctgcctgggtttcaggaatttgcgagttgaacatgctcatgattaaatattaaattacataaactaacagatatgttaaagcaagaagtaataaattctaaataattatgtattgattatgttaatacattttagtgttatctatgctcttgaggttacttacgtttattgcattttatactagaaacaccattttctagtagggtactgaacatctcttctcagtaccacttttagtgacttcattgtgatagctcaaaatcagcaaacactaccaagcagctagcattttggcccactaaaagctgattgttacttatttaatatacctctgtttacaagattacaaaaatacatttactgttraaaatccttaaacatatatagttaagaaaaaaggaagacactaaatatacatcaacaattttatcaatagcagtatcaacttgtacaaaatggacttgtatgtttacgttcataccactccacattttagctaagaatagcaattttatgtttgaactgaactctgttattgtattattatattatagctgaactctgttgttgatttattttgtcaatatccttcatactcttttaattgtgatatagtgtaaaattaaacaaaacaaaatgggaaaattaaaaatacaatgaaaataagattgattattagaagcaaagttgtggatgtcactatgtaactggaataagttaatttattcatataaggactgatttggttacagattttctagaagaaaagtaaaagtggatcctagttatattgtgctttttatctgaagagacattcattttttttgctactaaatacaagaggcaacatattaggagcactagattaaaatctagtaaatagattctgaatgtatgttttttgaatatataaattcatactcaaactacagttaaattgattttttttctgattaccttctatgtaaaccaaaaatgtaactttaacatgtggaagagatttctctgaaagagtgaaagcttaaaaacaggacagaaagaaaccttctgttttcaacaatatttattatcctatatgtgtgccatggaccataaagattttacacaacaggtgtgtttctggtttattagacctaaaatatgagggatgtgtttattctcattttgcaaatgatagaattaagagagagatttgtattattctcattttgcaatctatagaattaaggaccatttccattaaaagacttgctcaaaaacacacagctcataagttgtgatgcctgaattgtacccagccagtctagtgtcagaattcaaacacagaattgctatgcttaggattctcttgtaaattatggctccattagattgtctcaaatatcacatattgtcaaatgctcagtcttcatcaaacagccacattatcctttctcactgaaagagaaaccacatgcttaagattttaagtacataagaagtaaattgatgagctttttttcatatgtttgttggccacatagatgtctttttttgagaagcgtctgttcatatcctttgcccactttttgatgcagttgtttgtttttctcataaatttgtttaagtttcttgtagattttggatattagtctttagtagatggatagcttggaaaaatgttctcccattctataggttgcctgttcattctgatgataatttcttttgctgtgcagaagctctttagtttaattagatcccatttgtcaattttggcttttgttgccattgcttttagtgttttagtcatgaagtctttatccatggctatgtcctgaatggtattgcccaggttttcttctaggatttttggagttttaggtcttatgtttaagtctttaatccatcttgagttaatttttatccatcttgagttaaggtgtaaggaag

SEQ ID NO: 67603 - DNA, 944 bp, Homo sapiens
gcataactctccaactctatggaagcttargctgtctgaggcctttgttttgttagattgcattcagtattgattcagccttcatatgctttattttatagttttactaaagaatacgtttttctgcttttattatgtttgtacattacggcttatcaattattcttaatttgtaaaaaccaagtccaccaacttagaagtgtatatcaatattttaaggtattaagtcttaaaaatgagcgaatgtttataaattgagaaaaaacatgtctttgcctttaactgttcctttgagagttccaaagagttaagagtgaaaactaagtctatttgttgctactctgtttttaaaaaccaaaacaaaacaaacaaaaaaaaaaacggtctctcccttgttctgccagtcttcctctccccacaaccccagctgcaaaagaggggtaaaatggtacttaggaatcttaacctaggggaggcagagcagaacatttttgctcattaagatttttaaggtttattcaatccactgaaatatggattgagatatttgactgaattttgaccaatgaggctgttttttctaatgaaataatttgttgtcattgactttttgggtagttttacgatcttagcattttatattttgtcaaggattgaatgaagaggagagacatttgtataatttagattattactaattagagtttattttaactatatttgatatgaaactggtcagccgtttccaccattattattttaacagaaaccaaagaaaccaccacctcctgctaaggctccaggtatgtaagaagcatattattcagtttgctattttccattttttaaaattctaaaatggtaaaattggatctaatgcaaactattgatttttatcaagtatgatgtctgtaaacatttttagaaatatatgaaaattgagt

SEQ ID NO: 67604 - DNA, 1249 bp, Homo sapiens
gagttcaggttgctgaggcacctgagagaggaacatgaccaaacatagctctcactaggaaaaacctccacttgaagaaaacaagaacattttgtcaaatagtatagaacatgctaacaatagtagtgtttataatacttaaaaaaatctatttttatcaccaaagacaggaaggaaggctgcattctcttgttgagaattgcaaaggatgtacttttagggagggtcatagattacagatcttgaagaagttgtgaaaaacattgggatagaaactcagtcactttgttaaactctgcatgactggcttagacaacataggagggtaagtgccttaatttgattgtagagtttggaaggaaaaactgggagagtgtagtccagatatttcctcttgcttcctcatcttgagagctgctgtcctcacaaagactgtgccttgctctgcttcttcagactgcaagttttacagatgcaagcaccatactggagttttaaagatgcaggcatgatacatacaattttacgaatgcaagcaccacttgtggagtgtacagatgcaggtatcacacataaaattttaaagatgtaggtgccatacatggaaaccactggtgacagatatgtggccttgcctaattctgaggcttgcactacagatgaaagccatattcttgaatatcacttgaccagtaataaagataatatatttcctcctctatctgccttgcacttgtatagttcatttggcaaaaaaacttagagaatggaggtgataatttattgggacccttcaaatttcaacattaggttagatatttggagggtccctgattaatataatatataggtcccaaatccatatgtatttctaatatatattttccaataacagcacaaaagagctaggtaggaacaaggctatattggtctaaggaaataacctcaaatggtaatttgaatccacacgaaaaaatgagatccaaaaatgattaaaaagaaaataaatataacaaaagccataaatatatacttgtcctttcttctttcaaagatataaaattatataaaataataactataacaatttactgttggttttgtaacatttatagatgtagtatttataacaatatcagaaaaaggggtaaaagggaatggaactatamagaaatgtttctatggttcactggaattaagtttgtataaatctgataaaatgtatatggtaagctctagagcaactaaa

SEQ ID NO: 67605 - DNA, 2084 bp, Homo sapiens
aatgtgaactttaaacatttgcagattatattttaaaaatcagtaaatagtagaaagagcatgaattatgaaagcaatacttctgcctgaaaacccatgacaagaacgatatggagtaaaagaagaaagttggcaaagtctggacaatacagcaaagaaagtcatcctgggctatggtagaggtaacctggttgagcatttccactgattttttcagtgggaataaactggaagttaatatcagaactccaacatgtgattgataaatgtaaagtctgctgaagcaaatgctttagtaaaaacatgttaaacttctggtccttattgcagttgtggtcattctccacaaatcttttattttcaaaatgctaaataatcattataggaagcttcatagacaactatccaaattgcatagattgagattctggtcaatacactgggggaaaaaacaaaacaaacaaaataaaacaaaggatagaattggaaaaaaaatatgcttcccaaaatgtctgtttctgactcaaggcacaagttagattacgtttagtaaaatatcaatcatacttttgaaaactccagtaaagaacatttcagaccatgactttagaagatattatttttaaaatggcatttcygggtgagttagtacatgatcttgacacttgtttaaaaaagagaaatcaacaacctattcaatcacagtgttcaacagtcagcggtttctaatggcccctggaatactgaaaactctgtttacaaacttaatgcacatttctaattcattgacacatttgcctaataggatagatgtaggacttaaccgggtttctgcataacggtgctcagttatacttccacatataacagtgctcttactgatcctgaaagcctgaaacagatttcatgatatatcagctctctccaattacctacccagatgctctgaaaatctcagaggttttcaaaatgaaagttattttaaagcaatttattttgtaaagatacacatctcttaagagttttttttaatctgacacttgcaagaaaatttcacaatttgagaaagactgagagtcaccttttaaaagtttcacaccactaaagtttaattaaccttgtgccatgcatatgatggaattttaaacagataagcactttctgccttgaagatgccaacctctctggggcaattggacaccatgtcaccgggagctcatggaccactctgtggtagactacagtgtcaactgcatgtggcagatgaccactagaaggatgcagtctcagcctcagatgagaaacagcctttcagaatgctgatagattttttttagttcaactaacttctctaggaaataattacgtagaatcaataactttaaattaaagaataaaggttgtgagcaaaattctacagaggaaactcctgccacaccattgctttgtaaaacatttttattttaggatattttggggtggacaagagagagtgagtggagaaaggatacacatttaaaattcaagtgtcctatcccttgctgcaaggttctgaactttctaagaacactttctaaatataggaagatttgacatgtttataactacatattttctagggaaaaagtataaggttaattacactctcaaaaatattaatattccacaaatgtcaataaccactgcaatgtgtggtctaatttgtgatttcaaggtttgcaaagtgtaattctgctcaatgagaaagactattttttaaaaaaagcagaaagacacgcttatgatcaatgtgacacaggcacttggtcccagaaaaatgtgctcatcttgtagatcaactacatatttcaggcttctgcaagtgtggacagtaaaggttttgaggttatgtcagaggctagcccatggccagacattccttttcttggtacagggtaacagcacaacagtacccagatgccctgagagattctccaacaaaatgcttttcacaagcatggtgccacagctctgagcagagcaatctcattgactcaacccttcacatagtagaaaacattttctggttgtccttcctcgtgcaa

SEQ ID NO: 67606 - DNA, 2084 bp, Homo sapiens
aatgtgaactttaaacatttgcagattatattttaaaaatcagtaaatagtagaaagagcatgaattatgaaagcaatacttctgcctgaaaacccatgacaagaacgatatggagtaaaagaagaaagttggcaaagtctggacaatacagcaaagaaagtcatcctgggctatggtagaggtaacctggttgagcatttccactgattttttcagtgggaataaactggaagttaatatcagaactccaacatgtgattgataaatgtaaagtctgctgaagcaaatgctttagtaaaaacatgttaaacttctggtccttattgcagttgtggtcattctccacaaatcttttattttcaaaatgctaaataatcattataggaagcttcatagacaactatccaaattgcatagattgagattctggtcaatacactgggggaaaaaacaaaacaaacaaaataaaacaaaggatagaattggaaaaaaaatatgcttcccaaaatgtctgtttctgactcaaggcacaagttagattacgtttagtaaaatatcaatcatacttttgaaaactccagtaaagaacatttcagaccatgactttagaagatattatttttaaaatggcatttctgggtgagttagtacatgatcttgacacttgtttaaaaaagagaaatcaacaacctattcaatcacagtgttcaacagtcarcggtttctaatggcccctggaatactgaaaactctgtttacaaacttaatgcacatttctaattcattgacacatttgcctaataggatagatgtaggacttaaccgggtttctgcataacggtgctcagttatacttccacatataacagtgctcttactgatcctgaaagcctgaaacagatttcatgatatatcagctctctccaattacctacccagatgctctgaaaatctcagaggttttcaaaatgaaagttattttaaagcaatttattttgtaaagatacacatctcttaagagttttttttaatctgacacttgcaagaaaatttcacaatttgagaaagactgagagtcaccttttaaaagtttcacaccactaaagtttaattaaccttgtgccatgcatatgatggaattttaaacagataagcactttctgccttgaagatgccaacctctctggggcaattggacaccatgtcaccgggagctcatggaccactctgtggtagactacagtgtcaactgcatgtggcagatgaccactagaaggatgcagtctcagcctcagatgagaaacagcctttcagaatgctgatagattttttttagttcaactaacttctctaggaaataattacgtagaatcaataactttaaattaaagaataaaggttgtgagcaaaattctacagaggaaactcctgccacaccattgctttgtaaaacatttttattttaggatattttggggtggacaagagagagtgagtggagaaaggatacacatttaaaattcaagtgtcctatcccttgctgcaaggttctgaactttctaagaacactttctaaatataggaagatttgacatgtttataactacatattttctagggaaaaagtataaggttaattacactctcaaaaatattaatattccacaaatgtcaataaccactgcaatgtgtggtctaatttgtgatttcaaggtttgcaaagtgtaattctgctcaatgagaaagactattttttaaaaaaagcagaaagacacgcttatgatcaatgtgacacaggcacttggtcccagaaaaatgtgctcatcttgtagatcaactacatatttcaggcttctgcaagtgtggacagtaaaggttttgaggttatgtcagaggctagcccatggccagacattccttttcttggtacagggtaacagcacaacagtacccagatgccctgagagattctccaacaaaatgcttttcacaagcatggtgccacagctctgagcagagcaatctcattgactcaacccttcacatagtagaaaacattttctggttgtccttcctcgtgcaa

SEQ ID NO: 67607 - DNA, 2084 bp, Homo sapiens
aatgtgaactttaaacatttgcagattatattttaaaaatcagtaaatagtagaaagagcatgaattatgaaagcaatacttctgcctgaaaacccatgacaagaacgatatggagtaaaagaagaaagttggcaaagtctggacaatacagcaaagaaagtcatcctgggctatggtagaggtaacctggttgagcatttccactgattttttcagtgggaataaactggaagttaatatcagaactccaacatgtgattgataaatgtaaagtctgctgaagcaaatgctttagtaaaaacatgttaaacttctggtccttattgcagttgtggtcattctccacaaatcttttattttcaaaatgctaaataatcattataggaagcttcatagacaactatccaaattgcatagattgagattctggtcaatacactgggggaaaaaacaaaacaaacaaaataaaacaaaggatagaattggaaaaaaaatatgcttcccaaaatgtctgtttctgactcaaggcacaagttagattacgtttagtaaaatatcaatcatacttttgaaaactccagtaaagaacatttcagaccatgactttagaagatattatttttaaaatggcatttctgggtgagttagtacatgatcttgacacttgtttaaaaaagagaaatcaacaacctattcaatcacagtgttcaacagtcagcggtttctaatggcccctggaatactgaaaactctgtttacaaacttaatgcacatttctaattcattgacacatttgcctaataggatagatgtaggacttaacygggtttctgcataacggtgctcagttatacttccacatataacagtgctcttactgatcctgaaagcctgaaacagatttcatgatatatcagctctctccaattacctacccagatgctctgaaaatctcagaggttttcaaaatgaaagttattttaaagcaatttattttgtaaagatacacatctcttaagagttttttttaatctgacacttgcaagaaaatttcacaatttgagaaagactgagagtcaccttttaaaagtttcacaccactaaagtttaattaaccttgtgccatgcatatgatggaattttaaacagataagcactttctgccttgaagatgccaacctctctggggcaattggacaccatgtcaccgggagctcatggaccactctgtggtagactacagtgtcaactgcatgtggcagatgaccactagaaggatgcagtctcagcctcagatgagaaacagcctttcagaatgctgatagattttttttagttcaactaacttctctaggaaataattacgtagaatcaataactttaaattaaagaataaaggttgtgagcaaaattctacagaggaaactcctgccacaccattgctttgtaaaacatttttattttaggatattttggggtggacaagagagagtgagtggagaaaggatacacatttaaaattcaagtgtcctatcccttgctgcaaggttctgaactttctaagaacactttctaaatataggaagatttgacatgtttataactacatattttctagggaaaaagtataaggttaattacactctcaaaaatattaatattccacaaatgtcaataaccactgcaatgtgtggtctaatttgtgatttcaaggtttgcaaagtgtaattctgctcaatgagaaagactattttttaaaaaaagcagaaagacacgcttatgatcaatgtgacacaggcacttggtcccagaaaaatgtgctcatcttgtagatcaactacatatttcaggcttctgcaagtgtggacagtaaaggttttgaggttatgtcagaggctagcccatggccagacattccttttcttggtacagggtaacagcacaacagtacccagatgccctgagagattctccaacaaaatgcttttcacaagcatggtgccacagctctgagcagagcaatctcattgactcaacccttcacatagtagaaaacattttctggttgtccttcctcgtgcaa

SEQ ID NO: 67608 - DNA, 2084 bp, Homo sapiens
aatgtgaactttaaacatttgcagattatattttaaaaatcagtaaatagtagaaagagcatgaattatgaaagcaatacttctgcctgaaaacccatgacaagaacgatatggagtaaaagaagaaagttggcaaagtctggacaatacagcaaagaaagtcatcctgggctatggtagaggtaacctggttgagcatttccactgattttttcagtgggaataaactggaagttaatatcagaactccaacatgtgattgataaatgtaaagtctgctgaagcaaatgctttagtaaaaacatgttaaacttctggtccttattgcagttgtggtcattctccacaaatcttttattttcaaaatgctaaataatcattataggaagcttcatagacaactatccaaattgcatagattgagattctggtcaatacactgggggaaaaaacaaaacaaacaaaataaaacaaaggatagaattggaaaaaaaatatgcttcccaaaatgtctgtttctgactcaaggcacaagttagattacgtttagtaaaatatcaatcatacttttgaaaactccagtaaagaacatttcagaccatgactttagaagatattatttttaaaatggcatttctgggtgagttagtacatgatcttgacacttgtttaaaaaagagaaatcaacaacctattcaatcacagtgttcaacagtcagcggtttctaatggcccctggaatactgaaaactctgtttacaaacttaatgcacatttctaattcattgacacatttgcctaataggatagatgtaggacttaaccgggtttctgcataacggtgctcagttatacttccacatataacagtgctcttactgatcctgaaagcctgaaacagatttcatgatatawcagctctctccaattacctacccagatgctctgaaaatctcagaggttttcaaaatgaaagttattttaaagcaatttattttgtaaagatacacatctcttaagagttttttttaatctgacacttgcaagaaaatttcacaatttgagaaagactgagagtcaccttttaaaagtttcacaccactaaagtttaattaaccttgtgccatgcatatgatggaattttaaacagataagcactttctgccttgaagatgccaacctctctggggcaattggacaccatgtcaccgggagctcatggaccactctgtggtagactacagtgtcaactgcatgtggcagatgaccactagaaggatgcagtctcagcctcagatgagaaacagcctttcagaatgctgatagattttttttagttcaactaacttctctaggaaataattacgtagaatcaataactttaaattaaagaataaaggttgtgagcaaaattctacagaggaaactcctgccacaccattgctttgtaaaacatttttattttaggatattttggggtggacaagagagagtgagtggagaaaggatacacatttaaaattcaagtgtcctatcccttgctgcaaggttctgaactttctaagaacactttctaaatataggaagatttgacatgtttataactacatattttctagggaaaaagtataaggttaattacactctcaaaaatattaatattccacaaatgtcaataaccactgcaatgtgtggtctaatttgtgatttcaaggtttgcaaagtgtaattctgctcaatgagaaagactattttttaaaaaaagcagaaagacacgcttatgatcaatgtgacacaggcacttggtcccagaaaaatgtgctcatcttgtagatcaactacatatttcaggcttctgcaagtgtggacagtaaaggttttgaggttatgtcagaggctagcccatggccagacattccttttcttggtacagggtaacagcacaacagtacccagatgccctgagagattctccaacaaaatgcttttcacaagcatggtgccacagctctgagcagagcaatctcattgactcaacccttcacatagtagaaaacattttctggttgtccttcctcgtgcaa

SEQ ID NO: 67609 - DNA, 841 bp, Homo sapiens
gggccactagtgtctggttcttccttagtttcactctcaaaaacactgatagaagtgtcttcaaaattaatcaatatacttaataatagtatcaaacttttgcccatgttgtaatctggttagaggctcattctctagttctgaaggtgaaagagctggttcttttttctacccaagtgatcccacacagagagaagacagacttacagacttgcctccctgccttctcagaaaatgggaaaatggattttaaggaagaaaggaagtatgaaaatgtggttggaaatgtatttgcacttaccaggtatgcaatgagagtttttggatagggcagtaatgctaacacttgacagaatagaacaattgtttggccgtattttgggggatctgatgttgcctttcttagccccatgagctctgagaatccacttttcttctctagtgacaacttttagtccaaaattccatgtcagattgtataggagtacaaccacctcctagaagtcacctgtgatctcctgtgggatggtttctataaggtctataccgacaaactcacccagtgaaactgagttctacagctctggttcaaagctctgtcctyacacattatagcaggcacctgatattcaaactctcactaccttctgcttgtttagttccaaatgaaaagacactcacccaccagtgctccttgtctgggtccactccagcagcttggaacccttctttcttttgggatgacacagtaactttagtataaaataagatatgggtcacatattccttgctttgaaacaccacagacacacacacacctttttgtctgtttatttttttt

SEQ ID NO: 67610 - DNA, 644 bp, Homo sapiens
  misc_feature (1)...(644): n = A,T,C or G
tttcttactaaaaaaaatgcaaaatgaaccgnaagtattggcgcatgcttgtatcccagctacgcggtgggctggggcagtagaatcgcttgaacccggaagacgaaggttgcaggggccgagatcgggccactgcactccagcctaggcaacaagagcaaaactccgcctcaaaaaagcaaaaaacaaaaaaaaacacaaaaagtccaagccgagcccttcctgctccctctaggaatcaaaatggcggcgagggaaamctggagcagtcccggagcctgagccactgacaggagaggagagggcggcggcggcggtgggaggaggatggcggcggtgtgctggcgccggtgcctgccgcggtgctggtggcggaggcggcgggggcgacggccgaggtccctgcggcagcagcagcagcggcggcgggaggagcctccaggtcgattgaactgtggatgaggaacctacggaatacgaagggcagactgtatagtaaacacttgaggatgcttgctgtgtggttcttacagaatgcactgtccgtgtgtctggctgcccacagcctttcatacttcaatagtatgcactaaagtaaggtctaatggccctgttctcatagaaatagatggaaagaggctgct

SEQ ID NO: 67611 - DNA, 565 bp, Homo sapiens
actcatcctctttgcatgaattctttgtgcaagaaacatcctgaacatcatttaggacagtcctaatcacagagttcatcctgtacctatatagggaattaaatgggtttttgagctcatttccaatgaagtatcaatataggtattcagatgttttttatagaaatagaaacacacttagtgtgtttttagccgaaatrgtaccatgtatagtgttatctaacaatgtagaacacccagtaagtgatcagagctatcccatgaagagcaaattgaaagtgatagggaacagtttgtgtaccacaaattcactcagagttgttctcaatccctgggacagtcactgtgcccagatactttttatacccagcaggggtgcaatggtgttatattgctggtgatgcaaacttcaaatgcatgttttgcccttaaagtagtattgttcattttgtagcagaaatgctgcactatccttggggcaagaaaacagagaaacaaacatagataatatctgccaccagtagccacaattattgtcgatgatgaggtggctgcatttagaaca

SEQ ID NO: 67612 - DNA, 565 bp, Homo sapiens
actcatcctctttgcatgaattctttgtgcaagaaacatcctgaacatcatttaggacagtcctaatcacagagttcatcctgtacctatatagggaattaaatgggtttttgagctcatttccaatgaagtatcaatataggtattcagatgttttttatagaaatagaaacacacttagtgtgtttttagccgaaatagtaccatgtatagtgttatctaacaatgtagaacacccagtaagtgatcagagctatcccatgaagagcaaattgaaagtgatagggaacagtttgtgtaccacaaattcactcagagttgttctcaatccctgggacagtcactgtgcccagatactttttatacccagcaggggtgcaatggtgttatattgctggtgatgcaaacttcaaatgcatgttttgcccttaaagtagtattgttcattttgtagcagaaatgctgcacyatccttggggcaagaaaacagagaaacaaacatagataatatctgccaccagtagccacaattattgtcgatgatgaggtggctgcatttagaaca

SEQ ID NO: 67613 - DNA, 565 bp, Homo sapiens
actcatcctctttgcatgaattctttgtgcaagaaacatcctgaacatcatttaggacagtcctaatcacagagttcatcctgtacctatatagggaattaaatgggtttttgagctcatttccaatgaagtatcaatataggtattcagatgttttttatagaaatagaaacacacttagtgtgtttttagccgaaatagtaccatgtatagtgttatctaacaatgtagaacacccagtaagtgatcagagctatcccatgaagagcaaattgaaagtgatagggaacagtttgtgtaccacaaattcactcagagttgttctcaatccctgggacagtcactgtgcccagatactttttatacccagcaggggtgcaatggtgttatattgctggtgatgcaaacttcaaatgcatgttttgcccttaaagtagtattgttcattttgtagcagaaatgctgcactatccttggggcaagaaaacagagaaacaaacatrgataatatctgccaccagtagccacaattattgtcgatgatgaggtggctgcatttagaaca

SEQ ID NO: 67614 - DNA, 1758 bp, Homo sapiens
tctcattcattaacgacatgacatttctactttatacaaaatattcagttgaaattaaaktctccctaaccaggtagggcaggcagaatttgtttttaactccaaagctatatcttcacaatagaactacttggtattagtccattttcattctgttgataatgacatacccaagactgggcaatttacaaaagaaacaggtttaattggacttacagttccatgtggctagggtagcctcacaatcatagcagaaggcaaggaggagcaagtcccttcttgcacagatggcagcaggcaaagagagagtttgtacagggaaactccccttttgaaaatcatcaaatcttgagagactcattcactatcaccagaatagtgcaggaaagaacctccaccataattcaattgcctcccaccaggtgcctcctacaacatgtgggaaatcaagatgagatttgggtgtggacacagccaaaccatatcatgcttataatagtttgccaactttacatggtacagattgcatggtacagtaagaagaccaaatcaatgaatgggttccatgcatcaaaatagcatcagaagggaatctcttgctctctttctctctctctttcacagagacattgtggttgggggtgaatttcactttgagataaaaactgatttcactaacagtttccctttcatacttaaaaaactttactgtgtaaggcagaggtctccaacacccaggctggggactggtacaggtccatggcctgttaggaactgggctgcacagcaggaggtgagcggtgggtaagggagcgttacctcctgagctctgtctcctgtcgcaccagcagccacactgaattctcataggagcgtgaaccctattgtgaacctcatatgcaggggaattatgttgtgtactccttatgtgaatctaatgcctgatgatctgaggtagaacagttttatccccacacaactactccttcctcccatatgtgaaaaaattttcttccaaaaaaccagtccctggtgccaaaaaggttggggactgctggtgtaaggatgagatagctgttactaccactgtgtccacaaaaagaacaatgtagttagactggaaataacatgaagacagaaagattctggctccttgatggcatcatcaagctgctgaaagaaatctggaatcaccaactcttaagtttctgattttggggaaaaaaattaatctgtattgtttgtccattagtcagtttgttgttctggtggttacttaaagttaaaagcatcttgaattataacatttttgttttaaatttcattcgtgattaatctttatatttaacattcattttaataaacttttttaataatcccagttttcagaacacatagaaatatgatatttgaaaaattatggtagctgagatttaatgtgccattatatattatgctctgtatttctccatggttatatacacatattttcctatacttacaatcgatatattcttttcttcccctagcttataaggttatcctactgtgagtgaagatgagagatatgacatagccctttctgtgctgtgctcttgtctccatatcattttgtccacattatttatttcaacatatataattttcctcttctttggagaaatcataaatgaaatgcttcctgtgaggaaaacttacattcaatttttgagtagccagggttcctgccagagagataacacttgtccagctaatgca

SEQ ID NO: 67615 - DNA, 1758 bp, Homo sapiens
tctcattcattaacgacatgacatttctactttatacaaaatattcagttgaaattaaattctcsctaaccaggtagggcaggcagaatttgtttttaactccaaagctatatcttcacaatagaactacttggtattagtccattttcattctgttgataatgacatacccaagactgggcaatttacaaaagaaacaggtttaattggacttacagttccatgtggctagggtagcctcacaatcatagcagaaggcaaggaggagcaagtcccttcttgcacagatggcagcaggcaaagagagagtttgtacagggaaactccccttttgaaaatcatcaaatcttgagagactcattcactatcaccagaatagtgcaggaaagaacctccaccataattcaattgcctcccaccaggtgcctcctacaacatgtgggaaatcaagatgagatttgggtgtggacacagccaaaccatatcatgcttataatagtttgccaactttacatggtacagattgcatggtacagtaagaagaccaaatcaatgaatgggttccatgcatcaaaatagcatcagaagggaatctcttgctctctttctctctctctttcacagagacattgtggttgggggtgaatttcactttgagataaaaactgatttcactaacagtttccctttcatacttaaaaaactttactgtgtaaggcagaggtctccaacacccaggctggggactggtacaggtccatggcctgttaggaactgggctgcacagcaggaggtgagcggtgggtaagggagcgttacctcctgagctctgtctcctgtcgcaccagcagccacactgaattctcataggagcgtgaaccctattgtgaacctcatatgcaggggaattatgttgtgtactccttatgtgaatctaatgcctgatgatctgaggtagaacagttttatccccacacaactactccttcctcccatatgtgaaaaaattttcttccaaaaaaccagtccctggtgccaaaaaggttggggactgctggtgtaaggatgagatagctgttactaccactgtgtccacaaaaagaacaatgtagttagactggaaataacatgaagacagaaagattctggctccttgatggcatcatcaagctgctgaaagaaatctggaatcaccaactcttaagtttctgattttggggaaaaaaattaatctgtattgtttgtccattagtcagtttgttgttctggtggttacttaaagttaaaagcatcttgaattataacatttttgttttaaatttcattcgtgattaatctttatatttaacattcattttaataaacttttttaataatcccagttttcagaacacatagaaatatgatatttgaaaaattatggtagctgagatttaatgtgccattatatattatgctctgtatttctccatggttatatacacatattttcctatacttacaatcgatatattcttttcttcccctagcttataaggttatcctactgtgagtgaagatgagagatatgacatagccctttctgtgctgtgctcttgtctccatatcattttgtccacattatttatttcaacatatataattttcctcttctttggagaaatcataaatgaaatgcttcctgtgaggaaaacttacattcaatttttgagtagccagggttcctgccagagagataacacttgtccagctaatgca

SEQ ID NO: 67616 - DNA, 1039 bp, Homo sapiens
tattagaattttttattttgctgatttcagcaactttgtgaaactacacaacatagccctcagccaaatatgtggcatctagcagaaaagggaaaaatgattcttattctttcttaaaatgaattttctgtttcaataacttgtattcatatcattagggaaaacatattactttattttcttttgttcatattttcagcagcaaattggaaataacatttggacccattctcaaatatgtaactatatcatgagtgatgtaattgagttttctaagaacctaggccttacaggtatatgcactttagttgaagataattttaagtaaatcaagcaattgtattagtcattccgtttcccattaaacacaaaattttagaaaatataatatagaaattatcacaaaagcactgtaacmcagaaaaataaaatgttacttggatccaggtgtagtcctaatttctccacccaaggactaattacataaaattctagtatgtatgatttggagatttttatttcacttaatactctttttttaagaaactgttactttgggtacaaacgctatagagaaaaaatgtgaatgacaaggcagccccagaggttttgtgtgaaatccctgtgtaatctcagcagcgtgtggaagagccttctaagcattagacgaggcaaagcgcatttctgtgtcttgacccgagtctttgccaacaaatgtaagctaaagtctccgcagcccacgcgtctgcactccacagctccaaagatgggagggtacccactgccttctcctgagacctcctcttctgtgaccaggaggaaaggaaccaagtcctgggcttgaaccaggcctcagttcccctgacgaaaagtgaagagtgccttttatctcaccttccaacctgagtgagctttgtacaaatcagtgtaagattggtgtgtgcttgtttctgtaaccagagggtcctgtgtatccttatctttttctctcttaaaacttttataaagatatcttagagagaagccttttttgtaatgt

SEQ ID NO: 67617 - DNA, 1039 bp, Homo sapiens
tattagaattttttattttgctgatttcagcaactttgtgaaactacacaacatagccctcagccaaatatgtggcatctagcagaaaagggaaaaatgattcttattctttcttaaaatgaattttctgtttcaataacttgtattcatatcattagggaaaacatattactttattttcttttgttcatattttcagcagcaaattggaaataacatttggacccattctcaaatatgtaactatatcatgagtgatgtaattgagttttctaagaacctaggccttacaggtatatgcactttagttgaagataattttaagtaaatcaagcaattgtattagtcattccgtttcccattaaacacaaaattttagaaaatataatatagaaattatcacaaaagcactgtaacacagaaaaataaaatgttacttggatccaggtgtagtcctaatttctccacccaaggactaattacataaaattctagtatgtatgatttggagatttttatttcacttaatactctttttttaagaaactgttactttgggtacaaacgctatagagaaaaaatgtgaatgacaaggcagccccagaggttttgtgtgaaatccctgtgtaatctcagcagcgtgtggaagagccttctaagcattagacgaggcaaagcgcatttctgtgtcttgacccgagtctttgccaacaaatgtaagctaaagtctccgcagcccacgcgtctgcactycacagctccaaagatgggagggtacccactgccttctcctgagacctcctcttctgtgaccaggaggaaaggaaccaagtcctgggcttgaaccaggcctcagttcccctgacgaaaagtgaagagtgccttttatctcaccttccaacctgagtgagctttgtacaaatcagtgtaagattggtgtgtgcttgtttctgtaaccagagggtcctgtgtatccttatctttttctctcttaaaacttttataaagatatcttagagagaagccttttttgtaatgt

SEQ ID NO: 67618 - DNA, 1578 bp, Homo sapiens
aaatgggagggtaattgtttaacggagacagtgcttgagttttcaagctataacattctgtgattgggtggtggtgatggtttcgtgactttgtgaatacgctgaatgccactgaatcatacacttaaaatagttaaaatggtaaattttatattgtgtatatttcaaaagaaaacaactgaacaaaatgacctcaagaagaaaaataacacaaatgttattttcattcatgagtataccctataaatccactggcattggtctgttctcttctgagccagactttgatgaatttaactgggcttgcttgtgcaaggggctggcttcatgggcacgagacctgagtgtgctcagaggccacttggtctttcttctgtcatggtcctgaagttcttaataatttttggacgagaggcctcacggttttcctttgcactgggctctgtatctgcagtgyaccctgggatcagcgaaagcatgcctcacttctaagtgtggttgggtgtaggtggagtgatgtggtgaactcatccccatcatacaagtctactgcagaatttttcagcctgttggttatgagtttagggatggggtgtgtgtggtaagagaaagagatgcccctttttttgcaaggggtatatgcatcagacagtctattgttctggagacaaagaaatgttttgaacatgatgtgaacatgtaggatgcctttggatccatgaggacctctgagaggtgagctttttcataaggaggtgcatgctaataagcccaaggtgtggcaatgaacttcttgttccagatccccacatctcacccaggcttgtcttgaccttacagttgcttaaaatccctaagtctgttttacacaaaacacatttcaagcaactctcccttacatcgtatataaaattgatttcctgaatgagaacacaaaatcttttttatttatctaagttttaatgtaattatttttagttgaaaatttttaaaatatgtttctgccattctatttactatccatctcatcttggtgtcagagtccaaagtccaatgagactgtagttattaatgtggaaaaatggatagtgcatcagaattgactttaaataggaaataagtccatgttaccaagaaaagagaacaggaagggaggtgctcatgggagagccagtgggacggtctggaaatgggcaacatgcttcactttgaggattcgcagatgctgagttctgatgtgtattggtgaagtcatcttccctcaattatcttacgagtgaaccctgcaagtcaataagctgcagactgtgtctacagaagccttagggatgagttcactgtgtgtccctgagccttctgcttcagtaatctctagtcagttgcattgactctggccccctgttttctcctcctaaatgccaagctctgcttcagtgcttaaagcaatcttcccaacattgcttacatttaaatatttgtttatctgactgagattcaaacagatgcagttctctttctgaacatacaagactctcagaaactcagatttgaaagaaagcaacccaaatctgtttcttt

SEQ ID NO: 67619 - DNA, 1578 bp, Homo sapiens
aaatgggagggtaattgtttaacggagacagtgcttgagttttcaagctataacattctgtgattgggtggtggtgatggtttcgtgactttgtgaatacgctgaatgccactgaatcatacacttaaaatagttaaaatggtaaattttatattgtgtatatttcaaaagaaaacaactgaacaaaatgacctcaagaagaaaaataacacaaatgttattttcattcatgagtataccctataaatccactggcattggtctgttctcttctgagccagactttgatgaatttaactgggcttgcttgtgcaaggggctggcttcatgggcacgagacctgagtgtgctcagaggccacttggtctttcttctgtcatggtcctgaagttcttaataatttttggacgagaggcctcacggttttcctttgcactgggctctgtatctgcagtgtaccctgggatcagcgaaagcatgcctcacttctaagtgtggttgggtgtaggtggagtgatgtggtgaactcatccccatcatacaagtctactgcagaatttttcagcctgttggttatgagtttagggatggggtgtgtgtggtaagagaaagagatgcccctttttttgcaaggggyatatgcatcagacagtctattgttctggagacaaagaaatgttttgaacatgatgtgaacatgtaggatgcctttggatccatgaggacctctgagaggtgagctttttcataaggaggtgcatgctaataagcccaaggtgtggcaatgaacttcttgttccagatccccacatctcacccaggcttgtcttgaccttacagttgcttaaaatccctaagtctgttttacacaaaacacatttcaagcaactctcccttacatcgtatataaaattgatttcctgaatgagaacacaaaatcttttttatttatctaagttttaatgtaattatttttagttgaaaatttttaaaatatgtttctgccattctatttactatccatctcatcttggtgtcagagtccaaagtccaatgagactgtagttattaatgtggaaaaatggatagtgcatcagaattgactttaaataggaaataagtccatgttaccaagaaaagagaacaggaagggaggtgctcatgggagagccagtgggacggtctggaaatgggcaacatgcttcactttgaggattcgcagatgctgagttctgatgtgtattggtgaagtcatcttccctcaattatcttacgagtgaaccctgcaagtcaataagctgcagactgtgtctacagaagccttagggatgagttcactgtgtgtccctgagccttctgcttcagtaatctctagtcagttgcattgactctggccccctgttttctcctcctaaatgccaagctctgcttcagtgcttaaagcaatcttcccaacattgcttacatttaaatatttgtttatctgactgagattcaaacagatgcagttctctttctgaacatacaagactctcagaaactcagatttgaaagaaagcaacccaaatctgtttcttt

SEQ ID NO: 67620 - DNA, 1578 bp, Homo sapiens
aaatgggagggtaattgtttaacggagacagtgcttgagttttcaagctataacattctgtgattgggtggtggtgatggtttcgtgactttgtgaatacgctgaatgccactgaatcatacacttaaaatagttaaaatggtaaattttatattgtgtatatttcaaaagaaaacaactgaacaaaatgacctcaagaagaaaaataacacaaatgttattttcattcatgagtataccctataaatccactggcattggtctgttctcttctgagccagactttgatgaatttaactgggcttgcttgtgcaaggggctggcttcatgggcacgagacctgagtgtgctcagaggccacttggtctttcttctgtcatggtcctgaagttcttaataatttttggacgagaggcctcacggttttcctttgcactgggctctgtatctgcagtgtaccctgggatcagcgaaagcatgcctcacttctaagtgtggttgggtgtaggtggagtgatgtggtgaactcatccccatcatacaagtctactgcagaatttttcagcctgttggttatgagtttagggatggggtgtgtgtggtaagagaaagagatgcccctttttttgcaaggggtatatgcatcagacagtctattgttctggagacaaagaaatgttttgaacatgaygtgaacatgtaggatgcctttggatccatgaggacctctgagaggtgagctttttcataaggaggtgcatgctaataagcccaaggtgtggcaatgaacttcttgttccagatccccacatctcacccaggcttgtcttgaccttacagttgcttaaaatccctaagtctgttttacacaaaacacatttcaagcaactctcccttacatcgtatataaaattgatttcctgaatgagaacacaaaatcttttttatttatctaagttttaatgtaattatttttagttgaaaatttttaaaatatgtttctgccattctatttactatccatctcatcttggtgtcagagtccaaagtccaatgagactgtagttattaatgtggaaaaatggatagtgcatcagaattgactttaaataggaaataagtccatgttaccaagaaaagagaacaggaagggaggtgctcatgggagagccagtgggacggtctggaaatgggcaacatgcttcactttgaggattcgcagatgctgagttctgatgtgtattggtgaagtcatcttccctcaattatcttacgagtgaaccctgcaagtcaataagctgcagactgtgtctacagaagccttagggatgagttcactgtgtgtccctgagccttctgcttcagtaatctctagtcagttgcattgactctggccccctgttttctcctcctaaatgccaagctctgcttcagtgcttaaagcaatcttcccaacattgcttacatttaaatatttgtttatctgactgagattcaaacagatgcagttctctttctgaacatacaagactctcagaaactcagatttgaaagaaagcaacccaaatctgtttcttt

SEQ ID NO: 67621 - DNA, 687 bp, Homo sapiens
gtattactgtcatcgacatacacaaaataacgcataaataacttcactctgcaaaacacacagctcttctttcaatgccttcaaattgctactattacaaatcatcaagttatcttccaaatggataaaaacaacatggtgagccaaggttcacatgtarccattaggacttttttacgaaataaaattaggtatagtttataagtaaatatattaatacgaagctgggaaaagttctactcacgtggtttaactttgttctgttgaagaatcttcaactccaagactttgactatgttccccaaattactgaaaatatgtttatgtcagcctagtgcaaacttttaactaagaaacaggtacaaagaggtgttcgatttttgttttctttgaatataaacagaatggagttccagcactttaggtgggattcacatgttcttggcccatgtctgcttcagaaacaggacagggaaacaggacagggctccagctcccaggacaggtgaggacctggaaatgagggagaaaggacatttggggggaactccccaaaagtgtgctaagggaatgagcaaagcacagggatgagaatggcaggtgcactggtccatggggtattggggtcacctggaggatctgcctcacatctacttgaaagactgaggtggagactgctctggattt

SEQ ID NO: 67622 - DNA, 687 bp, Homo sapiens
gtattactgtcatcgacatacacaaaataacgcataaataacttcactctgcaaaacacacagctcttctttcaatgccttcaaattgctactattacaaatcatcaagttatcttccaaatggataaaaacaacatggtgagccaaggttcacatgtagccattaggacttttttacgaaataaaattaggtatagtttataagtaaatatattaatacgaagctgggaaaagttctactcacgtggtttaactttgttctgttgaagaatcttcaactccaagactttgactatgttccccaaattactgaaaatatgtttatgtcagcctagtgcaaacttttaactaagaaacaggtacaaagaggtgttcgatttttgttttctttgaatataaacagaatggagttccagcactttaggtgggattcacatgttcttggcccatgtctgcttcagaaacaggacagggaaacaggacagggctccagctcccaggacaggtgaggacctggaaatgagggagaaaggacatttggggggaactccccaaaagtgtgctaagggaatgagcaaagcacagggatgagaatggcaggtgcactggtccatggggtattggggtcacctggaggatctgcctcacawctacttgaaagactgaggtggagactgctctggattt

SEQ ID NO: 67623 - DNA, 717 bp, Homo sapiens
tgccaccgcactgcagcctgggtgacagaatgagactctgtctcaaacagcaaatcaaaacaaaacaaaaaagaaacaaaacataagaccagtttttaactggtagtataaaccttgtcaagagaagatagcaaaacagaatcaccaataattgatgggttcatccacaagcatttactgaacacctgctatgacgtaagattaggcttggagagatgagggacataagagggctgtcaggcaacatttttgccttccaggagagcaccctgtgttgtgtgcttcccagctctctccaaccacgtccttcytctgtgacactgcttggggtctcatatccaccaatgcccccatcacacatctctcccttcactggcttgcagaggacaatttatcacagaatgggctcccctgtcaaactattaatccacattaagatgttaatggttgacactgatttaataagtcaccttcaagaacacttgagttttccaaaagatgctggtgcagtttgtggccctgggtggagtcatgttggatgttcctgcatggggaagagaacagggctaagtcaatccttccagaaggccttgcatttcttaagtgtctttgttgtagctgtttcaccagaaagacaatgggtttgcctacataaatgtaggcacattgttttgtctttcatattcaacatttttctctttgtatccaccatgggat

SEQ ID NO: 67624 - DNA, 717 bp, Homo sapiens
tgccaccgcactgcagcctgggtgacagaatgagactctgtctcaaacagcaaatcaaaacaaaacaaaaaagaaacaaaacataagaccagtttttaactggtagtataaaccttgtcaagagaagatagcaaaacagaatcaccaataattgatgggttcatccacaagcatttactgaacacctgctatgacgtaagattaggcttggagagatgagggacataagagggctgtcaggcaacatttttgccttccaggagagcaccctgtgttgtgtgcttcccagctctctccaaccacgtccttcttctgtgacactgcttggrgtctcatatccaccaatgcccccatcacacatctctcccttcactggcttgcagaggacaatttatcacagaatgggctcccctgtcaaactattaatccacattaagatgttaatggttgacactgatttaataagtcaccttcaagaacacttgagttttccaaaagatgctggtgcagtttgtggccctgggtggagtcatgttggatgttcctgcatggggaagagaacagggctaagtcaatccttccagaaggccttgcatttcttaagtgtctttgttgtagctgtttcaccagaaagacaatgggtttgcctacataaatgtaggcacattgttttgtctttcatattcaacatttttctctttgtatccaccatgggat

SEQ ID NO: 67625 - DNA, 1634 bp, Homo sapiens
tctccactaacaatccagaatatttttatcgccccgcaaagaaaccccgtgcccattagcagtcaccctccatcccctcttcctccagcttctggcaaccacaaatctactttctgtctctatacctttgccgattttggacttttcatataaatggaatatcatacactatgtggccttttgtgactggcttctttcactgagtatggtatgatgcggtttgtcatgttatagcatcaatcaatacttcattctttttgtggctgattaatattctatggtatggatagactttagtctatccgttcatttgctcttggaagatcgtgcacacttaacctattagtcttcactacatttgaaaaggagagtcatgagtcacctgtcctccatcttggcgttactcttactctgtgacgcagcacagctgacagtatttgtcctcacttaattctaggttgtttgactggtcaaggtgaaacaaagatggggctggcagaaagagcaagggtgttggagctgctggacctcgtttggaccctgcctctgcccctgttggccatactccagtctttgcatctgttagccaaggctaaaaacacctattccaagatgatggaagcacactcctgtagtatcagtgactaactccccagccctcactactcaaaatgttcctcctgtgtccctgtgacttttctctagtacctcatgtttttattttcttctacattcgcaaggttctgcaccatcccttaaagattgtttctcaatcatctgatgcatttttctcttttcatctgttagagacaaacctgagctaaggctccacatgcccttctccaactcccatgcaccttccaggtcttcctctagattcatgagtgactggggcacaatagattattaaggagataaaacatttttctgtcctagaaacactgttttcacacaaattaggtcaggatggggctgagactgtacctgatttggcctagttttatacggacaatttttattactttcctccaaatcttctagctcttcctgtcagaccactgagagacttgagagataaggttaaaatgggaatgttttattttaaaatagaaaggaataaagccaaaatgttaaaacttagtaagtctctttttctcacttttgccttgttcttcaagtaagataacttttaagagaagagggaccatgctttggaaagaacattaattaatcagacctctcaaagtacagcccatagaccacaaaggcaaaataagcagtagtgctccttaaaatgatactgattcctgtgcctccctccagacctatggaatcagagcttgagtggtagcacccaagaatctgcatgttattagtgtttcttatatccataaagtttgagaacaacttagatgattaaagtccttattaaaacagatgcagcactaccaaaaaggatcatataactttaagtatgtgacccattgtcaattacagtctcatttctttagttttttttaaatggccactggtaattgttaagttcaattaagtccaatagttaaatcaaataagcaaaaacttttttttaattttatgagttcasaagtttgaaactgcaatgaaaggaaaca

SEQ ID NO: 67626 - DNA, 1976 bp, Homo sapiens
taggtgaaatttgaatgatttcaatcattaatctatagattttcttttcctgttttgacaaatataaaccatgatttttaaaaaattcaaataagaatgtttttagctgggtgttaatttagctggtcaaagaaaatattcagcgaataatttggctccttcacaaggaaaaatgaggtgatttggtcatctgaaattcttaaactgtcagtaacagtgaaaaatataatattctgctttttatatagttctaaggaattatttatctttataaaaacatccatattcattcggattattgtcaatacttgccaggaataacctgtgtctttactaccaaaatgaacatattgttatgattatcaactaataagagaggtgttgaaacactttgtaataacaagattttcttaatagttacaacggtaaatcaaaatatttattgcctagtacatatcaagaagtttttcaaagtggatgtacacactcaattctctatacggagatctcattttaatcagagccatcaaccttattccttgttgcacaagatactgtgtgtttgtgcatacgtgggagtgtgtgtaaactgcttacttcattttagataaagtacaagctcatgtaaatatatggttttcagtaaggccttactaaggctatctgaaaatcyagagttcatagatgcctagataatcgccttacagtgtcgttatacacagcttctacaattgtgaggcaaaactagacaatgtgcatgcaggcgatgagacagacgtataataagcacttaaactcatctttggctacaacggccagaggtagctccatatctgctgtcttcttcccacagccacttcatgacagcggatcccagattcatgatttgattccagatcttgagcaagagccgtgtgtaatgcattactggcacttaattaactttgcaaaggtagcaggaataactaaactgagttgttaaagctattaccatttacgaaaatcagtcatgctgcatcataaacagatttttcgagatccacttagaaaatcgagcttttccaaggaccaatttctatgtcaaactgaattataaactatacactggttagtgttttctttacaatgaaaaaaattaacatttagacttctaattaaaaattcaaccaaactaagaaaaaaaacctgcttattgccttccatatacaaagcactgtatcagtctaaggtggaacaccacaccctaaaaaggtgagctcatcctgcaagtcaagaaaaataaaaatggcattgtgcatgtttcacaagagggctgtggtcacagccagagccctgcaggtcaaatcatgtcccgtcagtagcactgatcatagttctgccaatatccccgccaccagtcaaaggcacgctagtcttactttatatgtggaggattactgcatatactttgggtctgcattagtctttggagtagggtataattatcaaagtatgtttaaaaacacacacgcagatctgttaggtcccctagaagagactgagttcagatgcattttaactagaagatagaggtacattatttcaaaaaacaattaattcgctttaaaaacctaaaacactggagatgatacaaacctgagctggcacagtgtatgggttttcagagaagaaaacacacaaactgcaaagaaagctggaattttctgcagtgtttacattttattacctggctaatggggaccatgcttccttttgtggggaagtgacgtccaaaggattacacaaaagaaagggcaccaagttgctgatatagtcccccggaaacacaaataaacaggattgggttggaagccctgggccacttcaaagaaaaaaatcaagtcactggtactagtaagaaatgaaaacaggcagggtagctcgctgtctgtgttaaaactatgaacccggtaggtaaagcccatttggctttaagg

SEQ ID NO: 67627 - DNA, 595 bp, Homo sapiens
aaaactattttgggggcatgaagtgaaaatttcttcttattctttgatagaaaaataaaactcaagcaatcatgattctaagcagaggggcttgtagcagatcatacaagctttcctcacattttacaattaaagaaacttcaaggaactggaaagtgggcaacagtccactcatcctacccattcctatgaaaaagtaacactcacacctgctggtgccacaggtctcaggctgcataaataaattttcctgataggtttccagyaataggaaggcaccttgtttttttaattgacaaaggtgggcgtgtattagtcagggttctctagagaaacagaaccaataggatgtctatatggtaggcctgcagatacacaaagattcaaccaactgtaaaccaaaaatattcagaaaaaaataacaataaaaataacaatagaataatacatatagaaaacaacagcatataacaactatttatatagcatttacagtgtattaagtattataggtaattgaaggttatttaaagcatacagaaagatgcatgtaggttatatgaaaatactacacatttttttttttgagatggag

SEQ ID NO: 67628 - DNA, 760 bp, Homo sapiens
ttttcctgttggttcctgtttatgttccactccaggtggggagggatgacctctgaatggtaattcacaatggagcctctggacaaggcgaatagagtcacccggagagacaggcctgttgagctttctttagggctcactgaatgtaaccagacaaataaaaaggatttctgagttaggttcaattagcaaccccttctgagatcccttccacatatacaaacacacacaaagatgcgacagacagaaggccttccaaatcagatccctaaccaagaactccaagagtatcccttccaaattattctccatctgagaaacctcctcaaaatcttcctgattgaggataagtctcccaaaccaaggctcttcctactagttagaaagaacctaccgagaccccccaggagcccaacagacgtcccacaatggggttacagacccagacactccatggtggagttacaaaccgatatcctgcaatggggctacagacaccacaccatagggctactaaaccagtcaggagaaggaaggaggtgttggcagcacctaagatactcatcaacccyacaatggggctacagacagacatcttatgatagggctacagttaagggacatctccccgtgactatttctccattgcaagtaaatccatgcatgttggatcagcagcaccccgccagtagagagagtaccagagtcagtccccagtccaagagaaataggcagccagccacttgggctggcttctgga

SEQ ID NO: 67629 - DNA, 1105 bp, Homo sapiens
tgaggagcgggaggaggggagggaaggaaaaagagcagccagtgaggttgagatctagaatctgtgaataaagctgtttcaaaaagggaatgggccactgtgtccaatgctgctgatggttcctgagaggcgagaactgaaattgactttaaattggacaccacagaggtcagtttctgacttggtcaggagcagtttcagctggagcaagctcaagagagactcagaggaggaagaggaggtggtagwatgagcaattgctctaaggagtcatactgcgagggatatgagaaacggggcaagggctggagaagggtgagcagcaaaggaagagtctcttctaatggtgggagatgatctattcaagccatagttatcaaaggctaaattttcagtgtaagataaatggagtattcttcattatcccaaaaggatgaataaactcaaatatgtatcactcgtgctatatgtcttaagatgtgtttccaagagcatctgaaatttcgtttgtacatatatcttgatcatttataaagccactgtgatctataaatcaagaaaatccattgtcatgaccatttgtaaaagtcaaaaattaagacatccttaattaaaaagtttcaaatctagacattaaatgtgtgtgaatgtacaaagataacaaaccatttctaacgctgttatatactagagaaattttgttttgcttgctgttttaacttgacaggtgaaaggctttagttgacttcatactgtaagaactgttaataaaagttatcaagtaaaaagccctatatctaaaaataccttatgaacagttattctatcaacttttcgaggtttttaaacctgcccagaaattacctcggtatctgaagtttccctctgtctcctcctctaattacgcttatttgttatgcaccagcattggggataatacaatttcttgttctgtgtaaaaaacaaaaacaaacaaacaaaattatcccaggtggatctgcagaaaggaacaatagaggagaaaggaagaagctggtggtgcaggaacaaagtctttaggtggccgggaggggatggaatccaaggcatgagaggaggacctggc

SEQ ID NO: 67630 - DNA, 767 bp, Homo sapiens
aataaaccagaagtatatctgatttcaagactttccgtatagcaacagtaataaaaaaaaagtttagtattggcctagatatagacatatagctcaatgggacagaatagatagttcagaaatgaacccacacgtatatgaccaattgattttcaacaaaaatatcatgacattttaatggagaaagattaatcttttcaataaatgtagtcttcaatgtacagtttctgtaaactttagtaaaagtttattcctaagtatttcatatttagctattgtaaayactgttttaaaaaattccaacttctgataatttattggccttataaagaaatacaattgattttttcgcattgacctggtctcctgtggccttgctaaattcacttcttagtttgagtagggacttttgtttgtttgtttgcaggtttcctagaatttttacataggcaatcatgttacctgagaataaatgaagctttacttgttttgcaaattatttcatttcttctggttttattgctctgggtaggccatctagtataaggttgaacataaggggtgaaagcaaacatccttgccttgctgcctcaagagaagagaacagcttcctggttcctcttcctaagtacagcagaggcctacgtctcccacaactttgaagctaggtttggtttgctctgaggattcctgttcctcctcctaccttattacataaagactttctgaattgcttgctcaactaccactcctttggatgattgtca

SEQ ID NO: 67631 - DNA, 1452 bp, Homo sapiens
acagagcaagaccctgtctcaaaccaaaaaaaagaataattggcataaattaagaatatataccagctgcaagagcagcaaaggaggttggaaaattgctaaaactgaaaagagaaatggagcccttgggatggattttcaaaagaggatgtgggagttctaacaggaagggcagacatcattccaccatgaagcaagcaaactctctgccaagtccccttcctttttgtgctctagcctataaagcagagtttctcaaccaggctcagtccttcagaaaaaactgcaagcataggagtccacacatatatgtgcatctggcacttgagcaataccttccaatggtggttcagagaggagcctctaaacccacgctccttgagtccttttcttatgacctgggtgatttggggcaagttatttaatctttatgaaactcaatttctttatctgtaaaactaagataataagtttccaactcaataggttatggagaagattgaataaaagactctgtgtaaatgtgcttttagaataaatgtctggcacacaggaagctgaaaaaacaaaaacgatatgacttccattattatctagctcttttactatacttagcttttctttttcatttcttctcacttgtagctctaagaaggggaggaaaatttatttggctagcgatggggtggtggcgaaggagttggatttgacttagcagaagcaaggtggatccattatagtgaagcagagcttggatgaagaagacaagcagtctattagctcagccccttctaggcacattcaatttttcccaagtgctcctggatattttagaagtcagctgaatcagcaaggcaggccaacattcaaattcaggaaatacagagaacaccacaaagatactcctcgaaaagagcaactccaagacacataattgtcagattcaccaaagttgaaatgaaggaaaaaggaaaaaatgttaagtgcagccagagagaaacagtgggttacacacaaagkgaagcccatcagactaacagaggatctcttggcagaaactatacaagccagaagagagtgggggctgatattcaacattcttaaagaaaagaattttcaacccagaatttcatagccagccaaactaagcttcataagtgaaggagaaataaaatcctttacagataagcaaatgctgagagattttgtcaccaccaggcctgccctaaaagagctcctgaaggaagcactaaacatggaaaggaacagctggtaccagccactgcaaaaacatgccaaaatgtaaagaccatcgatgctaggaagaaactgcatcaactaacaagcaaaagaaccagctaacatcacaatgacaggatcaaaattcacacatagcaatattaactttaaatgtaaatgggctaaatgctccaattaaaagacacagactga

SEQ ID NO: 67632 - DNA, 1452 bp, Homo sapiens
acagagcaagaccctgtctcaaaccaaaaaaaagaataattggcataaattaagaatatataccagctgcaagagcagcaaaggaggttggaaaattgctaaaactgaaaagagaaatggagcccttgggatggattttcaaaagaggatgtgggagttctaacaggaagggcagacatcattccaccatgaagcaagcaaactctctgccaagtccccttcctttttgtgctctagcctataaagcagagtttctcaaccaggctcagtccttcagaaaaaactgcaagcataggagtccacacatatatgtgcatctggcacttgagcaataccttccaatggtggttcagagaggagcctctaaacccacgctccttgagtccttttcttatgacctgggtgatttggggcaagttatttaatctttatgaaactcaatttctttatctgtaaaactaagataataagtttccaactcaataggttatggagaagattgaataaaagactctgtgtaaatgtgcttttagaataaatgtctggcacacaggaagctgaaaaaacaaaaacgatatgacttccattattatctagctcttttactatacttagcttttctttttcatttcttctcacttgtagctctaagaaggggaggaaaatttatttggctagcgatggggtggtggcgaaggagttggatttgacttagcagaagcaaggtggatccattatagtgaagcagagcttggatgaagaagacaagcagtctattagctcagccccttctaggcacattcaatttttcccaagtgctcctggatattttagaagtcagctgaatcagcaaggcaggccaacattcaaattcaggaaatacagagaacaccacaaagatactcctcgaaaagagcaactccaagacacataattgtcagattcaccaaagttgaaatgaaggaaaaaggaaaaaatgttaagtgcagccagagagaaacagtgggttacacacaaagggaagcccatcagactaacagagkatctcttggcagaaactatacaagccagaagagagtgggggctgatattcaacattcttaaagaaaagaattttcaacccagaatttcatagccagccaaactaagcttcataagtgaaggagaaataaaatcctttacagataagcaaatgctgagagattttgtcaccaccaggcctgccctaaaagagctcctgaaggaagcactaaacatggaaaggaacagctggtaccagccactgcaaaaacatgccaaaatgtaaagaccatcgatgctaggaagaaactgcatcaactaacaagcaaaagaaccagctaacatcacaatgacaggatcaaaattcacacatagcaatattaactttaaatgtaaatgggctaaatgctccaattaaaagacacagactga

SEQ ID NO: 67633 - DNA, 1452 bp, Homo sapiens
acagagcaagaccctgtctcaaaccaaaaaaaagaataattggcataaattaagaatatataccagctgcaagagcagcaaaggaggttggaaaattgctaaaactgaaaagagaaatggagcccttgggatggattttcaaaagaggatgtgggagttctaacaggaagggcagacatcattccaccatgaagcaagcaaactctctgccaagtccccttcctttttgtgctctagcctataaagcagagtttctcaaccaggctcagtccttcagaaaaaactgcaagcataggagtccacacatatatgtgcatctggcacttgagcaataccttccaatggtggttcagagaggagcctctaaacccacgctccttgagtccttttcttatgacctgggtgatttggggcaagttatttaatctttatgaaactcaatttctttatctgtaaaactaagataataagtttccaactcaataggttatggagaagattgaataaaagactctgtgtaaatgtgcttttagaataaatgtctggcacacaggaagctgaaaaaacaaaaacgatatgacttccattattatctagctcttttactatacttagcttttctttttcatttcttctcacttgtagctctaagaaggggaggaaaatttatttggctagcgatggggtggtggcgaaggagttggatttgacttagcagaagcaaggtggatccattatagtgaagcagagcttggatgaagaagacaagcagtctattagctcagccccttctaggcacattcaatttttcccaagtgctcctggatattttagaagtcagctgaatcagcaaggcaggccaacattcaaattcaggaaatacagagaacaccacaaagatactcctcgaaaagagcaactccaagacacataattgtcagattcaccaaagttgaaatgaaggaaaaaggaaaaaatgttaagtgcagccagagagaaacagtgggttacacacaaagggaagcccatcagactaacagaggatctcttggcagaaactatacaagccagaagagagtgggggcygatattcaacattcttaaagaaaagaattttcaacccagaatttcatagccagccaaactaagcttcataagtgaaggagaaataaaatcctttacagataagcaaatgctgagagattttgtcaccaccaggcctgccctaaaagagctcctgaaggaagcactaaacatggaaaggaacagctggtaccagccactgcaaaaacatgccaaaatgtaaagaccatcgatgctaggaagaaactgcatcaactaacaagcaaaagaaccagctaacatcacaatgacaggatcaaaattcacacatagcaatattaactttaaatgtaaatgggctaaatgctccaattaaaagacacagactga

SEQ ID NO: 67634 - DNA, 1034 bp, Homo sapiens
tgttccctgatgaacttcttgagctgcagaattgactaatcctaaaatctgatgtggtcattcacagctaaaggcatctgtagccttttgttcttcatattgtaataattttcttacagatacttcccccattaattcttgagctcttccaggacaaagagactcagtcttcttgttctttgattctcccttgggatataggctcatgtctatcactcagtgaacattcraaaatatttgttgaattgtgaaaaaaaaaaggcagttttaactttaagatacttagccatagttacaaacacttaaaaggaacagagtattagctgtgtctgatggaatataaattgatgagatcagttcaacaagccaaatttcaaatcagttttgctcctctggagttgacctcacagcgactaatgacttcccaattctccagttgcttcatcagtagagacaatcagccacagcactggggccatactgggaaaaatgacaaaagtgatcacatctgcctctgatccaagaacttcctaaggtgcatggtatgagataccaggagccaaagtccccgtgagatcatgggcacagttcaacagggtcccataagcttcctaatgactcctaatctgtgggacagggaaacattaggctcaaaaccctgcaggtccctctgaagtttatttgttttgaaggtgagatttctttcttttcttttttcctttttagatttaaagattttaaacatatgacgtcttgcctcgcatagtttctatggaaagggaggcagtatatctgaggatggaaaaagtaattattctgccaaaactgtctttcaccaatgctgaacgactgggcaaattcaccacattttccaccttctcacatgtcttaaaaacctagtcgttgccagtttcaccactggtacaatattggttatgcacaattcaaatgttcatctgtaatggcaaaacccttaataataacaatgatagtaaaaataacaggctaaattttgcaatttataaaggacttcc

SEQ ID NO: 67635 - DNA, 1034 bp, Homo sapiens
tgttccctgatgaacttcttgagctgcagaattgactaatcctaaaatctgatgtggtcattcacagctaaaggcatctgtagccttttgttcttcatattgtaataattttcttacagatacttcccccattaattcttgagctcttccaggacaaagagactcagtcttcttgttctttgattctcccttgggatataggctcatgtctatcactcagtgaacattcaaaaatatttgttgaattgtgaaaaaaaaaaggcagttttaactttaagatacttagccatagttacaaacacttaaaaggaacagagtattagctgtgtctgatggaatataaattgatgagatcagttcaacaagccaaatttcaaatcagttttgctcctctggagttgacctcacagcgactaatgacttcccaattctccagttgcttcatcagtagagacaatcagccacagcactggggccatactgggaaaaatgacaaaagtgatcacatctgcctctgatccaagaacttcctaaggtgcatggtatgagataccaggagccaaagtccccgtgagatcatgggcacagttcaacagggtcccataagcttcctaatgactcctaatctgtgggacagggaaacattaggctcaaaaccctgcaggtccctctgaagtttatttgttttgaaggtgagatttctttcttttcttttttcctttttagatttaaagattttaaacatatgacrtcttgcctcgcatagtttctatggaaagggaggcagtatatctgaggatggaaaaagtaattattctgccaaaactgtctttcaccaatgctgaacgactgggcaaattcaccacattttccaccttctcacatgtcttaaaaacctagtcgttgccagtttcaccactggtacaatattggttatgcacaattcaaatgttcatctgtaatggcaaaacccttaataataacaatgatagtaaaaataacaggctaaattttgcaatttataaaggacttcc

SEQ ID NO: 67636 - DNA, 2116 bp, Homo sapiens
tggcttgcttctggggtctctgaaatagaatgaattaatattttcatttagttttattcttgaaagggtgagtttctccacacacagcatggctttgtcttctggagagaggcaataaataaacaaacagtaaataatttaaatgattccgtagtgataagtgctgttgagaaaataaaagagatttatatcaggaggtgggttcaggaaaggtctctctaaaaaggtggcacttgaaatgaggcctaaatgacatgaaagaacctctgagaaggtttctgtggtgcagcaagtacaagattctgaagcacaacagattttgattgaaaaggggttgaagagaacttggtgaatagagagggggagagataggggatgaggtcagagtgatgtgtaaggaccaggacatcaggggccatgatggggtctttgggttttatttcaaatactctggggagccttcagaagctttaagcagggacatgatgtaatttgctgtacactttcaaagatcatactggtagtcatgtgaagaaaggatggtggggcagaatgaatggctgcagggaaatgaatttgccagccattcacggggttcaggtgtgggattacggcagcytggtctatcacttaggattaggattgtgatactaatggcggattacgtaataaactcaactatattggcttcatcaaaggggtttttcacacaagaagaagtctattgatggcagtccatggcagtccttggctgctcttttgtgcctttagagcccaggctctttctgttttcagcctctgtcattccaacatgttgctcttgttctcatggttgacagatggctgctgtacctccattgcatgtgcctttttaggccaagagggcaaaagggaaaaggcacttcccttttatcaggaaaatattgtactggttatggttatctgcagaaaactgaatttactccagcaatactactgcaatcctacttggcccctgtgatgttcaaggccagatgctaaagcttcatcaccgctgctcttggaagatccagatcaggctgagttctcagcacagctaattccctgttctcttcttcttgcctagtaatggaaccctgattgatacatggacccatgagctgtccacaagaaagactacatttcccaactcccatgcatctaggtgaggcatatggctcggttctggttagtgggatttaggccaaagtgtcatgtgaatgagccctcccttgtctgaccttcttccttttgctgactggaaagcagatgtgatggcttgagctgcaacagccatcttggacgatgaggaggaagccatacatgaatgtggcagaaaaacaagagaagaagctcggctcactcatgactatagagttgccaaatcttgctttcttcaagaaaagtgtctaaatgactttcttcctagccttcagtgagaatccaaaaacctctattgttaggaaaacccccaggaagggcagaaagcaactgaaacctagctcccctcctcacccctgtccctgctccccaaagactaaaggttggatgggcctgggtgatatgatgacatatgccaatctcgatcacgtgccagatgcctccatgtcaatcttctggcttccctgggtcacactggaagaaggattgtcctgggccacatataaaatacatgaacactaacaatagctgatgagctaaaaaaaaaaaaaaagaaattgcggccgggcgtggtggctcatgcctgtaataccagcactttggggggccgcggtgggcggatcatgacgtcaggagatcgagaccttcctggctaatacagtgaaaccccgtctctactaaaaatacaaaaagttagccaggtgtggtaacgggcgggcgcctgtagtcccagctacttgggaggctgaggcaagagaatggcgtgaacccgggaggtggagcttgcagtgagccgagatcgcgtcactgcactccagcctgtgcgacagagcgagacgccgtctaaaagaaaaaaaaaaaagaaaaagaaattgcaaaaaaactcataagttttaagaaagtttacgaatttgatttgagccacgtgtaatgctgt

SEQ ID NO: 67637 - DNA, 1423 bp, Homo sapiens
  misc_feature (1)...(1423): n = A,T,C or G
gcccaccaagtaaagctaaatcataatttaagcactttgtggaaacagtgcatgaaaccgaattggctagcttagccaactgagctcaggattgaacatttactttaattctcattttctgaaaagtagtcaaatgcctttaattaaaacatatcccttgaaattggtttagcataaattattttttaaaaaatcaaacgtgagccagaatctaattctgatatcgccgagggaaggaaaaccacaactctgatgcatcttgaacggggtgtgggtaaaggctgcagaaggacttgatgtcccttaagcccagcctcaggctgcagcgagccaagattgcgccactgcactccagcctccagcctgggcaacagaacaagactccatctctaaaacaacaacaacaaaacaacaaaaacagcctcaggtggcacttcttccaggaagccttcctgttcttccccagtcacaattactataccagttcccctttgcttccaggactctgtcctcctgaaacagcactgtttaatactcctgatagaataacagatgcgactatcgccccacagtgctgtaagctgggatggcaggtgttgggacatatggatccatttttccagcccattagaagatgaccatgagaacaggtcacaagagccgattggcattaccaaggagaagaagtctcccagaaaggagctgcagtgtttagtgatggcaggcacgtgggcactggggaaagagagtgggtctcagggccagcagtgggggcctcttcttcctctgccagaaccgcccatgactgtggcaaaattgacaggtggcaggagacagtggctgagcgtcacacctgtcatggagacaggctgagacacttctctgcagtcaatttggtagcacatttcttttgcannnnnnnnnnnnnnnnnnnnnnnnnnnnnnnnnnnnnnnnnnnnnnnnnnnnnnnnnnnnnnnnnnnnnnnnnnnnnnnnnnnnnnnnnnnnnnnnnnnnttttccagtggtttacacttttcccacaaaaggatccaccatgaccccgcacaactgcaggagatcctccctcggggtcctttcaacgctgaacaaccctgggtgacaggggtgcattctcagtcccagggcggasacagagatcaacgctcccaaggcctaggggagcagctccagggcctcttctgagtgctggagtgggtccctgagcctgagaccatgcacagcctctcacgaccgcctcccactcccactgtggtgatggtggggttgagaaacaaatggcatcaaatcaaccaccccactgaaatacctcctttctgagacccctggaaggtgtcactgaaggaagctccaatgtctgcaggtaggttggccccagcacacgctaacgttttgagttaaaat

SEQ ID NO: 67638 - DNA, 2197 bp, Homo sapiens
tgagcacattttatggaaaattattgagcacagtcttttcatgatccctgtatgctgtgtgtcctgagggcactaactcagagtgtcctgttactccctcatcagtgtgtcacctggacaattcactgagctcgttctctctctctgtgtgtgtatgtgtgtgtgtgtgtgtgtgtgtgtgtgtgtgtgtgtgtgtctatctgtctttctctttcattcttttccatttggccctgttctgtcccaacatgaaggcaataatttgttacctcattaatggatctatccttttagttttttaaccacttccctatgctacccatgaaacctagttggggctctgttgtgtctgatttcccctggcttattctttactttttcctccttttccaggctcagcagggagctgctggaggtagtagagcctgaagtcttgcaggactcactggatagatgttattcaactccttccagttgtcttgaacagcctgactcctgccagccctatggaagttccttttatgcattggaggaaaaacatgttggcttttctcttgacgtgggaggtgagtacctttctatgaaggtgataaggatccactgagtcttccatataaagatcatattcctgctccaagtggccattactgagctgagagatgtcattgccacagggaggacctataggcacatgtaggttgaatgaaactctagttctacctggaagcccagacaagggatgggtcagtgagcaagactctcttcctagtctcaggccatacctgtggcgccctgatcctattctcatgacattggacctgggcagatgtgacaaattcagagaactatgattttgactcaagggtttgtagatttcctttttcactctaatttcagtgtctaaagtcctcacaaccatgaacaatctgagtatttgatgagacagggctaaatattgcagtttttctcctagaaatcatttgagggtatttgctttaagttgattggaacaatatggcgtaactgtttgcacaaacttgggacaaatgatattgggataacgatctactagaatagggacattttacccacagtttctgggagaaaaaccgaggaatttctatcatgaccagccttcaggcctcctgaaatatatctctcacagtgtcctattcttatgctgaggagcctgaggtccctgtgtgaggattagacagtggattgttatgtgtgtaggggaatcagcttaatgtgtctgtccatgtctgaatttattgcagaaattgaaaagaaggggaaggggaagaaaagaaggggaagaagatcaaagaaggaaagaagaaggggaagaaaagaaggggaagaagatcaaaacccaccatgccccaggtgactttcagcaattctggatgcttaattctgtgttaacacctggaggcaacagattcagggaaaccagagtgtgtttgatgacatgttttcagcgaaggctgaattactcctactgtcattgctgttggttttcattgcagtagatgtttaggtttccatttcttcctccccttatcatttcctaacgtaccataggttgaccatacttcaaaagctgtactctcatggccactgcatygaattttgagcatattttatggaaaactattgagctcactcttttcatgatcacagtttgctgtgtgtcatgagggcactaagtcagagtgtcctttgactcccttaccagtatgtcacctggccaattcactaggtcactttctctctgtctctgtctctgtctctgtctctgtctgtctttctctttcattgttttctacctggccctgttctgtcccaacataaaggcaataatttgttacctcattaatggatctgtcctttttcttttcaaactcttccttacgttagccatgaaatctagctggggctgtgtggtttctgattccccctggcttattctttactttttcccacttttccaggctcagcagggagctgctggatgagaaagggcctgaagtcttgcaggactcactggatagatgttattcaactccttcaggttgtcttgaactgactgactcatgccagccctacagaagtgccttttatgtattggagcaacagcgtgttggcttggctgttgacatggatggtgagtacctttctatgaaggtgataa

SEQ ID NO: 67639 - DNA, 755 bp, Homo sapiens
gctcaaagttacctggggcatgatgggtcttggtcttcttccacttcttggtacttttcaatttctgcaataagttcagacatggacagacatatcaagctggttctcctacacacataacaatccactgtctaatcctcacacagggacttcaggctcctcagcatgagaataggacactgtgagagatattcttcaggaggcctgaaggctgatcaccatagagattccttggtttttgtcccagaaactgtgggtaaaattccctattctggtagatcgttatcccaatatcatttgtcccaagtttgtgcaaatggttatgccatatttttccaatcgatttaaagcaaatgcccccaaatggytgctaggagaaaaactgcactattcagccctgtctcatcaaatactcagattgttcacggtagcgaggattttagacgctgaaattagagtgaaggatgaaatctacaagatctacaaaattgagacaaaatcagagttgtgtgaatttgtcacatctgcccagatccaacatcttgagagtaggattagggcgccacaggcatggcctgagactaggaagagagccttgctcactgacccatcccttgtctgggcttccaagtggaactagagtttcactcaacctacatgtgcctataggtcctccctgtggcaatgacatctctcagctcagtaagggccacttgcagtaggaatatgaccctaaccagaagactcagtggatc

SEQ ID NO: 67640 - DNA, 3323 bp, Homo sapiens
atagaccagggccaggtagaaaagaatgaaagagaaagacagggagagggagagagagagagaggagaaagtgagctcagcgaattggccgggtgacacactgatgaaggggtcaaaggacactctgagttagtgccctcgggacacacagcgaacagtgatcatgaaaagagtgggctcaataattttccataaccttgctcaagattccatgcagttgccatacagcctttgaggtatggtcaacctatagtaagtgagtaaatgataaggggaggaagaaatggaaacctaaacatctactgcaatgaaaaccaacagcaatgtcagtaggagtaattcaaccttcgttgaaaacatgaaattgaacacactcttgttttccctggacctggcatctccaggtgtcaacacagaattaagcatccataattgctcaaagttacctggggcatgatgggtcttggtcttcttccacttcttggtacttttcaatttctgcaataagttcagacatggacagacatattaagctggttctcctacacacataacaatccactgtctaatcctcacacagggacttcaggctcctcagcatgagaataggacactgtgagagatagtcttcaggaggcctgaaggctgatcaccatagagattccttggtttttgtcccagaaactgtgggtaaaattccctattctggtagatcgttatcccaatatcatttgtcccaagtttgtgcaaatggttatgccatatttttccaatcgatttaaagcaaatgcccccaaatggctgctaggagaaaaactgcactattcagccctgtctcatcaaatactcagattgttcatggtagtgaggattttagacgctgaaattagagtgaaggatgaaatctacaagatctacaaaattgagacaaaatcagagttgtgtgaatttgtcacatctgcccagatccaacattttgagagtaggattagggcaccacgggcatggcctgagactaggaagagagccttgctcactgacccatcccttgtctgggcttccaagtggaactagagtttcactcaacctacatgtgcctatagttcctccctgtggtaatgacatctctcagctcagtaagggccacttgcagtaggaatatgaccctaaccagaagactcagtggatccttatcaccttcatagaaaggtactcaccatccatgtcaacagccaagccaacatgctgttgctccaatacataaaaggcacttctgtagggctggcatgagtcagtcagttcaagacaacctgaaggagttgaagaacatctatccagtgagtcctgcaagacttcaggccctttctcatccagcagctccctgctgagcctggaaaagtgggaaaaagtaaagaataagccagggggaatcagaaaccacacagccccagctagatttcatggctaacgtaaggaagagtttgaaaagaaaaaggacagatccattaatgaggtaacaaattattgcctttatgatgggacagaacagggccaggtagaaaacaatgaaagagaaagacagacagagacagagacagagacagagagaaagtgacctagtgaattggccaggtgacatactggtaagggagtcaaaggacactctgagttagtgccctcatgacacacagcaaactgtgatcatgaaaagagtgagctcaatagttttccataaaatatgctcaaaattcgatgcagtggccatgagagtacagcttttgaagtatggtcaacctatggtacgttaggaaatgataaggggaggaagaaatggaaacctaaacatctactgcaatgaaaaccaacagcaatgacagtaggagtaattcagccttcgttgaaaacatgtcatcaaacacactctggtttccctgaatctgttgcctccaggtgttaacacagaattaagcatccacaattgctgaaagtcacctggggcatggtgggttttgatcttcttccccttcttttcttccccttcttctttccttctttgatcttcttccccttcttttcttccccttccccttcttttcaatttctgcaataaattcagacatggacagacacattaagctgattcccctacacacataacaatccactgtctaatcctcacacagggacctcaggctcctcagcataagaataggacactgtgagagatatatttcaggaggcctgaaggctggtcatgatagaaattcctcggtttttctcccagaaactgtgggtaaaatgtccctattctagtagatcgttatcccaatatcatttgtcccaagtttgtgcaaacagttacgccatatttttccaatcaacttaaagcaaataccctcaaatgatttctaggagaaaaactgcaatatttagccctgtctcatcaaatactcagattgttcatggttgtgaggactttagacactgaaattagagtgaaaaaggaaatctacaaacccttgagtcaaaatcatagttctctgaatttgtcacatctgcccaggtccaatgtcatgagaataggatcagggcgccacaggtatggcctgagactaggaagagagtcttgctcactgacccatcccttgtctgggcttccaggtagaactagagtttcattcaacctacatgtgcctataggtcctccctgtggcaatgacatctctcagctcagtaatggccacttggagcaggaatatgatctttatatggaagactcagtggatccttatcaccttcatagaaaggtactcacctcccacgtcaagagaaaagccaacatgtttttcctccaatgcataaaaggaacttccatagggctggcaggagtcaggctgttcaagacaactggaaggagttgaataacatctatccagtgagtcctgcaagacttcaggctctactacctccagcagctccctgctgagcctggaaaaggaggaaaaagtaaagaataagccaggggaaatcagacacaacagagccccaactaggtttcatgggtagcatagggaagtggttaaaaaactaaaaggatagatccattaatgaggtaacaaattattgccttcatgttgggacagaacagggccaaatggaaaagaatgaaagagaaagacagatagacacacacacacacacacacacacacacacacacacacacacacacagasagagagaacgagctcagtgaattgtccaggtgacacactgatgagggagtaacaggacactctgagttagtgccctcaggacacacag

SEQ ID NO: 67641 - DNA, 3323 bp, Homo sapiens
atagaccagggccaggtagaaaagaatgaaagagaaagacagggagagggagagagagagagaggagaaagtgagctcagcgaattggccgggtgacacactgatgaaggggtcaaaggacactctgagttagtgccctcgggacacacagcgaacagtgatcatgaaaagagtgggctcaataattttccataaccttgctcaagattccatgcagttgccatacagcctttgaggtatggtcaacctatagtaagtgagtaaatgataaggggaggaagaaatggaaacctaaacatctactgcaatgaaaaccaacagcaatgtcagtaggagtaattcaaccttcgttgaaaacatgaaattgaacacactcttgttttccctggacctggcatctccaggtgtcaacacagaattaagcatccataattgctcaaagttacctggggcatgatgggtcttggtcttcttccacttcttggtacttttcaatttctgcaataagttcagacatggacagacatattaagctggttctcctacacacataacaatccactgtctaatcctcacacagggacttcaggctcctcagcatgagaataggacactgtgagagatagtcttcaggaggcctgaaggctgatcaccatagagattccttggtttttgtcccagaaactgtgggtaaaattccctattctggtagatcgttatcccaatatcatttgtcccaagtttgtgcaaatggttatgccatatttttccaatcgatttaaagcaaatgcccccaaatggctgctaggagaaaaactgcactattcagccctgtctcatcaaatactcagattgttcatggtagtgaggattttagacgctgaaattagagtgaaggatgaaatctacaagatctacaaaattgagacaaaatcagagttgtgtgaatttgtcacatctgcccagatccaacattttgagagtaggattagggcaccacgggcatggcctgagactaggaagagagccttgctcactgacccatcccttgtctgggcttccaagtggaactagagtttcactcaacctacatgtgcctatagttcctccctgtggyaatgacatctctcagctcagtaagggccacttgcagtaggaatatgaccctaaccagaagactcagtggatccttatcaccttcatagaaaggtactcaccatccatgtcaacagccaagccaacatgctgttgctccaatacataaaaggcacttctgtagggctggcatgagtcagtcagttcaagacaacctgaaggagttgaagaacatctatccagtgagtcctgcaagacttcaggccctttctcatccagcagctccctgctgagcctggaaaagtgggaaaaagtaaagaataagccagggggaatcagaaaccacacagccccagctagatttcatggctaacgtaaggaagagtttgaaaagaaaaaggacagatccattaatgaggtaacaaattattgcctttatgatgggacagaacagggccaggtagaaaacaatgaaagagaaagacagacagagacagagacagagacagagagaaagtgacctagtgaattggccaggtgacatactggtaagggagtcaaaggacactctgagttagtgccctcatgacacacagcaaactgtgatcatgaaaagagtgagctcaatagttttccataaaatatgctcaaaattcgatgcagtggccatgagagtacagcttttgaagtatggtcaacctatggtacgttaggaaatgataaggggaggaagaaatggaaacctaaacatctactgcaatgaaaaccaacagcaatgacagtaggagtaattcagccttcgttgaaaacatgtcatcaaacacactctggtttccctgaatctgttgcctccaggtgttaacacagaattaagcatccacaattgctgaaagtcacctggggcatggtgggttttgatcttcttccccttcttttcttccccttcttctttccttctttgatcttcttccccttcttttcttccccttccccttcttttcaatttctgcaataaattcagacatggacagacacattaagctgattcccctacacacataacaatccactgtctaatcctcacacagggacctcaggctcctcagcataagaataggacactgtgagagatatatttcaggaggcctgaaggctggtcatgatagaaattcctcggtttttctcccagaaactgtgggtaaaatgtccctattctagtagatcgttatcccaatatcatttgtcccaagtttgtgcaaacagttacgccatatttttccaatcaacttaaagcaaataccctcaaatgatttctaggagaaaaactgcaatatttagccctgtctcatcaaatactcagattgttcatggttgtgaggactttagacactgaaattagagtgaaaaaggaaatctacaaacccttgagtcaaaatcatagttctctgaatttgtcacatctgcccaggtccaatgtcatgagaataggatcagggcgccacaggtatggcctgagactaggaagagagtcttgctcactgacccatcccttgtctgggcttccaggtagaactagagtttcattcaacctacatgtgcctataggtcctccctgtggcaatgacatctctcagctcagtaatggccacttggagcaggaatatgatctttatatggaagactcagtggatccttatcaccttcatagaaaggtactcacctcccacgtcaagagaaaagccaacatgtttttcctccaatgcataaaaggaacttccatagggctggcaggagtcaggctgttcaagacaactggaaggagttgaataacatctatccagtgagtcctgcaagacttcaggctctactacctccagcagctccctgctgagcctggaaaaggaggaaaaagtaaagaataagccaggggaaatcagacacaacagagccccaactaggtttcatgggtagcatagggaagtggttaaaaaactaaaaggatagatccattaatgaggtaacaaattattgccttcatgttgggacagaacagggccaaatggaaaagaatgaaagagaaagacagatagacacacacacacacacacacacacacacacacacacacacacacacagagagagagaacgagctcagtgaattgtccaggtgacacactgatgagggagtaacaggacactctgagttagtgccctcaggacacacag

SEQ ID NO: 67642 - DNA, 3323 bp, Homo sapiens
atagaccagggccaggtagaaaagaatgaaagagaaagacagggagagggagagagagagagaggagaaagtgagctcagcgaattggccgggtgacacactgatgaaggggtcaaaggacactctgagttagtgccctcgggacacacagcgaacagtgatcatgaaaagagtgggctcaataattttccataaccttgctcaagattccatgcagttgccatacagcctttgaggtatggtcaacctatagtaagtgagtaaatgataaggggaggaagaaatggaaacctaaacatctactgcaatgaaaaccaacagcaatgtcagtaggagtaattcaaccttcgttgaaaacatgaaattgaacacactcttgttttccctggacctggcatctccaggtgtcaacacagaattaagcatccataattgctcaaagttacctggggcatgatgggtcttggtcttcttccacttcttggtacttttcaatttctgcaataagttcagacatggacagacatattaagctggttctcctacacacataacaatccactgtctaatcctcacacagggacttcaggctcctcagcatgagaataggacactgtgagagatagtcttcaggaggcctgaaggctgatcaccatagagattccttggtttttgtcccagaaactgtgggtaaaattccctattctggtagatcgttatcccaatatcatttgtcccaagtttgtgcaaatggttatgccatatttttccaatcgatttaaagcaaatgcccccaaatggctgctaggagaaaaactgcactattcagccctgtctcatcaaatactcagattgttcatggtagtgaggattttagacgctgaaattagagtgaaggatgaaatctacaagatctacaaaattgagacaaaatcagagttgtgtgaatttgtcacatctgcccagatccaacattttgagagtaggattagggcaccacgggcatggcctgagactaggaagagagccttgctcactgacccatcccttgtctgggcttccaagtggaactagagtttcactcaacctacatgtgcctatagttcctccctgtggtaatgacatctctcagctcagtaagggccacttgcagtaggaatatgaccctaaccagaagactcagtggatccttatcaccttcatagaaaggtactcaccatccatgtcaacagccaagccaacatgctgttgctccaatacataaaaggcacttctgtagggctggcatgagtcagtcagttcaagacaacctgaaggagttgaagaacatctatccagtgagtcctgcaagacttcaggccctttctcatccagcagctccctgctgagcctggaaaagtgggaaaaagtaaagaataagccagggggaatcagaaaccacacagccccagctagatttcatggctaacgtaaggaagagtttgaaaagaaaaaggacagatccattaatgaggtaacaaattattgcctttatgatgggacagaacagggccaggtagaaaacaatgaaagagaaagacagacagagacagagacagagacagagagaaagtgacctagtgaattggccaggtgacatactggtaagggagtcaaaggacactctgagttagtgccctcatgacacacagcaaactgtgatcatgaaaagagtgagctcaatagttttccataaaatatgctcaaaattcgatgcagtggccatgagagtacagcttttgaagtatggtcaacctatggtacgttaggaaatgataaggggaggaagaaatggaaacctaaacatctactgcaatgaaaaccaacagcaatgacagtaggagtaattcagccttcgttgaaaacatgtcatcaaacacactctggtttccctgaatctgttgcctccaggtgttaacacagaattaagcatccacaattgctgaaagtcacctggggcatggtgggttttgatcttcttccccttcttttcttccccttcttctttccttctttgatcttcttccccttcttttcttccccttccccttcttttcaatttctgcaataaattcagacatggacagacacattaagctgattcccctacacacataacaatccactgtctaatcctcacacagggacctcaggctcctcagcataagaataggacactgtgagagatatatttcaggaggcctgaaggctggtcatgatagaaattcctcggtttttctcccagaaactgtgggtaaaatgtccctattctagtagatcgttatcccaatatcatttgtcccaagtttgtgcaaacagttacgccatatttttccaatcaacttaaagcaaataccctcaaatgatttctaggagaaaaactgcaatatttagccctgtctcatcaaatactcagattgttcatggttgtgaggactttagacactgaaattagagtgaaaaaggaaatctacaaacccttgagtcaaaatcatagttctctgaatttgtcacatctgcccaggtccaatgtcatgagaataggatcagggcgccacaggtatggcctgagactaggaagagagtcttgctcactgacccatcccttgtctgggcttccaggtagaactagagtttcattcaacctacatgtgcctataggtcctccctgtggcaatgacatctctcagctcagtaatggccacttggagcaggaatatgatctttatatggaagactcagtggatccttatcaccttcatagaaaggtactcacctcccacgtcaagagaaaagccaacatgtttttcctccaatgcataaaaggaacttccatagggctggcaggagtcaggctgttcaagacaactggaaggagttgaataacatctatccagtgagtcctgcaagacttcaggctctactacctccagcagctccctgctgagcctggaaaaggaggaaaaagtaaagaataagccaggggaaatcagacacaacagagccccaactaggtttcatgggtagcatagggaagtggttaaaaaactaaaaggatagatccattaatgaggtaacaaattattgccttcatgttgggacagaacagggccaaatggaaaagaatgaaagagaaagacagatagacacacacacacacacacacacacacacacacacayacacacacacagagagagagaacgagctcagtgaattgtccaggtgacacactgatgagggagtaacaggacactctgagttagtgccctcaggacacacag

SEQ ID NO: 67643 - DNA, 3323 bp, Homo sapiens
atagaccagggccaggtagaaaagaatgaaagagaaagacagggagagggagagagagagagaggagaaagtgagctcagcgaattggccgggtgacacactgatgaaggggtcaaaggacactctgagttagtgccctcgggacacacagcgaacagtgatcatgaaaagagtgggctcaataattttccataaccttgctcaagattccatgcagttgccatacagcctttgaggtatggtcaacctatagtaagtgagtaaatgataaggggaggaagaaatggaaacctaaacatctactgcaatgaaaaccaacagcaatgtcagtaggagtaattcaaccttcgttgaaaacatgaaattgaacacactcttgttttccctggacctggcatctccaggtgtcaacacagaattaagcatccataattgctcaaagttacctggggcatgatgggtcttggtcttcttccacttcttggtacttttcaatttctgcaataagttcagacatggacagacatattaagctggttctcctacacacataacaatccactgtctaatcctcacacagggacttcaggctcctcagcatgagaataggacactgtgagagatagtcttcaggaggcctgaaggctgatcaccatagagattccttggtttttgtcccagaaactgtgggtaaaattccctattctggtagatcgttatcccaatatcatttgtcccaagtttgtgcaaatggttatgccatatttttccaatcgatttaaagcaaatgcccccaaatggctgctaggagaaaaactgcactattcagccctgtctcatcaaatactcagattgttcatggtagtgaggattttagacgctgaaattagagtgaaggatgaaatctacaagatctacaaaattgagacaaaatcagagttgtgtgaatttgtcacatctgcccagatccaacattttgagagtaggattagggcaccacgggcatggcctgagactaggaagagagccttgctcactgacccatcccttgtctgggcttccaagtggaactagagtttcactcaacctacatgtgcctatagttcctccctgtggtaatgacatctctcagctcagtaagggccacttgcagtaggaatatgaccctaaccagaagactcagtggatccttatcaccttcatagaaaggtactcaccatccatgtcaacagccaagccaacatgctgttgctccaatacataaaaggcacttctgtagggctggcatgagtcagtcagttcaagacaacctgaaggagttgaagaacatctatccagtgagtcctgcaagacttcaggccctttctcatccagcagctccctgctgagcctggaaaagtgggaaaaagtaaagaataagccagggggaatcagaaaccacacagccccagctagatttcatggctaacgtaaggaagagtttgaaaagaaaaaggacagatccattaatgaggtaacaaattattgcctttatgatgggacagaacagggccaggtagaaaacaatgaaagagaaagacagacagagacagagacagagacagagagaaagtgacctagtgaattggccaggtgacatactggtaagggagtcaaaggacactctgagttagtgccctcatgacacacagcaaactgtgatcatgaaaagagtgagctcaatagttttccataaaatatgctcaaaattcgatgcagtggccatgagagtacagcttttgaagtatggtcaacctatggtacgttaggaaatgataaggggaggaagaaatggaaacctaaacatctactgcaatgaaaaccaacagcaatgacagtaggagtaattcagccttcgttgaaaacatgtcatcaaacacactctggtttccctgaatctgttgcctccaggtgttaacacagaattaagcatccacaattgctgaaagtcacctggggcatggtgggttttgatcttcttccccttcttttcttccccttcttctttccttctttgatcttcttccccttcttttcttccccttccccttcttttcaatttctgcaataaattcagacatggacagacacattaagctgattcccctacacacataacaatccactgtctaatcctcacacagggacctcaggctcctcagcataagaataggacactgtgagagatatatttcaggaggcctgaaggctggtcatgatagaaattcctcggtttttctcccagaaactgtgggtaaaatgtccctattctagtagatcgttatcccaatatcatttgtcccaagtttgtgcaaacagttacgccatatttttccaatcaacttaaagcaaataccctcaaatgatttctaggagaaaaactgcaatatttagccctgtctcatcaaatactcagattgttcatggttgtgaggactttagacactgaaattagagtgaaaaaggaaatctacaaacccttgagtcaaaatcatagttctctgaatttgtcacatctgcccaggtccaatgtcatgagaataggatcagggcgccacaggtatggcctgagactaggaagagagtcttgctcactgacccatcccttgtctgggcttccaggtagaactagagtttcattcaacctacatgtgcctataggtcctccctgtggcaatgacatctctcagctcagtaatggccacttggagcaggaatatgatctttatatggaagactcagtggatccttatcaccttcatagaaaggtactcacctcccacgtcaagagaaaagccaacatgtttttcctccaatgcataaaaggaacttccatagggctggcaggagtcaggctgttcaagacaactggaaggagttgaataacatctatccagtgagtcctgcaagacttcaggctctactacctccagcagctccctgctgagcctggaaaaggaggaaaaagtaaagaataagccaggggaaatcagacacaacagagccccaactaggtttcatgggtagcatagggaagtggttaaaaaactaaaaggatagatccattaatgaggtaacaaattattgccttcatgttgggacagaacagggccaaatggaaaagaatgaaagagaaagacagatagacacacacacacacacacacacacacacacacacacacacacacacasagagagagaacgagctcagtgaattgtccaggtgacacactgatgagggagtaacaggacactctgagttagtgccctcaggacacacag

SEQ ID NO: 67644 - DNA, 1431 bp, Homo sapiens
cttcttccacttcttggtacttttcaatttctgcaataagttcagacatggacagacatattaagctggttctcctacacacataacaatccactgtctaatcctcacacggggacttcaggctcctcagcatgagaataggacactgtgagagatagtcttcaggaggcctgaaggctgatcaccataaagattccttggtwtttgtcccagaaactgtgggtaaaattccctattctggtagatcgttatcccaatatcatttgtcccaagtttgtgcaaatggttatgccatatttttccaatcgatttaaagcaaatgcccccaaatggttgctaggagaaaaactgcactattcagccctgcctcatcaaatactcagattgttcatggtagtgaggattttagacgctgaaattagagtgaaggatgaaatctacaagatctacaaaattgagacaaaatcagagttgtgtgaatttgtcacatctgcccagatccaacatcttgagagtaggattagggcgccacaggcatggcctgagactaggaagagagccttgctcactgacccatcccttgtctgggcttccaagtggaactagagtttcactcaacctacatgtgcctataggtcctccctgtggcaatgacatctctcagctcagtaagggccacttgcagtaggaatatgaccctaaccagaagactcagtggatccttatcaccttcatagaaaggtactcaccatccatgtcaacagccaagccaacacgctgttgctccaatacataaaaggcacttctgtagggctggcatgagtcagtcagttcaagacaacctgaaggagttgaataacatctatccagtgagtcctgcaagacttcaggccctttctcatccagcagctccctgctgagcctggaaaagtgggaaaaagtaaagaataagccagggggaatcagaaaccacacagccccagctagatttcatggctaacgtaaggaagagtttgaaaagaaaaaggacagatccattaatgaggtaacaaattattgcctttatgttgggatagaacagggccaggtagaaaacaatgaaagagaaagacagagagagagagacagagacagagacagagacagagagaaagtgacctagtgaattggccaggtgacatactggtaagggagtcaaaggacactctgacttagtgccctcatgacacacagcaaactgtgatcatgaaaagagtgagctcaatagttttccataaaatatgctcaaaattcgatgcagtggccatgagagtacagcttttgaagtatggtcaacctatggtacgttaggaaatgataaggggaggaagaaatggaaacctaaacatctactgcaatgaaaaccaacagcaatgacagtaggagtaattc

SEQ ID NO: 67645 - DNA, 1431 bp, Homo sapiens
cttcttccacttcttggtacttttcaatttctgcaataagttcagacatggacagacatattaagctggttctcctacacacataacaatccactgtctaatcctcacacggggacttcaggctcctcagcatgagaataggacactgtgagagatagtcttcaggaggcctgaaggctgatcaccataaagattccttggtttttgtcccagaaactgtgggtaaaattccctattctggtagatcgttatcccaataycatttgtcccaagtttgtgcaaatggttatgccatatttttccaatcgatttaaagcaaatgcccccaaatggttgctaggagaaaaactgcactattcagccctgcctcatcaaatactcagattgttcatggtagtgaggattttagacgctgaaattagagtgaaggatgaaatctacaagatctacaaaattgagacaaaatcagagttgtgtgaatttgtcacatctgcccagatccaacatcttgagagtaggattagggcgccacaggcatggcctgagactaggaagagagccttgctcactgacccatcccttgtctgggcttccaagtggaactagagtttcactcaacctacatgtgcctataggtcctccctgtggcaatgacatctctcagctcagtaagggccacttgcagtaggaatatgaccctaaccagaagactcagtggatccttatcaccttcatagaaaggtactcaccatccatgtcaacagccaagccaacacgctgttgctccaatacataaaaggcacttctgtagggctggcatgagtcagtcagttcaagacaacctgaaggagttgaataacatctatccagtgagtcctgcaagacttcaggccctttctcatccagcagctccctgctgagcctggaaaagtgggaaaaagtaaagaataagccagggggaatcagaaaccacacagccccagctagatttcatggctaacgtaaggaagagtttgaaaagaaaaaggacagatccattaatgaggtaacaaattattgcctttatgttgggatagaacagggccaggtagaaaacaatgaaagagaaagacagagagagagagacagagacagagacagagacagagagaaagtgacctagtgaattggccaggtgacatactggtaagggagtcaaaggacactctgacttagtgccctcatgacacacagcaaactgtgatcatgaaaagagtgagctcaatagttttccataaaatatgctcaaaattcgatgcagtggccatgagagtacagcttttgaagtatggtcaacctatggtacgttaggaaatgataaggggaggaagaaatggaaacctaaacatctactgcaatgaaaaccaacagcaatgacagtaggagtaattc

SEQ ID NO: 67646 - DNA, 1431 bp, Homo sapiens
cttcttccacttcttggtacttttcaatttctgcaataagttcagacatggacagacatattaagctggttctcctacacacataacaatccactgtctaatcctcacacggggacttcaggctcctcagcatgagaataggacactgtgagagatagtcttcaggaggcctgaaggctgatcaccataaagattccttggtttttgtcccagaaactgtgggtaaaattccctattctggtagatcgttatcccaatatcatttgtcccaagtttgtgcaaatggttatgccatatttttccaatcgatttaaagcaaatgcccccaaatggttgctaggagaaaaactgcactattcagccctgyctcatcaaatactcagattgttcatggtagtgaggattttagacgctgaaattagagtgaaggatgaaatctacaagatctacaaaattgagacaaaatcagagttgtgtgaatttgtcacatctgcccagatccaacatcttgagagtaggattagggcgccacaggcatggcctgagactaggaagagagccttgctcactgacccatcccttgtctgggcttccaagtggaactagagtttcactcaacctacatgtgcctataggtcctccctgtggcaatgacatctctcagctcagtaagggccacttgcagtaggaatatgaccctaaccagaagactcagtggatccttatcaccttcatagaaaggtactcaccatccatgtcaacagccaagccaacacgctgttgctccaatacataaaaggcacttctgtagggctggcatgagtcagtcagttcaagacaacctgaaggagttgaataacatctatccagtgagtcctgcaagacttcaggccctttctcatccagcagctccctgctgagcctggaaaagtgggaaaaagtaaagaataagccagggggaatcagaaaccacacagccccagctagatttcatggctaacgtaaggaagagtttgaaaagaaaaaggacagatccattaatgaggtaacaaattattgcctttatgttgggatagaacagggccaggtagaaaacaatgaaagagaaagacagagagagagagacagagacagagacagagacagagagaaagtgacctagtgaattggccaggtgacatactggtaagggagtcaaaggacactctgacttagtgccctcatgacacacagcaaactgtgatcatgaaaagagtgagctcaatagttttccataaaatatgctcaaaattcgatgcagtggccatgagagtacagcttttgaagtatggtcaacctatggtacgttaggaaatgataaggggaggaagaaatggaaacctaaacatctactgcaatgaaaaccaacagcaatgacagtaggagtaattc

SEQ ID NO: 67647 - DNA, 1431 bp, Homo sapiens
cttcttccacttcttggtacttttcaatttctgcaataagttcagacatggacagacatattaagctggttctcctacacacataacaatccactgtctaatcctcacacggggacttcaggctcctcagcatgagaataggacactgtgagagatagtcttcaggaggcctgaaggctgatcaccataaagattccttggtttttgtcccagaaactgtgggtaaaattccctattctggtagatcgttatcccaatatcatttgtcccaagtttgtgcaaatggttatgccatatttttccaatcgatttaaagcaaatgcccccaaatggttgctaggagaaaaactgcactattcagccctgcctcatcaaatactcagattgttcatggtagtgaggattttagacgctgaaattagagtgaaggatgaaatstacaagatctacaaaattgagacaaaatcagagttgtgtgaatttgtcacatctgcccagatccaacatcttgagagtaggattagggcgccacaggcatggcctgagactaggaagagagccttgctcactgacccatcccttgtctgggcttccaagtggaactagagtttcactcaacctacatgtgcctataggtcctccctgtggcaatgacatctctcagctcagtaagggccacttgcagtaggaatatgaccctaaccagaagactcagtggatccttatcaccttcatagaaaggtactcaccatccatgtcaacagccaagccaacacgctgttgctccaatacataaaaggcacttctgtagggctggcatgagtcagtcagttcaagacaacctgaaggagttgaataacatctatccagtgagtcctgcaagacttcaggccctttctcatccagcagctccctgctgagcctggaaaagtgggaaaaagtaaagaataagccagggggaatcagaaaccacacagccccagctagatttcatggctaacgtaaggaagagtttgaaaagaaaaaggacagatccattaatgaggtaacaaattattgcctttatgttgggatagaacagggccaggtagaaaacaatgaaagagaaagacagagagagagagacagagacagagacagagacagagagaaagtgacctagtgaattggccaggtgacatactggtaagggagtcaaaggacactctgacttagtgccctcatgacacacagcaaactgtgatcatgaaaagagtgagctcaatagttttccataaaatatgctcaaaattcgatgcagtggccatgagagtacagcttttgaagtatggtcaacctatggtacgttaggaaatgataaggggaggaagaaatggaaacctaaacatctactgcaatgaaaaccaacagcaatgacagtaggagtaattc

SEQ ID NO: 67648 - DNA, 1431 bp, Homo sapiens
cttcttccacttcttggtacttttcaatttctgcaataagttcagacatggacagacatattaagctggttctcctacacacataacaatccactgtctaatcctcacacggggacttcaggctcctcagcatgagaataggacactgtgagagatagtcttcaggaggcctgaaggctgatcaccataaagattccttggtttttgtcccagaaactgtgggtaaaattccctattctggtagatcgttatcccaatatcatttgtcccaagtttgtgcaaatggttatgccatatttttccaatcgatttaaagcaaatgcccccaaatggttgctaggagaaaaactgcactattcagccctgcctcatcaaatactcagattgttcatggtagtgaggattttagacgctgaaattagagtgaaggatgaaatctmcaagatctacaaaattgagacaaaatcagagttgtgtgaatttgtcacatctgcccagatccaacatcttgagagtaggattagggcgccacaggcatggcctgagactaggaagagagccttgctcactgacccatcccttgtctgggcttccaagtggaactagagtttcactcaacctacatgtgcctataggtcctccctgtggcaatgacatctctcagctcagtaagggccacttgcagtaggaatatgaccctaaccagaagactcagtggatccttatcaccttcatagaaaggtactcaccatccatgtcaacagccaagccaacacgctgttgctccaatacataaaaggcacttctgtagggctggcatgagtcagtcagttcaagacaacctgaaggagttgaataacatctatccagtgagtcctgcaagacttcaggccctttctcatccagcagctccctgctgagcctggaaaagtgggaaaaagtaaagaataagccagggggaatcagaaaccacacagccccagctagatttcatggctaacgtaaggaagagtttgaaaagaaaaaggacagatccattaatgaggtaacaaattattgcctttatgttgggatagaacagggccaggtagaaaacaatgaaagagaaagacagagagagagagacagagacagagacagagacagagagaaagtgacctagtgaattggccaggtgacatactggtaagggagtcaaaggacactctgacttagtgccctcatgacacacagcaaactgtgatcatgaaaagagtgagctcaatagttttccataaaatatgctcaaaattcgatgcagtggccatgagagtacagcttttgaagtatggtcaacctatggtacgttaggaaatgataaggggaggaagaaatggaaacctaaacatctactgcaatgaaaaccaacagcaatgacagtaggagtaattc

SEQ ID NO: 67649 - DNA, 1431 bp, Homo sapiens
cttcttccacttcttggtacttttcaatttctgcaataagttcagacatggacagacatattaagctggttctcctacacacataacaatccactgtctaatcctcacacggggacttcaggctcctcagcatgagaataggacactgtgagagatagtcttcaggaggcctgaaggctgatcaccataaagattccttggtttttgtcccagaaactgtgggtaaaattccctattctggtagatcgttatcccaatatcatttgtcccaagtttgtgcaaatggttatgccatatttttccaatcgatttaaagcaaatgcccccaaatggttgctaggagaaaaactgcactattcagccctgcctcatcaaatactcagattgttcatggtagtgaggattttagacgctgaaattagagtgaaggatgaaatctacaagatctacaaaattgagacaaaatcagagttgtgtgaatttgtcacatctgcccagatccaacatcttgagagtaggattagggcgccacaggcatggcctgagactaggaagagagccttgctcactgacccatcccttgtctgggcttccaagtggaactagagtttcactcaacctacatgtgcctataggtcctccctgtggcaatgacatctctcagctcagtaagggccacttgcagtaggaatatgaccctaaccagaagactcagtggatccttatcaccttcatagaaaggtactcaccatccatgtcaacagccaagccaacacgctgttgctccaatacataaaaggcacttctgtagggctggcatgagtcagtcagttcaagacaacctgaaggagttgaataacatctatccagtgagtcctgcaagacttcaggccctttctcatccagcagctccctgctgagcctggaaaagtgggaaaaagtaaagaataagccagggggaatcagaaaccacacagccccagctagatttcatggctaacgtaaggaagagtttgaaaagaaaaaggacagatccattaatgaggtaacaaattattgcctttatgttgggatagaacagggccaggtagaaaacaatgaaagagaaagacagasagagagagacagagacagagacagagacagagagaaagtgacctagtgaattggccaggtgacatactggtaagggagtcaaaggacactctgacttagtgccctcatgacacacagcaaactgtgatcatgaaaagagtgagctcaatagttttccataaaatatgctcaaaattcgatgcagtggccatgagagtacagcttttgaagtatggtcaacctatggtacgttaggaaatgataaggggaggaagaaatggaaacctaaacatctactgcaatgaaaaccaacagcaatgacagtaggagtaattc

SEQ ID NO: 67650 - DNA, 1431 bp, Homo sapiens
cttcttccacttcttggtacttttcaatttctgcaataagttcagacatggacagacatattaagctggttctcctacacacataacaatccactgtctaatcctcacacggggacttcaggctcctcagcatgagaataggacactgtgagagatagtcttcaggaggcctgaaggctgatcaccataaagattccttggtttttgtcccagaaactgtgggtaaaattccctattctggtagatcgttatcccaatatcatttgtcccaagtttgtgcaaatggttatgccatatttttccaatcgatttaaagcaaatgcccccaaatggttgctaggagaaaaactgcactattcagccctgcctcatcaaatactcagattgttcatggtagtgaggattttagacgctgaaattagagtgaaggatgaaatctacaagatctacaaaattgagacaaaatcagagttgtgtgaatttgtcacatctgcccagatccaacatcttgagagtaggattagggcgccacaggcatggcctgagactaggaagagagccttgctcactgacccatcccttgtctgggcttccaagtggaactagagtttcactcaacctacatgtgcctataggtcctccctgtggcaatgacatctctcagctcagtaagggccacttgcagtaggaatatgaccctaaccagaagactcagtggatccttatcaccttcatagaaaggtactcaccatccatgtcaacagccaagccaacacgctgttgctccaatacataaaaggcacttctgtagggctggcatgagtcagtcagttcaagacaacctgaaggagttgaataacatctatccagtgagtcctgcaagacttcaggccctttctcatccagcagctccctgctgagcctggaaaagtgggaaaaagtaaagaataagccagggggaatcagaaaccacacagccccagctagatttcatggctaacgtaaggaagagtttgaaaagaaaaaggacagatccattaatgaggtaacaaattattgcctttatgttgggatagaacagggccaggtagaaaacaatgaaagagaaagacagagagagagagacagagacagagacagagacagagagaaagtgacctagtgaattggccaggtgacatactggtaagggagtcaaaggacactctgasttagtgccctcatgacacacagcaaactgtgatcatgaaaagagtgagctcaatagttttccataaaatatgctcaaaattcgatgcagtggccatgagagtacagcttttgaagtatggtcaacctatggtacgttaggaaatgataaggggaggaagaaatggaaacctaaacatctactgcaatgaaaaccaacagcaatgacagtaggagtaattc

SEQ ID NO: 67651 - DNA, 520 bp, Homo sapiens
ctttactttttcctacttttccaggctcagcagggagctgctggatgagaaagagcctgaagtcttgcaggactcactggatagatgttattcgactccttcaggttatcttgaactgcctgacttaggccagccctacagcagtgctgtttactcattggaggaacagtaccttggcttggctcttgacgtggacagtgagtaccttactgtgaaggtgataagcctccacctggtcttccagataggggtgatattcctgttccaagtgccccttactgacccgagagacgtcattgccgcaggcaggacctatgggcgcatataggttgtaatgaaactgtagtctcagttggaagcctagacatgaaatgggtcagtgagcaaggctctattcctagtctccagccatgcctgtggcaacctgagcccgctctcagcacgttggacccaggcagatgtaaaaaattcacagaagtatgatttggactgaagggtttgtaratttcctccttcattc

SEQ ID NO: 67652 - DNA, 577 bp, Homo sapiens
ttattgagcacagtcttttcatgatccctgtatgctgtgtgtcctgagggcactaactcagagtgtcctgttactccctcatcagtgtgtcacctggacaattcactgagctcgttctctctctctgtgtgtgtatgtgtgtgtgtgtgtgtgtgtgtgtgtgtgtgtgtgtgtgtgtgtctatctgtctttctctttcattcttttccatttggccctgttctgtcccaacatgaaggcaataatttgttrcctcattaatggatctatccttttagttttttaaccacttccctatgctacccatgaaacctagttggggctctgttgtgtctgatttcccctggcttattctttactttttcctccttttccaggctcagcagggagctgctggaggtagtagagcctgaagtcttgcaggactcactggatagatgttattcaactccttccagttgtcttgaacagcctgactcctgccagccctatggaagttccttttatgcattggaggaaaaacatgttggcttttctcttgacgtgggaggtgagtacctttctatgaaggtgataa

SEQ ID NO: 67653 - DNA, 686 bp, Homo sapiens
tttcctctggagaggagaactggcaactgggagataaggacaggacagagagtgtcattgtaaaaagttttgttctcattgatttatgaaacatgtaaatatattattgtttactcaaaaataagtaaatataaattttaaaatatgatcatagtctctacattttaatcctcagagatgccttttaagtttttctgttagaaacttttaattctattacgcatatataggcattactttgctctttaatattttttcagggaaaatgacataaaaatttaaaaaacccaggcaataactttctacattatcaggttttattacgctaaattaaatttactaaatgctattaattaaattttagtaaatgcttttagagtatgtgttcttttaaytgataagatggtactattctcatgatgcattatgtggagtctataaaggaaagttaatatcacaatgcctagaaaagttaaagtttctgcctcatggggaaatatggctggtctttattccagactattttcaaatagcctgctcagccctccaaagctatgttgtcttctctgacctgtttcttaatttatatgtaacttttaaatctgcaaaaggatatttcaatttatttttattttattattattttttgagacagagcctcactgtgttgcccaggctggtctggg

SEQ ID NO: 67654 - DNA, 612 bp, Homo sapiens
atagtaggagagctaatagaagaccattggagacctctgataagcagtgaaagaaaccagggttgtggttcagtgataagcaaatgtggagagtggcaccgtgaaaatatgatttcaagaaatatggcagccagtgggaagggggcaatggaggaatggcttaaagagaaacataaacaagaagaccccactttaaatttttaattgtttttcagaaataggaaatataaatatgtttatttaccaatgaagcaatgaagaagctgatggagagagagaagacatttatccaaaaaaatcaagagacatttgagagaaggccatggaagatagggaaggaagaatcactatgatttgtgtctattattaaataatcatgtttaatctctatttctatcccaggtggacaaacgaaggctcaaagagaccaaggagccaatcgaagagaaagcaacaagtagtggctccagagtccacatgcaagactagatgactccatgaccaagctcttccactaccaatttcatagtggaaggatttccaayggaaaggaatagcatcgcagcttcaatttgagaattagaaagtaaatagttaactataaatggagat

SEQ ID NO: 67655 - DNA, 1266 bp, Homo sapiens
cccccccgcagcctcccaagtagctgggactatagtagtgaaccactgagcccagcttgtaatattttttttaacagtaaacctgtgttgcttttattagaaaaaaatgatactaagaattggaaaatgacagaacagcttgggaaagggcaggagaggagactagagagctctggccagcccagggtggtgcaaaacaccaaaacaggcagagtgggtggagctgggcattggagcttgagggtaagctgggtttgtctgaggggctctgtcttccaggagctcaccttttcaaaaggtgtgagggaaggaaggaggctataggcccaataagcagttggcatttcctgacaattgtttcaaacacaaagccagcaggagctgctcccagcgagccccgcttctccccataatctagccttgggtaacaggcttctcccaggagatcactgttctcagtccctggcaagagctggccccatggggagtgctttgttgatagtgcccagtgcccagcaaccaggctgggtttgggaaggaggctggagtcttcaggaggaaggtcctgcccaagatggtgcagagggtgagtgaatgggggagcccaggtgggccttcctttagccccagccctttaggctgctccagaggagccttcgcccctttccccagagcacaggctgatctgtcagccaaggagtggaaaggagaacatggaggttcttcctgccacttggatcctaccctgctatgtgatctttgagaagtcaccagggttgcccacccaagggtgcagaggccagagatccacgtgctccaaccctgttggaggtgggartctgtcaggctttctgcaagtctcacagctgtgtgtggaggggagacaaagcatccagcagcctggctggggttcttcaggtttgggccctcctggaagaggagccgggctcctcatgggaattgcgctcctggggagggaggagggcaggaacacctggaagggctgttggttacctcagacccccaaacctgggagctacatcccagatctcatattttggaaatcaggggaagatggatggggagttttagaagtctgacagttctagtttcacacccagatctgcctcagtttcctcttctggaaaatggacatgatgctgcctccatctcctagcatggctattgggattgaatgggaaatcttggcagagagccaggtgcatagttctgctccctcacctctgtaacctatttccacctccc

SEQ ID NO: 67656 - DNA, 1266 bp, Homo sapiens
cccccccgcagcctcccaagtagctgggactatagtagtgaaccactgagcccagcttgtaatattttttttaacagtaaacctgtgttgcttttattagaaaaaaatgatactaagaattggaaaatgacagaacagcttgggaaagggcaggagaggagactagagagctctggccagcccagggtggtgcaaaacaccaaaacaggcagagtgggtggagctgggcattggagcttgagggtaagctgggtttgtctgaggggctctgtcttccaggagctcaccttttcaaaaggtgtgagggaaggaaggaggctataggcccaataagcagttggcatttcctgacaattgtttcaaacacaaagccagcaggagctgctcccagcgagccccgcttctccccataatctagccttgggtaacaggcttctcccaggagatcactgttctcagtccctggcaagagctggccccatggggagtgctttgttgatagtgcccagtgcccagcaaccaggctgggtttgggaaggaggctggagtcttcaggaggaaggtcctgcccaagatggtgcagagggtgagtgaatgggggagcccaggtgggccttcctttagccccagccctttaggctgctccagaggagccttcgcccctttccccagagcacaggctgatctgtcagccaaggagtggaaaggagaacatggaggttcttcctgccacttggatcctaccctgctatgtgatctttgagaagtcaccagggttgcccacccaagggtgcagaggccagagatccacgtgctccaaccctgttggaggtgggagtctgtcaggctttctgcaagtctcacagctgtgtgtggaggggagacaaagcatccagcagcctggctggggttcttcaggtttgggccctcctggaagaggagccgggctcctcatgggaattgcgctcctggggagggaggagggcaggaacacctggaagggctgttggttacctcagacccccaaacctgggagctrcatcccagatctcatattttggaaatcaggggaagatggatggggagttttagaagtctgacagttctagtttcacacccagatctgcctcagtttcctcttctggaaaatggacatgatgctgcctccatctcctagcatggctattgggattgaatgggaaatcttggcagagagccaggtgcatagttctgctccctcacctctgtaacctatttccacctccc

SEQ ID NO: 67657 - DNA, 1524 bp, Homo sapiens
tggaaaaacactagggcaatgctgaccaatggaactttctgcaatgatggaaatattctctatttgtgctgtccaatatggtggacaccagccacatgtggctattgagtacttgaaatgtggctcatgagaatgaagacttgtgttttttggtttttgtttggtttttgttttttgtttttttgttttgttttgtttgttgttgttgtttttgagatggagtcttgctctgtcacccaggctggagtgcagtgacgtgatctcgcctcactgcaacctctgcctcccaggttcaactgattctcctacctcagcttcccgaatacaggcatgtacctgggactacaggcatacaccatcatgcccggctaatttttgtatttttagggagacagggtttcaccatgttggccaggctggtcttgaactcctgatcctgacctcaggtgatccttggcctctcaaagttctgggattataggcatgagccaccgcacccagcctagacttgtgttttaattttaattttattttggacagcatagctctagtgaaccaattcctactgagaggaccaaaaatggtgtcatcattgagatgatcacacttgatcctataccagtggcaaagttmtttcatgtctgtgggtactcactggagcctcccagtaactctctaggccaaggcaggaaccactgcacatgggacaagctacttgcccaaggtcttccagccagcaggtgcaagggctaagactagagcccagatcttctgattctagaagtgaggcttgtgctgagcatggtggctcatgcctgtaatcccagaactttgggaggctgggacgggaggatcccttgatcccaggaatttaagacaagcctgggcaacatggtgagaccccatctctacaaaaagagtaaagtaaaaaaattagccaggtgtggtggtacatgtctgtagtcccagctactctggaggctgagatgggaggattgcttgaacccaggaagtcaaggctacagtgatccctgatcatgccacggcactccagcctgggagacagagagagatcctgtgtccaaaaaaaaaaaaagaagtgcagcttactacatcaccagcctcgctccagcagacctgctgttgggtggaagcataaccaaaaacaatgactgatgccagaatttcaggctcaggcttgacctgtggagaaaaggtttttgaggtggactatggagggggacattggaacctaaagttgctcactcgatttgtagatagaaggggtgaatgtggctatgtatggggacacatatgccaggcactgttaggctctttacagatgtgatttcatttaccttcacaaggtggggcattgttctccccactttatggataaggagatagaggctcagagaggtgacttgagttgtccaaggtcatacagcaaacaagcggcagagctgggctttggaccaggcactttggctccaaagggtttgcctccactaccacctcacttgg

SEQ ID NO: 67658 - DNA, 1524 bp, Homo sapiens
tggaaaaacactagggcaatgctgaccaatggaactttctgcaatgatggaaatattctctatttgtgctgtccaatatggtggacaccagccacatgtggctattgagtacttgaaatgtggctcatgagaatgaagacttgtgttttttggtttttgtttggtttttgttttttgtttttttgttttgttttgtttgttgttgttgtttttgagatggagtcttgctctgtcacccaggctggagtgcagtgacgtgatctcgcctcactgcaacctctgcctcccaggttcaactgattctcctacctcagcttcccgaatacaggcatgtacctgggactacaggcatacaccatcatgcccggctaatttttgtatttttagggagacagggtttcaccatgttggccaggctggtcttgaactcctgatcctgacctcaggtgatccttggcctctcaaagttctgggattataggcatgagccaccgcacccagcctagacttgtgttttaattttaattttattttggacagcatagctctagtgaaccaattcctactgagaggaccaaaaatggtgtcatcattgagatgatcacacttgatcctataccagtggcaaagttctttcatgtctgtgggtactcactggagcctcccagtaactctctaggccaaggcaggaaccactgcacatgggacaagctacttgcccaaggtcttccagccagcaggtgcaagggctaagactagagcccagatcttctgattctagaagtgaggcttgtgctgagcatggtggctcatgcctgtaatcccagaactttgggaggctgggacgggaggatcccttgatcccaggaatttaagacaagcctgggcaacatggtgagaccccatctctacaaaaagagtaaagtaaaaaaattagccaggtgtggtggtacatgtctgtagtcccagctactctggaggctgagatgggaggattgcttgaacccaggaagtcaaggctacagtgatccctgatcatgccacggcactccagcctgggagacagagagagatcctgtstccaaaaaaaaaaaaagaagtgcagcttactacatcaccagcctcgctccagcagacctgctgttgggtggaagcataaccaaaaacaatgactgatgccagaatttcaggctcaggcttgacctgtggagaaaaggtttttgaggtggactatggagggggacattggaacctaaagttgctcactcgatttgtagatagaaggggtgaatgtggctatgtatggggacacatatgccaggcactgttaggctctttacagatgtgatttcatttaccttcacaaggtggggcattgttctccccactttatggataaggagatagaggctcagagaggtgacttgagttgtccaaggtcatacagcaaacaagcggcagagctgggctttggaccaggcactttggctccaaagggtttgcctccactaccacctcacttgg

SEQ ID NO: 67659 - DNA, 1246 bp, Homo sapiens
tatactccagcctaggcaacagagggagaccctatctctaaaaatatgaaaataaaaataaatctattgctgagttaaaacaaaaacccaaaacttagtggcttaaaataattatttgttcatgactctgcagtgtggactcagcttggaggggtcagctcttctccgcttatgtggcagtttttttgcttgccttgctgggggtcactcgtatggctgcactcagcaggctagtggctggcagaggcctgggctcagctggaagacagggatcgctaggcttctcttcctagccatcagggccaccctctctccacgtggcctctccagcaaaggaactggactttttacctggaagttcagggctcctaagatgctccaaggccttaaggagctcctgaaagaaagaataccagtccttggctgggcatggtggctcatgcctgtaatcccagcactttgggaggctgaggcgggcagatcactaggtcaggagatcgagaccagcctggctaacatggtgaaaccccttctctgctaaaaatacaaaagattagccaggcttggtggcagatgcctgtagtcctgtagtcccagctactcgggaggctgaggcaggagaatggcgtgaacctgggaggcggagcttgcagtgagcggagatcgtgccactgcactccagcctgggcaacagagggagactctgtckaaaaaaaaaaaagaaagaaagaaagaaagaataccagtcctcgtctcgcaggacattcagagggtgcagcgacagaatggaggtggagcacttctcccagggcctggccaccactgtgacactcagctagctgtcacaccactgtgtttaaaacactagtctcagcctccaccacccagacaagtgataaagccctaattctctatgcatgacacttccggttttatctttcaaaactcctcccctttacacatcactctctagcctaagtgaagggagcaccacgaaacgcaccacaccactgtgccttcacacactctgctcttgtcccccagtgtccatctggccaacatcatcttcactggggctcctcctcccccagccctcctgacccttccccagagctggctttctcagctttgtccttgagctgttcacagatgaccttggctcacctggatggtggagacaggcaggacttttctaagaggccatacaaagcagccctgtgggaaacgcggctgtgagaataacggt

SEQ ID NO: 67660 - DNA, 1293 bp, Homo sapiens
gaacctgggtagtatggtattggtggggaggtgggggttccttggagaacttttggaagtgagaatatagtatttggtgatatgtggatgttaggaatgagggagaggcagaaggaaaaagattcagggaagccacatagatttctagcttggatgactaggtacatggtagtgctaactggggaaaatgaagagagaataaaagcaaagtgtatcaggggaggagtacatggaaagcaactgcctcttcccatccgcataccccccacccaaaatctagtgggaaataatggttcaggaccacacacacacacacacacacacatatagacatatacatcctttacaactccctctcccaacaaaaacaaaaacaattttttcttttcatcatcaccgttcagagaaagcttgaaaacgagcagcaggtttttagtgagaagcttgaaagcgtaaaggctgtgaggaactgtccctggaagctgcctggggatttcctgtaggaaaatggtgacagggatggtcacaggaatcaagatgtgagcacaaaatgactgagaggaggtggctggagaggccaacccctggatttggaatagggaaagaagcctagaaaagccatgggcctctgggtgggctggagcacactggatggagcaggatggagtgaagaggaaggtctttcaagaagcagggagcctgcagagtggcctgagaatatctagaggccttcagaagtagggcaagacagcacatgggccatgggggcgaaaatggttacgatgtgaaacttgaaactactctggaattgaatgtgattgagtttttattttacttgggctgaacttttctcatacttaaagttcrttctgccccatcagctcctttctgggttgtgtggtgccttgatcagacagaagccaggccctaggagtgttgcttgaggaagagaaaaatgttggtctgttgatctctgaggggccttaatctccaaaggaagcctgagtctaggggagaaactggacattgtagtctgaagacaatgtctcctcccagaacttcttgtattttggggagggtttcattttccccatatgatctttaataatgacatgccattcctcagggccattatcttatttgctctattcctatcaaaatgcttctgtctacagcattggctaatagtatgaaaaccttagtcggtgttcagtcttgaaggcatgtgaaatcgagaacttggaattttgggtatttccaggtcattgttactcaaagacatgctttgttttg

SEQ ID NO: 67661 - DNA, 576 bp, Homo sapiens
tccatgcgcagagctctgatcccaccgtctcctcccctcattctccaagtctgcttagttctgcccactactcttccttctcagcaacagttccagcatccagaagtcttgagcagccttctgcctcacaagttgggggtggcccaattaagaaacttcatggcaacttcaaggccaaggaaacaggctgcattggctgggaaggctcgggtcatcactgcatcagaccctttagacaaggatgtgattccttcatcccagatcagctccctcagcacatctccaaaactgttaggatatttcccaggaggtgcgtctggaagggatacttgagcacatcttgcgggactgccattgcccagttgaagatccctgcaatgcacccagccaccaggattcaaggcacactgagctcacagaccctctttccttccggagtgaagatattttttagccattcatttgtcatgaaatacrttccgctagctggaacgtctcacataagggtaagcacggtccctttgtagatgcctcggatctgaaactcctggtacaacttctttgcacagtccaagg

SEQ ID NO: 67662 - DNA, 794 bp, Homo sapiens
tggaaggcctctggtcatgatgagtgaagttggttttatcccgagagaaatgatacataaaataaagatagagctggtagagggagaggttgtgaactccaagagaggcaagaaatagtcagtgtatcaaaaccactttattattctggctataactatttttcttttcacttatttcctagaaaatataatggtagtaagttcattgcactttcctcttaatttcttctgtattaaaatgcaggaggagggaatagagaatcttcacatttgcaagaagtagcttaattatataataattataataaactgttactatctgcatagcaataggttaaaataggttaattttctctctgtctctccttttttttttttttgagacagaatctcactctgtcacccagctggagtgcaatggtgcaatcctggctcactgcgacctctgcctcatggattcaagcaattctcctgcctcagcctcccaagtacctgggattataggcacttgccaccacgcccagctaattttttgtatttttagtagagacggggtttcaccatgttggccaagcaggtctcgaactcctgagctcaggtgatccacccgctttggcctctcaaagtgctgggattacaggcatgagccaccgcgtccggactctctctctctctctctctctctctctctctyttttttttttttttttaagagacaaggtcttgctacgttgcccaagctggtctgggtcttgctgtgttgctcaaactggtctcaaactcttggctttaag

SEQ ID NO: 67663 - DNA, 947 bp, Homo sapiens
aatcgagtctggctcatcatttggtcattccttttttccaacgtgacagcctcactgacagaatctcataaatgagtaaacatttactaagtacctagcgtgtgccaggcattatgccgggtgttttgtttatgaacaccgtaagctggtctgttaggcagtacgacaggttccaagtctagagatgaggcagatcagcaaaacagctgttctagaaccacatgagaaatgctactgcaagttatgtactgaacatcataggatgcaatgctaacattaaatgctgaaattgcttgctttggctaaaatgagaatggagagatagcgataattgattgcagaatcaccaggagaaaaaagaaaatgttaaacggacaggtatatttagaattaggactgcattgctgaagaagaacccatgttactttgtccttaacttaaaactaatttgaaaatgttgcatgttggtctagtttatgtgctacttatcaagaaaaagactacttgaatatacaaatatttttttcagatatttgcaacctatatatgaaaatcctattaacaatctcttctaccacttcctttccaaactatgaaacatgccctgaattccaaaaaatgaaagtatctgataatctcaagttttatacatgcttcaagtttaggaagtagagctaggcaaaagaaggagtcaagtcaatgcccttcccaatttttaaaattaataccaagagttgaaaccatgaatcccagccacctttctataatcrtagaaagattagcatgttagtttaatttctgcacaccacttcagaccacctgcatccccaaatagtgtcagataacaggcctttcttcatacattaattttacattaccctctctcccaggcagctagggagctaacaagcagtccctgtggctcaatctgaacagaactggcatgc

SEQ ID NO: 67664 - DNA, 795 bp, Homo sapiens
catggattctgactcttgcctggtgyttcatccactactctttgaacagagtttgtgtctttaagacttggctaaatatctaaaatcaaattcttatattcactagaagaaaatataatctaaaggaagctggtggtggttcctttcatggtgtttgtgatccagactgttggcaactcttagatattctctactggatacatgcatatatatcacatagaaatgtgactaacccataaggaaaagaactggagaataacttagtaacagcattattattatgctcagaggctcagtaaaatacatatacatagaactataactcaaatttaaagtttacatgtataaatgtattactgtaaatatacatccactgatacatgaaacaatcacaacagtctgattatattttataagatcgttacatacgtaactacaggatttctgctttatatttatacttacaagtagaattttcttttccccttttggcaggtaaccaaagttaaaaacaaactatttagagaaataaacttgataccaagggacaaaatagatgccagaaccctcatgtcatattgcaaacttgattcaaattctgttgctgtaacctttgtgacataactttatgtaaaaggtttacagattttttttaaaattactatttacttgagtaaatgaaataataaatgttctagtccatttggcctgctacaacatacataccataagctgggtggcttaaacaacaaacatttacttatcacagttctggagactagggactcccagatc

SEQ ID NO: 67665 - DNA, 743 bp, Homo sapiens
tctcttgctttgaaatgaaatatgttgcttggattatgagtgagaaaacacatttattgagcatttatctcatgtctgacgtgaatatacacttttcacctaggatacttcttatagctttcacatattatcactggtttaatccagtgaaaggttatttcttttacatggccatgcaagttactagaagactttactcactgtatctatttgaagatccatgtggaaaaaagctttcaaggtcataactaacaagacaacatggagaattgagtcccagtttgtcacacttcacaratcactgctgcttacatttagaagcaagtcccaaggctaaacctgttgtcaaaacaacaacaacaacaatgcgaccgtgtgtcaagaagtgaaaaataagagacactatagaagaggtgctgcactgcccaagtgtacagaaacgtgggcagggaagtatcactatgagcagcgggcttcctcttgaattggtgccttctatgagcatctactctgcttatgtcttggccacattgtcacttagcacagctttcattgctgcctcttgcgttctttgtggaccttagggaatcactaaaggaatgaagacaaagaggtggaggtgagacaagacaaagaggaagacaacaggagggggcctctgatcagcctgcctttttatgttgatgattgcttcttattaataaaactgtgtgagacattggagctgaagaaaggataaaatt

SEQ ID NO: 67666 - DNA, 569 bp, Homo sapiens
agtaatggactgattattttaagaatacaactcggtgacaagtagtttatgtttaactcagttttggtttgttgtttgttaaggccattgcttaggataatgaaaacaagaggaggagaaacaagaatataaacaagaaacagaagcagcagcataagaaaatgaagaggaacaagaagatgatgattagaagaagaaaaaacagactgaaagmaaggaagaacaggtgcgggaattacaaagcctattatgataccttatttcccctcctgatttatgaaatttgaaaaaaattcaagacttttcacaacaaagccaagctaaaagatacaccaatagtcacccgctaaattttgctaagaataagacaatgttgccactcacacctggcccaggcaccagcaggaggagggcacttccagattctgcaggagaaggaggaggactcctccttgccatggctgggcctccactgctgccacctaggcccacagtacagcacccgcagctgcctccccacttcaggccaggctgggcccggtgggctccacagcattcccactcccact

SEQ ID NO: 67667 - DNA, 651 bp, Homo sapiens
tgcatttagattacaaggaccataaatggattataggttttgttttgtttttaagttttcagaatgttttcatgatagtttaagcccatacaaatatcattctttagaccacagattggcaaagtatgacctgtgggccacatctggccagcggcctgtttttgtaaataaagctttattggaacacagccacactcgcttgtgtacatactgtctgtagctgcttttgtgccacaaggcagagttgagtagttgcaacagagaacatatgtggtccacaaagcctaaaatatctgccatccggccttttacaaaaaaatttgccaactccctttttagaccaacattgacacaatctcattttcctcactaatttaacaggaggaagtttatatattaatgcaaaaatagaacacatgrcccttcctcaaaatgtaccccctctcatatcttataagcatgtcactgcttttctatacaagaagcattttttagagtagctgtaaagaacagagaatttgagtcctgactccatgctctccagctgtgtgactttgggccagtccttcagtctctcatgcctcagtttttctcatctgtatagggggattgtgatcatacctagttcatcaggttgtaatgaagattaaa

SEQ ID NO: 67668 - DNA, 651 bp, Homo sapiens
tgcatttagattacaaggaccataaatggattataggttttgttttgtttttaagttttcagaatgttttcatgatagtttaagcccatacaaatatcattctttagaccacagattggcaaagtatgacctgtgggccacatctggccagcggcctgtttttgtaaataaagctttattggaacacagccacactcgcttgtgtacatactgtctgtagctgcttttgtgccacaaggcagagttgagtagttgcaacagagaacatatgtggtccacaaagcctaaaatatctgccatccggccttttacaaaaaaatttgccaactccctttttagaccaacattgacacaatctcattttcctcactaatttaacaggaggaagtttatatattaatgcaaaaatagaacacatggcccttcctcaaaatgtaccccctctcatatcttataagcatgtcactgcttttctatacaagaagcattttttagagtagckgtaaagaacagagaatttgagtcctgactccatgctctccagctgtgtgactttgggccagtccttcagtctctcatgcctcagtttttctcatctgtatagggggattgtgatcatacctagttcatcaggttgtaatgaagattaaa

SEQ ID NO: 67669 - DNA, 1352 bp, Homo sapiens
aatggggaataattggcaatttatgtgtatgtgtttttaaggccgtgggacaaatatatttttgttgacaagcagctgaagctttccctggtataaagacagggttactaattaagggatagtataattatgtgtgttggcagaaatgtcacatatgtaccatggctgcaaacatcgggggcctgcgacccagctcatctcagggggttcaggccaagacggacctctggggcagcacctcacatcaggccagtcagtcattgcttcctcctcggtgatgtttccccagctcgctacactgatgaggactccatcacaagccactgggaaagacaggctatgaagtttgaacatatgtgaaaatgtaccttcatctcatagaatccactgcaagcctcaagaatgatgttggagaaatctacgttttttagtgcaggaaggtgattgaaattatgtgatatgaaaaaataaatatatataaaacggtctatgtcagcatggagagtggaaagtacgcatcttcctcctctgcaacccaggatccaatctctggggccaacctgctccagctccatcctgcagggggaaatgtgagatccttcattactgaggttctaggttcctgggatatctcagaaaggcacatctccaaacacagaaaagttccctgccagtcacgttgaccacctcatgcagggtaactttgataagttttttcacacacacacacacaagtctgctttgtatgcatttctcagaaatctctttctcaaaagggatgcaggctcaaaagaaagtaggctgtggggagaaagaaaatccctgccgttctgggtaactgaaaaattaaattattaaaacaatcacagcatgtgaacttctcccaaaaccctattccaagcttcccagtcagacctagagcagtattgttcagagmccaaggggcagtgcagacaagcaaggccaacgtggccttctcagccaacttggcttcctcagagttttcctggcccctcctgtacagtgcagcccttaagcccctactgtttgctcacttgtctgtgagcccagttcagccccgtgcagggcttctggaatgctggcctgtgtcttgcactgtccttcaacctagctggggaagtgaatgattagttaatgacctagtatgaggcagaacccagagttctaaaagatccttgagaagagtgtccttgaggtgatgcgggggaggcgcaacaagaaccatcttttaaatgattgaggaccatggttgtgtgccctgaaggcaccagaaaaattagtgccagcccctctgtatcatgacagggctctgtgtttgagatggcaagttt

SEQ ID NO: 67670 - DNA, 597 bp, Homo sapiens
tgctccaagatctcataaggctgtgctcttgctaggggtgagggcttatctaaaggtttgaccaggaaagtatctgcttccaagctcacaaggttgttagcagcattccattttttataagtggtcagattgaagaccttagttccttgttggctgttagctgaaaactgctctccaatccttgccatatggacccttctaacatggcaatttgcctcatcaaagccagcacagaagtgaattagcaggaaggaagtgacaatctgttgtaacctaatcaatactgctgtgttttattgattagaagcaaattactcaaggaaaagggattacccaaagtcatgaatatcaggacatgggtatcattgagaaccttcttagagactgctactataacccccatattgaaaaaacccccatactgaacttcccacagagtcctcgccattgaaaaatttctctctcaaccgaagsgattgaagccattgaaaagaactgtcaaagatgcaaatgtgtcacatgggcagggttatattaattcatgtatatcatctctcaaattattttattacattagctagtcatctcaatatttat

SEQ ID NO: 67671 - DNA, 637 bp, Homo sapiens
tttgcttgctcctgaactagaaagagctccagctttggagcattaagattggcattttataaactccaaagctctggttcacaatcctgctgtcacccttgcacatctgagggaaaaaaacatgttttcatcagtaattctgtcttaccccttagtagaaaggctcccagcatgcacatacatgacaaagctagtgaaatctaagcttcagggacactcacatgcacaaggccttgggaagggcccatrtgaggtgttcatatagttatctgtttttgaatcatttgaaaaaataagatccggagactgttgtctctttccattccagtttttccccaatgagtcttttccatgtgttgggtagtgctaggatgcccttgggaatttcgaggagccaactaaacagaagttgagatgggaaattggggatatttgtagcctgggtgtagtgggatctggagaaatagacagagagaaagacatttcacagtctcttctttgtatggttaagttactgctagtacctcccaagataggaatgacttgtgggaatatttccattgaccaccatgctgacccttaagtgttacgatgcaaaagttcaggcttagtggtcttagcgctatgtgaacatgtt

SEQ ID NO: 67672 - DNA, 706 bp, Homo sapiens
agtctaccaagttaaggagtggttaggaagattaggaaagtgtttctgtccctcactgagaattaaactttgtttgtttgtttgtttgtttgtttgagatgcagtcttgctctgtctctcaggctggagtgcagtggcgcgatctcggctcactgcaagctccgcctcccgggttcacgccattctcctgcctcagcctcccgagtagctgggactacaggcgcctgccaccatgcccatctaattttttttgtatttttagtagagagggggtttcaccgtgttagccaggatggtcttgatctcctgacctcgtgatctgcccacctcagcctcccaaattcctgggattacaggcgtgagccaccgcgccaggccaagaattaaactttgtcctccaaagattcgtgtgtgtgtgtgtgtgtgtgtgtgtgtgtgtgtrtgtgtgtgtgtgtatttgttctaaaaatacccccagaaaactagaaaaataagaaagtgtaactcctcctcaccctgatgtaaaagtctcagtggggaccacatttattgcgtccatacccctcgtggattagtctaaaagtcttggaatgtcaaagactaccatggctgctatcctacttccctccagtaacctctcaagggggcagatgattccacattgaataaatccaatttaggggaaaactcctgtcgggaaaaggat

SEQ ID NO: 67673 - DNA, 582 bp, Homo sapiens
ttatttttgttttgttttgagacagggtctccctctgtcacccaggctcgatcgcagtggcgcaatcataactcactgcagccttgaccttccaggcttaagtgatcctctcaccccagtctcccaatcagctgggaccatgggtgtctaccaccacacttggctaatttttttttttttttttttttttagttttttgtagagatggggtctccctgtgttgctgagattggtctcaaactcctgggctcagggctcaagcaatcctcccgcctcarcctctgagtagctaggaagaatgcaggcttgcaccactgcatccaactaatttttaaatatcttatagaaacagggtctcactctgttgcccaggcttgtcctgagctcctggcctcagcgatcttcccaccttggcctcccgaagtgttgggactgcaggcataagccactgcacccagctggtgtgaggccttttaaagaggtgaccacagccagggagccctgcattgaggtgcccacagatgctgtggaatgtggggttggggggcagtgagcaacagttggagccagagaagaccccac

SEQ ID NO: 67674 - DNA, 1181 bp, Homo sapiens
tgcatgaggctagaaacagccattcatttggaagagggcgttgcaatgactcagcctctgggcttaagctttccttttgcataagaagtctgaggggtcctcagatgttttatcttcctttacaaagttgtgttgtcaacaccaaggaaacagtcttgattctgaacaaggaggtagcctgggtactgaaggtgaaaagagctcagatcagaagtttcttggaaagagatttaaagatttttaaaaaatcagattactaaggcatattaaaatatgttcagtcttacactgtgttctttgaaaccttgaattactctagcaaaaggctcagagggtactgctatgagaagctggatcttggacatctctttcaaatgcctcggtacctttcaaagggctttggatggaatgaagggacaccattgggtctcacagctttctcctgcctaacataccacagcagtgtatgaaattgttcccatcagctccagcgcgtgaaagacaatacgaacagtaacacccccaaagaaacagtggggctggagacagcagaatccttggagggttctctggctgaagaaatctctctcctaccacagatactgtccccagagaaggtgcacctctaccaccaatgccctccatcctcagttgacaaggattcaaaaagtttgttggtgacrctgacatgtaatattcccctgcgagttacacacatccaggtgaccttcggaccagcattgccggcacacccgtcacgccatcaacctgccaggctggagaagaccgctcagagcttttccttgactggggagaggggagccggagcagcgccccacgtctcacggttcacccctgccgtctctcggggccttccttcaggctttccctgtatcctcagatcttcgccagggtcctgtgatccagtgttagttcattccatgtgtcatatatgaatgatgtcatttgaatcatttcaagtccttttgtaggaaaactaaggcagaaaggccagcaccacaaagaggcatccagaattctcctcggcacaggagggtgcagccatggtgcctttgaggagacggacacgcttagttccccctgccatcagtgggcatctcgatgttaaccagatcttagaaattgctctgctcaggttggactcataagtgtactcttag

SEQ ID NO: 67675 - DNA, 504 bp, Homo sapiens
gtagcctccatatgcctttccttcttggtggcatttttcatctgaaagcattttttttttttttagctcaaaaacttagatgtgaaaaattcaacgcattgggaagaggcgtcaacatttgaaccgcaaatgattaaacctttatgactaaagtaataggtttggcttcagtcttcccagtggagtagcaagcagaggtccttttcagtttgcaaacagtagtatacaaacttggtccatatcaaatactgtttctcttccagggcttgtgtgtgcactgggaacagcaacaaaagttgaacagcaactgggtggkgtttctttatgtcttctgtttaatcagagtttcctgatggtttggccacttcattctcctttggcttaaggggttctaagccatggggcagaccttgggtggctcactgctcttggaaggagggtgtccagccttcctggcagtgtggagatgagtaagggaaacactgcaggggcttctggcttcct

SEQ ID NO: 67676 - DNA, 1475 bp, Homo sapiens
tggacggagaacacaactgcaagtccacagaccagaggtctaaatatttcaaaagaagaaatcgagccagcaaactttcaaataaaatattggctatcctcctgctttcctaatgatgaaaccaaaaaatacgtggaaagctatgatttttattggctgaaagttggcaaaatctcaatggctgaatgtaatgcttgttgtacatgtctgggggttttactcacgggccagcaatgcttgaataagtcaaaaataaagacatccataattcataaatgagtatgtactttttcagtaaaatttatttttcttgcctcattcagtataatcaataattatgttgtatgagcaagattttcacataattcatcttttaacattaatgtgataaagtgccaaattttgaatgcatttttgtcaaaaatgtacattaagcctggtgcagtggctctcacccgtaatcccagcactttgagacgccaaggcaagaggtttgcttgaggccaggtgtacgagtccagcctgggcaacagtgtgagacctcatctctaaaaaatgtgtttacaaaactatccaggcatggtggtgcatgcctgtgggcctatctactcaagaggcagaggctgaggcgggaagatcacatgagctcaggagttcaaggctgcagtgagctatggtcatcacaccactgtacttcagcctgggtgacagattgagatcgtgtctctaaaaattttttttttaaaaaggaaattaaatgtaaatttagaaaataaatttaaataatttttcatattttcaaaaagtattgcctctaaaacattcaaaattagctgttaaaaagcaaaacacaaattttaattatggaagtaactttaatcaaagctagttttttaaaaaaaactttgaaaatttaattaaatcacctgaaatatttaggtaaaaatgaaactatttatgattccactgagaactgtaaccagaccagaaaatgctgtgttgcttatataaaaaaaagtaggccaggtgtggtgactcacacctgtaatcccaacactttggaggctgaggctggaggatcacttgagcccaggagttwcagaccagcttgggcaatatagggagaccccatttctataaaaaatttaaaaaaagaattagttggggctgtgattgtgccatgccagcctggataacagagcgagaccctgtcagaaagaaaggaaacaaaagagaaggaagagagggaagaaagggaagaaaagaaggaaggaaggaaggaaggaaggaaggaaggagtgagtgagtgagtgagtgagtgaaggagggagggagggaaggagagagggagggaagagagagagaaggaaggaagggagggagggggaggggagaaagagaaggaaggaagggagggagggagagaagaagaaagaaagcatatctcacttcatgtaggttataactagacctac

SEQ ID NO: 67677 - DNA, 1475 bp, Homo sapiens
tggacggagaacacaactgcaagtccacagaccagaggtctaaatatttcaaaagaagaaatcgagccagcaaactttcaaataaaatattggctatcctcctgctttcctaatgatgaaaccaaaaaatacgtggaaagctatgatttttattggctgaaagttggcaaaatctcaatggctgaatgtaatgcttgttgtacatgtctgggggttttactcacgggccagcaatgcttgaataagtcaaaaataaagacatccataattcataaatgagtatgtactttttcagtaaaatttatttttcttgcctcattcagtataatcaataattatgttgtatgagcaagattttcacataattcatcttttaacattaatgtgataaagtgccaaattttgaatgcatttttgtcaaaaatgtacattaagcctggtgcagtggctctcacccgtaatcccagcactttgagacgccaaggcaagaggtttgcttgaggccaggtgtacgagtccagcctgggcaacagtgtgagacctcatctctaaaaaatgtgtttacaaaactatccaggcatggtggtgcatgcctgtgggcctatctactcaagaggcagaggctgaggcgggaagatcacatgagctcaggagttcaaggctgcagtgagctatggtcatcacaccactgtacttcagcctgggtgacagattgagatcgtgtctctaaaaattttttttttaaaaaggaaattaaatgtaaatttagaaaataaatttaaataatttttcatattttcaaaaagtattgcctctaaaacattcaaaattagctgttaaaaagcaaaacacaaattttaattatggaagtaactttaatcaaagctagttttttaaaaaaaactttgaaaatttaattaaatcacctgaaatatttaggtaaaaatgaaactatttatgattccactgagaactgtaaccagaccagaaaatgctgtgttgcttatataaaaaaaagtaggccaggtgtggtgactcacacctgtaatcccaacactttggaggctgaggctggaggatcacttgagcccaggagtttcagaccagcttgggcaatatagggagaccccatttctataaaaaatttaaaaaaagaattagttggggctgtgattgtgccatgccagcctggataacagagcgagaccctgtcagaaagaaaggaaacaaaagagaaggaagagagggaagaaagggaagaaaagaaggaaggaaggaaggaaggaaggaaggaaggartgagtgagtgagtgagtgagtgaaggagggagggagggaaggagagagggagggaagagagagagaaggaaggaagggagggagggggaggggagaaagagaaggaaggaagggagggagggagagaagaagaaagaaagcatatctcacttcatgtaggttataactagacctac

SEQ ID NO: 67678 - DNA, 1475 bp, Homo sapiens
tggacggagaacacaactgcaagtccacagaccagaggtctaaatatttcaaaagaagaaatcgagccagcaaactttcaaataaaatattggctatcctcctgctttcctaatgatgaaaccaaaaaatacgtggaaagctatgatttttattggctgaaagttggcaaaatctcaatggctgaatgtaatgcttgttgtacatgtctgggggttttactcacgggccagcaatgcttgaataagtcaaaaataaagacatccataattcataaatgagtatgtactttttcagtaaaatttatttttcttgcctcattcagtataatcaataattatgttgtatgagcaagattttcacataattcatcttttaacattaatgtgataaagtgccaaattttgaatgcatttttgtcaaaaatgtacattaagcctggtgcagtggctctcacccgtaatcccagcactttgagacgccaaggcaagaggtttgcttgaggccaggtgtacgagtccagcctgggcaacagtgtgagacctcatctctaaaaaatgtgtttacaaaactatccaggcatggtggtgcatgcctgtgggcctatctactcaagaggcagaggctgaggcgggaagatcacatgagctcaggagttcaaggctgcagtgagctatggtcatcacaccactgtacttcagcctgggtgacagattgagatcgtgtctctaaaaattttttttttaaaaaggaaattaaatgtaaatttagaaaataaatttaaataatttttcatattttcaaaaagtattgcctctaaaacattcaaaattagctgttaaaaagcaaaacacaaattttaattatggaagtaactttaatcaaagctagttttttaaaaaaaactttgaaaatttaattaaatcacctgaaatatttaggtaaaaatgaaactatttatgattccactgagaactgtaaccagaccagaaaatgctgtgttgcttatataaaaaaaagtaggccaggtgtggtgactcacacctgtaatcccaacactttggaggctgaggctggaggatcacttgagcccaggagtttcagaccagcttgggcaatatagggagaccccatttctataaaaaatttaaaaaaagaattagttggggctgtgattgtgccatgccagcctggataacagagcgagaccctgtcagaaagaaaggaaacaaaagagaaggaagagagggaagaaagggaagaaaagaaggaaggaaggaaggaaggaaggaaggaaggagkgagtgagtgagtgagtgagtgaaggagggagggagggaaggagagagggagggaagagagagagaaggaaggaagggagggagggggaggggagaaagagaaggaaggaagggagggagggagagaagaagaaagaaagcatatctcacttcatgtaggttataactagacctac

SEQ ID NO: 67679 - DNA, 893 bp, Homo sapiens
gcccaaactgccaaccatgtgttacaaataaagcccttcccgaaaatggatcaaaaacactttgtaatgagtgaaggagctggtttaaaaagggccaacatcaaacaaaatcccagtcctgagtcacagacactcaaatagccccttccagggtgggaatgtcctccaaagcacttccatttgtgtgagtagttcttcaagccaacgtatccaaatacatacatctgatgagcggactttgcttgtttacatacattatgtacattcctttgatagtcaattgtctaaagttggaacagttcggagggaagagctatataaggtttgcaatgatctttgtccaccagttactggacaactggatccaaattccacaaatagctgtggttctttacctgcatggttctcctcccctgagacatccagtgccatgcattttctcttgcaggtctttccttgcatcacccctccaaccccagcagatatcctggctgagcctgttttctctgtgaggggctacactgcacactggggctcttgaaaagggcttgctgggctgggcacggtggctcacgcctgtaatcctgacactttggtaggccgaggtgggtggatcacctgaggtcaggtgttcaagatcagcctggccaatatggtgaaaccccgtctctactaaaaatacagaaaaattagctgggcatggtggtgtgcacctgtaatcccagctactcaggaggctgaggcaggagaatcacttgaacccgggaggcagaggttccagtgagccaagatggcaccaytgtacttcagcctaggcgacagagagagactccaattcaaaaaaagaaaaagagaaaaaaaaaaaaaagaaaaaaaagaaagggcttcctgca

SEQ ID NO: 67680 - DNA, 577 bp, Homo sapiens
accccttcttctgttgtgtctttcccatcaccctatggcaaaagagttttccatttctgtggttttccaagcatcccacacctccccttgcagccacatacttagggctggtgaagtagccgttcagtcatctcactggctccagattgttctccaggcatccagggggcatttatgctcatgcccagcgctggtggctgcctcgatgctattgtagatgtccaagtcctgagccctcggactgctttcaaagccccagctgccctaccctgtcctcccatctctcrttcctataatccgctctatccgaaagagtcgacttgccatttgtacaactccatacttcacatttttcttttctctgcctttgtacactctgtttattcaacgtacatagtacaaataccttcttaatctaccccctttaaactcctaaccattgttcaaaactcctcctcctatgaaacttttcttagtccttggatttggatgttgtcatcttcagggcatcttctctgggtttctttgagatcaacacaatatagtcagggctgtgggccctgagcccatctgaata

SEQ ID NO: 67681 - DNA, 577 bp, Homo sapiens
accccttcttctgttgtgtctttcccatcaccctatggcaaaagagttttccatttctgtggttttccaagcatcccacacctccccttgcagccacatacttagggctggtgaagtagccgttcagtcatctcactggctccagattgttctccaggcatccagggggcatttatgctcatgcccagcgctggtggctgcctcgatgctattgtagatgtccaagtcctgagccctcggactgctttcaaagccccagctgccctaccctgtcctcccatctctcgttcctataatccgctctatccgaaagagtcgacttgccatttgtacaactccatacttcacatttttcttttctctgcctttgyacactctgtttattcaacgtacatagtacaaataccttcttaatctaccccctttaaactcctaaccattgttcaaaactcctcctcctatgaaacttttcttagtccttggatttggatgttgtcatcttcagggcatcttctctgggtttctttgagatcaacacaatatagtcagggctgtgggccctgagcccatctgaata

SEQ ID NO: 67682 - DNA, 1279 bp, Homo sapiens
atgtaaaataaatataatagagatagttaactttaggctcacacgtctcccaagcaaaccacaagcttatgagtgcaggactcttacgtgtttccttccgcagagccctgcacactgtaggggctggggcgtgacttggcgagtacagcaagtctggctagagtttctcaagggtgtgcccatggggattagtggaaagagctctgtgcttgggttgggtggtttgcccactccaccttttattctccttgggtaagtggcttgggacctcatttgccctttccaatgggatagcaacatgtttctttttggaagctactgtgaaagatgatgatctgggagggacttgggacacaggcttatttgttacacagatgccaccggccttgcatctctcttgtgagctcagaagttgcttgacatcactgcctttttcatcaggtggttcataggaagaggccaaragagagagaaggatgctgtatttatgggaaaaggctaccagaatttccatccgaggttggtggtccattcctctacctatgtggaaggcaggttctccttgacaatagccaggtctgcatgtgtcttccactcaatctacaacgtatccacggagagtgaccttgtactcagtactcagtactccagccccttggctggagttagctctgcccgctccacccctgtgccttttctggcccacttgaaatttgatgtcttgggttgtagcctatttttaaggttgagtctcactcttagactatgagctcttgaaaaataataactgtgtcttatttgtctttgctcttccacttacatataggaactactaatgacatttagcaaatgtctctttatcttttgatggagcagagagaggtctgaggatgaactgctttcatcttctcgctgtgtgatcttgcacgggtcctttcctatccctcctctgccactcttctaggaccgaaggggttcgagggtgacctttctggccacttgcaattgctaagagtgtattgatttgagaattaaaggaacgtggctcttgaaatgtgtgtgcggtagaggccatccaaaatagctaatgaagaaacatcctggggattacgccaagttcacaacgcattttaatgagccgtgagtgtgtgtgaatgcgtgtgtcgaccacatgcacattgatggctgtggcagggaggacgctgtttctgagagtagagtcctcacttctgagaaacttacagaaggtggaacagatcacgccgtatttcatagcagc

SEQ ID NO: 67683 - DNA, 1279 bp, Homo sapiens
atgtaaaataaatataatagagatagttaactttaggctcacacgtctcccaagcaaaccacaagcttatgagtgcaggactcttacgtgtttccttccgcagagccctgcacactgtaggggctggggcgtgacttggcgagtacagcaagtctggctagagtttctcaagggtgtgcccatggggattagtggaaagagctctgtgcttgggttgggtggtttgcccactccaccttttattctccttgggtaagtggcttgggacctcatttgccctttccaatgggatagcaacatgtttctttttggaagctactgtgaaagatgatgatctgggagggacttgggacacaggcttatttgttacacagatgccaccggccttgcatctctcttgtgagctcagaagttgcttgacatcactgcctttttcatcaggtggttcataggaagaggccaagagagagagaaggatgctgtatttatgggaaaaggctaccagaatttccatccgaggttggtggtccattcctctacctatgtggaaggcaggttctccttgacaatagccaggtctgcatgtgtcttccactcaatctacaacgtayccacggagagtgaccttgtactcagtactcagtactccagccccttggctggagttagctctgcccgctccacccctgtgccttttctggcccacttgaaatttgatgtcttgggttgtagcctatttttaaggttgagtctcactcttagactatgagctcttgaaaaataataactgtgtcttatttgtctttgctcttccacttacatataggaactactaatgacatttagcaaatgtctctttatcttttgatggagcagagagaggtctgaggatgaactgctttcatcttctcgctgtgtgatcttgcacgggtcctttcctatccctcctctgccactcttctaggaccgaaggggttcgagggtgacctttctggccacttgcaattgctaagagtgtattgatttgagaattaaaggaacgtggctcttgaaatgtgtgtgcggtagaggccatccaaaatagctaatgaagaaacatcctggggattacgccaagttcacaacgcattttaatgagccgtgagtgtgtgtgaatgcgtgtgtcgaccacatgcacattgatggctgtggcagggaggacgctgtttctgagagtagagtcctcacttctgagaaacttacagaaggtggaacagatcacgccgtatttcatagcagc

SEQ ID NO: 67684 - DNA, 758 bp, Homo sapiens
agtttctctgtatccctgacagtacttggtattacttccaagtactttttttttttgttttagcagttctggtaggtgtgtaattgtatctcattgtgattctaatttgcatttccttaacgggtaataatcttgaatatattttaatatgcttatttgccatccatatatcttctggtaaatggcctatcttttgcccagtttctaactgaattgttggtatttactgctgaattttgatcattctttctatgcatctttcggtcagatatgtggcttgcaagtattttctcccagtatgtatcttggttcttgtttgtttgtttgtttttgttttcattctcttaacagagtcatttgcagagcaaaagttttaaatgttgatgtagtttgatttctcaaaattttcatttatggatcatgtttttgctctaatgtctaagattatttttatccctggccctattctttartctacagagctccagcttttcttgggtctattttttttttttttttttttttttttggtctgtgtctgttgacgtttctgatttgcacacttctccagtgcctcattccagatataaaggaggcaaaagataacccctggggacttgccactatgctgtttctcgaggcccaggtcccctagctcattgcattcttcgttccaccattcagaattgtatgtttatttcacatatgaggtctgggattgttagctactcttagtcagggagttagggagaaatttg

SEQ ID NO: 67685 - DNA, 771 bp, Homo sapiens
cagaaacctctatcaccctctgcctaacccccttccctggtcaatgtccaagtctatggattcctgagaattctcagggtggcgccctcctgctgcggcctgcagcctccctgcttcagtgacttgccactttctcactgggttttctcttccttctgggcctttttcctgctacctcacctgtttctcccttttccctctgccagtggagagaccccagacagaaatctggatctgttgcggccatagctgagcagcaatgggttgctccccattgcccagagggggaactcagaagatgaagttcaaactgctaagactgactaaggtcacccaaaggtccccagatgtccagcttcctgsaggctccctttgctttaagaaaaaaaaaaaaattggactgaaatgttgcagaaagtccagtttccttcctgaggactttcaggggtcgctagggaggctgacatttcctgtccatctttcactcttcacggctgttgtggaccttgcaacatggtccttcttgctgctgaaggctatgggcctatgtccagccactaaacgcacacaagcattgggacgcagcatttaacacacttgactgaatagttaggaatgagataaaggaatgctaattctgaaagggggaaaaaacagacttaagattatacatctggttccagaaccataggatgctctgtccatctgtgcccttttctggaaagtctcatgcctagaagggaaagatgatgaggcggaggcagcaatttg

SEQ ID NO: 67686 - DNA, 771 bp, Homo sapiens
cagaaacctctatcaccctctgcctaacccccttccctggtcaatgtccaagtctatggattcctgagaattctcagggtggcgccctcctgctgcggcctgcagcctccctgcttcagtgacttgccactttctcactgggttttctcttccttctgggcctttttcctgctacctcacctgtttctcccttttccctctgccagtggagagaccccagacagaaatctggatctgttgcggccatagctgagcagcaatgggttgctccccattgcccagagggggaactcagaagatgaagttcaaactgctaagactgactaaggtcacccaaaggtccccagatgtccagcttcctggaggctccctttgctttaagaaaaaaaaaaaaattggactgaaatgttgcagaaagtccagtttccttcctgaggactttcaggggtcgctagggaggctgacatttcctgtccatctttcactcttcacggctgttgtggaccttgcaacatggtccttcttgctgctgaaggctatgggcctatgtccagccactaaacgcacacaagcattgggacgcagcatttaacacacttgactgaatakttaggaatgagataaaggaatgctaattctgaaagggggaaaaaacagacttaagattatacatctggttccagaaccataggatgctctgtccatctgtgcccttttctggaaagtctcatgcctagaagggaaagatgatgaggcggaggcagcaatttg

SEQ ID NO: 67687 - DNA, 743 bp, Homo sapiens
cttgagtccagaaggtcgaggctgcagtaagccatgatcatgctactgcactccagcctgggcaacagggtgagaccctgtctcaaaaaataataataaggccaggcgcagkggctcatgcctgtaaaatcccagcactttgggaggccgaggctggcagatcacttgaggtcagaagttcaagaccagcctagccaacatactgaaaccttgtctctactaaaaatacaaaaattagctgggcatggtggcgggagcctgtaatcccagctactcgggaggctgaggcagaagaattgcttgaacctgggtggtggaggttgcagtgagcggagctcacaccactgcactacagcctgagagacagagcgagactccttctcaaaataaataataatactgactctgagagtaacagaaatactcataatcacaagaacacagagagattgtcttcattttatagataagcatttaggctcagagaggccaatgggcttgctgaaggccacgctgttggaaggtgcatctgtttgaccccatcctattccttccttccagctcagggactatctcatcaattagaaagatatcagtcaataccaaaagaaataatatgaaaaacagaaacaaaaaaacttaggtgaaaactgttttccacttttctaaaccttctttcgattgaacacgtatcaatgtggtagtaatggatgggacgcacgaaagcccagccagcttaaacg

SEQ ID NO: 67688 - DNA, 657 bp, Homo sapiens
caaatccatggacattatatttaatgtaacgtatcttcttaccagcattgactctgctccattattcattagaaagcatgtttcagtaagtgaagttgaggagtgagtggttggtgaggtggtggagacaggacrgaagacttgagtttccttgtttacaggagaaaagagagaaggcaggagtagaaagagggggtggactgaggaaggagttttttaggaccaggaagatgtgaccacaatgatgagagagaagtgctaacagtctagaaagacaattctaaaagactaggggaaattacaaaaatctaggctgctgctacacttggggagacttgcatagaatatttacaagtaactgtgaacttgaacaattgtaggcagcatactgagatgcaattaacagaagaaagataagatgaaagggcttggattctgtaggcccaccctcaaagatgaccaaatagagaaatggcaattaaaataatacagttaggttacatgtatattcatgtatgtgtgtgtgtgtgtgtgtgtatacaaacatgtatacaagtaagtgaatatttactatatcataatatattctaattttacaaataatactgattatgataaatacttaatcctcactttaactgtctctgttgatcaacc

SEQ ID NO: 67689 - DNA, 1239 bp, Homo sapiens
tgcataaaagctaatggggaaaatatcctggaatgtctgttccctagaacttaaagtataatttaaaaaaaagatattcatctaaaatatctgttctctataattgccaaaaaagcaaaacaacaacaacaacaacaacggcaaatctgaagctttggctctgatttggcttcttgttttctctcctgatatccttatgagcaaactgcatgtgcctctgagagaaaaacacacactagtgagcagaatgttgagtactgtgatcaaagtattatggtaaaaatttttttcattttgtattgttttgaaaagattgatcttttctaaaatggacagtgtattagtctgttcttgcaccactataaagaaatacctgaaattgggtaatttaaaaagaagagaggtttaattggctcacagttccgcaggctctacaggaagcatggctggggaggcttcaggaaacttacaatcaccatagaaggtgaaggggaagcaggcacatcttacatggcagaggaggaagggagtgaaagaggaggtgctacacacttttaaacaacctgatcttatgagaactcactatcatgagaatggcaagggggaaatccacccccatatccagtcacctcccaccaggcccctcctccaacactggggattacaattccacatgagatttgggcggggacacaaatccaggccatatcaggcagttaagctccagttcaaatccttactgtaaatgtgtattgagaaaaggttaattttcaataatataaatatatataaaattktatgtgtgtatatacataacacacaaagtaaacaatgttgacagagattctctggttttagtattagacatgctttcaagtctcagtatcttacacatgttctgtaatcagaaaaaagttaatttaaaataagaaactactccaatatctgttacaggtgcttagtaaatggtaaataacatatttatgtcatgatacagtcaaagaagtatatggtcttatgctttagaaataagataatcttattaggtatcatattactatattaaggctgaaagagctaaatgaattaagagtcctcagaaataatggaaaaatggatagttcattagaatgattcctgggaattactttgttttggttggaaagactatacaggaagggagggcctctgcatgagtatgcagtctgtgcgttacacaactagcaggaacatcttgaa

SEQ ID NO: 67690 - DNA, 763 bp, Homo sapiens
tttagtcctaaaggagaggtaaattactgttgctgttaaatttctatgcccaaaatccttactgtgaactacttgtggaaactaaagcacaggatctcctaaaggctactattaaatgcaactgtattatcccaggagagagaactcaaatgatatattacattttagcaagatttggctgctagtcacagaacaggtataaatggaagcacaaactcagtcatggtggcaggctggtgggggcaatactgtcccgcccttggagagctacagaagggacgccccctgtgaggagggaggaggcatggtagaggatgctgggagggcataggaaaaagggacattcttcaacaactgtcctgtctcaagttggtggactcaagtttcagccaataaaaagttggcgaagaaaggtgtttgataaaacatggaatcttttaaccaacattcatcacctccaaacattgttaatgcaaaatgaagtaacaaaaatagggtcatgaattgcttttatatatctaacaaatatttcttgactgtctactctgtgcaaagtgtgtgggcactgtacttactcctgcgcaacttcttgagggaccaaaagcacgataactccatgcctgccttgtaatacactgggagaatcattctacagttcacacatgaaccctgccaaggaagataaaatatggccctaatcctcctttcatggwtctctccatgaaggaacaatgagagaagccagcctaacatttataaagtg

SEQ ID NO: 67691 - DNA, 715 bp, Homo sapiens
cataaatgcctatattaaaacatactaaaagttgaaaataagttacctatactgtcactataggagctaataaaaaagaataagtaagctcaacgaaactgggaagaaataatcaaaataaatgccagaaatcatttaaatggaaaatagacatgtaatagacatagttaacaaagctaaaagttggttctttgaaaatattaaattgctaaatttctagcgtcagtgaccaagagatagaakaggagagagaaaaaaaaaaaaaagaccaatagaccaacatcagaagtaaaaaagaaaatctcactatcaatattatgtgctgataaatttgacaagttattcaaaatgaaaaaactttttgaacacataaattatacaagataaaaaaaaaactgaatagcccttaatatagcaatgatataatccacaagtaaaactttcacgcgaagaaagctccaagcacagtatcataagagaatttttataaatattgaatgaaaaatcaatgttatatgtttttcagaaatttagtataatcttcctaactcatattatcagaaaagtattattttgttgcaataatactaaaacaatattttaaaaagtgaaattgtaggccaatatttcttatgaacaaagatacaaaattcctaaaacatattattagcacattgaatttagtgataagtaaaaaggataacacatcatgaca

SEQ ID NO: 67692 - DNA, 715 bp, Homo sapiens
cataaatgcctatattaaaacatactaaaagttgaaaataagttacctatactgtcactataggagctaataaaaaagaataagtaagctcaacgaaactgggaagaaataatcaaaataaatgccagaaatcatttaaatggaaaatagacatgtaatagacatagttaacaaagctaaaagttggttctttgaaaatattaaattgctaaatttctagcgtcagtgaccaagagatagaagaggagagagaaaaaaaaaaaaaagaccaatagaccaacatcagaagtaaaaaagaaaatctcactatcaatattatgtgctgataaatttgacaagttattcaaaatgaaaaaacttttygaacacataaattatacaagataaaaaaaaaactgaatagcccttaatatagcaatgatataatccacaagtaaaactttcacgcgaagaaagctccaagcacagtatcataagagaatttttataaatattgaatgaaaaatcaatgttatatgtttttcagaaatttagtataatcttcctaactcatattatcagaaaagtattattttgttgcaataatactaaaacaatattttaaaaagtgaaattgtaggccaatatttcttatgaacaaagatacaaaattcctaaaacatattattagcacattgaatttagtgataagtaaaaaggataacacatcatgaca

SEQ ID NO: 67693 - DNA, 715 bp, Homo sapiens
cataaatgcctatattaaaacatactaaaagttgaaaataagttacctatactgtcactataggagctaataaaaaagaataagtaagctcaacgaaactgggaagaaataatcaaaataaatgccagaaatcatttaaatggaaaatagacatgtaatagacatagttaacaaagctaaaagttggttctttgaaaatattaaattgctaaatttctagcgtcagtgaccaagagatagaagaggagagagaaaaaaaaaaaaaagaccaatagaccaacatcagaagtaaaaaagaaaatctcactatcaatattatgtgctgataaatttgacaagttattcaaaatgaaaaaactttttgaacacataaattatacaagataaaaaaaaaactgaatagcccttaatatagcaatgatataatccacaagtaaaactttcacgcgaagaaagctccaagcacagtatcataagagaatttttataaatattgaatgaaaaatcaatgttatatgtttttcagaaatttagtataatcttcctaactcatattatcagaaaagtattattttgttrcaataatactaaaacaatattttaaaaagtgaaattgtaggccaatatttcttatgaacaaagatacaaaattcctaaaacatattattagcacattgaatttagtgataagtaaaaaggataacacatcatgaca

SEQ ID NO: 67694 - DNA, 1407 bp, Homo sapiens
tgcctttgaaagaaaataaaaagtaggtacaggcagttaaaatgaatttttaaaaayattgtgctaaaacacctccttgacaatgtgttacacacacaaacacatacacacacacccctgagaaataagaatgtcatgtattttgatgattctatttcaacttaaataacattctgtctctttcaaaattgaaattgtttgttatttcaaactgcatatatacacatgaaatcttaatgatattaaacatcccatgatatcttacaggctagtgattcaaagacaaatttaagttaaatttacaaggaaatattatataaatgcatataatagttattcagttcaagcaattttcaaaaagcaaatatgcccagggaatcaacactcagatcaatcaataatagaatacatataccctctcaatcactactccaccacggagggaaccagcatcttgctttctatcaggattgaacattattcataataatatgtaatataggcaagcataaactattattgattcctcttttaagaataagtgtggctcagaattttacgtaagatttgttaatacatgaaaggtagcacttgaaacaaaagcttctgagttactaagagggaaaaaagaacatgagaaaattattacaaaacagcatgtggtcaagtatacatacacatgcctttttcttatagggtaaaataaacgatgaggttttttttctttctttttttttttttgacggagtctcactctttcacccaggccagagtgcagtggcgctgtctcggctcactgcaacctccgcctcccggggacgccattctcctgcctcagcatcactagtagctgggactacaggcgccctccaccgcgcccggctaattttttgtattttttgtagaggcggggtttcaccgtgttagccaggatagtctcgatcccctgacctcatgatccgcctgcctcggcctcccgaagtgctgggattacaggcgtgagccaccgcgcccggccaatgatgagtatttttaaacattattctgaatgatgttagcagatccaatgccctgcttcactctgcacgtagggaggatcatgtgctaggccaagcaaaggcttgctgttgtgtttcttcacttgctgagagagaaaagttctaacagaatgggtctaaaagaaaagctgagtttatacaaatattttatttttatgtgtattattgctgaaaatatgagtcaaaagtgaaaggcatatagaatgataaactctaatataaacactaatacttctggataaacagttagttccctaccacactctatgtcctcatttattttaatgtgctccaacttccaaaaaagcatcatatcatttcggatgcttccttctgcccatagttaatt

SEQ ID NO: 67695 - DNA, 1407 bp, Homo sapiens
tgcctttgaaagaaaataaaaagtaggtacaggcagttaaaatgaatttttaaaaacattgtgctaaaacacctccttgacaatgtgttacacacacaaacacatacacacacacccctgagaaataaraatgtcatgtattttgatgattctatttcaacttaaataacattctgtctctttcaaaattgaaattgtttgttatttcaaactgcatatatacacatgaaatcttaatgatattaaacatcccatgatatcttacaggctagtgattcaaagacaaatttaagttaaatttacaaggaaatattatataaatgcatataatagttattcagttcaagcaattttcaaaaagcaaatatgcccagggaatcaacactcagatcaatcaataatagaatacatataccctctcaatcactactccaccacggagggaaccagcatcttgctttctatcaggattgaacattattcataataatatgtaatataggcaagcataaactattattgattcctcttttaagaataagtgtggctcagaattttacgtaagatttgttaatacatgaaaggtagcacttgaaacaaaagcttctgagttactaagagggaaaaaagaacatgagaaaattattacaaaacagcatgtggtcaagtatacatacacatgcctttttcttatagggtaaaataaacgatgaggttttttttctttctttttttttttttgacggagtctcactctttcacccaggccagagtgcagtggcgctgtctcggctcactgcaacctccgcctcccggggacgccattctcctgcctcagcatcactagtagctgggactacaggcgccctccaccgcgcccggctaattttttgtattttttgtagaggcggggtttcaccgtgttagccaggatagtctcgatcccctgacctcatgatccgcctgcctcggcctcccgaagtgctgggattacaggcgtgagccaccgcgcccggccaatgatgagtatttttaaacattattctgaatgatgttagcagatccaatgccctgcttcactctgcacgtagggaggatcatgtgctaggccaagcaaaggcttgctgttgtgtttcttcacttgctgagagagaaaagttctaacagaatgggtctaaaagaaaagctgagtttatacaaatattttatttttatgtgtattattgctgaaaatatgagtcaaaagtgaaaggcatatagaatgataaactctaatataaacactaatacttctggataaacagttagttccctaccacactctatgtcctcatttattttaatgtgctccaacttccaaaaaagcatcatatcatttcggatgcttccttctgcccatagttaatt

SEQ ID NO: 67696 - DNA, 1407 bp, Homo sapiens
tgcctttgaaagaaaataaaaagtaggtacaggcagttaaaatgaatttttaaaaacattgtgctaaaacacctccttgacaatgtgttacacacacaaacacatacacacacacccctgagaaataagaatgtcatgtattttgatgattctatttcaacttaaataacattctgtctctttcaaaattgaaattgtttgttatttcaaactgcatatatacacatgaaatcttaatgatattaaacatcccatgatatcttacaggctagtgattcaaagacaaatttaagttaaatttacaaggaaatattatataaatgcatataatagttattcarttcaagcaattttcaaaaagcaaatatgcccagggaatcaacactcagatcaatcaataatagaatacatataccctctcaatcactactccaccacggagggaaccagcatcttgctttctatcaggattgaacattattcataataatatgtaatataggcaagcataaactattattgattcctcttttaagaataagtgtggctcagaattttacgtaagatttgttaatacatgaaaggtagcacttgaaacaaaagcttctgagttactaagagggaaaaaagaacatgagaaaattattacaaaacagcatgtggtcaagtatacatacacatgcctttttcttatagggtaaaataaacgatgaggttttttttctttctttttttttttttgacggagtctcactctttcacccaggccagagtgcagtggcgctgtctcggctcactgcaacctccgcctcccggggacgccattctcctgcctcagcatcactagtagctgggactacaggcgccctccaccgcgcccggctaattttttgtattttttgtagaggcggggtttcaccgtgttagccaggatagtctcgatcccctgacctcatgatccgcctgcctcggcctcccgaagtgctgggattacaggcgtgagccaccgcgcccggccaatgatgagtatttttaaacattattctgaatgatgttagcagatccaatgccctgcttcactctgcacgtagggaggatcatgtgctaggccaagcaaaggcttgctgttgtgtttcttcacttgctgagagagaaaagttctaacagaatgggtctaaaagaaaagctgagtttatacaaatattttatttttatgtgtattattgctgaaaatatgagtcaaaagtgaaaggcatatagaatgataaactctaatataaacactaatacttctggataaacagttagttccctaccacactctatgtcctcatttattttaatgtgctccaacttccaaaaaagcatcatatcatttcggatgcttccttctgcccatagttaatt

SEQ ID NO: 67697 - DNA, 1407 bp, Homo sapiens
tgcctttgaaagaaaataaaaagtaggtacaggcagttaaaatgaatttttaaaaacattgtgctaaaacacctccttgacaatgtgttacacacacaaacacatacacacacacccctgagaaataagaatgtcatgtattttgatgattctatttcaacttaaataacattctgtctctttcaaaattgaaattgtttgttatttcaaactgcatatatacacatgaaatcttaatgatattaaacatcccatgatatcttacaggctagtgattcaaagacaaatttaagttaaatttacaaggaaatattatataaatgcatataatagttattcagttcaagcaattttcaaaaagcaaatatgcccagggaatcaacactcagatcaatcaataatagaatacatrtaccctctcaatcactactccaccacggagggaaccagcatcttgctttctatcaggattgaacattattcataataatatgtaatataggcaagcataaactattattgattcctcttttaagaataagtgtggctcagaattttacgtaagatttgttaatacatgaaaggtagcacttgaaacaaaagcttctgagttactaagagggaaaaaagaacatgagaaaattattacaaaacagcatgtggtcaagtatacatacacatgcctttttcttatagggtaaaataaacgatgaggttttttttctttctttttttttttttgacggagtctcactctttcacccaggccagagtgcagtggcgctgtctcggctcactgcaacctccgcctcccggggacgccattctcctgcctcagcatcactagtagctgggactacaggcgccctccaccgcgcccggctaattttttgtattttttgtagaggcggggtttcaccgtgttagccaggatagtctcgatcccctgacctcatgatccgcctgcctcggcctcccgaagtgctgggattacaggcgtgagccaccgcgcccggccaatgatgagtatttttaaacattattctgaatgatgttagcagatccaatgccctgcttcactctgcacgtagggaggatcatgtgctaggccaagcaaaggcttgctgttgtgtttcttcacttgctgagagagaaaagttctaacagaatgggtctaaaagaaaagctgagtttatacaaatattttatttttatgtgtattattgctgaaaatatgagtcaaaagtgaaaggcatatagaatgataaactctaatataaacactaatacttctggataaacagttagttccctaccacactctatgtcctcatttattttaatgtgctccaacttccaaaaaagcatcatatcatttcggatgcttccttctgcccatagttaatt

SEQ ID NO: 67698 - DNA, 1407 bp, Homo sapiens
tgcctttgaaagaaaataaaaagtaggtacaggcagttaaaatgaatttttaaaaacattgtgctaaaacacctccttgacaatgtgttacacacacaaacacatacacacacacccctgagaaataagaatgtcatgtattttgatgattctatttcaacttaaataacattctgtctctttcaaaattgaaattgtttgttatttcaaactgcatatatacacatgaaatcttaatgatattaaacatcccatgatatcttacaggctagtgattcaaagacaaatttaagttaaatttacaaggaaatattatataaatgcatataatagttattcagttcaagcaattttcaaaaagcaaatatgcccagggaatcaacactcagatcaatcaataatagaatacatataccctctcaatcactactccaccacggagggaaccagcatcttgctttctatcaggattgaacattattcataataatatgtaatataggcaagcataaactattattgattcctcttttaagaataagtgtggctcagaattttacgtaagatttgttaatacatgaaaggtagcacttgaaacaaaagcttctgagttactaagagggaaaaaagaacatgagaaaattattacaaaacagcatgtggtcaagtatacatacacatgcctttttcttatagggtaaaataaacgatgaggttttttttctttctttttttttttttgacggagtctcactctttcacccaggccagagtgcagtggcgctgtctcggctcactgcaacctccgcctcccggggacgccattctcctgcctcagcatcactagtagctgggactacaggcgccctccaccgcgcccggctaattttttgtattttttgtagaggcggggtttcaccgtgttagccaggatagtctcgatcccctgacctcatgatccgcctgcctcggcctcccraagtgctgggattacaggcgtgagccaccgcgcccggccaatgatgagtatttttaaacattattctgaatgatgttagcagatccaatgccctgcttcactctgcacgtagggaggatcatgtgctaggccaagcaaaggcttgctgttgtgtttcttcacttgctgagagagaaaagttctaacagaatgggtctaaaagaaaagctgagtttatacaaatattttatttttatgtgtattattgctgaaaatatgagtcaaaagtgaaaggcatatagaatgataaactctaatataaacactaatacttctggataaacagttagttccctaccacactctatgtcctcatttattttaatgtgctccaacttccaaaaaagcatcatatcatttcggatgcttccttctgcccatagttaatt

SEQ ID NO: 67699 - DNA, 1407 bp, Homo sapiens
tgcctttgaaagaaaataaaaagtaggtacaggcagttaaaatgaatttttaaaaacattgtgctaaaacacctccttgacaatgtgttacacacacaaacacatacacacacacccctgagaaataagaatgtcatgtattttgatgattctatttcaacttaaataacattctgtctctttcaaaattgaaattgtttgttatttcaaactgcatatatacacatgaaatcttaatgatattaaacatcccatgatatcttacaggctagtgattcaaagacaaatttaagttaaatttacaaggaaatattatataaatgcatataatagttattcagttcaagcaattttcaaaaagcaaatatgcccagggaatcaacactcagatcaatcaataatagaatacatataccctctcaatcactactccaccacggagggaaccagcatcttgctttctatcaggattgaacattattcataataatatgtaatataggcaagcataaactattattgattcctcttttaagaataagtgtggctcagaattttacgtaagatttgttaatacatgaaaggtagcacttgaaacaaaagcttctgagttactaagagggaaaaaagaacatgagaaaattattacaaaacagcatgtggtcaagtatacatacacatgcctttttcttatagggtaaaataaacgatgaggttttttttctttctttttttttttttgacggagtctcactctttcacccaggccagagtgcagtggcgctgtctcggctcactgcaacctccgcctcccggggacgccattctcctgcctcagcatcactagtagctgggactacaggcgccctccaccgcgcccggctaattttttgtattttttgtagaggcggggtttcaccgtgttagccaggatagtctcgatcccctgacctcatgatccgcctgcctcggcctcccgaagtgctgggattacaggcgtgagccaccgcgcccggccaatgatgagtatttttaaacattattctgaatgatgttagcagatccaatgccctgcttcactctgcacgtagggaggatcatgtgctaggccaagcaaaggcttgctgttgtgtttcttyacttgctgagagagaaaagttctaacagaatgggtctaaaagaaaagctgagtttatacaaatattttatttttatgtgtattattgctgaaaatatgagtcaaaagtgaaaggcatatagaatgataaactctaatataaacactaatacttctggataaacagttagttccctaccacactctatgtcctcatttattttaatgtgctccaacttccaaaaaagcatcatatcatttcggatgcttccttctgcccatagttaatt

SEQ ID NO: 67700 - DNA, 1407 bp, Homo sapiens
tgcctttgaaagaaaataaaaagtaggtacaggcagttaaaatgaatttttaaaaacattgtgctaaaacacctccttgacaatgtgttacacacacaaacacatacacacacacccctgagaaataagaatgtcatgtattttgatgattctatttcaacttaaataacattctgtctctttcaaaattgaaattgtttgttatttcaaactgcatatatacacatgaaatcttaatgatattaaacatcccatgatatcttacaggctagtgattcaaagacaaatttaagttaaatttacaaggaaatattatataaatgcatataatagttattcagttcaagcaattttcaaaaagcaaatatgcccagggaatcaacactcagatcaatcaataatagaatacatataccctctcaatcactactccaccacggagggaaccagcatcttgctttctatcaggattgaacattattcataataatatgtaatataggcaagcataaactattattgattcctcttttaagaataagtgtggctcagaattttacgtaagatttgttaatacatgaaaggtagcacttgaaacaaaagcttctgagttactaagagggaaaaaagaacatgagaaaattattacaaaacagcatgtggtcaagtatacatacacatgcctttttcttatagggtaaaataaacgatgaggttttttttctttctttttttttttttgacggagtctcactctttcacccaggccagagtgcagtggcgctgtctcggctcactgcaacctccgcctcccggggacgccattctcctgcctcagcatcactagtagctgggactacaggcgccctccaccgcgcccggctaattttttgtattttttgtagaggcggggtttcaccgtgttagccaggatagtctcgatcccctgacctcatgatccgcctgcctcggcctcccgaagtgctgggattacaggcgtgagccaccgcgcccggccaatgatgagtatttttaaacattattctgaatgatgttagcagatccaatgccctgcttcactctgcacgtagggaggatcatgtgctaggccaagcaaaggcttgctgttgtgtttcttcacttgctgrgagagaaaagttctaacagaatgggtctaaaagaaaagctgagtttatacaaatattttatttttatgtgtattattgctgaaaatatgagtcaaaagtgaaaggcatatagaatgataaactctaatataaacactaatacttctggataaacagttagttccctaccacactctatgtcctcatttattttaatgtgctccaacttccaaaaaagcatcatatcatttcggatgcttccttctgcccatagttaatt

SEQ ID NO: 67701 - DNA, 749 bp, Homo sapiens
tcttctcttcccgtcccaggttccctttctcttggcctgggcttagcgccgcttcccaggagaatgacctcaaacaacgcttccagagtatctgcatgggaggatcaacccaccagtgcttgaatgtttcccagtctagcctgccttggtagactctgctcttcatattttagatgaggatataaaagtatcataagcatttcctgaaaacactttgatgaagttgtctcattttatataatagtccaatttaacttgtagacgtggaataccaacgagcgcgatcttcatttccaatgaagaaattcatgagaaatgaggatttccatgatctttgctttatcattgtagttctacaagctcacagtgttggacagatgggtgtatttttaaaacatgctgtttaacacttagtaaggcttcctcttagaacacgcatgccttttgtcactaagagatcccttctccgatttgttaattttctatccttcactttctctatgttctctttcttgaaatccctattagtcagatgttggacccmtcgcttgggttcctctctcttaatgtttttctcacatactctgaaccttgtaatttagtttcatattttgtgagacttccatagccttattttccaagcttttttttctcaatttcagcaaacacaattgtcttctaaaaaaatctttacattttctaattatttcttatccataaaatccagttcttcttttatggataaaaca

SEQ ID NO: 67702 - DNA, 554 bp, Homo sapiens
agctgtgaaaaattagtagtgatagcaatagtacagctatgtcctcataaagtgtattttttgttatagagccaatatttattcctgaaaaggtgagattctgcatgaatatgttgaggggctttttcctatcattttaaatgtgaaattatgatacattgcatataaacctaaacccctaatgactgacgtacagtataaatgaaattcaataaaccagccatacataaccagcaattattttaggagataagatgcttaaaatatcttcttaatcatttaaaacatatattttgctaacaaacagttgcttgttgtgcaagaacatggtctctcagcatcaccaaaattcaagagacataatccttagtggacatttaactagcttctccaaatgtaaaagcatgattgcaatgttcggccaattttatttttaatatacctcaagrtatttctcacatttcatcatgttagtaatgtactgagtttaggagatgtaaatatattttttctataaaacaggccaaaataatttattaagaggaatttttttc

SEQ ID NO: 67703 - DNA, 1140 bp, Homo sapiens
aatctatgcatcaacatgaactttacaagaaatctacttactcttataaaggcatatcacatataattgattttcatatttaaggatatatatttagtatattttaatataatctacgtatatrggttctgcatttgtgtatatactgttacccttctgtatccatgaggaattggttccatgactccctgtggataccaaaattctctaatgctcaagtctctgatatataatggtgtggcatttgcatacaacctatgcacagcctctcctatactttaattcacctctagattactcataatacccaggtaaagaggactcagggtatccctgctgtgatactaatttaaaatgccgcattgaccattttgggctcacccagtgtcttctgcaactgcacagcattatggagtcacattctctggactcctattagcttttcaagatgctggaaagtgttgggttaggagcagacagaagattacactgagcataaacttgactatcctctctcacaagataacatcccccaagaatgctgacctttccagaatcactgtcctctcctataacttgtttgtagttgaattatttttaagaaaaataaatttcttgaaccaatactctgctttgagctctctcagctgttttagacatggcagtcatcaaataaatatcatggaactctgaggctggcacttaacagaacagacaaggtggctggcatttacttaaacatttccaatggtacaaagtgggactttagtgaggccgtgaaaagtcaagtaacaatgggaatgcttaactgagtacaaaaagcaaagacacacatagctatatgacacaattctaatatttaagcatttaaaatgatatttagaacataaataaatgatacatttaattccaagccttctataaagacaaatttaatttgtactcacttgttattctaatattaaaactcatctaaataatgaaaagttgtaataatacagtttaccattatgcgatttaaatcatagtgcaaataatttggagtgctattttactgaaagagccccagagatgattataggttcatcagtcaatacagtgaccatctcaaactgcatgacactaacatattagcctaag

SEQ ID NO: 67704 - DNA, 1140 bp, Homo sapiens
aatctatgcatcaacatgaactttacaagaaatctacttactcttataaaggcatatcacatataattgattttcatatttaaggatatatatttagtatattttaatataatctacgtatataggttctgcatttgtgtatatactgttacccttctgtatccatgaggaattggttccatgactccctgtggataccaaaattctctaatgctcaagtctctgatatataatggtgtggcatttgcatacaacctatgcacagcctctcctatactttaattcacctctagattactcataatacccaggtaaagaggactcagggtatccctgctgtgatactaatttaaaatgccgcattgaccattttgggctcacccagtgtcttctgcaactgcacagcattatggagtcacattctctggactcctattagcttttcaagatgctggaaagtgttgggttaggagcagacagaagattacactgagcataaacttgactatcctctctcacaagataacatcccccaagaatgctgacctttccagaatcactgtcctctcctataacttgtttgtagttgaattatttttaagaaaaataaatttcttgaaccaatactctgctttgagctctctcagctgttttagacatggcagtcatcaaataaatatcatggaactcygaggctggcacttaacagaacagacaaggtggctggcatttacttaaacatttccaatggtacaaagtgggactttagtgaggccgtgaaaagtcaagtaacaatgggaatgcttaactgagtacaaaaagcaaagacacacatagctatatgacacaattctaatatttaagcatttaaaatgatatttagaacataaataaatgatacatttaattccaagccttctataaagacaaatttaatttgtactcacttgttattctaatattaaaactcatctaaataatgaaaagttgtaataatacagtttaccattatgcgatttaaatcatagtgcaaataatttggagtgctattttactgaaagagccccagagatgattataggttcatcagtcaatacagtgaccatctcaaactgcatgacactaacatattagcctaag

SEQ ID NO: 67705 - DNA, 1015 bp, Homo sapiens
caaaaggtcttggaagttaaaaatacgttagtgggaatttaaagaaacaaataaagatttggaaggtagagttggggccatatcccaaaatcgaagaaaacattaaagatgtagcaaggagatgttaaaactattttaaagaactgaaaagatctatttaattagtctggaaaatataactaataatattggagaaagaaataataaagagaggaaagggaatcaccaatgatatcagatgaaaaataattaaaaagatggagtcgatggattttcagatttaatgtattaaggcaaatgcatttaaagactacttacacgaagggcattatcattatacccaaatactagggattaagctgatagagagtgaaaagaaaaacaaaaacaagacttaataggcaaaaaaatttggaataagaatgacatccaatttcttaacaatactgtaatctagaaagaaaatgcagaatggggttcacaattctcagggcagcttattctcaagttaaaattttatgtcggcaaactagtaagaaattattaagttaatatctgtaattagaaccatgcctgacatgaaacaaggactttttagtgtttgataaattaacagaattgataagtaaaggaagacttctttatacatgaaagrtatcaataattatcttccatttcttcttccactagaagcaaatgtggatcacagaacggaggagcaaatcaataagacgaaagacattggatcctgcaagtgttggagcttacacagagacaaaaagcatcccaggaagacacagagggctgcaggaagttctgtgcctcgggaccagagaactagcaaactggagccagggggttcgcgttcccaggagtgtcttctcctgaatgagagactgggaactgacagattaccttaccgttttcatcgtattgaaaaacatttaaaaatatagatttgtctaaaatgctgagatttaatggcagatttgtctcacacacaaaatatgagata

SEQ ID NO: 67706 - DNA, 1015 bp, Homo sapiens
caaaaggtcttggaagttaaaaatacgttagtgggaatttaaagaaacaaataaagatttggaaggtagagttggggccatatcccaaaatcgaagaaaacattaaagatgtagcaaggagatgttaaaactattttaaagaactgaaaagatctatttaattagtctggaaaatataactaataatattggagaaagaaataataaagagaggaaagggaatcaccaatgatatcagatgaaaaataattaaaaagatggagtcgatggattttcagatttaatgtattaaggcaaatgcatttaaagactacttacacgaagggcattatcattatacccaaatactagggattaagctgatagagagtgaaaagaaaaacaaaaacaagacttaataggcaaaaaaatttggaataagaatgacatccaatttcttaacaatactgtaatctagaaagaaaatgcagaatggggttcacaattctcagggcagcttattctcaagttaaaattttatgtcggcaaactagtaagaaattattaagttaatatctgtaattagaaccatgcctgacatgaaacaaggactttttagtgtttgataaattaacagaattgataagtaaaggaagacttctttatacatgaaaggtatcaataattatcttccatttcttcttccactagaagcaaatgtggatcacagaacggaggagcaaatcaataagacgaaagacattggatcctgcaagtgttggagcttacacagagacaaaaagcatcccaggaagacacagagggctgcaggaagttctgtgcctcgggaccagagaactagcaaactggagccagggggttcgcgttcccaggagtgtcttctcctgaatgagagactgggaactgacagattaccttaccgttttcatcgtattgaaaaacatttaaaaatatagatttgtctaaaatgctgagatttaatggcagatttgtctcacacmcaaaatatgagata

SEQ ID NO: 67707 - DNA, 861 bp, Homo sapiens
ttctagataacaataaaagaatttgtasaaaatgacttgtataacacgactccttcggtatccacagcacatcattcatgggtggtaacacacagagaaggtccctccccactaagtcttactgggccatcctcatatcctactttgtaagctgaaaaatagaatctcatgattgaaatggtagaactgtcacattttgtaacattcatgtatgtccactgtgaaccaggggcacagttttctcttactgttgttgttttactaaacatcatcaaatattcacaaatgtgagagagaggaaagagagggtgggatatagtatgatatatataaaatatatatgacattatatgtatatgacaatgtgccgataagtatgatatatgttacataccatgtatacatacgacaatgcactgcaggtctccaggaattaacatgtgcaatattcctcaggaggcaccagtctcatagttcatataaacagcaacaccagagtttatgcaatctccagctatatggttgcatgaaattgtcccagtaatatgtaatgtaacatataacatatgacttatataatgaaaaatacaaggacctcaccctgaggtgtacatgtgttcatgaaaagctgcacctcctatttgaggaggcaaaaaatttcaccagctttaaaaatcttaataactttagctaatccaatgctgttctttcgcaaatttatcggcagaagacctatctctatagcaaatgctattcctgcatctcatgcgtggtgagtggtgcttgttatgtggtgagtggtgcttgttgtctgatttttatagctctattatgatcagtttgaaatgtagttgtagttct

SEQ ID NO: 67708 - DNA, 861 bp, Homo sapiens
ttctagataacaataaaagaatttgtacaaaatgacttgtataacacgactccttcggtatccacagcacatcattcatgggtggtaacacacagagaaggtccctccccactaagtcttactgggccatcctcatatcctactttgtaagctgaaaaatagaatctcatgattgaaatggtagaactgtcacattttgtaacattcatgtatgtccactgtgaaccaggggcacagttttctcttactgttgttgttttactaaacatcatcaaatattcacaaatgtgagagagaggaaagagagggtgggatatagtatgatatatataaaatatatatgacattatatrtatatgacaatgtgccgataagtatgatatatgttacataccatgtatacatacgacaatgcactgcaggtctccaggaattaacatgtgcaatattcctcaggaggcaccagtctcatagttcatataaacagcaacaccagagtttatgcaatctccagctatatggttgcatgaaattgtcccagtaatatgtaatgtaacatataacatatgacttatataatgaaaaatacaaggacctcaccctgaggtgtacatgtgttcatgaaaagctgcacctcctatttgaggaggcaaaaaatttcaccagctttaaaaatcttaataactttagctaatccaatgctgttctttcgcaaatttatcggcagaagacctatctctatagcaaatgctattcctgcatctcatgcgtggtgagtggtgcttgttatgtggtgagtggtgcttgttgtctgatttttatagctctattatgatcagtttgaaatgtagttgtagttct

SEQ ID NO: 67709 - DNA, 293 bp, Homo sapiens
gtgtataaatagatataaataggtgtcctaagttggagcaataacgtcttccaccctcttgcttattggctttctcccatatttcttctgcatttacatatttctggtataattttagatttggggcacacttggtttgaaaagggtcgatggtttctccactacttttgtctcacattccaaaaaacaaaggggatgccattcttcatggcagcacctgccactcatctgctgtcaggctattgcttaargcacatatcttaatggcctggcacgcttctccaccctacaat

SEQ ID NO: 67710 - DNA, 773 bp, Homo sapiens
aagtcactgcttaaatcattgtttctacaggatactgtattgatagcaaaagtactcctgctrgcatgaaacactgatgattccctgagggtctatggacaagtcccatagtttgtaaaagtctatatgtctgcatctcagaagactatagacattgaacttaatgatacaaaagatgtttaccaattccctcctgaggcttagttatattttcccttcactcattattgcaaaaagtctacacccaatcatcccattaactactcaattaacaacatagtttcactcagcaggccttttctcaaaagcccaagtaaatgtcctgccacattaaaagaaactgctattaaaaataaacataaacacactttaactgaatgtatgtccatgttgggtttattattccacaattaattgcccatcaattaaaaaaatggcagagaaaaaaaacaaatatattagtgatatttaaagaatccaaaggttccaggggagaaatgaagtaataaatagtaaggagctaagcggaaaggcagaatctaattgtaaaatttccatgtgaattgttttgtagttgctttagggaaagaagagctaatgacttgtcaacctgaaaccatagcggctcttctgcaaatatcactactcaagtatcagttaatgctcaaaggctaaacaagacagtatctacagcattacaagttttctgtcaaaaacattatatttatagatgaaattggccttgctacaaagagaaaattgaatttaaaaag

SEQ ID NO: 67711 - DNA, 773 bp, Homo sapiens
aagtcactgcttaaatcattgtttctacaggatactgtattgatagcaaaagtactcctgctggcatgaaacactgatgattccctgagggtctatggacaagtcccatagtttgtaaaagtctatatgtctgcatctcagaagactatagacattgaacttaatgatacaaaagatgtttaccaattccctcctgaggcttagttatattttcccttcactcattattgcaaaaagtctacacccaatcatcccattaactactcaattaacaacatagtttcactcagcaggccttttctcaaaagcccaagtaaatgtcctgccacattaaaagaaactgctattaaaaataaacataaacacactttaactgaatgtatgtccatgttgggtttattattccacaattaattgcccatcaattaaaaaaatggcagagaaaaaaaacaaatatattagtgatatttaaagaatccaaaggttccaggggagaaatgaagtaataaatagtaaggagctaagcrgaaaggcagaatctaattgtaaaatttccatgtgaattgttttgtagttgctttagggaaagaagagctaatgacttgtcaacctgaaaccatagcggctcttctgcaaatatcactactcaagtatcagttaatgctcaaaggctaaacaagacagtatctacagcattacaagttttctgtcaaaaacattatatttatagatgaaattggccttgctacaaagagaaaattgaatttaaaaag

SEQ ID NO: 67712 - DNA, 695 bp, Homo sapiens
acagtgatgagattccatgttatcagggtatatgaggttaggtcacagatggggatgatgatggaggagggcctgaaagcagaaggctactgcagggaggaaaaggtatgagttatctcaatgaataggataaattacaacaattcaatcaatatggcatggtgttatgagctgaactgtgtccctcaaaattctacagtatgttgaagtcctaacctccatcacctcagaatgtaactgtctttggaaataggtctttaaaggtggtaattaagtkaaaattagacagttgtggtggcccttaatcgaatatggctgctagccttttaagaggaaatttggaaatacagatttgacaccaggctggtgcacgaacagagacaaccatgggaagagagtgagatgatcatctgaaagcagagaggtgtgtaacagatccttaccaaaggatcaagaaaaccaatccacccttcagaactgtggaaaaataaatttctgttgtttaagccacccagactgtggtattgttaatgacagccctagcaacataatacacatgataaaattgctggggtgctaggcactgtggttcacacaggtactttcagcactttgggaggccaagacaggaggatcaggagtttgagaccagcctgggcaacataactagatcctgtctccacaaaaaaattaaa

SEQ ID NO: 67713 - DNA, 695 bp, Homo sapiens
acagtgatgagattccatgttatcagggtatatgaggttaggtcacagatggggatgatgatggaggagggcctgaaagcagaaggctactgcagggaggaaaaggtatgagttatctcaatgaataggataaattacaacaattcaatcaatatggcatggtgttatgagctgaactgtgtccctcaaaattctacagtatgttgaagtcctaacctccatcacctcagaatgtaactgtctttggaaataggtctttaaaggtggtaattaagttaaaattagacagttgtggtggcccttaatygaatatggctgctagccttttaagaggaaatttggaaatacagatttgacaccaggctggtgcacgaacagagacaaccatgggaagagagtgagatgatcatctgaaagcagagaggtgtgtaacagatccttaccaaaggatcaagaaaaccaatccacccttcagaactgtggaaaaataaatttctgttgtttaagccacccagactgtggtattgttaatgacagccctagcaacataatacacatgataaaattgctggggtgctaggcactgtggttcacacaggtactttcagcactttgggaggccaagacaggaggatcaggagtttgagaccagcctgggcaacataactagatcctgtctccacaaaaaaattaaa

SEQ ID NO: 67714 - DNA, 887 bp, Homo sapiens
aggtttgggagccacaatatgggtggttgggagtgtcacctgagttccctaactccagagttctcaaattctcacccacgacagtcacctgagagctttaaaagatctcggtgcaaggccccgttccagacctggaaagtgggaattagcagtttttaaagctttccagataattcaactgtgctgccaaatttgagacccaatactaggcatacatgcttttcaaactttaatatttgaaatctygaccagcctggccagcacgtgaaaccttgtctctattaaaaatacaaaaaattagccgggcatggtaacgtgcacctgtactctcagctactcaggaggctgaggcaggagaattgcttgaacctggcaggcaggggttatagtgagccaagattgcaccactgcactccagcctgggtgagagagtgagactccatcaaaaaagaaaagaaaacagaagaaaagaaatctcctgtgatcctgttaagatgcagactctgattctgcagttctggggtggggcctgagaggttgcattttagcaagaccccagctgatgttgatactgctggtctatggacaagtttgagttgcaaaactgtagagaatgggaaacctccaaacatttctgtgtgagggagtgatgtaaccaaagctgaactctgcaaagaggaatcaagcatcccttagcagaagtagacttaaaggggaaggaatgaggtgggagaccattaaaaaagttaatgagaagatgggcttggagaagtctgaatgatcctggtagcaggctccctgtggagaagtaaccctatcacattcaacgccactctacagggggccgttgctatggggtgggcttgtaaaaggccctaccaggatcc

SEQ ID NO: 67715 - DNA, 880 bp, Homo sapiens
tctccatgcagataataaataaagtaacttttgttttgagagatttatttcgaagacctcttcattaaacactatttgggggcagatgcgtacctatggaaggtgaagaaaaacatgctgataaaatagccatcaaggaaatgtgccactgacaaaatctaacatggtctgtcttcaaagaatacatttaaaatacagaaacatacacacatgcacaggcacacacgggaaggagagagggaagaggggagagaaaaagagagaggaaagctggaaggaggaattaattttaaaaagacctttgaaaccacatttaaaatatatgaaattccgaaatttggaagtaatcattacttccaaatacggctgagtgttgaaaagtcaaaccaaaagtctgcttgtttgttctgatggtgggttgctgaggtggagaagagatgatgctgctgcaaaaattacccaattctttaagggggtagtaattttgctttttttaatctyacagcttggatgaatgggtttataaaactaaaaggaagaaagtagaattctgacaggcagtgggaaggggccgactctacgccaacttcttatgttgtcaggcaggaactcacgggccgcagggtcctcatccgaacactcaaggggtgtgtgtgtgtgtgtgtgtgtgtgtgtgtgtgtgtgagagagagagagagagagcgagagagagagaatatcggggggagctagctaagtggagaaactagaactaatggctattccattacagaaacagagatacctcctggaaaaatccttccttccattttttaatccatcaaaaattggataaaaaaggccattgaacctttaagaaacagcaatagtatcctcagga

SEQ ID NO: 67716 - DNA, 880 bp, Homo sapiens
tctccatgcagataataaataaagtaacttttgttttgagagatttatttcgaagacctcttcattaaacactatttgggggcagatgcgtacctatggaaggtgaagaaaaacatgctgataaaatagccatcaaggaaatgtgccactgacaaaatctaacatggtctgtcttcaaagaatacatttaaaatacagaaacatacacacatgcacaggcacacacgggaaggagagagggaagaggggagagaaaaagagagaggaaagctggaaggaggaattaattttaaaaagacctttgaaaccacatttaaaatatatgaaattccgaaatttggaagtaatcattacttccaaatacggctgagtgttgaaaagtcaaaccaaaagtctgcttgtttgttctgatggtgggttgctgaggtggagaagagatgatgctgctgcaaaaattacccaattctttaagggggtagtaattttgctttttttaatctcacagcttggatgaatgggtttataaaactaaaaggaagaaagtagaattctgacaggcagtgggaaggggcygactctacgccaacttcttatgttgtcaggcaggaactcacgggccgcagggtcctcatccgaacactcaaggggtgtgtgtgtgtgtgtgtgtgtgtgtgtgtgtgtgtgagagagagagagagagagcgagagagagagaatatcggggggagctagctaagtggagaaactagaactaatggctattccattacagaaacagagatacctcctggaaaaatccttccttccattttttaatccatcaaaaattggataaaaaaggccattgaacctttaagaaacagcaatagtatcctcagga

SEQ ID NO: 67717 - DNA, 880 bp, Homo sapiens
tctccatgcagataataaataaagtaacttttgttttgagagatttatttcgaagacctcttcattaaacactatttgggggcagatgcgtacctatggaaggtgaagaaaaacatgctgataaaatagccatcaaggaaatgtgccactgacaaaatctaacatggtctgtcttcaaagaatacatttaaaatacagaaacatacacacatgcacaggcacacacgggaaggagagagggaagaggggagagaaaaagagagaggaaagctggaaggaggaattaattttaaaaagacctttgaaaccacatttaaaatatatgaaattccgaaatttggaagtaatcattacttccaaatacggctgagtgttgaaaagtcaaaccaaaagtctgcttgtttgttctgatggtgggttgctgaggtggagaagagatgatgctgctgcaaaaattacccaattctttaagggggtagtaattttgctttttttaatctcacagcttggatgaatgggtttataaaactaaaaggaagaaagtagaattctgacaggcagtgggaaggggccgactctacgccaacttcttatgttgtcaggcaggaactcacgggccgcagggtcctcatccgaacactcaaggggtgtgtgtgtgtgtgtgtgtgtgtgtgtgtgtgtgtgwgagagagagagagagagcgagagagagagaatatcggggggagctagctaagtggagaaactagaactaatggctattccattacagaaacagagatacctcctggaaaaatccttccttccattttttaatccatcaaaaattggataaaaaaggccattgaacctttaagaaacagcaatagtatcctcagga

SEQ ID NO: 67718 - DNA, 880 bp, Homo sapiens
tctccatgcagataataaataaagtaacttttgttttgagagatttatttcgaagacctcttcattaaacactatttgggggcagatgcgtacctatggaaggtgaagaaaaacatgctgataaaatagccatcaaggaaatgtgccactgacaaaatctaacatggtctgtcttcaaagaatacatttaaaatacagaaacatacacacatgcacaggcacacacgggaaggagagagggaagaggggagagaaaaagagagaggaaagctggaaggaggaattaattttaaaaagacctttgaaaccacatttaaaatatatgaaattccgaaatttggaagtaatcattacttccaaatacggctgagtgttgaaaagtcaaaccaaaagtctgcttgtttgttctgatggtgggttgctgaggtggagaagagatgatgctgctgcaaaaattacccaattctttaagggggtagtaattttgctttttttaatctcacagcttggatgaatgggtttataaaactaaaaggaagaaagtagaattctgacaggcagtgggaaggggccgactctacgccaacttcttatgttgtcaggcaggaactcacgggccgcagggtcctcatccgaacactcaaggggtgtgtgtgtgtgtgtgtgtgtgtgtgtgtgtgtgtgagwgagagagagagagagcgagagagagagaatatcggggggagctagctaagtggagaaactagaactaatggctattccattacagaaacagagatacctcctggaaaaatccttccttccattttttaatccatcaaaaattggataaaaaaggccattgaacctttaagaaacagcaatagtatcctcagga

SEQ ID NO: 67719 - DNA, 880 bp, Homo sapiens
tctccatgcagataataaataaagtaacttttgttttgagagatttatttcgaagacctcttcattaaacactatttgggggcagatgcgtacctatggaaggtgaagaaaaacatgctgataaaatagccatcaaggaaatgtgccactgacaaaatctaacatggtctgtcttcaaagaatacatttaaaatacagaaacatacacacatgcacaggcacacacgggaaggagagagggaagaggggagagaaaaagagagaggaaagctggaaggaggaattaattttaaaaagacctttgaaaccacatttaaaatatatgaaattccgaaatttggaagtaatcattacttccaaatacggctgagtgttgaaaagtcaaaccaaaagtctgcttgtttgttctgatggtgggttgctgaggtggagaagagatgatgctgctgcaaaaattacccaattctttaagggggtagtaattttgctttttttaatctcacagcttggatgaatgggtttataaaactaaaaggaagaaagtagaattctgacaggcagtgggaaggggccgactctacgccaacttcttatgttgtcaggcaggaactcacgggccgcagggtcctcatccgaacactcaaggggtgtgtgtgtgtgtgtgtgtgtgtgtgtgtgtgtgtgagagagagagagagagagcgagagagagagaatatcggggggagctagctaagtggagaaactagaactaatggctattccattacagaaacagagatacctcctggaaaaatccttccttccattttttaatccatcaaaaattggataaaaaaggccattgaacctttaagaaacagcaatagtmtcctcagga

SEQ ID NO: 67720 - DNA, 730 bp, Homo sapiens
gggagaggatcaggaaaaataatgaatgggcactaggcttaatatacccaggtgatgaaataatctgtaaaacaaacccccatgatacaagtttacctatgtgacaaacctgcatttgtacccaggaacttaaaataaacattaaaaaaagaggcaattaggatacagacacatagagagggaagtctgcaagccaaggggagaggaggctgcaggagaatccaaacctgtcactttgatcctggacttccgggctccaggactacgcagcaataaccttctgctgtttatgcccycagtgtgtgtaacttccttatagtaaccccagcaaacgcatacatcatccagactaggtaggccatttttctaaaatattactaaacaatgtcaaatatttaaacgctgttttgtaaaatacaagctgaagtgtttgaacaacgtttcctcatttgcacatttatgcgccagtgaattgctggttgacatattcataggtttaagcatatggcatctggttcatttcatatatgtttggtttcatcacactgaattctgttgtcacttacattaagtccccaaaagcccttttcatgaaatgttaaggagagatcatgaaataatgaaatcagataaataaacaattgaatctggtgaatccaaccagaattaaaagttgtcatattagggtcgactttgtactatttcgagtgatagtaacatattacggaat

SEQ ID NO: 67721 - DNA, 688 bp, Homo sapiens
gaaagcatcacaactcaaccacatgccacaagcagcccattaaagcacaaataacttactaataaaaagttcttatcagaatacagagaattccaattagcctttttatttactaacattatcttagagtcgacataaagttaaccgcttcctgcttttaatttagttcattctaatgactatttctctgcatctctacagttcgtttaaggatgaagatggggataatgaaaaacaaaagtcctgccagcactaacattgtcaagccgtgatatcggcacttaaaacaaccgtttgtgagagaaaacctggtatctggcttctgacgtttcagtacaatcttctattgtgcatctggatgacatcactgttgtgtgtgagtccttggtcccaataatagcccagcacagaggcgccagggcatgctttcatattcacattcatgtggacataacaggactcctgaactgcatgcttcccccagtgacacacgccccatgcctccaggctgtgcacaggcaatgcagtggcagcccagagggagaggtgatttacggtggctcaggcagacaccactaataccggcttttcatgtgtttgaccaacagcctttgcagagatgtgcatacagggccctaactstccaggagctgctacggacagagcccggtaatcccgacgacttagt

SEQ ID NO: 67722 - DNA, 688 bp, Homo sapiens
gaaagcatcacaactcaaccacatgccacaagcagcccattaaagcacaaataacttactaataaaaagttcttatcagaatacagagaattccaattagcctttttatttactaacattatcttagagtcgacataaagttaaccgcttcctgcttttaatttagttcattctaatgactatttctctgcatctctacagttcgtttaaggatgaagatggggataatgaaaaacaaaagtcctgccagcactaacattgtcaagccgtgatatcggcacttaaaacaaccgtttgtgagagaaaacctggtatctggcttctgacgtttcagtacaatcttctattgtgcatctggatgacatcactgttgtgtgtgagtccttggtcccaataatagcccagcacagaggcgccagggcatgctttcatattcacattcatgtggacataacaggactcctgaactgcatgcttcccccagtgacacacgccccatgcctccaggctgtgcacaggcaatgcagtggcagcccagagggagaggtgatttacggtggctcaggcagacaccactaataccggcttttcatgtgtttgaccaacagcctttgcagagatgtgcatacagggccctaactgtccaggagctgctacggacagagcccggtaatcccgackacttagt

SEQ ID NO: 67723 - DNA, 1010 bp, Homo sapiens
atatcatgtattgttttcataatttaaaataactaccaatacatcataagcaatctttagtaagtttatcatttgattgctcaatttattccaaagcctgtatgactgtctatttaatattagatgtttgagacacagaaaacacaaaaaaactcattgtcctagaggagcctaaagtttatagaatttatgaggacttatgtttcatttctaaaagattttgggaagtttttctgttgaggttgggctgcctctgtgtctgataactaggaagaacaccaacagctccttttctacaagaggtgtattgttcccattctcttcagtgccacatccttgctttagtgcttccactgaccttgtgcttcctgaactcctacgtaaccttagtttgtgtcagtaatgtagtacttaayaatacagcatcttctctccttagcccacctcctcaccatcagctcacctcctcaccatcctttctttccctagcccaccccaatcaggttctgtctgctctgttccactgaaaattttcttgttaaggttacaatgttgaagatgttttgctaaaaaaaaccaaaaggccaaaatccatgcttgcaacaattccaagaaattggtgaattgctgaggatgctgcctttcattctctggtccctgcttacacctgcagtctcacctccactttgcagctttattgtgtctttctcaccaccaaaccttcattcatgctgctctctccctgcctggaatgcccagcttcttcatctccaattagaaaattctcgctcacttttgcagtaaatgcctttctgttttatttctcccaagcctttttttttttttccagtttaggtatcatctatttcttctttccagaggaccctaatttctctttggggaattttatctcccctattgttggcagggataccctgctgatctttaatctaactcatttggtacagtcgtagaatgggcattgacccatgctaggccaactgggcttt

SEQ ID NO: 67724 - DNA, 533 bp, Homo sapiens
agagggccgagacaaaaggctgagacaagtctgtttggagaaaactctgtgtggaatgtcaatgcacatattagaacccagcctgtcaatttggtccacagagagaatggtggttttatgacattattggcaccacaatctaacaactctcaaccggctggggcattaaacatgacgaaggacacagatagactaccctagattttttttattcaaagggagcacatgtaatgttctcatgcaaaccagagaggaagtgagaattctttcatcttccttttctttgctattaacctcaatcacataactcttgggttaattttccttctataacgagaacaccaaacagaaaacacatgtgagaattaaataaacacagagtagaatgaaggctgaatctatggaatctatcaggacttgtttacagagaaggtaaattaacaatttyttggaggcacagttttcttacctgtatgataggaagaatcactgttggaataggcattagtgttagggatgcttctagaaagcct

SEQ ID NO: 67725 - DNA, 533 bp, Homo sapiens
agagggccgagacaaaaggctgagacaagtctgtttggagaaaactctgtgtggaatgtcaatgcacatattagaacccagcctgtcaatttggtccacagagagaatggtggttttatgacattattggcaccacaatctaacaactctcaaccggctggggcattaaacatgacgaaggacacagatagactaccctagattttttttattcaaagggagcacatgtaatgttctcatgcaaaccagagaggaagtgagaattctttcatcttccttttctttgctattaacctcaatcacataactcttgggttaattttccttctataacgagaacaccaaacagaaaacacatgtgagaattaaataaacacagagtagaatgaaggctgaatctatggaatctatcaggacttgtttacagagaaggtaaattaacaatttcttggaggcacagttttyttacctgtatgataggaagaatcactgttggaataggcattagtgttagggatgcttctagaaagcct

SEQ ID NO: 67726 - DNA, 1557 bp, Homo sapiens
tacctaggaaataaatcaagaaaaagttagacttaccttaagtgccttttcctaaaacaggacaaattcattttgaagggggaaaaaaagcagcaaggaaacgttacagaggttctttgtgcacaaagagtgttcccttggttctgtggaatgctctgmccacccaggcccttctcagcactctcttgccctcctaggcctgttttgtcctgtgtacagagggataaggacacagggaagtcaactggctgctcctatattacagaattttttcaggacaagggattcagtactctctgtcttccttccaacattctaccctgccactggatataaataatgagaaatatcagtgccctggaggtggacgtcaacccttgctgcctctttaagagctagggccaaaagccagagaagacatttcccttcctcctgcatcttctaatcccaaagcctggggacactgcaagtccagtggtgcttggaaaggttgaaaaacgacctccctttaagccggaaggaaagaaaatgccaggggattaatagggttgaaggattacaaatttcagataggtcacacttcatctgctttgagttattggggcttgcttctttcacaatttcttaccatggcaaaagtcagaaaagactttcttgatctgttcttgggatggggactttcccatacatttgggagatactgactctctggtccaattgcaccaggattcagaggcactgccattcctggtgacctgcttctgtgtggccatcccaatgtcatgaagacacatcccacggctgttttccattaggaagacatgagggggcacctgggagaggtagcgggagatggcacatccccatgttcccatcacacgcagcagtacccatggatgcctcaccctcagggatccacgccgtgggatgcagcaaattgagaacccaccagaatgttccaccccgcacccagcaggtcccttttggagcaagccagcagcctctccccatgggactgcagatgcgtcacactggaaactgctcttctttttctcttttcatccaaattgaggatctgagcaaaagtctgaaggccctggagataactcaggttcttttccctgagtgacagctcgacagggtcttacagtaaataagggggagtctaagaaaaagatgatctcatttcatgaatgcatatttgtgtcctaaagaagaagaaccacaagaccaacctcagagccccatgaatattacagtagatccaaccctgtgaccacaccacccatggtggtgatccccagggatgaagggattggctaattgctgccaagcactgtggcaagggccatgcaccttagctccgagaagccatgaccctgatagggtcctctcagctgatggacattgcccacctctttcttctacaggccatgacatcacacaacaggaatgctgatcatgaaggatgcacgcattgtgctcaggcagggaaagtgtgctcaatggccctggtctaaccctatccccttttgtatgaaatttgcagaggtggat

SEQ ID NO: 67727 - DNA, 1557 bp, Homo sapiens
tacctaggaaataaatcaagaaaaagttagacttaccttaagtgccttttcctaaaacaggacaaattcattttgaagggggaaaaaaagcagcaaggaaacgttacagaggttctttgtgcacaaagagtgttcccttggttctgtggaatgctctgcccacccaggcccttctcagcactctcttgccctcctaggcctgttttgtcctgtgtacagagggataaggacacagggaagtcaactggctgctcctatattacagaattttttcaggacaagggattcagtactctctgtcttccttccaacattctaccctgccactggatataaataatgagaaatatcagtgccctggaggtggacgtcaacccttgctgcctctttaagagctagggccaaaagccagagaagacatttcccttcctcctgcatcttctaatcccaaagcctggggacactgcaagtccagtggtgcttggaaaggttgaaaaacgacctccctttaagccggaaggaaagaaaatgccaggggattaatagggttgaaggattacaaatttcagataggtcacacttcatctgctttgagttattggggcttgcttctttcacaatttcttaccatggcaaaagtcagaaaagactttcttgatctgttcttgggatggggactttcccatacatttgggagatactgactctctggtccaattgcaccaggattcagaggcactgccattcctggtgacctgcttctgtgtggccatcccaatgtcatgaagacacatcccacggctgttttccattaggaagacatgagggggcacctgggagaggtagcgggagatggcacatccccatgttcccatcacacgcagcagtacccatggatgcctcaccctcagggatccacgccgtgggatgcagcaaattgagaacccaccagaatgttccaccccgcacccagcaggtcccttttggagcaagccagcagcctctccccatgggactgcagatgcgycacactggaaactgctcttctttttctcttttcatccaaattgaggatctgagcaaaagtctgaaggccctggagataactcaggttcttttccctgagtgacagctcgacagggtcttacagtaaataagggggagtctaagaaaaagatgatctcatttcatgaatgcatatttgtgtcctaaagaagaagaaccacaagaccaacctcagagccccatgaatattacagtagatccaaccctgtgaccacaccacccatggtggtgatccccagggatgaagggattggctaattgctgccaagcactgtggcaagggccatgcaccttagctccgagaagccatgaccctgatagggtcctctcagctgatggacattgcccacctctttcttctacaggccatgacatcacacaacaggaatgctgatcatgaaggatgcacgcattgtgctcaggcagggaaagtgtgctcaatggccctggtctaaccctatccccttttgtatgaaatttgcagaggtggat

SEQ ID NO: 67728 - DNA, 1345 bp, Homo sapiens
actccctaagaaaatcaatggtcctcatttgggaaagagcacaatctcattgcaaagcttagggtcctgtaaatttaccagtgtctttcctcaaatgctcaccaaagaaaaaaaaaaagatagtcaagcaaagctatggtatttaaacctactagagagagggacagcacccccttcacagaatcttggcagtatatcaaaacagggaaattaggaaaggcttttctggactggccagagtgattttggagtggacttcgtgaagaaaggcactggttttaatttgacagagattataatataataatgttgaagagcttggcacagcaaggtgagggtcttgaaagaatcattgagcagaatgttagttctgagaagtaagctctgtattagtcttgtctttctgagcaagaatttcctggagtgagaagctaaattatttaagtttggtttcagtattgtttaacaaaaggaggaaaatgtttgcctagactcagagacagaatttatgttgctttcaggttttaccaaaatctctatctccttctcaatctctctagactacgtatgggagcaaataattgggatgtcttttctggaactcagccttaataactacaagtctgtgtatttgcatggatcctgatagtcatgttattatcagtttatgtaaacaaaactgctttgatcctgcaatataccccatctgttacatttaccctttcccctttcccaacattaattgttgattgctccattactacaattctactccatctattttttctctagtcagtcttttaccaaacactctatcaaaattattttcacatggctgggcacagtggctcacacctgtagtcccagcactttggaaggcctggagggggctgtggattgcttcagcccaggagttcgagaccagcctgggcaacatgagaaacctcatctcaactataaatacaaaaattagccaggtgtggtggcacatgcctatagtyccagctattcaggatgttgagatgggaggaccgcttgagcccagggaagtcaaggctgaagtgagctgtcattttgcccctccactctaacctgggtgacagacagactctgtctcaaacaacaacaacatatatatatataatatatatatattttttaatatatataatatatattttatatatattacatatatagtataatgttttgtttttctttaccagtcacctccaaattgctaatagaaaataattctctatcctcatctttattttatcaatggcatttgtaacaagtaattaccttttcttaaaaaaataattttgagaaattagtttcaaga

SEQ ID NO: 67729 - DNA, 1345 bp, Homo sapiens
actccctaagaaaatcaatggtcctcatttgggaaagagcacaatctcattgcaaagcttagggtcctgtaaatttaccagtgtctttcctcaaatgctcaccaaagaaaaaaaaaaagatagtcaagcaaagctatggtatttaaacctactagagagagggacagcacccccttcacagaatcttggcagtatatcaaaacagggaaattaggaaaggcttttctggactggccagagtgattttggagtggacttcgtgaagaaaggcactggttttaatttgacagagattataatataataatgttgaagagcttggcacagcaaggtgagggtcttgaaagaatcattgagcagaatgttagttctgagaagtaagctctgtattagtcttgtctttctgagcaagaatttcctggagtgagaagctaaattatttaagtttggtttcagtattgtttaacaaaaggaggaaaatgtttgcctagactcagagacagaatttatgttgctttcaggttttaccaaaatctctatctccttctcaatctctctagactacgtatgggagcaaataattgggatgtcttttctggaactcagccttaataactacaagtctgtgtatttgcatggatcctgatagtcatgttattatcagtttatgtaaacaaaactgctttgatcctgcaatataccccatctgttacatttaccctttcccctttcccaacattaattgttgattgctccattactacaattctactccatctattttttctctagtcagtcttttaccaaacactctatcaaaattattttcacatggctgggcacagtggctcacacctgtagtcccagcactttggaaggcctggagggggctgtggattgcttcagcccaggagttcgagaccagcctgggcaacatgagaaacctcatctcaactataaatacaaaaattagccaggtgtggtggcacatgcctatagtcccagctattcaggatgttgagatgggaggaccgcttgagcccagggaagtcaaggctgaagtgagctgtcattttgcccctccactctaacctgggtgacagacagactctgtctcaaacaacaacaacatatatatatataatatatatatattttttaatatatataatatatattttatatatattayatatatagtataatgttttgtttttctttaccagtcacctccaaattgctaatagaaaataattctctatcctcatctttattttatcaatggcatttgtaacaagtaattaccttttcttaaaaaaataattttgagaaattagtttcaaga

SEQ ID NO: 67730 - DNA, 536 bp, Homo sapiens
taaacaagtaatgcaaaccatcctcttggggagtatccatttcttttgtcatatgtctagagctcaatattctgagttttttcctatgaatttgatttcccaagtatttattttaactgtataaagaaagtgtattagaaaatatcagttaaaaacactgggagcttcctgatcaagaagttggctcttacaattagagccaaaataatgacaatgatgacaataaaaattataaagatctgatatttattgggtacttactatgtgctggtcattgttctagaagctgacatctattcattaarcagcagttatcaggcatatgaacaaaaaatttgaggtgttgaccacaggcttcacctttgtgacaggataaacacattttgcctgagattacccatattaaaagagtactatgtttggaacttataggctatctgactctctgggcaaggattcccgtaatgaagaagacaagatgaaagattatatctcaactgatctgagcttctggggcataacaaatgacttaattt

SEQ ID NO: 67731 - DNA, 2641 bp, Homo sapiens
  misc_feature (1)...(2641): n = A,T,C or G
atcattttacatcttgcatagctcacttgcctttgtcctcatcctggatcctctgaatttatgccttgccaaaagcatcttcctttcatccttgattcaggctttgtgttctagggaagctgatatagaacacatctattcgcatttagttgatcagtcctggtccgtgataaaacttgaagtagagaagtgttttgctgaataagaaaaatgagaaaattatggaattttgggaatagtgagaaatttttgccaaagaagaagaaaataaagtcaggaatgagaccaaaacaacaacaacaacaacaacaacaaatctaaaacaaaataaaatgtgtaacaaaactctttatatcaagtagataaaaaacttgatttaacttttacagaagccaccacaaaaaagaaaatattatttatttttgtgttcatgatacaatgagaaggaaaaaaaacacacacaaacccaaatctttaggaaaattccaaattcgttgtataaatttcaattaaattttctttctgaatcctgtatcacttatgaatactatcagaaataaataacaatgtatgactaatagtgacttcataatgaagatattcgagtatctcactcagacaaggtcccacatattttctccaaaatcttttgctctcctatcttcagtacgttgcttttgatcctttagtttgtcttctcttggtggtgagatgcctgccagtattccaactatcaaaggtaggaagtggggaaggtagtcagggcaggggagaatttctgctctaatggctttcatgggattgtcggaaggaccttttctgccttttctctacatcaactgtggtcatgacacactggccagaactgggacattatggccattgtaacctgcaatataggctgggagtgtgagcacctgcctttttgagcctgtaccaactcataagtagaggagggttagagacaaggcggaggcanacacatcnggtggtgcgtatttttctttctagttctcatactgagaattacctgtgatatactgaataatatcctaggtaacacatcacagtnatatgtgacattccttatagctatacataagtgttttccatacatgctgatgacattataccaccatatgatgcagtagaaataattccttatagtgggaacaggtaggatagaaatggttgcagtttagatgtgtaggcaactgacctagcttgcatattttagaacatgggacagtttggtctgagtgttctaaaaacctgtccctgaatcgagatttgtaagactaaatgtacatgttacacagctccagattacacttcatagtgatgcttgagtatgactttgattttgccatttctacatagacccagtattactaggagataatcaagttaggaataaagttgcctgatattggggggataactaagaaatctagtatgaatgcatgcatgctgtctctgcttggatataattatgccagggggccaggattctgttcagaagattgtttcaaattggcttcrgtgcctgcacaaatgggcaataaaacccccaagatatactccatattatatcacagaaataattatacctgaagaatttaaggcaagtaaaatcacacgcttgcctggacaaaagtaaaatatccataaactatccataaaatgctaagctttcagtagtgctattttctggtgtaccctccagaataaactgtgagtgaatatgcaccaaaataactaaacaaggtaattcattgtatgcggttgttatttatataccaattaaaagtaatagaatggcttccaaaaataactactttagttttagaataatttctctgcactcccttttggcaataatcagcaaacagaattgatgattcaggccacagtagtatgaaataataaaactatgctgtctttatataataaaatatttgccttttttgtgccagttttgcctttttttcttaaaagtaaaataagctaatatttattaagccctgtacttacttaaatctcttgacaccaatgacatagacactatcttcaaaatgttaagtgactcagaaaagttaaggggtttgtccaagttatgcagttgtaagtggtagatctgggataatgaggaggcctgaattttgtgaatctaaaagtggattagaattattaggaaacaaaaaagagaactgcccagaatttctgcttagcacggactcaggatctctgagttcaaggccctatgatacggatgaacaaagtgtcagtacaccttcatctcaggatgagaatattgcatgggacaaagcctatcaatgtcataaggtgaacacttcacaattttttttcataatctatctccacctgcttgacagtacatgaaaatcccactcatattctagcattgggctgctggacgtattgttggctttcaccctcaactctgttttcatctgtgccccaatgataacttggatagagagtatgtcaagtattactaattagaggcaattgtaaatggaaagtcttgtttcatggatttttaaaatgtatacttatatgattatttactttttctcatatttctcaattcttaattctatcttttaaggccgaaatt

SEQ ID NO: 67732 - DNA, 2641 bp, Homo sapiens
  misc_feature (1)...(2641): n = A,T,C or G
atcattttacatcttgcatagctcacttgcctttgtcctcatcctggatcctctgaatttatgccttgccaaaagcatcttcctttcatccttgattcaggctttgtgttctagggaagctgatatagaacacatctattcgcatttagttgatcagtcctggtccgtgataaaacttgaagtagagaagtgttttgctgaataagaaaaatgagaaaattatggaattttgggaatagtgagaaatttttgccaaagaagaagaaaataaagtcaggaatgagaccaaaacaacaacaacaacaacaacaacaaatctaaaacaaaataaaatgtgtaacaaaactctttatatcaagtagataaaaaacttgatttaacttttacagaagccaccacaaaaaagaaaatattatttatttttgtgttcatgatacaatgagaaggaaaaaaaacacacacaaacccaaatctttaggaaaattccaaattcgttgtataaatttcaattaaattttctttctgaatcctgtatcacttatgaatactatcagaaataaataacaatgtatgactaatagtgacttcataatgaagatattcgagtatctcactcagacaaggtcccacatattttctccaaaatcttttgctctcctatcttcagtacgttgcttttgatcctttagtttgtcttctcttggtggtgagatgcctgccagtattccaactatcaaaggtaggaagtggggaaggtagtcagggcaggggagaatttctgctctaatggctttcatgggattgtcggaaggaccttttctgccttttctctacatcaactgtggtcatgacacactggccagaactgggacattatggccattgtaacctgcaatataggctgggagtgtgagcacctgcctttttgagcctgtaccaactcataagtagaggagggttagagacaaggcggaggcanacacatcnggtggtgcgtatttttctttctagttctcatactgagaattacctgtgatatactgaataatatcctaggtaacacatcacagtnatatgtgacattccttatagctatacataagtgttttccatacatgctgatgacattataccaccatatgatgcagtagaaataattccttatagtgggaacaggtaggatagaaatggttgcagtttagatgtgtaggcaactgacctagcttgcatattttagaacatgggacagtttggtctgagtgttctaaaaacctgtccctgaatcgagatttgtaagactaaatgtacatgttacacagctccagattacacttcatagtgatgcttgagtatgactttgattttgccatttctacatagacccagtattactaggagataatcaagttaggaataaagttgcctgatattggggggataactaagaaatctagtatgaatgcatgcatgctgtctctgcttggatataattatgccagggggccaggattctgttcagaagattgtttcaaattggcttcagtgcctgcacaaatgggcaataaaacccccaagatatactccatattatatcacagaaataattatacctgaagaatttaaggcaagtaaaatcacacgcttgcctggacaaaagtaaaatatccataaactatccataaaatgctaagctttcagtagtgctattttctggtgtaccctccagaataaactgtgagtgaatatgcaccaaaataactaaacaaggtaattcattgtatgcggttgttatttatataccaattaaaagtaatagaatggcttccaaaaataactactttagttttagaataatttctctgcactcccttttggcaataatcagcaaayagaattgatgattcaggccacagtagtatgaaataataaaactatgctgtctttatataataaaatatttgccttttttgtgccagttttgcctttttttcttaaaagtaaaataagctaatatttattaagccctgtacttacttaaatctcttgacaccaatgacatagacactatcttcaaaatgttaagtgactcagaaaagttaaggggtttgtccaagttatgcagttgtaagtggtagatctgggataatgaggaggcctgaattttgtgaatctaaaagtggattagaattattaggaaacaaaaaagagaactgcccagaatttctgcttagcacggactcaggatctctgagttcaaggccctatgatacggatgaacaaagtgtcagtacaccttcatctcaggatgagaatattgcatgggacaaagcctatcaatgtcataaggtgaacacttcacaattttttttcataatctatctccacctgcttgacagtacatgaaaatcccactcatattctagcattgggctgctggacgtattgttggctttcaccctcaactctgttttcatctgtgccccaatgataacttggatagagagtatgtcaagtattactaattagaggcaattgtaaatggaaagtcttgtttcatggatttttaaaatgtatacttatatgattatttactttttctcatatttctcaattcttaattctatcttttaaggccgaaatt

SEQ ID NO: 67733 - DNA, 2641 bp, Homo sapiens
  misc_feature (1)...(2641): n = A,T,C or G
atcattttacatcttgcatagctcacttgcctttgtcctcatcctggatcctctgaatttatgccttgccaaaagcatcttcctttcatccttgattcaggctttgtgttctagggaagctgatatagaacacatctattcgcatttagttgatcagtcctggtccgtgataaaacttgaagtagagaagtgttttgctgaataagaaaaatgagaaaattatggaattttgggaatagtgagaaatttttgccaaagaagaagaaaataaagtcaggaatgagaccaaaacaacaacaacaacaacaacaacaaatctaaaacaaaataaaatgtgtaacaaaactctttatatcaagtagataaaaaacttgatttaacttttacagaagccaccacaaaaaagaaaatattatttatttttgtgttcatgatacaatgagaaggaaaaaaaacacacacaaacccaaatctttaggaaaattccaaattcgttgtataaatttcaattaaattttctttctgaatcctgtatcacttatgaatactatcagaaataaataacaatgtatgactaatagtgacttcataatgaagatattcgagtatctcactcagacaaggtcccacatattttctccaaaatcttttgctctcctatcttcagtacgttgcttttgatcctttagtttgtcttctcttggtggtgagatgcctgccagtattccaactatcaaaggtaggaagtggggaaggtagtcagggcaggggagaatttctgctctaatggctttcatgggattgtcggaaggaccttttctgccttttctctacatcaactgtggtcatgacacactggccagaactgggacattatggccattgtaacctgcaatataggctgggagtgtgagcacctgcctttttgagcctgtaccaactcataagtagaggagggttagagacaaggcggaggcanacacatcnggtggtgcgtatttttctttctagttctcatactgagaattacctgtgatatactgaataatatcctaggtaacacatcacagtnatatgtgacattccttatagctatacataagtgttttccatacatgctgatgacattataccaccatatgatgcagtagaaataattccttatagtgggaacaggtaggatagaaatggttgcagtttagatgtgtaggcaactgacctagcttgcatattttagaacatgggacagtttggtctgagtgttctaaaaacctgtccctgaatcgagatttgtaagactaaatgtacatgttacacagctccagattacacttcatagtgatgcttgagtatgactttgattttgccatttctacatagacccagtattactaggagataatcaagttaggaataaagttgcctgatattggggggataactaagaaatctagtatgaatgcatgcatgctgtctctgcttggatataattatgccagggggccaggattctgttcagaagattgtttcaaattggcttcagtgcctgcacaaatgggcaataaaacccccaagatatactccatattatatcacagaaataattatacctgaagaatttaaggcaagtaaaatcacacgcttgcctggacaaaagtaaaatatccataaactatccataaaatgctaagctttcagtagtgctattttctggtgtaccctccagaataaactgtgagtgaatatgcaccaaaataactaaacaaggtaattcattgtatgcggttgttatttatataccaattaaaagtaatagaatggcttccaaaaataactactttagttttagaataatttctctgcactcccttttggcaataatcagcaaacagaattgatgattcaggccacagtagtatgaaataataaaactatgctgtctttatataataaaatatttgccttttttgtgccagttttgcctttttttcttaaaagtaaaataagctaatatttattaagccctgtacttacttaaatctcttgacaccaatgacatagacactatcttcaaaatgttaagtgactcagaaaagttaaggggtttgtccaagttatgcagttgtaagtggtagatctgggataatgaggaggcctgaattttgtgaatctaaaagtggattagaattattaggaaacaaaaaagagaactgcccagaatttctgcttagcacggactcaggatctctgagttcaaggccctatgatacggatgaacaaagtgtcagtacaccttcatctcaggatgagaatattgcatgggacaaagcctatcaatgtcataaggtgaacacttcacaattttttttcataatctatctccacctgcttgacagtacatgaaaatcccactcatattctagcattgggctgctggacgtattgttggctttcaccctcaactctgttttcatctgtgccccartgataacttggatagagagtatgtcaagtattactaattagaggcaattgtaaatggaaagtcttgtttcatggatttttaaaatgtatacttatatgattatttactttttctcatatttctcaattcttaattctatcttttaaggccgaaatt

SEQ ID NO: 67734 - DNA, 785 bp, Homo sapiens
tgtgccatactcagggagtttattacaaacacaacaaatgattatactctatggtgcataacttaattctagtctattaacctagctaggacactcacattgtgatacaaattttcgtttgatgctcaggaatccccaggccatcagagtagaaagctccatgaatacagacctatttttttatatctatttcctttgctcatacattattaggactttagtggtcatttcatgaatcagttgatagaaggcgaaggacaaggcattgaaatttccttcagctttcactgggaactttcagtatgatgagagggaaatttaacatgtctggacatttgtgacaaggttctgcwtatgactaaaaatcttctatttgataggcttgagaaagataatataggacagattaaataccgcataaatgctatataataaagagacactcacagtatgtcaagggacgcatagtgatgcaactatgtctgtcatacatttactgtatttggtacatgaaatgtacaacaacaacaacccaccgaatggcggcatctgtacttattttctccctgggcctggatatttgcaatcctttctatgtttaatgcccagaaatgcaattaatatttttactttggtacatttatattttaacactggagttggtaccagacaggattgtggagctactcacatcatgtgactctgctgcaccattcaatgtgaaaacaagtgaaaactgatgaaatcagcatttaatgcaatctgagcaggagaatgaatgggag

SEQ ID NO: 67735 - DNA, 1238 bp, Homo sapiens
ggtgcagatggactagcataatttctctcaaaagtgttcctgagtgtttgytgtcctgatctggaacaccacactgcaccttcccataccacaccatatcatattcagtcaatttgcttgctagtccaggggagatggcaggaagtttcttttaatctctggctttgttccaaaataaatattcacttgaggtgtcttaattgcagtgggaagtaactcttgtctgaaaggtattcaatttaacaggcatttgttgagagcctactatatgtccagcacaattctaggcactttggatacaacaatgaacataaacaaacaaaaaatccctgccctcatgaagcctacattccagaggaagaagaaagatgttttaaaaaatacttagaataggtcaagtatataaaatgatgaccagagtaatgaaaataaagtagaaaaaggagtgtcagggagacaggtagtggtcagttttaaataaggtggtgaaggaaaactttatagaaaagaagtcaacatttgagcaacaacctgaagaaggtgagggaaagggttgcatggagatcagggaggccagtgtagctggagcatagagaggagctcaaagagggaaagaggagccactgctttgttgaaattgactgcaaggaggcaaaggcagaggcagagaattcagtcaggagtcatcgcaatgacccaaaatgagagatgatggtggcttgggccagaagagaagcagcgaagtgacgagaaatggtcaaatttcaaatatattttcagctaaagctgacaggatacgctgatagataggtcatagcatggaggagaataagaggagtcaagctggatcctgatgcttttggaccgagaaattgtagactttaagtagaatcacctagcaaagaaaccaaggcagatacaagatggatttatacatttatgctcacatgcaaacagaaggtgacatgaggctattttcttacgtctttcatacatcagcatgaattaactactggagtgtgtcatttaaaggacaggatatggtctgcacacatttaagtctaacaacagtaaacattattcctgtatggttaattgggagttgacatcaccctcagtcagcctgtggttgagtcttgcagggaaaatgccactgagttttctcagccttaaaaaaataatgtatgcttttatctgacctaaagtcaggaactataaaagaagaaatgcaaacttgg

SEQ ID NO: 67736 - DNA, 1238 bp, Homo sapiens
ggtgcagatggactagcataatttctctcaaaagtgttcctgagtgtttgctgtcctgmtctggaacaccacactgcaccttcccataccacaccatatcatattcagtcaatttgcttgctagtccaggggagatggcaggaagtttcttttaatctctggctttgttccaaaataaatattcacttgaggtgtcttaattgcagtgggaagtaactcttgtctgaaaggtattcaatttaacaggcatttgttgagagcctactatatgtccagcacaattctaggcactttggatacaacaatgaacataaacaaacaaaaaatccctgccctcatgaagcctacattccagaggaagaagaaagatgttttaaaaaatacttagaataggtcaagtatataaaatgatgaccagagtaatgaaaataaagtagaaaaaggagtgtcagggagacaggtagtggtcagttttaaataaggtggtgaaggaaaactttatagaaaagaagtcaacatttgagcaacaacctgaagaaggtgagggaaagggttgcatggagatcagggaggccagtgtagctggagcatagagaggagctcaaagagggaaagaggagccactgctttgttgaaattgactgcaaggaggcaaaggcagaggcagagaattcagtcaggagtcatcgcaatgacccaaaatgagagatgatggtggcttgggccagaagagaagcagcgaagtgacgagaaatggtcaaatttcaaatatattttcagctaaagctgacaggatacgctgatagataggtcatagcatggaggagaataagaggagtcaagctggatcctgatgcttttggaccgagaaattgtagactttaagtagaatcacctagcaaagaaaccaaggcagatacaagatggatttatacatttatgctcacatgcaaacagaaggtgacatgaggctattttcttacgtctttcatacatcagcatgaattaactactggagtgtgtcatttaaaggacaggatatggtctgcacacatttaagtctaacaacagtaaacattattcctgtatggttaattgggagttgacatcaccctcagtcagcctgtggttgagtcttgcagggaaaatgccactgagttttctcagccttaaaaaaataatgtatgcttttatctgacctaaagtcaggaactataaaagaagaaatgcaaacttgg

SEQ ID NO: 67737 - DNA, 741 bp, Homo sapiens
ctgaaccctttagagactataatattatgaggcattaattttttttgttttttccgagtggctttcaatctgtagctgtatgttagctatatgaaggtgagtatacatacatattgtgaaagcaaaaattgcatccgacaaagttaagcagcaaggacaaatgctattcaagrcaattacaataggagagagaggccagaaatcagcctgctcaactccactataacaaggggtgggaggaactttagggactggtatgagctagtggaagggaactagagaacactggaggatgggggcaggttgatcactgggttgtgtgaagcacactgagtttgcaaaatacttttctctgtgattaggtcatctctgctggctaattggcacccattgaagttaggctcctactctcccttagagactggtagacaggggtgctatttttcatgatgattacatttcaaagggttggctcccagcaacttgagaaagacttccctgagtagtacaacaggcaagaggcttttaaaaatatttacatctcaaaggggcagagaaaggatttacaattacaattttttcttttgtaaatgctctaggaaaaaaagaagtcaggggctcagaatctgagagaagcctgtcaagtttagtcaagctgagggaaacatcaaggccttcttgattaaaaggtatacactcacacacacttgcttctaatttatcttaaaaatatatgctctg

SEQ ID NO: 67738 - DNA, 741 bp, Homo sapiens
ctgaaccctttagagactataatattatgaggcattaattttttttgttttttccgagtggctttcaatctgtagctgtatgttagctatatgaaggtgagtatacatacatattgtgaaagcaaaaattgcatccgacaaagttaagcagcaaggacaaatgctattcaagacaattacaataggagagagaggccagaaatcagcctgctcaactccactataacaaggggtgggaggaactttagggactggtatgagctagtggaagggaactakagaacactggaggatgggggcaggttgatcactgggttgtgtgaagcacactgagtttgcaaaatacttttctctgtgattaggtcatctctgctggctaattggcacccattgaagttaggctcctactctcccttagagactggtagacaggggtgctatttttcatgatgattacatttcaaagggttggctcccagcaacttgagaaagacttccctgagtagtacaacaggcaagaggcttttaaaaatatttacatctcaaaggggcagagaaaggatttacaattacaattttttcttttgtaaatgctctaggaaaaaaagaagtcaggggctcagaatctgagagaagcctgtcaagtttagtcaagctgagggaaacatcaaggccttcttgattaaaaggtatacactcacacacacttgcttctaatttatcttaaaaatatatgctctg

SEQ ID NO: 67739 - DNA, 741 bp, Homo sapiens
ctgaaccctttagagactataatattatgaggcattaattttttttgttttttccgagtggctttcaatctgtagctgtatgttagctatatgaaggtgagtatacatacatattgtgaaagcaaaaattgcatccgacaaagttaagcagcaaggacaaatgctattcaagacaattacaataggagagagaggccagaaatcagcctgctcaactccactataacaaggggtgggaggaactttagggactggtatgagctagtggaagggaactagagaacactggaggatgggggcaggttgatcactgggktgtgtgaagcacactgagtttgcaaaatacttttctctgtgattaggtcatctctgctggctaattggcacccattgaagttaggctcctactctcccttagagactggtagacaggggtgctatttttcatgatgattacatttcaaagggttggctcccagcaacttgagaaagacttccctgagtagtacaacaggcaagaggcttttaaaaatatttacatctcaaaggggcagagaaaggatttacaattacaattttttcttttgtaaatgctctaggaaaaaaagaagtcaggggctcagaatctgagagaagcctgtcaagtttagtcaagctgagggaaacatcaaggccttcttgattaaaaggtatacactcacacacacttgcttctaatttatcttaaaaatatatgctctg

SEQ ID NO: 67740 - DNA, 1816 bp, Homo sapiens
cttgtctaacataatcttgtgactattttggtgtaaaacactcttagactacttgggattttctaagagttgaacttyggaatttttagaacatggcttaaaattcaaaactcaaaactataaatggagattgtgacataagggattgaaaagggtgagaatcattctgaaatgtgtatagtcataccatcatgattctagatttcaggaacagcacctcatttttaccaaataatagataaatatgaagcctcacctgcaccacagacctgccctgtatagtcagctggccagttgactatggggtacacctgattaaaggttccaattttctgcctccagtctaccttcagacttaagacacaaacatcatgcctggtgccatttccctcactctgcctctcatatcatagtttctcacacccctttttacttagcaatgtgatagagaaggaagacaaagaacaattgttggtgactcgtaatatatcagaaattgttacatgttttattcggttaaatcctggggcaatgatgctgctgctgctgctgatgatgatgatggttttatagataaatataaggcttagacagtttgcagatcttgataaagtggaatcaccaatgagttttgaagggtgaaaacttgcacaaagtcacacagccaaaaccggtactcttgtctctacaactcagtgcctttccaccacactaagttgcttcccagggtgtctgtctgcatctgtactcttccttcgatttacaacagcagaagacccactaaaagcagagaataattggcaaagaactttgcacatagcaggtgttccacgtttgttcaatgaatatcagatataacttgcaagataaaatttgttttctcagagatgagcatagctcagtagcagggtcttcctctcctctccagcctatatcatgcagaccagtctgggccccaacgtggtcactaattttatgtgtcatcttggctaggctatggcacccagtactctggtcaaacaccagtctagatgttgttgcaaaggttctttttagacgtgattaacatttacatcagtagattgaataaagcagattaccatctattacataagtgggcctcatccaatcaaatgaaggcttaagaaaaaagactgaggtctcctaagaaagcaggaattctgccaccagactgtcttcagactcaagactgcagcatcaactcttcccggaatctccagactgtcaacctgccccacaaagttcacacttagcccctacaactatatagatatagatatatacatgcatatgtatataagtacatgtgtgtgacatacacttacacacatacacatgtgttcatatgtgacatacacttgacacatgcacacacacacatcctactggttctgtttttttggagaatcctaatataactggcataactttcctgctaaaaaccaaccagtgtttttatagaaggccagagaatgagtataggattagtttatcccccttctcataattaacttccctgtccccttactccatggatggaaaggaagtgggtgtgaaatgcttcctgaggatgagcatcattctgcattctgatgcaagcatagctgcttctgctgcctttgctaacttcacaggggcctgacccaaaagccaaaaaggccatgggtttatattatctatcacttcaatttaagttatatgcctttcttcctgaaagtcacggagtatctggagatgagaagttgcctctattagaaaaagcaggttttagatagcaaaacccactctgccagaa

SEQ ID NO: 67741 - DNA, 1816 bp, Homo sapiens
cttgtctaacataatcttgtgactattttggtgtaaaacactcttagactacttgggattttctaagagttgaacttcggaatttttagaacatggcttaaaattcaaaactcaaaactataaatggagattgtgacataagggattgaaaagggtgagaatcattctgaaatgtgtatagtcataccatcatgattcwagatttcaggaacagcacctcatttttaccaaataatagataaatatgaagcctcacctgcaccacagacctgccctgtatagtcagctggccagttgactatggggtacacctgattaaaggttccaattttctgcctccagtctaccttcagacttaagacacaaacatcatgcctggtgccatttccctcactctgcctctcatatcatagtttctcacacccctttttacttagcaatgtgatagagaaggaagacaaagaacaattgttggtgactcgtaatatatcagaaattgttacatgttttattcggttaaatcctggggcaatgatgctgctgctgctgctgatgatgatgatggttttatagataaatataaggcttagacagtttgcagatcttgataaagtggaatcaccaatgagttttgaagggtgaaaacttgcacaaagtcacacagccaaaaccggtactcttgtctctacaactcagtgcctttccaccacactaagttgcttcccagggtgtctgtctgcatctgtactcttccttcgatttacaacagcagaagacccactaaaagcagagaataattggcaaagaactttgcacatagcaggtgttccacgtttgttcaatgaatatcagatataacttgcaagataaaatttgttttctcagagatgagcatagctcagtagcagggtcttcctctcctctccagcctatatcatgcagaccagtctgggccccaacgtggtcactaattttatgtgtcatcttggctaggctatggcacccagtactctggtcaaacaccagtctagatgttgttgcaaaggttctttttagacgtgattaacatttacatcagtagattgaataaagcagattaccatctattacataagtgggcctcatccaatcaaatgaaggcttaagaaaaaagactgaggtctcctaagaaagcaggaattctgccaccagactgtcttcagactcaagactgcagcatcaactcttcccggaatctccagactgtcaacctgccccacaaagttcacacttagcccctacaactatatagatatagatatatacatgcatatgtatataagtacatgtgtgtgacatacacttacacacatacacatgtgttcatatgtgacatacacttgacacatgcacacacacacatcctactggttctgtttttttggagaatcctaatataactggcataactttcctgctaaaaaccaaccagtgtttttatagaaggccagagaatgagtataggattagtttatcccccttctcataattaacttccctgtccccttactccatggatggaaaggaagtgggtgtgaaatgcttcctgaggatgagcatcattctgcattctgatgcaagcatagctgcttctgctgcctttgctaacttcacaggggcctgacccaaaagccaaaaaggccatgggtttatattatctatcacttcaatttaagttatatgcctttcttcctgaaagtcacggagtatctggagatgagaagttgcctctattagaaaaagcaggttttagatagcaaaacccactctgccagaa

SEQ ID NO: 67742 - DNA, 1816 bp, Homo sapiens
cttgtctaacataatcttgtgactattttggtgtaaaacactcttagactacttgggattttctaagagttgaacttcggaatttttagaacatggcttaaaattcaaaactcaaaactataaatggagattgtgacataagggattgaaaagggtgagaatcattctgaaatgtgtatagtcataccatcatgattctagatttcaggaacagcacctcatttttaccaaataatagataaatatgaagcctcacctgcaccacagacctgccctgtatagtcagctggccagttgactatggggtacacctgattaaaggttccaattttctgcctccagtctaccttcagacttaagacasaaacatcatgcctggtgccatttccctcactctgcctctcatatcatagtttctcacacccctttttacttagcaatgtgatagagaaggaagacaaagaacaattgttggtgactcgtaatatatcagaaattgttacatgttttattcggttaaatcctggggcaatgatgctgctgctgctgctgatgatgatgatggttttatagataaatataaggcttagacagtttgcagatcttgataaagtggaatcaccaatgagttttgaagggtgaaaacttgcacaaagtcacacagccaaaaccggtactcttgtctctacaactcagtgcctttccaccacactaagttgcttcccagggtgtctgtctgcatctgtactcttccttcgatttacaacagcagaagacccactaaaagcagagaataattggcaaagaactttgcacatagcaggtgttccacgtttgttcaatgaatatcagatataacttgcaagataaaatttgttttctcagagatgagcatagctcagtagcagggtcttcctctcctctccagcctatatcatgcagaccagtctgggccccaacgtggtcactaattttatgtgtcatcttggctaggctatggcacccagtactctggtcaaacaccagtctagatgttgttgcaaaggttctttttagacgtgattaacatttacatcagtagattgaataaagcagattaccatctattacataagtgggcctcatccaatcaaatgaaggcttaagaaaaaagactgaggtctcctaagaaagcaggaattctgccaccagactgtcttcagactcaagactgcagcatcaactcttcccggaatctccagactgtcaacctgccccacaaagttcacacttagcccctacaactatatagatatagatatatacatgcatatgtatataagtacatgtgtgtgacatacacttacacacatacacatgtgttcatatgtgacatacacttgacacatgcacacacacacatcctactggttctgtttttttggagaatcctaatataactggcataactttcctgctaaaaaccaaccagtgtttttatagaaggccagagaatgagtataggattagtttatcccccttctcataattaacttccctgtccccttactccatggatggaaaggaagtgggtgtgaaatgcttcctgaggatgagcatcattctgcattctgatgcaagcatagctgcttctgctgcctttgctaacttcacaggggcctgacccaaaagccaaaaaggccatgggtttatattatctatcacttcaatttaagttatatgcctttcttcctgaaagtcacggagtatctggagatgagaagttgcctctattagaaaaagcaggttttagatagcaaaacccactctgccagaa

SEQ ID NO: 67743 - DNA, 1816 bp, Homo sapiens
cttgtctaacataatcttgtgactattttggtgtaaaacactcttagactacttgggattttctaagagttgaacttcggaatttttagaacatggcttaaaattcaaaactcaaaactataaatggagattgtgacataagggattgaaaagggtgagaatcattctgaaatgtgtatagtcataccatcatgattctagatttcaggaacagcacctcatttttaccaaataatagataaatatgaagcctcacctgcaccacagacctgccctgtatagtcagctggccagttgactatggggtacacctgattaaaggttccaattttctgcctccagtctaccttcagacttaagacacaaacatcatgcctggtgccatttccctcactctgcctctcatatcatagtttctcacacccctttttacttagcaatgtgatagagaaggaagacaaagaacaattgttggtgactcgtaatatatcagaaattgttacatgttttattcggttaaatcctggggcaatgatgctgctgctgctgmtgatgatgatgatggttttatagataaatataaggcttagacagtttgcagatcttgataaagtggaatcaccaatgagttttgaagggtgaaaacttgcacaaagtcacacagccaaaaccggtactcttgtctctacaactcagtgcctttccaccacactaagttgcttcccagggtgtctgtctgcatctgtactcttccttcgatttacaacagcagaagacccactaaaagcagagaataattggcaaagaactttgcacatagcaggtgttccacgtttgttcaatgaatatcagatataacttgcaagataaaatttgttttctcagagatgagcatagctcagtagcagggtcttcctctcctctccagcctatatcatgcagaccagtctgggccccaacgtggtcactaattttatgtgtcatcttggctaggctatggcacccagtactctggtcaaacaccagtctagatgttgttgcaaaggttctttttagacgtgattaacatttacatcagtagattgaataaagcagattaccatctattacataagtgggcctcatccaatcaaatgaaggcttaagaaaaaagactgaggtctcctaagaaagcaggaattctgccaccagactgtcttcagactcaagactgcagcatcaactcttcccggaatctccagactgtcaacctgccccacaaagttcacacttagcccctacaactatatagatatagatatatacatgcatatgtatataagtacatgtgtgtgacatacacttacacacatacacatgtgttcatatgtgacatacacttgacacatgcacacacacacatcctactggttctgtttttttggagaatcctaatataactggcataactttcctgctaaaaaccaaccagtgtttttatagaaggccagagaatgagtataggattagtttatcccccttctcataattaacttccctgtccccttactccatggatggaaaggaagtgggtgtgaaatgcttcctgaggatgagcatcattctgcattctgatgcaagcatagctgcttctgctgcctttgctaacttcacaggggcctgacccaaaagccaaaaaggccatgggtttatattatctatcacttcaatttaagttatatgcctttcttcctgaaagtcacggagtatctggagatgagaagttgcctctattagaaaaagcaggttttagatagcaaaacccactctgccagaa

SEQ ID NO: 67744 - DNA, 1328 bp, Homo sapiens
gcattcgtaattataaaatttgtgttttaaagccttctacacatatactgtgcttttctttatttccttatatctcttactgtttcatgatcctggtatttgaawtctcattaagtgttgtttggggatttgctgggaatgtcatctacatagtaatgtctcaagtttgtagcaactttaaaacataataggagatggaattcacagcagagtaataaccctcccactttaggcaatgtatttgtgattggtatgactttgttcccagagggcagttagcaacacaatattaaggctatgtgtacaaggaaaacaaattttaaaaatctcctttaaaaaaaaacagttcccaatcctaaccagtatcatgcacagaatccgtttccacctcttcatatggaagcagctctgggtggacatctagaaagttggataactatttatcacatatgatctgtaaagggagagatttacaagaaagtgttaaatttaatccataggaaagcaaaatcaaaaatcaatgaattttccatttgtagttttccctaggggctccactctctagatggcttaaatgcgttagaattaaatgactaggcacaattgtttgttagtgacataaaagcaaggtaagcatttctgctttatgagtccaagcacagggaaacttggttttctttggaaggatatcataaaggcaatgtttatgagtaatccctcattgtctttccttctgtagcattcaatggtatgtactataatttagaaatgaaaactacttaaagaccacttgctaagtttcatgtatttcaaattctcagatcctgagtgtttaaatatgcctatatttcttcatgaaaaaaacataatctttgccaagttagaaaaagaaagtcatattcccatttttaactcaatgtaatcagaaatttggacagtttttagccttcaatacattatgtaatttaggtaacaggctgaataaaagtaaggaacttcagttaaattcagagagaagctagtaattatttctaagactcaaatgtatagaacagatctctgatattaaggataagaccctcaaaggtgacccaaaatgggtaattgtgggattattttgggaggaatcatcatagattcttactgctataaatacagtcaaatgtcagataaatatactccactgaaatgttttctaggaatgatgttggaaccaatgttggtaattttgaaagtcatggagaggatttcagatgatagaagtcgggcaactatcccaggtttaataaataagcaaatggtgagttccaaagctgctgtatcaatga

SEQ ID NO: 67745 - DNA, 1328 bp, Homo sapiens
gcattcgtaattataaaatttgtgttttaaagccttctacacatatactgtgcttttctttatttccttatatctcttactgtttcatgatcctggtatttgaaatctcattaagtgttstttggggatttgctgggaatgtcatctacatagtaatgtctcaagtttgtagcaactttaaaacataataggagatggaattcacagcagagtaataaccctcccactttaggcaatgtatttgtgattggtatgactttgttcccagagggcagttagcaacacaatattaaggctatgtgtacaaggaaaacaaattttaaaaatctcctttaaaaaaaaacagttcccaatcctaaccagtatcatgcacagaatccgtttccacctcttcatatggaagcagctctgggtggacatctagaaagttggataactatttatcacatatgatctgtaaagggagagatttacaagaaagtgttaaatttaatccataggaaagcaaaatcaaaaatcaatgaattttccatttgtagttttccctaggggctccactctctagatggcttaaatgcgttagaattaaatgactaggcacaattgtttgttagtgacataaaagcaaggtaagcatttctgctttatgagtccaagcacagggaaacttggttttctttggaaggatatcataaaggcaatgtttatgagtaatccctcattgtctttccttctgtagcattcaatggtatgtactataatttagaaatgaaaactacttaaagaccacttgctaagtttcatgtatttcaaattctcagatcctgagtgtttaaatatgcctatatttcttcatgaaaaaaacataatctttgccaagttagaaaaagaaagtcatattcccatttttaactcaatgtaatcagaaatttggacagtttttagccttcaatacattatgtaatttaggtaacaggctgaataaaagtaaggaacttcagttaaattcagagagaagctagtaattatttctaagactcaaatgtatagaacagatctctgatattaaggataagaccctcaaaggtgacccaaaatgggtaattgtgggattattttgggaggaatcatcatagattcttactgctataaatacagtcaaatgtcagataaatatactccactgaaatgttttctaggaatgatgttggaaccaatgttggtaattttgaaagtcatggagaggatttcagatgatagaagtcgggcaactatcccaggtttaataaataagcaaatggtgagttccaaagctgctgtatcaatga

SEQ ID NO: 67746 - DNA, 1328 bp, Homo sapiens
gcattcgtaattataaaatttgtgttttaaagccttctacacatatactgtgcttttctttatttccttatatctcttactgtttcatgatcctggtatttgaaatctcattaagtgttgtttggggatttgctgggaatgtcatctacatagtaatgtctcaagtttgtagcawctttaaaacataataggagatggaattcacagcagagtaataaccctcccactttaggcaatgtatttgtgattggtatgactttgttcccagagggcagttagcaacacaatattaaggctatgtgtacaaggaaaacaaattttaaaaatctcctttaaaaaaaaacagttcccaatcctaaccagtatcatgcacagaatccgtttccacctcttcatatggaagcagctctgggtggacatctagaaagttggataactatttatcacatatgatctgtaaagggagagatttacaagaaagtgttaaatttaatccataggaaagcaaaatcaaaaatcaatgaattttccatttgtagttttccctaggggctccactctctagatggcttaaatgcgttagaattaaatgactaggcacaattgtttgttagtgacataaaagcaaggtaagcatttctgctttatgagtccaagcacagggaaacttggttttctttggaaggatatcataaaggcaatgtttatgagtaatccctcattgtctttccttctgtagcattcaatggtatgtactataatttagaaatgaaaactacttaaagaccacttgctaagtttcatgtatttcaaattctcagatcctgagtgtttaaatatgcctatatttcttcatgaaaaaaacataatctttgccaagttagaaaaagaaagtcatattcccatttttaactcaatgtaatcagaaatttggacagtttttagccttcaatacattatgtaatttaggtaacaggctgaataaaagtaaggaacttcagttaaattcagagagaagctagtaattatttctaagactcaaatgtatagaacagatctctgatattaaggataagaccctcaaaggtgacccaaaatgggtaattgtgggattattttgggaggaatcatcatagattcttactgctataaatacagtcaaatgtcagataaatatactccactgaaatgttttctaggaatgatgttggaaccaatgttggtaattttgaaagtcatggagaggatttcagatgatagaagtcgggcaactatcccaggtttaataaataagcaaatggtgagttccaaagctgctgtatcaatga

SEQ ID NO: 67747 - DNA, 1328 bp, Homo sapiens
gcattcgtaattataaaatttgtgttttaaagccttctacacatatactgtgcttttctttatttccttatatctcttactgtttcatgatcctggtatttgaaatctcattaagtgttgtttggggatttgctgggaatgtcatctacatagtaatgtctcaagtttgtagcaactttaaaacataataggagatggaattcacrgcagagtaataaccctcccactttaggcaatgtatttgtgattggtatgactttgttcccagagggcagttagcaacacaatattaaggctatgtgtacaaggaaaacaaattttaaaaatctcctttaaaaaaaaacagttcccaatcctaaccagtatcatgcacagaatccgtttccacctcttcatatggaagcagctctgggtggacatctagaaagttggataactatttatcacatatgatctgtaaagggagagatttacaagaaagtgttaaatttaatccataggaaagcaaaatcaaaaatcaatgaattttccatttgtagttttccctaggggctccactctctagatggcttaaatgcgttagaattaaatgactaggcacaattgtttgttagtgacataaaagcaaggtaagcatttctgctttatgagtccaagcacagggaaacttggttttctttggaaggatatcataaaggcaatgtttatgagtaatccctcattgtctttccttctgtagcattcaatggtatgtactataatttagaaatgaaaactacttaaagaccacttgctaagtttcatgtatttcaaattctcagatcctgagtgtttaaatatgcctatatttcttcatgaaaaaaacataatctttgccaagttagaaaaagaaagtcatattcccatttttaactcaatgtaatcagaaatttggacagtttttagccttcaatacattatgtaatttaggtaacaggctgaataaaagtaaggaacttcagttaaattcagagagaagctagtaattatttctaagactcaaatgtatagaacagatctctgatattaaggataagaccctcaaaggtgacccaaaatgggtaattgtgggattattttgggaggaatcatcatagattcttactgctataaatacagtcaaatgtcagataaatatactccactgaaatgttttctaggaatgatgttggaaccaatgttggtaattttgaaagtcatggagaggatttcagatgatagaagtcgggcaactatcccaggtttaataaataagcaaatggtgagttccaaagctgctgtatcaatga

SEQ ID NO: 67748 - DNA, 1328 bp, Homo sapiens
gcattcgtaattataaaatttgtgttttaaagccttctacacatatactgtgcttttctttatttccttatatctcttactgtttcatgatcctggtatttgaaatctcattaagtgttgtttggggatttgctgggaatgtcatctacatagtaatgtctcaagtttgtagcaactttaaaacataataggagatggaattcacagcagagtaataaccctcccactttaggcaatgtatttgtgattggtatgactttgttcccagagggcagttagcaacacaatattaaggctatgtgtacaaggaaaacaaattttaaaaatctcctttaaaaaaaaacagttcccratcctaaccagtatcatgcacagaatccgtttccacctcttcatatggaagcagctctgggtggacatctagaaagttggataactatttatcacatatgatctgtaaagggagagatttacaagaaagtgttaaatttaatccataggaaagcaaaatcaaaaatcaatgaattttccatttgtagttttccctaggggctccactctctagatggcttaaatgcgttagaattaaatgactaggcacaattgtttgttagtgacataaaagcaaggtaagcatttctgctttatgagtccaagcacagggaaacttggttttctttggaaggatatcataaaggcaatgtttatgagtaatccctcattgtctttccttctgtagcattcaatggtatgtactataatttagaaatgaaaactacttaaagaccacttgctaagtttcatgtatttcaaattctcagatcctgagtgtttaaatatgcctatatttcttcatgaaaaaaacataatctttgccaagttagaaaaagaaagtcatattcccatttttaactcaatgtaatcagaaatttggacagtttttagccttcaatacattatgtaatttaggtaacaggctgaataaaagtaaggaacttcagttaaattcagagagaagctagtaattatttctaagactcaaatgtatagaacagatctctgatattaaggataagaccctcaaaggtgacccaaaatgggtaattgtgggattattttgggaggaatcatcatagattcttactgctataaatacagtcaaatgtcagataaatatactccactgaaatgttttctaggaatgatgttggaaccaatgttggtaattttgaaagtcatggagaggatttcagatgatagaagtcgggcaactatcccaggtttaataaataagcaaatggtgagttccaaagctgctgtatcaatga

SEQ ID NO: 67749 - DNA, 1077 bp, Homo sapiens
aaaaatatggaaccagcctaaatgcccatcaatcaaccagtagataaaaaattgtgagatatatatatatayatatatatatgatggaatactactcagccataaaaagaaacaaattaatggcattcgcagcaacctggatggaactggagactattattttaagcaaagtagctcaggaatggaaaaccaaatattgtatgttctcactcataagtgggagctaagctatgagtatgcaaagacataagaatgatacaatggactttggagactcagaggaaatggttgggggcggtgaggagctaaagactacaaatttttttcagtgtatactgcttcggtgatgggtgtaccaaaatctcacaaatcacaactaaagaacttacccatgtaaccaaatactacctgttcgccaaaaacctatggaaataaaaaataataaaataaaataaaatcactgaactatctgcaaaaaaaaaaaaaaaggaaaagaatggctggatttgttgcagaggtattacaaaaatcaaatgatgcaatgaaaatgattcgtaaactcaacagaacagagcaaacacaaagagagtattattagagctaatgaccttcagcattattttcagattttccaggctttgataataagtgtgtatgtatttgcttatctagggaggatgtgagactggaatctggttttaaatggcaaaccattctttctggaaggttattcagagtatagagaaggaaatctatttaaaatgaattcgtaggaccatgctaagagctaacatgtattgatggcttaccacatgcaagtcactgttcttagcacttttgtctgctttaattcatatattctctacaataattccatgtactaggtaccatttctattttcccaacatttatagatgagaacctagagaagatagatataaagtaaacttacccaaggtcatggagctacaaatttcaaatccaggtctcaaaacctggtgcttaactctggagtcaatcctcgtaactgctatactgtattaccctttattatgtattattatttcataaaaaatt

SEQ ID NO: 67750 - DNA, 1077 bp, Homo sapiens
aaaaatatggaaccagcctaaatgcccatcaatcaaccagtagataaaaaattgtgagatatatatatatatatatatatatgatggaatactactcagccataaaaagaaacaaattaatggcattcgcagcaacctggatggaactggagactattattttaagcraagtagctcaggaatggaaaaccaaatattgtatgttctcactcataagtgggagctaagctatgagtatgcaaagacataagaatgatacaatggactttggagactcagaggaaatggttgggggcggtgaggagctaaagactacaaatttttttcagtgtatactgcttcggtgatgggtgtaccaaaatctcacaaatcacaactaaagaacttacccatgtaaccaaatactacctgttcgccaaaaacctatggaaataaaaaataataaaataaaataaaatcactgaactatctgcaaaaaaaaaaaaaaaggaaaagaatggctggatttgttgcagaggtattacaaaaatcaaatgatgcaatgaaaatgattcgtaaactcaacagaacagagcaaacacaaagagagtattattagagctaatgaccttcagcattattttcagattttccaggctttgataataagtgtgtatgtatttgcttatctagggaggatgtgagactggaatctggttttaaatggcaaaccattctttctggaaggttattcagagtatagagaaggaaatctatttaaaatgaattcgtaggaccatgctaagagctaacatgtattgatggcttaccacatgcaagtcactgttcttagcacttttgtctgctttaattcatatattctctacaataattccatgtactaggtaccatttctattttcccaacatttatagatgagaacctagagaagatagatataaagtaaacttacccaaggtcatggagctacaaatttcaaatccaggtctcaaaacctggtgcttaactctggagtcaatcctcgtaactgctatactgtattaccctttattatgtattattatttcataaaaaatt

SEQ ID NO: 67751 - DNA, 1077 bp, Homo sapiens
aaaaatatggaaccagcctaaatgcccatcaatcaaccagtagataaaaaattgtgagatatatatatatatatatatatatgatggaatactactcagccataaaaagaaacaaattaatggcattcgcagcaacctggatggaactggagactattattttaagcaaagtagctcaggaatggaaaaccaaatattgtatgttctcactcataagtgggagctaagctatgagtatgcaaagacataagaatgatacaatggactttggagactcagaggaaatggttgggggcggtgaggagctaaagactacaaattttkttcagtgtatactgcttcggtgatgggtgtaccaaaatctcacaaatcacaactaaagaacttacccatgtaaccaaatactacctgttcgccaaaaacctatggaaataaaaaataataaaataaaataaaatcactgaactatctgcaaaaaaaaaaaaaaaggaaaagaatggctggatttgttgcagaggtattacaaaaatcaaatgatgcaatgaaaatgattcgtaaactcaacagaacagagcaaacacaaagagagtattattagagctaatgaccttcagcattattttcagattttccaggctttgataataagtgtgtatgtatttgcttatctagggaggatgtgagactggaatctggttttaaatggcaaaccattctttctggaaggttattcagagtatagagaaggaaatctatttaaaatgaattcgtaggaccatgctaagagctaacatgtattgatggcttaccacatgcaagtcactgttcttagcacttttgtctgctttaattcatatattctctacaataattccatgtactaggtaccatttctattttcccaacatttatagatgagaacctagagaagatagatataaagtaaacttacccaaggtcatggagctacaaatttcaaatccaggtctcaaaacctggtgcttaactctggagtcaatcctcgtaactgctatactgtattaccctttattatgtattattatttcataaaaaatt

SEQ ID NO: 67752 - DNA, 1077 bp, Homo sapiens
aaaaatatggaaccagcctaaatgcccatcaatcaaccagtagataaaaaattgtgagatatatatatatatatatatatatgatggaatactactcagccataaaaagaaacaaattaatggcattcgcagcaacctggatggaactggagactattattttaagcaaagtagctcaggaatggaaaaccaaatattgtatgttctcactcataagtgggagctaagctatgagtatgcaaagacataagaatgatacaatggactttggagactcagaggaaatggttgggggcggtgaggagctaaagactacaaatttttttcagtgtatactgcttcggtgatgggtgtaccaaaatctcacaaatcacaactaaagaacttacccatgtaaccaaatactacctgttcgccaaaaacctatggaaataaaaaataataaaataaaataaaatcactgaactatctgcaaaaaaaaaaaaaaaggaaaagaatggctggatttgttgcagaggtattacaaaaatcaaatgatgcaatgaaaatgattcgtaaactcaacagaacagagcaaacacaaagagagtattattagagctaatgaccttcagcattattttcagattttccaggctttgataataagtgtgtatgtatttgcttatctagggaggatgtgagactggaatctggttttaaatggcaaaccwttctttctggaaggttattcagagtatagagaaggaaatctatttaaaatgaattcgtaggaccatgctaagagctaacatgtattgatggcttaccacatgcaagtcactgttcttagcacttttgtctgctttaattcatatattctctacaataattccatgtactaggtaccatttctattttcccaacatttatagatgagaacctagagaagatagatataaagtaaacttacccaaggtcatggagctacaaatttcaaatccaggtctcaaaacctggtgcttaactctggagtcaatcctcgtaactgctatactgtattaccctttattatgtattattatttcataaaaaatt

SEQ ID NO: 67753 - DNA, 1077 bp, Homo sapiens
aaaaatatggaaccagcctaaatgcccatcaatcaaccagtagataaaaaattgtgagatatatatatatatatatatatatgatggaatactactcagccataaaaagaaacaaattaatggcattcgcagcaacctggatggaactggagactattattttaagcaaagtagctcaggaatggaaaaccaaatattgtatgttctcactcataagtgggagctaagctatgagtatgcaaagacataagaatgatacaatggactttggagactcagaggaaatggttgggggcggtgaggagctaaagactacaaatttttttcagtgtatactgcttcggtgatgggtgtaccaaaatctcacaaatcacaactaaagaacttacccatgtaaccaaatactacctgttcgccaaaaacctatggaaataaaaaataataaaataaaataaaatcactgaactatctgcaaaaaaaaaaaaaaaggaaaagaatggctggatttgttgcagaggtattacaaaaatcaaatgatgcaatgaaaatgattcgtaaactcaacagaacagagcaaacacaaagagagtattattagagctaatgaccttcagcattattttcagattttccaggctttgataataagtgtgtatgtatttgcttatctagggaggatgtgagactggaatctggttttaaatggcaaaccattctttctggaaggttattcagagtatagagaaggaaatctatttaaaatgaattcgtaggaccatgctaagagctaacatgtattgatggcttaccacatgcaagtcactgttcttagcacttttgtctgctttaattcatatattctctacaataattccatgtactaggtaccatttctattttcccaacatttatagatgagaacctagagaagatagatataaagtaaacttacccaaggtcatggagctacaaatttcaaatccaggtctcaaaacctggtgcttractctggagtcaatcctcgtaactgctatactgtattaccctttattatgtattattatttcataaaaaatt

SEQ ID NO: 67754 - DNA, 1077 bp, Homo sapiens
aaaaatatggaaccagcctaaatgcccatcaatcaaccagtagataaaaaattgtgagatatatatatatatatatatatatgatggaatactactcagccataaaaagaaacaaattaatggcattcgcagcaacctggatggaactggagactattattttaagcaaagtagctcaggaatggaaaaccaaatattgtatgttctcactcataagtgggagctaagctatgagtatgcaaagacataagaatgatacaatggactttggagactcagaggaaatggttgggggcggtgaggagctaaagactacaaatttttttcagtgtatactgcttcggtgatgggtgtaccaaaatctcacaaatcacaactaaagaacttacccatgtaaccaaatactacctgttcgccaaaaacctatggaaataaaaaataataaaataaaataaaatcactgaactatctgcaaaaaaaaaaaaaaaggaaaagaatggctggatttgttgcagaggtattacaaaaatcaaatgatgcaatgaaaatgattcgtaaactcaacagaacagagcaaacacaaagagagtattattagagctaatgaccttcagcattattttcagattttccaggctttgataataagtgtgtatgtatttgcttatctagggaggatgtgagactggaatctggttttaaatggcaaaccattctttctggaaggttattcagagtatagagaaggaaatctatttaaaatgaattcgtaggaccatgctaagagctaacatgtattgatggcttaccacatgcaagtcactgttcttagcacttttgtctgctttaattcatatattctctacaataattccatgtactaggtaccatttctattttcccaacatttatagatgagaacctagagaagatagatataaagtaaacttacccaaggtcatggagctacaaatttcaaatccaggtctcaaaacctggtgcttaactctggagtcaatcctygtaactgctatactgtattaccctttattatgtattattatttcataaaaaatt

SEQ ID NO: 67755 - DNA, 566 bp, Homo sapiens
taatgaggataaattctggaatgtgctcctcttcccactctccttaaaaatatatcctgaatttcagtgaacaagatagagtgtatctagcagattcacaggataatgaaaggtggttagaatttaacttgaagtcgaatggtgagccagttacttcctttaaacatttcccatattatccactaagaggccagatttctggggagaaatattcattaaggctaactctcgaaacttttggcagctgcacttcattcacagctttcacaatggccagaggctagcaggaaaaaacagccacagtccactgacctcccaggaccatgctttcatggggcctagataactgggtacagagctgtcctttctgcaaatcagaggcatcacttctyataccattaccagctagccagtgtgatggtcatttggaatgcatttgtaatgctctaatgtatgagaatgtagttggattcaatatattttaaatgtatccaatgaaaatttgtttagttaggttaattcttgtttttattagtgatgtcaacaataatcaaatggtataaaat

SEQ ID NO: 67756 - DNA, 755 bp, Homo sapiens
ggaggtttgtgcacartggtggcagcagcacagacgtaaagccccagtcctcagcatcagaatccgtgactcttctgaaaatgtgacttcaattccaccagcgctgcaagagcactgagcttggagtgcttggagtgggaagggaggggggcttgagggtcactcagtgtccatgagtggtagatagaactgggtcctggagcagctgagctgcctgtgcagaccggcagggccactgtgagcgtgtgctcaactgctgcaatttctcatcccacccgtgtcttccgctgctgtgctcctttgctgagaaaagaaggtcttgcaagtccatagggttcccacatgttagatgcctctgcacccttgaactccaaagagtttgtgatcccaggaagcagctctgaaatccattccatagaactctggaggtgaccgcctgctgtgcaataaacaaaacctccagacacccccacccccaacaacagcttaaggagccactgggtgctgagagcaaggagggaaaccatgaccacacctctgcctctctcacctccttcatggcctcctgcagccctgggatgagaggggacagcgccctaacagtgaaacaggccctggaggcagaggctggccccctcctctcccctagggactgttgctacatcagggaaatgaccttagattttcccgcctgtccaccgaattatctatactctattctagacagctcaggtcctgagttgagtgaatttggt

SEQ ID NO: 67757 - DNA, 755 bp, Homo sapiens
ggaggtttgtgcacaatggtggcagcagcacagacrtaaagccccagtcctcagcatcagaatccgtgactcttctgaaaatgtgacttcaattccaccagcgctgcaagagcactgagcttggagtgcttggagtgggaagggaggggggcttgagggtcactcagtgtccatgagtggtagatagaactgggtcctggagcagctgagctgcctgtgcagaccggcagggccactgtgagcgtgtgctcaactgctgcaatttctcatcccacccgtgtcttccgctgctgtgctcctttgctgagaaaagaaggtcttgcaagtccatagggttcccacatgttagatgcctctgcacccttgaactccaaagagtttgtgatcccaggaagcagctctgaaatccattccatagaactctggaggtgaccgcctgctgtgcaataaacaaaacctccagacacccccacccccaacaacagcttaaggagccactgggtgctgagagcaaggagggaaaccatgaccacacctctgcctctctcacctccttcatggcctcctgcagccctgggatgagaggggacagcgccctaacagtgaaacaggccctggaggcagaggctggccccctcctctcccctagggactgttgctacatcagggaaatgaccttagattttcccgcctgtccaccgaattatctatactctattctagacagctcaggtcctgagttgagtgaatttggt

SEQ ID NO: 67758 - DNA, 755 bp, Homo sapiens
ggaggtttgtgcacaatggtggcagcagcacagacgtaaagccccagtcctcagcatcagaatccgtgactcttctgaaaatgtgacttcaattccaccagcgctgcaagagcactgagcttggagtgcttggagtgggaagggaggggggcttgagggtcactcagtgtccatgagtggtagatagaactgggtcctggagcagctgagctgcctgtgcagaccggcagggccactgtgagcgtgtgctcaactgctgcaatttctcatcccacccgtgtcttccgctgctgtgctcctttgctgagaaaagaagrtcttgcaagtccatagggttcccacatgttagatgcctctgcacccttgaactccaaagagtttgtgatcccaggaagcagctctgaaatccattccatagaactctggaggtgaccgcctgctgtgcaataaacaaaacctccagacacccccacccccaacaacagcttaaggagccactgggtgctgagagcaaggagggaaaccatgaccacacctctgcctctctcacctccttcatggcctcctgcagccctgggatgagaggggacagcgccctaacagtgaaacaggccctggaggcagaggctggccccctcctctcccctagggactgttgctacatcagggaaatgaccttagattttcccgcctgtccaccgaattatctatactctattctagacagctcaggtcctgagttgagtgaatttggt

SEQ ID NO: 67759 - DNA, 755 bp, Homo sapiens
ggaggtttgtgcacaatggtggcagcagcacagacgtaaagccccagtcctcagcatcagaatccgtgactcttctgaaaatgtgacttcaattccaccagcgctgcaagagcactgagcttggagtgcttggagtgggaagggaggggggcttgagggtcactcagtgtccatgagtggtagatagaactgggtcctggagcagctgagctgcctgtgcagaccggcagggccactgtgagcgtgtgctcaactgctgcaatttctcatcccacccgtgtcttccgctgctgtgctcctttgctgagaaaagaaggtcttgcaagtccatagggttcccacatgttagatgcctctgcacccttgaactccaaagagtttgtgatcccaggaagcagctctgaaatccattccatagaactctggaggtgaccgcctgctgtgcaataaacaaaacctccagacacccccacccccaacaacagcttaaggagccactgggtkctgagagcaaggagggaaaccatgaccacacctctgcctctctcacctccttcatggcctcctgcagccctgggatgagaggggacagcgccctaacagtgaaacaggccctggaggcagaggctggccccctcctctcccctagggactgttgctacatcagggaaatgaccttagattttcccgcctgtccaccgaattatctatactctattctagacagctcaggtcctgagttgagtgaatttggt

SEQ ID NO: 67760 - DNA, 696 bp, Homo sapiens
atgacaacaggaggaggtgtgggatggagcagctgcagggtgcttgggtgggcctggacaccagatctgggtttatcctgaatgcagaaggaaatgaggacagattgagcaggaaagggaagggacccagtgtggaagctgatgctggaccctgactattcagcagggactgtgagccatgcccagccatgggaacacaatccagtggggacgatggatgggggacgaggcataacaagtgtgtccggggccctgaagggggacmaggggctccgggcagcaaagctggatgttggctgcagcctggtgtttgggaaggatgttgtgagagaggtggatgatgagctcctgggcatgggggaaccaggactggaacacagcctgtccgacctccccaccccaaccacgctttctccactgagccccaaaccgtggagagatggagaaggaggtgcatggccctgcccagtagtcaggagggctgaggcagaggccactcccagaccaccctgggaactgcccagggggtgctgggtgacgtggcctgcagctccccagtctggcactgctcccagactccacaccccaggatgaagcctcctacaacctggcagatgtcttacctgcagaaacagatgccggggtccagtcagaggctctgttctcttaggaggccaattgaagcggggccttcct

SEQ ID NO: 67761 - DNA, 855 bp, Homo sapiens
actggagctccctgcccagcgggccctgcccaggaggaagcggcccagggtggtgaggggccctggcaggcacccccgcctctcctgcctgaggcggtttggggaccaaggccctgcttgggtactgagcttttccctgatgtctgtgatcacagccctggccatacacaatcacgcacacacacacacgtaagcacacacatgaacacacgtacacgctcataaacatccacactcaagtgcacacacgcaaacacatgtacatgtacacgcagagacagtcatactcacacatgtacacagacgtgcactcacacgcgtttataagtcacacacaacccacagagacatgttcccacacacacgcaccctattttgcacatacggcacacacacaggcccaggagggtggcagaggcaccaaatgccctctyggaatgcagggaccttgaattttccatttgtttctcccttgccggcagcctagctgggagctgggctcagaccctgctgcttgaagcagggtgagcccctgttaggtccccaccgccaggctgggccttcctcagaagccccttctgctgccaagcagacccccgggtccctgggctcactgccctccctctgaccttgtaccccagctgggccgtgtcctctgcgaggctggaccccgcgtcccttaggagcccaccctagagggggattctctgctctcccgcagccccactgtgcggcgtgatcgcactgggtggtcgtgtcctcttctgcgcagggactcctcactaggctggagtctgagaaaggccccccacccccgctgctcccccacttccctctctcttccgccattgtcct

SEQ ID NO: 67762 - DNA, 855 bp, Homo sapiens
actggagctccctgcccagcgggccctgcccaggaggaagcggcccagggtggtgaggggccctggcaggcacccccgcctctcctgcctgaggcggtttggggaccaaggccctgcttgggtactgagcttttccctgatgtctgtgatcacagccctggccatacacaatcacgcacacacacacacgtaagcacacacatgaacacacgtacacgctcataaacatccacactcaagtgcacacacgcaaacacatgtacatgtacacgcagagacagtcatactcacacatgtacacagacgtgcactcacacgcgtttataagtcacacacaacccacagagacatgttcccacacacacgcaccctattttgcacatacggcacacacacaggcccaggagggtggcagaggcaccaaatgccctctcggaatgcagggaccttgaattttccatttgtttctcccttgccrgcagcctagctgggagctgggctcagaccctgctgcttgaagcagggtgagcccctgttaggtccccaccgccaggctgggccttcctcagaagccccttctgctgccaagcagacccccgggtccctgggctcactgccctccctctgaccttgtaccccagctgggccgtgtcctctgcgaggctggaccccgcgtcccttaggagcccaccctagagggggattctctgctctcccgcagccccactgtgcggcgtgatcgcactgggtggtcgtgtcctcttctgcgcagggactcctcactaggctggagtctgagaaaggccccccacccccgctgctcccccacttccctctctcttccgccattgtcct

SEQ ID NO: 67763 - DNA, 855 bp, Homo sapiens
actggagctccctgcccagcgggccctgcccaggaggaagcggcccagggtggtgaggggccctggcaggcacccccgcctctcctgcctgaggcggtttggggaccaaggccctgcttgggtactgagcttttccctgatgtctgtgatcacagccctggccatacacaatcacgcacacacacacacgtaagcacacacatgaacacacgtacacgctcataaacatccacactcaagtgcacacacgcaaacacatgtacatgtacacgcagagacagtcatactcacacatgtacacagacgtgcactcacacgcgtttataagtcacacacaacccacagagacatgttcccacacacacgcaccctattttgcacatacggcacacacacaggcccaggagggtggcagaggcaccaaatgccctctcggaatgcagggaccttgaattttccatttgtttctcccttgccggcagccyagctgggagctgggctcagaccctgctgcttgaagcagggtgagcccctgttaggtccccaccgccaggctgggccttcctcagaagccccttctgctgccaagcagacccccgggtccctgggctcactgccctccctctgaccttgtaccccagctgggccgtgtcctctgcgaggctggaccccgcgtcccttaggagcccaccctagagggggattctctgctctcccgcagccccactgtgcggcgtgatcgcactgggtggtcgtgtcctcttctgcgcagggactcctcactaggctggagtctgagaaaggccccccacccccgctgctcccccacttccctctctcttccgccattgtcct

SEQ ID NO: 67764 - DNA, 842 bp, Homo sapiens
aaggcctttcagtaaaatcacagaggaactgtagatccatgactgtgcccaaggatacagcgtggaccctgaacaaagcctcagcaacaggcccgccctgcctcttcctgccccacactttcctcagtcaggtcagggaagacagaagacaggtttcccagcctagcaatgcccagacctgggaggagactctcatctcacgggtgacctgtcgacggtttacaagtgcatgatgtggagtcgtggacttggctggtcctctatctgtgttgattggaccggaatctgcatctgggtaaactgaggtgaggggctcccagacactggacggggtgaaggcaaggtcagcactggaggaaatgttcctgctcgtctcagctgaagccccatttccaggtgaccaggggtgacatccctgcagaagtcgcccacccacaggccaccctgctcttgggaactgagtcacattctacttagtagcttggggatggttttactttgcagttaagtaatctttaataaggtaattaaaaaggaaaaagaagaaaaacaaaggcaaatgaggtaaccgtgcagcagcattattgccagggaggggcagcccttccaggtttggcctcaacaccagctatggcctctggtgcttctgaaaggtctctgattgacactgttccaggctcagttcatctctacttgccaaaggtgaggtttgtctgcttccccccacagatgctgccagggtcctgagagtcagcttggggagggtgagtagatgcaggggtagggakgggagggtggattctgggctgggttgcacaaaggcaggctctggggcttggaga

SEQ ID NO: 67765 - DNA, 1861 bp, Homo sapiens
tcaaaatataagaaaggagaaaaaaactcttacgtggataccaatagtctgctggtttcccacaatgcctaccaaaccatcgagttgtgtaatttgggaccaaattttttttaaacaagtgtcaattttgcagcttgccacacactgtgttttgttgggcttcgaaggcaataatcaccagtatttataccatactttataatttacaaagtgttttcagaattgttatttcattccccagaggagaaaatttgctccgaataagaccaagttttccccgaagatctcgactacaaagacttagaaccaagacccagttccaaggcttttcttctaagtccaaacctgtggtcttttccatgcaccactgtgtctgcctccaaggaacagatagtatcactggggagacatyagcaactcaacgtaccaggaagacctttccaggaaaacatttctctagttttataatggaagccaataacaaaagaggaattcctgccactattatgtgacaggcctgtgttggcagaaagaaacactagctgtgatagaaatctctaaatgggtatttgacgcaacacatcagttcaactgaattatgggaggtcaatgggtagcttttcaacaagaaagtccacaaggcaaggaatcaggaatctggatccaagtccaacatcatcgttaactgctgcttcttaaccttcccaggccttagttttgctatctgtaaaatgaaaggttggacgcgatgatctccgatgactcttccccctaaaattctatactatttgctagaatgctcctaggaattacactgcaccatggtttatagctcactctaattacagggtttacagtcagagagaacagtgaattctaaatcagttcaacgtctaattcctgttcagtcatgtcagggcagattgtttttacatatattaaatttatggcactgccctttttaggggaggaggtgaggcaacttcatgtaatctgtttaggtgaataaggccggaaagctataaacaataatgagagtaagaatcagctaggataccttatacttctcaagacatgttcgcagtaaatccataagatagatgggcaagtattttttgttttgttttgtcttgtttgctttttaaaatattaccttttgtcagatgaagaaagtgaacacagactggcttacgtgatttgaccaaagtcttcttacgacagagccaggattaagactcggatttcctgactttgattctagtatttcttccaacagtcatgaagagtatatttcctttgcagtcatataacatattctcattagcaaaatgctcctttctgatgtctacgaaaaggagttggcaagtatcattcttgatgacagatgctggggagagatgtatcattagggtgcaaaggccactttcgaatgttctttcttgcttcttgaatatttgcagaggcagaagatatgtgcatcttaggatctatcatcatgtaagctgaaatgaaaaaagaactcgggttgaatttacatagacctatcattatttccaattgcatctggtcaaaaacaaatgggaattttagaatgtcgtcatctgttcaatgccttcattgcaaggcttggttgtaactcctgctggctctttcatctgagtacatttccaattttgctttacatgattcatcttaaactttattgtcatgctcatggtaataatgcaggttgacaacactttaaatggctggcttcccatgacacaaggtaattaatttttatattgcattttttagtataaagtattgagacaaagactttaaagaccaaaatgataatggttttgggggtacacgaatt

SEQ ID NO: 67766 - DNA, 966 bp, Homo sapiens
ctgggtgcagagcaagaccccatctcaaaagaaaaagtaagtcaagggtagggatgtggaaaaaatgctgctttacttaatgaccattttaccaacatttaggaaaagaacaggggttgggggagatctgttagtgatggggcagctgtggtggggttggaggcggtgggaaaggtaagccacttggaggcagccccaagccgagggtgcagactctccagctacggcctgggctcactttcctcctcaaccctatttcctcagcttccagaatagggcagggggactgtggtgggcaggataacgccctcagggatgccctaatccctagaacctgtgaatacgttaggttcyatgacaaatgagcattaagtttgtggatgagattatggataatgatagggacataatcctggattatccaggtgggcccactgtcaccaacagggtcctaaaatgtggaagagggagaaagagcaaccagtgtcagagtgatgcaatgtgacgaagactcaccagccattggctggcttggaagatgggaaggggccacgagccaaggcatgcaggccaggaaggattctccccggagcccccagagggaacacagccctgctgatgccttgactttaactcactgagagtgcgtcagacttccgatctccagaacggtaagatactaaatgtgtggtgttttaatccacttagcttgtggcaatctgttacagcagcaacaggaagctaatacgaggatgttctcagcaggggatccccctaaatgacagcagaccccagaatggcctctcaccccatatctggcttccagttcctctaaaagtgccatgaaataaacccaaccttcctgactcagatgggctgggagaaggtttcacttcttaacaacaaacaaaacctgcctcagagaaggcaccacgtctagacaaatgtttggctctcaagctgctg

SEQ ID NO: 67767 - DNA, 966 bp, Homo sapiens
ctgggtgcagagcaagaccccatctcaaaagaaaaagtaagtcaagggtagggatgtggaaaaaatgctgctttacttaatgaccattttaccaacatttaggaaaagaacaggggttgggggagatctgttagtgatggggcagctgtggtggggttggaggcggtgggaaaggtaagccacttggaggcagccccaagccgagggtgcagactctccagctacggcctgggctcactttcctcctcaaccctatttcctcagcttccagaatagggcagggggactgtggtgggcaggataacgccctcagggatgccctaatccctagaacctgtgaatacgttaggttccatgacaaatgagcattaagtttgtggatgagattatggataatgatagggacataatcctggattatccaggtgggcccactgtcaccaacagggtcctaaaatgtggaagagggagaaagagcaaccagtgtcagagtgatgcaatgtgacgaagactcaccagccattkgctggcttggaagatgggaaggggccacgagccaaggcatgcaggccaggaaggattctccccggagcccccagagggaacacagccctgctgatgccttgactttaactcactgagagtgcgtcagacttccgatctccagaacggtaagatactaaatgtgtggtgttttaatccacttagcttgtggcaatctgttacagcagcaacaggaagctaatacgaggatgttctcagcaggggatccccctaaatgacagcagaccccagaatggcctctcaccccatatctggcttccagttcctctaaaagtgccatgaaataaacccaaccttcctgactcagatgggctgggagaaggtttcacttcttaacaacaaacaaaacctgcctcagagaaggcaccacgtctagacaaatgtttggctctcaagctgctg

SEQ ID NO: 67768 - DNA, 966 bp, Homo sapiens
ctgggtgcagagcaagaccccatctcaaaagaaaaagtaagtcaagggtagggatgtggaaaaaatgctgctttacttaatgaccattttaccaacatttaggaaaagaacaggggttgggggagatctgttagtgatggggcagctgtggtggggttggaggcggtgggaaaggtaagccacttggaggcagccccaagccgagggtgcagactctccagctacggcctgggctcactttcctcctcaaccctatttcctcagcttccagaatagggcagggggactgtggtgggcaggataacgccctcagggatgccctaatccctagaacctgtgaatacgttaggttccatgacaaatgagcattaagtttgtggatgagattatggataatgatagggacataatcctggattatccaggtgggcccactgtcaccaacagggtcctaaaatgtggaagagggagaaagagcaaccagtgtcagagtgatgcaatgtgacgaagactcaccagccattggctggcttggaagaygggaaggggccacgagccaaggcatgcaggccaggaaggattctccccggagcccccagagggaacacagccctgctgatgccttgactttaactcactgagagtgcgtcagacttccgatctccagaacggtaagatactaaatgtgtggtgttttaatccacttagcttgtggcaatctgttacagcagcaacaggaagctaatacgaggatgttctcagcaggggatccccctaaatgacagcagaccccagaatggcctctcaccccatatctggcttccagttcctctaaaagtgccatgaaataaacccaaccttcctgactcagatgggctgggagaaggtttcacttcttaacaacaaacaaaacctgcctcagagaaggcaccacgtctagacaaatgtttggctctcaagctgctg

SEQ ID NO: 67769 - DNA, 966 bp, Homo sapiens
ctgggtgcagagcaagaccccatctcaaaagaaaaagtaagtcaagggtagggatgtggaaaaaatgctgctttacttaatgaccattttaccaacatttaggaaaagaacaggggttgggggagatctgttagtgatggggcagctgtggtggggttggaggcggtgggaaaggtaagccacttggaggcagccccaagccgagggtgcagactctccagctacggcctgggctcactttcctcctcaaccctatttcctcagcttccagaatagggcagggggactgtggtgggcaggataacgccctcagggatgccctaatccctagaacctgtgaatacgttaggttccatgacaaatgagcattaagtttgtggatgagattatggataatgatagggacataatcctggattatccaggtgggcccactgtcaccaacagggtcctaaaatgtggaagagggagaaagagcaaccagtgtcagagtgatgcaatgtgacgaagactcaccagccattggctggcttggaagatgggaaggggccacgagccaaggcatgcaggccaggaaggattctccccggagcccccagagggaacacagccctgctgatgccttgactttaactcactgagagtgcrtcagacttccgatctccagaacggtaagatactaaatgtgtggtgttttaatccacttagcttgtggcaatctgttacagcagcaacaggaagctaatacgaggatgttctcagcaggggatccccctaaatgacagcagaccccagaatggcctctcaccccatatctggcttccagttcctctaaaagtgccatgaaataaacccaaccttcctgactcagatgggctgggagaaggtttcacttcttaacaacaaacaaaacctgcctcagagaaggcaccacgtctagacaaatgtttggctctcaagctgctg

SEQ ID NO: 67770 - DNA, 1174 bp, Homo sapiens
ccctacaggcatggctttctctgccaggaatgcttgttcttcaagctccagctctagtgtcccttctcatgctgccctgaaaaggcagagccccctgtctggatcacatcctctcccagctcaggtcagacctgctcccgggaaggaggcgggtgcagctaattcttgtttaattgcaagcttccattaagttacttggctgactgggtaaaggcatgaakgcttgcaggaataaatgacaacctccctccctgccagccttctgggctgagcactgacctgggcactgtacatttggccctcattcaggaggtactgaccctattcacagatgagaaagctgaggctcagggagaggaattaatggagccagggaataagccacacacccaggcgggagcacaatcttctgctggcactggctcaccgctatttcctgtcccgaggagcctccggctttatttgctttcccaaaggatcctctgctgttcagggtttaccttccaggtacccgtaatgagtcagggaagaggacatggtccctgacctcatccagctcattccatgcatcaaagagcaaagatgagcaagacagctggggttgtagccaggcaggtaggagaggttgcatggagaagggttgccccgccaggcaagggaaaatggcagtgaccgaggcccagggccgatcaggggggctcccgctctggggaaggcaccagaggaccaaggtggcctcggatcggaaggagtccaagacaaaacctggagaaaggcggacaacagcaagatggcgtgtcccctgattcatggctcgggctgccactggccctttagaagggacagactctagggagggcattgcttgtccaatcccactctcactcctgctttctccagccctgggggccccctcggctgccagctgccagcgatgtcctccagcaggtgccctcctgccagactggggaagtatgttaaggggaaggcagggcaggaggaaggagagtggccaacaaaggagggtgggggccccgcaggaggagggcatgtcctatcagggaaaggagtgcctgatggaaggcagaagccaagtaataataaaaagccactgattcttaagcacgggccaagcacttgtcacagtgagctactgagagactaaagcgtttct

SEQ ID NO: 67771 - DNA, 694 bp, Homo sapiens
cttaatgagctctgcaggtgattctgatgcactctcactttgagaaccactgctgtaagtcaagagaaagtgcctggaaatcagtgagaaaaggaatgacgggaccactctttctaggaatttcttcctctctgacttgttatttctgccctgtctacgtcttctaaaaaggacctgaagagacacacacacgcttggaaaagttgactgaaaaatattcctcccagctccagaatctggtgatcctgggctctgactctgacamggtcgctgcgtcctgcctgacttgagtcaggcattcttctcacagcaggatgcctggcaggcttaaagccattaatagggccactcacaggggcagggcaaaccgtatgaggcccctcctataccggaaagcctaagggagactgcagggagagcactgctcagctgcggccttgaggggtccgggccaatgagacagcctcaggggccgcttccccccaactctcccccaggccctgatcatctccctgtgaagttgggcagaagtcacctcaagcctcacacctattttgggcacacacacacacacacacacacacacacacacacacccatctactgaatgcctctttgccttctggtgacccttggacctttattgtttacagatcccagagaaaagagagtcatccctggggatgggaaggca

SEQ ID NO: 67772 - DNA, 694 bp, Homo sapiens
cttaatgagctctgcaggtgattctgatgcactctcactttgagaaccactgctgtaagtcaagagaaagtgcctggaaatcagtgagaaaaggaatgacgggaccactctttctaggaatttcttcctctctgacttgttatttctgccctgtctacgtcttctaaaaaggacctgaagagacacacacacgcttggaaaagttgactgaaaaatattcctcccagctccagaatctggtgatcctgggctctgactctgacaaggtcgctgcgtcctgcctgacttgagtcaggcattcttctcacagcaggatgcctggcaggcttaaagccattaatagggccactcacaggrgcagggcaaaccgtatgaggcccctcctataccggaaagcctaagggagactgcagggagagcactgctcagctgcggccttgaggggtccgggccaatgagacagcctcaggggccgcttccccccaactctcccccaggccctgatcatctccctgtgaagttgggcagaagtcacctcaagcctcacacctattttgggcacacacacacacacacacacacacacacacacacacccatctactgaatgcctctttgccttctggtgacccttggacctttattgtttacagatcccagagaaaagagagtcatccctggggatgggaaggca

SEQ ID NO: 67773 - DNA, 721 bp, Homo sapiens
ccgggatttgaagggagtctgtgggccccctggggctgagcatgtgtagcaagcagaaagagtttgggccactttgagtgtccccagacccttcccccatctcttcccacagaactgagctggtgacgctgcctcacagggccgaggaaggtcagtgcattcaatctggtcccacagagtctcccccagggggcagcaaggatttcacttggggctctgccatggtcattctctgctgaccctgaccaaggccacgtggggtggctggcaccacgccctggagattacctgtcctccatgtgctcagagctcagtagagaaacaagattaatactgacaggcaaataatacagtttggatacaatctgaagctatttgggacacaggtacatcctgttccttacagcacaccccagttcaaactatccacattcaagggctcaatagtggcatgtccttagtggctatcgtgttgcgcagcaaagcctcaaagacttaaacaagttatttagcctttctgtgcctcagtttcctcatctggtggatggggacaataagagtacctacagataatacacacatagggtttagcacagccccaggctcaggaaaactttgataaatgctcattcattatattgctagygttgaaggcaggattggggggtgtgcagttctcccactttgggtttggctttgggaagcaactttccttcaactt

SEQ ID NO: 67774 - DNA, 990 bp, Homo sapiens
catccctcagtgggctctaaccaccaacctctagattaacagccgaacgcgctaaccgattgtgccacagagacaggtattgtaccttcttctgggcactataggaagggtgcactcaccaaacactcccccaaccgtcccaacctcagagcccaccagacagtacaactgtgcaaggctttggaaaactgaagagattagagtggtgaatcgtgttagtctcattggagacccgcaggttgggagattctggaaccaggacgaccttgcccctcgccttcatcaaaagctgccggaaacgccccggccccgacacakacctgaaccgcctgggggcccaagggaaactgaaaggccggtgggctcccgggatggctcttcccgttctttgcgcctccttcacccagtgagggagcctgtgcccactctgcccagtcacttttgaggccgctgaggaacttccgctgccatcttcggatcctgtgtcccgcacgggggctccaccagggcagggatcgtggtgagggtggctcctgggtcccctcgcggggagcagggtctggcactcaccagcgcgcacgactaggacttgttgaattaatccatcctcgcctttagcttttaggcctttgaagagccctgaaaatggaaatcatgaaatattttaccatggggaacttttgatttgctttttgttgtttgtttgtttgttttgtttgtttttgagacagggtctcgcttggtcgcccaggctggagtgcagtggtgcaaacacggctcactgcagcctcgacctcccggggccgtcgtcgcctttagcttttagtcccttgagaaccccaagaatagaaatcatgagatttttccatggggaagttcttttttcaaagcgtctattcacgttgatttctaggcatcccccagggagggcaacgggcagggcctccagtgcaccttctgcgcggtggagccgcgggggctcagttgggc

SEQ ID NO: 67775 - DNA, 638 bp, Homo sapiens
aagtgcaaaacttgtcagaaataatttcctttgccaaaagattctaaaatactttttttttttgagatcagctcactgcaacttccacttcccacgttcacaggattctcctgcctcagcctcatgagtagctgggactgcaggcctgtgccaacacacccagctaatttttgtatttttagtagagatggaattacatcatgttggccaggctggtctcaaactctgtacctcaagtagtgtgcccacctcagcctcccaaagtgttgggattacaggcgtgagccaccatacctggcctaaaatactcttacttcaagtaaaagtgcattaaaaacaaacttctcakttgcatccctggaatctatagaaagcccggggagacaatcaagtgctacaggatcaagcgctaaacaggggaggacaaagtgtggcttcctcactaggagtcagggcaaagttaactgccttggtttccaatggagaccagaactcggttcccctgtgacgggaggacgcagcccagaggaggccgactttctcttcatggtgccttcagacaggaaatctcctaggatttctttctttccctttgatctactcccaatactccctttctgtttcttcaaggtcttttt

SEQ ID NO: 67776 - DNA, 897 bp, Homo sapiens
  misc_feature (1)...(897): n = A,T,C or G
gtcacaaaaaaccaaaagcatttatttgtcattatgtatctctcctgaatttcaaccttgataggctaacatggctcacaaacagctttaaatttggcttctcaaatgtctgtctaatggtttacaaaagtccagttactcaaatgaatttatcttacagtccggtttctattgttccatgctgtgcctcagtgacataaaccaagagtcagtatatacaaagatttattcccactggtttataaccaaccaataaatagtatgcctgttatatatagttctgtgcattgggttgccagtctccttccttcttttacctgattgttattggaagtggagatgatgtaatgttatgggtcacttctattagcgtccctggactacagttctaycatctattttttaagctgttttaccttgttatataagatctgcatatttagtagcatcatttatgttattaatagttaacatctatggtagtcacttctttggttaggtcagagactaaaatctgaaaattagaaatccattctttatttcaggtgtgtgcatgctgttgtgttgatccctctcctctcccagaaaagtcattgtaggcccaagttgatgaagggacagactgtgaaagaatggatgcagagcatggactaagtatgcagtgcccactgagtcgaaaatgttgctaaagttgcttttctgcgattgtctaacattcctctgagtcacctcgtctgctgcttaagaaccccaaagcattttcttcactgttttgtggccattgttataaacnccannnnnnnnnnnnnnnnnnnnnnnnnnnnnnnnnnnnnnnnnnnnnnnnnnnnnnnnnnnnnnnnnnnnnnnnnnnnnnnnnnnnnnnnnnnnnnnnnnnnt

SEQ ID NO: 67777 - DNA, 897 bp, Homo sapiens
  misc_feature (1)...(897): n = A,T,C or G
gtcacaaaaaaccaaaagcatttatttgtcattatgtatctctcctgaatttcaaccttgataggctaacatggctcacaaacagctttaaatttggcttctcaaatgtctgtctaatggtttacaaaagtccagttactcaaatgaatttatcttacagtccggtttctattgttccatgctgtgcctcagtgacataaaccaagagtcagtatatacaaagatttattcccactggtttataaccaaccaataaatagtatgcctgttatatatagttctgtgcattgggttgccagtctccttccttcttttacctgattgttattggaagtggagatgatgtaatgttatgggtcacttctattagcgtccctggactacagttctatcatctattttttaagctgttttaccttgttatataagatctgcatatttagtagcatcatttatgttattaatagttaacatctatggtagtcacttctttggttaggtcagagactaaaatctgaaaattagaaatccattctttatttcaggtgtgtgcatgctgttgtgttgatccctctcctctcccagaaaagtcattgtaggcccaagttgatgaagggacagactgtgaaagaatggatgcagagcatggactaagtatgcagtgcccactgagtygaaaatgttgctaaagttgcttttctgcgattgtctaacattcctctgagtcacctcgtctgctgcttaagaaccccaaagcattttcttcactgttttgtggccattgttataaacnccannnnnnnnnnnnnnnnnnnnnnnnnnnnnnnnnnnnnnnnnnnnnnnnnnnnnnnnnnnnnnnnnnnnnnnnnnnnnnnnnnnnnnnnnnnnnnnnnnnnt

SEQ ID NO: 67778 - DNA, 638 bp, Homo sapiens
atccacccgcgttggcctcccaaagtgccgagattgtaggcatgagccaccacgcccatccttgtgttgtatattctttgggctcagagggaaaacgtgtttttctaaaatwaggatttagcatcgtgaagaattttgtccaatgcatttacattaatgcccttttctgacaagtttgtatcgggcgtttcattcttctgtgtgataaagcaaaagatatcaaaagattttgcggaaaagtcaccttagcgaggaccgccgctttctgaaccacagtgcttccaggttgacacatgaagtgcccagaggtgctgttctaatgctgagtcctagaagaacctttgggatttgctgttcaaggtggcacggtgtcatgtgaacctgcaggctggccctcttgccacagttaaaaccacagtccagatgtcagattttacatagatgtctgtgctgacgcagtcccgttatgaaaagatctattttgtcatatgcactgctgtggtgaatataagtggtcttgatgatttcagcccttgtcacattgacttttcgctgtcatgtattcacttgattcgctggcaggtcccagtgggaattcttttcatggcatctttgtgttttggtgacacccaggtgga

SEQ ID NO: 67779 - DNA, 1304 bp, Homo sapiens
ggatcccgtggaacattttgttaactcccccctagaacaagaggcaagtgaagtctacatttgagggagtaccataattaaaaacattgtcaatggttcatcagggaaagcaaacatcagggaaagaaagcatttctttctcccaagagaaataaatgtctaaattaaatgcttacatttttttcagtatacaaaagcctctcagatatctggtttttaagagtcacattttggccgggcatggtggttcatgcctgtaatcccatctctttgggaggccaagttgggaaaactgcttatgctcaggagtttgagatcagcctgggcaacatggcaaaaccccatctctacaaaaactgcaaaaattagctgggcgtggtggtgccagcctgtggtcccagctactcaggaggctgaggtgggaggatcgattgagccgggagggggaggttccagtgagccatgatcacaccactgccctccagcctggacaacagagcaagactctgtctcgaaaaataatggtaataaaaaaaaagaagtcacatgttgatattaaaatcactgattttttggaggaaatgaacagtgtggaatttccacctgcccttcatgactgcattatacatgaagatctagcttagctttgccttttgtggttaatgcaggcaaccacctatctcttgggcatttccagcctgaaactgtgagtgttcccagtgtgttctcctcctcgcccagaactttaaataaatccttcatctcttactcaggagtgtctctgagaagctatttccccaaaataggagggagaaaatgctcaatttttctgagctcaaaggcacttatgttacatccagaataatgaaagaatagtaaattaaaacactgtgtttgtttgtaactatttcccaaattagttgctactttaggtaatgcggttatgtctttattaaagaaattgacatgagaagcaccttaggagtcagggtaagggaagcagcccattcctcttcctaagagcatccccagttccttctgggaatgacgacatccctcttagacagtgctgagactctgacccagagcccttctctcctggccagggtgaatgtgtgacccacactaagctaatcatacctcccactctgmatctgagcagggtatctgagactccacacgctctggaagccctgcaaacttttccctttgccttctgtcagccaaagcccactgcagttgcatgcaccaaactttaaaccttggcttcactgatgagtttcacattaaatggttttatatca

SEQ ID NO: 67780 - DNA, 514 bp, Homo sapiens
agagccactcggatatttgatggcgttgaggatagccctgccaaacaccctgcaccaagcaagtcagtcctgtagaaggaaggtctgcccacgctgctagtacgkccctgtgaggaatcactgagtcccatcagctagcttttcctttagtatcctctccttattgtttatcatcttgacattggcccaaagggctcagtccagcactctggactccactgcctgctctcaggctgctggaggagaccggcatccagaaacacgtgaccgagcctctgtgcactcgggacttttaatctccttaattgaaactggcctcttgggaggcagatctgcattggccctgagcttcagcatgtcatcaacttttgcttatttcttttaaagatcaattgacacaccatagtatccaatcttctccctgaatatcggacctatttgccaaccagaagcaaaaccagaaacacacacacttagaaaaacagctcaggaaacaaaagtgcctgataaaaat

SEQ ID NO: 67781 - DNA, 1089 bp, Homo sapiens
  misc_feature (1)...(1089): n = A,T,C or G
acctcataaaactggaagcccagagtagggcacattctgtcctcatcagatcaatcattcttctcatgatcacaaaatgactgcagtggccccaggcattgcatctctacacaccgtccagaggcaaaatagaattctatcctttctttgtgtctccttttaaggactagggatccttttcttgtgctctttttaaaagttaagaatccttttccagaatcttctgcactactgtagtcttcctccctgcctcaagtttgtaaaccccttcctaagtcaatgattagcaacggattgccttgactggcttaaccaatcaagatcaatgaggagatgggtccaggtgtctctgaagcacgtggatggcggagaactggacagaatctcagctctgttgacaaagaagggggtggtagggtgctgtgcatcattgggggattgtaggtggtattgtcatatgatcaaatttgcattgtggaaagatggttttggccaggcgtggtgcctcttgcctrtaatcccagcactttgggaggctgaggcaggtggatcatgagctcaggagtttgagaccnnnnnnnnnnnnnnnnnnnnnnnnnnnnnnnnnnnnnnnnnnnnnnnnnnnnnnnnnnnnnnnnnnnnnnnnnnnnnnnnnnnnnnnnnnnnnnnnnnnntttttttttttctgaaatggagttttaactcttgttgcccaggctggagtgcaatggcgcgaccttggctcatagcaatctctgcctcccaggttcatacgattctcctgcctcagcctcccaagtagctgggattacaagcatgtaccactacgcccagctaattttgtatttttagtagagacagggtttcaccatgttggtcaggctggtctcgaactcctgacctcaggttatctacccacttctgccgcccaaagtgctgggattacaggcgtgagccacagtgcctggctgcattgtggaaagatgaatatgacaatagcttgtagaatgatgacagagaagaatgagacgcaacacaggaaaactgctgtagcaggggtggagatgaatgatagcctcaatcagtcac

SEQ ID NO: 67782 - DNA, 708 bp, Homo sapiens
aactcttctgaagtttactatttacctcagctttgaagcagagatctggtgtctatcccatgtggtatttgcaatgctacaagataaagtctagttttaaatctgccggattgttgggtacctctgacgtctcagcatccacaactaaagaccaagccagctcttatttcaaatgtgtacagtgggtcgggcgcagtggctcacgcctgtaatcctagcactttgagaggccgaggcgggtggatcacttgagtccaagagtttgaaaccagcatgggcaacgtggtgaaaccctgtctctacgaaaaatacaaaaattagccakgtgtggtggtatacacctgtaatcccagctactcaggaggctgaggcaggagaatcgcttgaacccgggaggcggaggttgcagtgagccgagatcacgccactgcactccagcctgggtgacagagtgagaccctatctaaaaaaaaaaaaaaaaaatcaagtgtgtcagtgtgaccgagaagctgggttaatcctcagcagagagaagttccatatgatggggaggaaaggaagagcaaatatacactcaaaaatgtctgggtttgacggtttagagtaatcatttaggaaggaaagaagatatataaggaaatctagactggggaatttggaagttattcgaagcatgttgagaaggatcaggccattttgctactaact

SEQ ID NO: 67783 - DNA, 683 bp, Homo sapiens
cccccacttccatatttcccgtccacccccacagggcacagagctgcaggtcactgtgggagcgtggagcctttggccctaccccaatcattctttttgaaaaggagtcagaatataggtagcacagctcctcctctttatctgagtctagctcataattggaaccaccattttcctcactatctgagctgggtattgggaaactccagcagcagcttgccttccctccagtggggaggaggggggagtatctgaatcttcaggggggcaatccaagactcaaaatccttccaatccggtgagctcccctcttcctgttccttaatggtctgcatgaggtccttcatctctaatttagggggttctctttcctctttatgtgtggacaaaggtcttcagtggagactgtctatctgagtcttatctatcctttgtttagaagccacaaccacattgcactgcacacgagtcctgcccctctgattgtctcccttttgggcccttggaggaccacttgtagaggtctctactgctcaggtctcatccacagctacagtggcttccaccttgcagctccctccatcagatgatgggacatggcagagatgcgtctccaccacctcgctcattgtcatcccagggayagaagaagggacaaggaagtcttccattgtgggggatcc

SEQ ID NO: 67784 - DNA, 530 bp, Homo sapiens
cctagaacactcttctcccagatattcacatggagctgcctcctcccatccttaggtctttgttcatctgctcaaatgtcccttatcagagaagcttttaaaaatctctgtgtcaaacagtaaatctttgttactgaattttatattgctcytaccaagttttttatccatatactgaatcaccctaacattcaatatatttttgtcttttgtcctacttttgtgttctttctatattttgtcctactacttgtgctagaagttaagctccctgagaggagggggttttgtctgttttatttcctgtatttttccagagctcacagtagcgtctggtacacagtgagtgcccaacaacaaaaaaattatttgttaacggaaagaacaaacaccccaagctcgagggcaggacctgtctttattcttcttttactccctaagagcctgacaaaggtttgcattgggtagacttttcataaacatttgttgaactgtacaattcaattactttttacaaatggttgtgttca

SEQ ID NO: 67785 - DNA, 486 bp, Homo sapiens
cttcctctttaaagtaataaaacatctcagatacatccaactttctttgccctctctgctccccaggtaaatattatcctaaagttgatgtgtatcattcccatacatgcttttgtacatttacagcagatgatctattcataaacaatatgtactgttgcttgtatgtctttatatttgacacacatagtatctttggtatatcctttctttcatcttttttcttttttctttttttttttttttttttttttgagacggagtctcactctgtcacccaggctggagtgcagtggcgcgatttcagctcactgcaagctccacctcccaggttcatgccattcttctgcctcagcctcccgagtagctggggctacaggcgcccgccaccacaccckgctaattttttgtatttttagtagagatggggtttcaccgtgttagccaggatggtcttgatcttctgacctcatgatccgcccacct

SEQ ID NO: 67786 - DNA, 731 bp, Homo sapiens
  misc_feature (1)...(731): n = A,T,C or G
taaccttggccattttttggttttgttctctgtattctttttgggcagtctcatccattgtagctgctgggattgttttgttgcatgggatgcaaagaaacataagtagaaatggatatgggatgatctcacagaatctgatgtctagatgcagctgggctttatgaaaactaaacagttatcagaaaactactctcatactctctttgnttttttttttttttttttttkgttgtttgtttctttgtttgtttgtttttttgagacagagtcttaccctgttgcccaggctggagtacattgggaagatcacagctcactgcagccctaacctcctgggcttgagtgattctcccacctcatcctcctgagtagctggaactacaggcatgcactaccacacccggctaatttttaaatttttttgtagagatgggttctcactgtgctgcccaggtctttcttgtttttgttgttgttgttgttgttgttgtgttttgttttttgttttttgagatggagtttcactcttgttgcccaggctggagtgcagtggcacgatctcggctcactgcaacctccgcctcctgggttcaagcaatactcctgcctcagcctcccgagtagctgggattacaggcatgcaccaccacgcccggctaattttgtacttttagtagagatggggtttctccacgttagtcaggctggtctcgaactcccaacctcag

SEQ ID NO: 67787 - DNA, 682 bp, Homo sapiens
tcctgatatctgtctttcttaaagaaattaaactcatccctagtgattatactttcttcatctaacactataatattaataacatttgaaaaaataatgtctaataattaacactagatttacagagtatttttagacaattttctaaaattatctgaaaaatttgaccagaatcattgtaaaattcacatctgagcttatgaaagcccactttattccactctaaaagaacaaaattttgtacytttaattttatcttttaaaatgttttaacataaaggtagtgggagacgttactaaaggaagcttagatagtaacgtatttgttgtctcagttaacacaaagaccatagatggggcagatctgcaggatgcaaaaactttcctttttctcacctcatagtagtcatatggctactgcaattctctggtttcatgtgcttacaaaatgtcctttagttaaaaataaaaagaaagagaaagagaaagagaaagaaagaaaaagaaagagaaagaagaagaaaagagaaaaaataatttcttcatgtgtctatttaaattaacaaagacgtgaattgtcccagacctccctgtgatgagtaacttcatgtgtcagttttactgggctaagggttacccacatggctgataaaacattatttctgagtatgtctgtgtttcc

SEQ ID NO: 67788 - DNA, 682 bp, Homo sapiens
tcctgatatctgtctttcttaaagaaattaaactcatccctagtgattatactttcttcatctaacactataatattaataacatttgaaaaaataatgtctaataattaacactagatttacagagtatttttagacaattttctaaaattatctgaaaaatttgaccagaatcattgtaaaattcacatctgagcttatgaaagcccactttattccactctaaaagaacaaaattttgtacttttaattttatcttttaaaatgttttaacataaaggtagtgggagacgttactaaaggaagcttagrtagtaacgtatttgttgtctcagttaacacaaagaccatagatggggcagatctgcaggatgcaaaaactttcctttttctcacctcatagtagtcatatggctactgcaattctctggtttcatgtgcttacaaaatgtcctttagttaaaaataaaaagaaagagaaagagaaagagaaagaaagaaaaagaaagagaaagaagaagaaaagagaaaaaataatttcttcatgtgtctatttaaattaacaaagacgtgaattgtcccagacctccctgtgatgagtaacttcatgtgtcagttttactgggctaagggttacccacatggctgataaaacattatttctgagtatgtctgtgtttcc

SEQ ID NO: 67789 - DNA, 682 bp, Homo sapiens
tcctgatatctgtctttcttaaagaaattaaactcatccctagtgattatactttcttcatctaacactataatattaataacatttgaaaaaataatgtctaataattaacactagatttacagagtatttttagacaattttctaaaattatctgaaaaatttgaccagaatcattgtaaaattcacatctgagcttatgaaagcccactttattccactctaaaagaacaaaattttgtacttttaattttatcttttaaaatgttttaacataaaggtagtgggagacgttactaaaggaagcttagatagtaacgtatttgtygtctcagttaacacaaagaccatagatggggcagatctgcaggatgcaaaaactttcctttttctcacctcatagtagtcatatggctactgcaattctctggtttcatgtgcttacaaaatgtcctttagttaaaaataaaaagaaagagaaagagaaagagaaagaaagaaaaagaaagagaaagaagaagaaaagagaaaaaataatttcttcatgtgtctatttaaattaacaaagacgtgaattgtcccagacctccctgtgatgagtaacttcatgtgtcagttttactgggctaagggttacccacatggctgataaaacattatttctgagtatgtctgtgtttcc

SEQ ID NO: 67790 - DNA, 682 bp, Homo sapiens
tcctgatatctgtctttcttaaagaaattaaactcatccctagtgattatactttcttcatctaacactataatattaataacatttgaaaaaataatgtctaataattaacactagatttacagagtatttttagacaattttctaaaattatctgaaaaatttgaccagaatcattgtaaaattcacatctgagcttatgaaagcccactttattccactctaaaagaacaaaattttgtacttttaattttatcttttaaaatgttttaacataaaggtagtgggagacgttactaaaggaagcttagatagtaacgtatttgttgtctcagttaacacaaagaccatagatggggcagatctgcaggatgcaaaaactttcctttttytcacctcatagtagtcatatggctactgcaattctctggtttcatgtgcttacaaaatgtcctttagttaaaaataaaaagaaagagaaagagaaagagaaagaaagaaaaagaaagagaaagaagaagaaaagagaaaaaataatttcttcatgtgtctatttaaattaacaaagacgtgaattgtcccagacctccctgtgatgagtaacttcatgtgtcagttttactgggctaagggttacccacatggctgataaaacattatttctgagtatgtctgtgtttcc

SEQ ID NO: 67791 - DNA, 682 bp, Homo sapiens
tcctgatatctgtctttcttaaagaaattaaactcatccctagtgattatactttcttcatctaacactataatattaataacatttgaaaaaataatgtctaataattaacactagatttacagagtatttttagacaattttctaaaattatctgaaaaatttgaccagaatcattgtaaaattcacatctgagcttatgaaagcccactttattccactctaaaagaacaaaattttgtacttttaattttatcttttaaaatgttttaacataaaggtagtgggagacgttactaaaggaagcttagatagtaacgtatttgttgtctcagttaacacaaagaccatagatggggcagatctgcaggatgcaaaaactttcctttttctcacctcatagtagtcatatggctactgcaattctctggtttcatgtgcttacaaaatgtcctttagttaaaaataaaaagaaagagaaagagaaagasaaagaaagaaaaagaaagagaaagaagaagaaaagagaaaaaataatttcttcatgtgtctatttaaattaacaaagacgtgaattgtcccagacctccctgtgatgagtaacttcatgtgtcagttttactgggctaagggttacccacatggctgataaaacattatttctgagtatgtctgtgtttcc

SEQ ID NO: 67792 - DNA, 670 bp, Homo sapiens
tttccaggagaaatcacaggacaatggatatcagaagaaatgatgggaccagggtaatattggatgttttgtatataaaaaactaatgtgggcaacaaaaaagcatataaagtcactgaagcaaaatatatattgygaaatctaaaagaaaatatgctattggtaggccatggctacattataaaaaacatttcatttcacataaagtatgaatactacactatgactatgagttaatattaaaaaattgaccacataggaaataggagaaaaaagtaacaacactgtggaaagcaaagaaaatgactgcaagatgaagctatcaccaccatctcgtggccacatacggacctcctcagaagcttagatgaataaagggaagagactggagttattaaaatttgtaaactcagagtaaaagccttcctgagctgaggctagacctctgagggagagaaatgttccaactgctgctgttacctctgaagaggcactttctggggctctgaaaaaattggtaaactgaaacaattactgctcctagggcaaggggatgttcttgggagaatatcagcaaggacagcaaacaaacaggaaaaggagatctattcttccattctcttgcctatgtttctctagtacctcccaatagcagtacgtagcaggatcc

SEQ ID NO: 67793 - DNA, 670 bp, Homo sapiens
tttccaggagaaatcacaggacaatggatatcagaagaaatgatgggaccagggtaatattggatgttttgtatataaaaaactaatgtgggcaacaaaaaagcatataaagtcactgaagcaaaatatatattgtgaaatctaaaagaaaatatgctattggtaggccatggctacattataaaaaacatttcatttcacataaagtatgaatactacactatgactatgagttaatattaaaaawttgaccacataggaaataggagaaaaaagtaacaacactgtggaaagcaaagaaaatgactgcaagatgaagctatcaccaccatctcgtggccacatacggacctcctcagaagcttagatgaataaagggaagagactggagttattaaaatttgtaaactcagagtaaaagccttcctgagctgaggctagacctctgagggagagaaatgttccaactgctgctgttacctctgaagaggcactttctggggctctgaaaaaattggtaaactgaaacaattactgctcctagggcaaggggatgttcttgggagaatatcagcaaggacagcaaacaaacaggaaaaggagatctattcttccattctcttgcctatgtttctctagtacctcccaatagcagtacgtagcaggatcc

SEQ ID NO: 67794 - DNA, 670 bp, Homo sapiens
tttccaggagaaatcacaggacaatggatatcagaagaaatgatgggaccagggtaatattggatgttttgtatataaaaaactaatgtgggcaacaaaaaagcatataaagtcactgaagcaaaatatatattgtgaaatctaaaagaaaatatgctattggtaggccatggctacattataaaaaacatttcatttcacataaagtatgaatactacactatgactatgagttaatattaaaaaattgaccacataggaaataggagaaaaaagtaacaacactgtggaaagcaaagaaaatgactgcaagatgaagctatcaccaccatctcgtggccacatacggacytcctcagaagcttagatgaataaagggaagagactggagttattaaaatttgtaaactcagagtaaaagccttcctgagctgaggctagacctctgagggagagaaatgttccaactgctgctgttacctctgaagaggcactttctggggctctgaaaaaattggtaaactgaaacaattactgctcctagggcaaggggatgttcttgggagaatatcagcaaggacagcaaacaaacaggaaaaggagatctattcttccattctcttgcctatgtttctctagtacctcccaatagcagtacgtagcaggatcc

SEQ ID NO: 67795 - DNA, 670 bp, Homo sapiens
tttccaggagaaatcacaggacaatggatatcagaagaaatgatgggaccagggtaatattggatgttttgtatataaaaaactaatgtgggcaacaaaaaagcatataaagtcactgaagcaaaatatatattgtgaaatctaaaagaaaatatgctattggtaggccatggctacattataaaaaacatttcatttcacataaagtatgaatactacactatgactatgagttaatattaaaaaattgaccacataggaaataggagaaaaaagtaacaacactgtggaaagcaaagaaaatgactgcaagatgaagctatcaccaccatctcgtggccacatacggacctcctcagaagcttagatgaataaagggaagagactggagttattaaaatttgtaaactcagagtaaaagccttcctgagctgaggctagacctctgagggagagawatgttccaactgctgctgttacctctgaagaggcactttctggggctctgaaaaaattggtaaactgaaacaattactgctcctagggcaaggggatgttcttgggagaatatcagcaaggacagcaaacaaacaggaaaaggagatctattcttccattctcttgcctatgtttctctagtacctcccaatagcagtacgtagcaggatcc

SEQ ID NO: 67796 - DNA, 670 bp, Homo sapiens
tttccaggagaaatcacaggacaatggatatcagaagaaatgatgggaccagggtaatattggatgttttgtatataaaaaactaatgtgggcaacaaaaaagcatataaagtcactgaagcaaaatatatattgtgaaatctaaaagaaaatatgctattggtaggccatggctacattataaaaaacatttcatttcacataaagtatgaatactacactatgactatgagttaatattaaaaaattgaccacataggaaataggagaaaaaagtaacaacactgtggaaagcaaagaaaatgactgcaagatgaagctatcaccaccatctcgtggccacatacggacctcctcagaagcttagatgaataaagggaagagactggagttattaaaatttgtaaactcagagtaaaagccttcctgagctgaggctagacctctgagggagagaaatgttccaactgctgctgttacctctgaagaggcactttctggggctctgaaaaaattggtaaactgaaacaattactgctcctagggcaaggggatgttcttgggagaatatcagcaaggacrgcaaacaaacaggaaaaggagatctattcttccattctcttgcctatgtttctctagtacctcccaatagcagtacgtagcaggatcc

SEQ ID NO: 67797 - DNA, 670 bp, Homo sapiens
tttccaggagaaatcacaggacaatggatatcagaagaaatgatgggaccagggtaatattggatgttttgtatataaaaaactaatgtgggcaacaaaaaagcatataaagtcactgaagcaaaatatatattgtgaaatctaaaagaaaatatgctattggtaggccatggctacattataaaaaacatttcatttcacataaagtatgaatactacactatgactatgagttaatattaaaaaattgaccacataggaaataggagaaaaaagtaacaacactgtggaaagcaaagaaaatgactgcaagatgaagctatcaccaccatctcgtggccacatacggacctcctcagaagcttagatgaataaagggaagagactggagttattaaaatttgtaaactcagagtaaaagccttcctgagctgaggctagacctctgagggagagaaatgttccaactgctgctgttacctctgaagaggcactttctggggctctgaaaaaattggtaaactgaaacaattactgctcctagggcaaggggatgttcttgggagaatatcagcaaggacagcaaacaaacaggaaaaggagatctattcttccattctcttgcctatgtttctctagtacctcccaatagcagwacgtagcaggatcc

SEQ ID NO: 67798 - DNA, 577 bp, Homo sapiens
cttccgggactttgactgcggcatcttggcggcctcctcagccccggcccaaccacatcaaccgcggcggcggcggctcctgctgctgtgatcggcggcggccgcgccgggagagagcggcatacagagcaggggcggcggcgggcgcggctgcctctcgctcgctagctcgygcgctcccaaccgcccggaaccgaccgcgcggcggcgcccctcccccccacaacacgcccacgtgaccggccggcgtcagcaccgcccctcttcgcgccgtggcccgccgcctccgccccccgaaatacgcggggggtgcgtcggggcgacgttttactttaaaggcaaaaaaaggggacgccgcgatgcccccagaaaagtcacgactgaaactcgctgcgtcatgacccggtttactctttcagaagaaaaacaactgcaatattctcaaaatgtccactggtagccatttccctacatcaataaaaaaactttagaatatactttatttagctactaacctgtaaaaaataaagcaccataaattcctgtgtatgtgtaaaaacaaagattgtgaagtaac

SEQ ID NO: 67799 - DNA, 576 bp, Homo sapiens
aaaaaaaaaagtgataggagctactacaggattaaaaggaagggacagcatctctagaagagagaagcctggggcagttcaaccaatgtggaactgcccattatctgcatttttcataggctcttaggactacagttaatcacaaaattttgraactgaattttattaatgttcagaaaaaaagtcatataataaagtccccgagtcattccccaccccaaaatagggcccaggaaagctgccctaattgccttacccaagggacaggcctactatgggtaatctccaaaatgtttaaaaggcatatacgacatttactgcttctgtgtcctcacttaatattttctcctaaatgttctgcaacctttcatttcctatctgtgataagacaataatgaagtccaaattgccaaataagaactcacagtgcttcaccactgcagttgtgaaactctctccttagtttctagaacattactctttcctaaattgttctacctctccaatttctctctctctctcttcctccttgggccacctctttccattccacacacctctagagaatttcatcca

SEQ ID NO: 67800 - DNA, 874 bp, Homo sapiens
ttaccttccagaaatattattaatttaaactatctgctggtattagtaaatgtttcagtgtagaactaagaataaggagttcttctctgagaatgaaatctctgtattcaattaaaagttgggttttttgagaggtattgtctttgttttctgcctgtattctccttagcatagttttatgatataacaatgctaaccttcaatcatatattggaaaacatatttacacatatatgtgaattaacccaactagtaacattttaatctggcatttggccaagataaagtaaggatctgaatttctgctcccacttgtcatataataaaaaataggtatttgctctttgtccctggttcctagcacatagttcctaaaactactggaatctagttcagatatttgcaaagatttatatttcacttttatatagacttatacatttttaccacaagtggtagcctttttgcttatattaaaactagcagtgggctgggtgtggtggctcatgcctgtaattccagcactttgggagtccaaggcaagaggatcacttgagtccaggagtttgagaccagactgggcaacatagggagactctgtctctgccaaaataataaataaataaatagctgggtgtggtggcatgcactgatggtatgcactagccttcccttccctcctcagctacscgaaaggctgagcggggagaatcacttaaacctgggaggtggagactgcagtgagctgtgttcacaccactgtattccagcctgagcaacagagcaagactctgtttcaaaagaaataaaaatagcagaatttatgtatataaaaatcttacctgaacacttatcctctaggtgggttgctaag

SEQ ID NO: 67801 - DNA, 745 bp, Homo sapiens
tggatcccatttctaaaaactggattcattgactacattattaaattgtttcaatgctgtattccactatatgttgcattctatagaatgtttacttaacatctttggaataatcattaagtaaacaaaaactgtcccctcttcctcaaaactttcttttattcccatgcttatccactgtcatcaaaktaccacatctgacagaaataattttaatttcaccatcaattgctaggatattaatttagactacaaatagctgcatataaacataaatgaaaaaatatttttccactctcgttgttgaaacagtgggagtcctgaatgatttgatagctgtacaattaatcaaataatagactactggattaaatctcagtgaactaaaaatatctgtgcatagctgtaaacaaaattaaattaatatcctcagtacctcttatgcctttaatgctatcaggatcagtagatgtgattttaaatgacgattcatataaataggaatatacgtaaaatttaaaaatactaagtgaatttatacctaattgtactacattattaagtataattttctgagtgttactcctaaccagtagcaaatatgttatatatatgagatatatgatatgtgtatatatgatatatgatatatatgttatgatatatatatgatatgtgatatatatgttactgggtagcaggtacagtagcaagttttctttcttaaaagaatggtatactctgg

SEQ ID NO: 67802 - DNA, 535 bp, Homo sapiens
tttgaataaagaattcaatctatctatctaatagaagttgggtttaagtatttcataaattagttaatagataaaattcagagatatttgatgaaacaaagttacttgtcctatgctttttaattctttataaagaaaagcaggcatacagacaggatagtcaaaatctttatccttattggattagcaatttaatccaataagcaattttttccatgcattcttttatattttaagttaatagtttggtaggaaaaatccttcaaagttgtcrcacacaagcaatacactgggttaaaataatgatgttgtaaataatatggaagtattacaaggtcttacaggaaaaaagctgtctgtttactcttcaccgccactagatataatctaaacattacattcctaaaaggatatgcaatatcactcgcattcaggctaggcaattgcattcctctcttggtcttagctgaactctgcggcatgatcttaagctttggctatttgaggtaaacgaactctgtggtcacgcctgcct

SEQ ID NO: 67803 - DNA, 1191 bp, Homo sapiens
tcttcacattgctgtgagagaaaataaaaaagactaagtgatattttctatccccaaggagcttactgtccaattgtagaaatacaattaacaaatagaaaattagactctcttaagataaatttagtataatgtttccagagaaggataaatatccatatggattggaggagttagaagcttcagagagactggaggacttgtgttaggtcttcagaaataaagatgattcaattaccaaaacagagaaagaagtagggctttgcaggcaaaaatagcaacataaacagttatagggtgtgaaaatgagtgtgatgtgttctgggaattgtgtgacaacatacatggtacagtggagtatatatgtaaaagagtagaaaataaagttgtgcaaagaggttggaattatggaaagttatgaatgccaggctaagaagttgagrcaactgaaaaaatttaaggaggaaggtaaaatgatcagaggtaggttttagaaagattattcttgcattaaaaaccaaatggaggtgaagactagggccaggtgataactttgagaatgaagtaacactccttgaggtatgccataaccagtttaaacaatatttgacctttccaacaagtatatggagatacaactcttttcttacttttaatgatgggtgtaataacttatattgcagattttattccttgtttcaccacctgctcatctgttcccatcaatagttgtctccacctccataaacagaaatcttgaggcttcccactcatgattacctcatataaacatgcatcattatcccaatactggtgcctctctttgtcattgaaaaggtttccagaattatctttcaagtcctcttgacaaacattgtattgagtggcgggaaaatagggaagaaaaaagcaactctttatcccatcctttgatactgcaaacatattttatatcctctttttttcctatataattaaagaagcataatgcggaaaaagtcccagcaaaggaactgctaacagaatgtctttacacttagtttaatgtgattttttttttttttttttttttgagacggagtctctctctgtcacccaggctggagtgcagtggcgcaatctccgatcactgcaagctctgtctcccgggttcatgccattctcctgcctcagcagtggtcagaaagatag

SEQ ID NO: 67804 - DNA, 1191 bp, Homo sapiens
tcttcacattgctgtgagagaaaataaaaaagactaagtgatattttctatccccaaggagcttactgtccaattgtagaaatacaattaacaaatagaaaattagactctcttaagataaatttagtataatgtttccagagaaggataaatatccatatggattggaggagttagaagcttcagagagactggaggacttgtgttaggtcttcagaaataaagatgattcaattaccaaaacagagaaagaagtagggctttgcaggcaaaaatagcaacataaacagttatagggtgtgaaaatgagtgtgatgtgttctgggaattgtgtgacaacatacatggtacagtggagtatatatgtaaaagagtagaaaataaagttgtgcaaagaggttggaattatggaaagttatgaatgccaggctaagaagttgagacaactgaaaaaatttaaggaggaaggtaaaatgatcagaggtaggttttagaaagattattcttgcattaaaaaccaaatggaggtgaagactagggccaggtgataactttgagaatgaagtaacactccttgaggtatgccataaccagtttaaacaatatttgacctttccaacaagtatatggagatacaactctwttcttacttttaatgatgggtgtaataacttatattgcagattttattccttgtttcaccacctgctcatctgttcccatcaatagttgtctccacctccataaacagaaatcttgaggcttcccactcatgattacctcatataaacatgcatcattatcccaatactggtgcctctctttgtcattgaaaaggtttccagaattatctttcaagtcctcttgacaaacattgtattgagtggcgggaaaatagggaagaaaaaagcaactctttatcccatcctttgatactgcaaacatattttatatcctctttttttcctatataattaaagaagcataatgcggaaaaagtcccagcaaaggaactgctaacagaatgtctttacacttagtttaatgtgattttttttttttttttttttttgagacggagtctctctctgtcacccaggctggagtgcagtggcgcaatctccgatcactgcaagctctgtctcccgggttcatgccattctcctgcctcagcagtggtcagaaagatag

SEQ ID NO: 67805 - DNA, 1596 bp, Homo sapiens
gtactttatctagcagtgtctaagaattttatcaaggtaattttgaaactccttctggtacttatgatcaaaatttcaggctgacagtcctgagtatgaaatcaaaatatccatcagctcaagtgatatgcaaaaggtrtgctttcagctcatagccaagtgtgtaatctctgcattgccaggaccattgtggtaactagacactctgggtgttattgtccctttcatcaatgtgtaatatcatagcataaagctatcaatatatttcaggcacaagtttggaaaaattgaatttaaagatgtaattgatcaataattaggatgtaccatccaagaaactaagtcaagatttagaaaattaagggcattaaattaaaatctagacaaaaatttttaaaaagtaataaatagtttacggttgagctatactgtttctgctctgactgtacctagcatactgtaccatactgagtttaggtgtctcttcaacacaggtggtttggcttctatctatatatagcctggggggggaataatcatgatttttaataatttatttaaattggtgttttttagtgtcatgtgtagatggagataaataataaagaaagaaaatttgtaatcatctaacaggtttttcctgctgctgcacagacaaaatgaattcactgagaccatggcattgtagtcgagaaagaatttaactgatgagaggccagcccacatgggaaaactggagttatcactcacatcagcctccctaaaagctcagaggttagggtttgcatggacaatttgatgactgggagactagggaatgggtgctgctgattggttggggatgaaatcatagggtgtggaaaatggtcctcatgcattgaggctgcctctgggtagggccacaggaccagttgtatcatgagtcacaggtcctggcagggccagtctgttgtaaaaatgtctgaaaaaatctcataagatcaagcttaggttctacaatggtgatgttatccataggagcaactgaggaagtcacaaatcctgttacctctggctacatgactcctgagcagtaaggaattatagaaaatttgcctacatcttatcagaattcagagccctcttataactttgtggcctttcattagttttacaaaggtggtctagtttgggaaagagctattattgtccatgctttaaggttaaactataaactaaattcctccctaaattagcttagcctatctccaggattgaacaaggacagcatgaagcttagaagcaagatggagtcaactgtgtcagatttctcttgctgtcataattttgcaaaggtggtttcatatttagtcattatttcttaagcaggaaagataaagaagttaaagtttactgaaaagtaatctacacaagtaatctaggagaagccatcatttttcacatggaattattgtgccaggaaaattcaccatttaccattctgcctgtgtttctcctacatagctattcacaggttaaagctttatgtttcagactctgtaacattgggaaaatcattccactggttcatttatgagtctttgtaaattctgagag

SEQ ID NO: 67806 - DNA, 1596 bp, Homo sapiens
gtactttatctagcagtgtctaagaattttatcaaggtaattttgaaactccttctggtacttatgatcaaaatttcaggctgacagtcctgagtatgaaatcaaaatatccatcagctcaagtgatatgcaaaaggtatgctttcagctcatagccaagtgtgtaatctctgcattgccaggaccattgtggtaactagacactctgggtgttattgtccctttcatcaatgtgtaatatcatagcataaagctatcaatayatttcaggcacaagtttggaaaaattgaatttaaagatgtaattgatcaataattaggatgtaccatccaagaaactaagtcaagatttagaaaattaagggcattaaattaaaatctagacaaaaatttttaaaaagtaataaatagtttacggttgagctatactgtttctgctctgactgtacctagcatactgtaccatactgagtttaggtgtctcttcaacacaggtggtttggcttctatctatatatagcctggggggggaataatcatgatttttaataatttatttaaattggtgttttttagtgtcatgtgtagatggagataaataataaagaaagaaaatttgtaatcatctaacaggtttttcctgctgctgcacagacaaaatgaattcactgagaccatggcattgtagtcgagaaagaatttaactgatgagaggccagcccacatgggaaaactggagttatcactcacatcagcctccctaaaagctcagaggttagggtttgcatggacaatttgatgactgggagactagggaatgggtgctgctgattggttggggatgaaatcatagggtgtggaaaatggtcctcatgcattgaggctgcctctgggtagggccacaggaccagttgtatcatgagtcacaggtcctggcagggccagtctgttgtaaaaatgtctgaaaaaatctcataagatcaagcttaggttctacaatggtgatgttatccataggagcaactgaggaagtcacaaatcctgttacctctggctacatgactcctgagcagtaaggaattatagaaaatttgcctacatcttatcagaattcagagccctcttataactttgtggcctttcattagttttacaaaggtggtctagtttgggaaagagctattattgtccatgctttaaggttaaactataaactaaattcctccctaaattagcttagcctatctccaggattgaacaaggacagcatgaagcttagaagcaagatggagtcaactgtgtcagatttctcttgctgtcataattttgcaaaggtggtttcatatttagtcattatttcttaagcaggaaagataaagaagttaaagtttactgaaaagtaatctacacaagtaatctaggagaagccatcatttttcacatggaattattgtgccaggaaaattcaccatttaccattctgcctgtgtttctcctacatagctattcacaggttaaagctttatgtttcagactctgtaacattgggaaaatcattccactggttcatttatgagtctttgtaaattctgagag

SEQ ID NO: 67807 - DNA, 1596 bp, Homo sapiens
gtactttatctagcagtgtctaagaattttatcaaggtaattttgaaactccttctggtacttatgatcaaaatttcaggctgacagtcctgagtatgaaatcaaaatatccatcagctcaagtgatatgcaaaaggtatgctttcagctcatagccaagtgtgtaatctctgcattgccaggaccattgtggtaactagacactctgggtgttattgtccctttcatcaatgtgtaatatcatagcataaagctatcaatatatttcaggcacaagtttggaaaaattgaatttaaagatgtaattgatcaataattaggaygtaccatccaagaaactaagtcaagatttagaaaattaagggcattaaattaaaatctagacaaaaatttttaaaaagtaataaatagtttacggttgagctatactgtttctgctctgactgtacctagcatactgtaccatactgagtttaggtgtctcttcaacacaggtggtttggcttctatctatatatagcctggggggggaataatcatgatttttaataatttatttaaattggtgttttttagtgtcatgtgtagatggagataaataataaagaaagaaaatttgtaatcatctaacaggtttttcctgctgctgcacagacaaaatgaattcactgagaccatggcattgtagtcgagaaagaatttaactgatgagaggccagcccacatgggaaaactggagttatcactcacatcagcctccctaaaagctcagaggttagggtttgcatggacaatttgatgactgggagactagggaatgggtgctgctgattggttggggatgaaatcatagggtgtggaaaatggtcctcatgcattgaggctgcctctgggtagggccacaggaccagttgtatcatgagtcacaggtcctggcagggccagtctgttgtaaaaatgtctgaaaaaatctcataagatcaagcttaggttctacaatggtgatgttatccataggagcaactgaggaagtcacaaatcctgttacctctggctacatgactcctgagcagtaaggaattatagaaaatttgcctacatcttatcagaattcagagccctcttataactttgtggcctttcattagttttacaaaggtggtctagtttgggaaagagctattattgtccatgctttaaggttaaactataaactaaattcctccctaaattagcttagcctatctccaggattgaacaaggacagcatgaagcttagaagcaagatggagtcaactgtgtcagatttctcttgctgtcataattttgcaaaggtggtttcatatttagtcattatttcttaagcaggaaagataaagaagttaaagtttactgaaaagtaatctacacaagtaatctaggagaagccatcatttttcacatggaattattgtgccaggaaaattcaccatttaccattctgcctgtgtttctcctacatagctattcacaggttaaagctttatgtttcagactctgtaacattgggaaaatcattccactggttcatttatgagtctttgtaaattctgagag

SEQ ID NO: 67808 - DNA, 1596 bp, Homo sapiens
gtactttatctagcagtgtctaagaattttatcaaggtaattttgaaactccttctggtacttatgatcaaaatttcaggctgacagtcctgagtatgaaatcaaaatatccatcagctcaagtgatatgcaaaaggtatgctttcagctcatagccaagtgtgtaatctctgcattgccaggaccattgtggtaactagacactctgggtgttattgtccctttcatcaatgtgtaatatcatagcataaagctatcaatatatttcaggcacaagtttggaaaaattgaatttaaagatgtaattgatcaataattaggatgtaccatccaagaaactaagkcaagatttagaaaattaagggcattaaattaaaatctagacaaaaatttttaaaaagtaataaatagtttacggttgagctatactgtttctgctctgactgtacctagcatactgtaccatactgagtttaggtgtctcttcaacacaggtggtttggcttctatctatatatagcctggggggggaataatcatgatttttaataatttatttaaattggtgttttttagtgtcatgtgtagatggagataaataataaagaaagaaaatttgtaatcatctaacaggtttttcctgctgctgcacagacaaaatgaattcactgagaccatggcattgtagtcgagaaagaatttaactgatgagaggccagcccacatgggaaaactggagttatcactcacatcagcctccctaaaagctcagaggttagggtttgcatggacaatttgatgactgggagactagggaatgggtgctgctgattggttggggatgaaatcatagggtgtggaaaatggtcctcatgcattgaggctgcctctgggtagggccacaggaccagttgtatcatgagtcacaggtcctggcagggccagtctgttgtaaaaatgtctgaaaaaatctcataagatcaagcttaggttctacaatggtgatgttatccataggagcaactgaggaagtcacaaatcctgttacctctggctacatgactcctgagcagtaaggaattatagaaaatttgcctacatcttatcagaattcagagccctcttataactttgtggcctttcattagttttacaaaggtggtctagtttgggaaagagctattattgtccatgctttaaggttaaactataaactaaattcctccctaaattagcttagcctatctccaggattgaacaaggacagcatgaagcttagaagcaagatggagtcaactgtgtcagatttctcttgctgtcataattttgcaaaggtggtttcatatttagtcattatttcttaagcaggaaagataaagaagttaaagtttactgaaaagtaatctacacaagtaatctaggagaagccatcatttttcacatggaattattgtgccaggaaaattcaccatttaccattctgcctgtgtttctcctacatagctattcacaggttaaagctttatgtttcagactctgtaacattgggaaaatcattccactggttcatttatgagtctttgtaaattctgagag

SEQ ID NO: 67809 - DNA, 1596 bp, Homo sapiens
gtactttatctagcagtgtctaagaattttatcaaggtaattttgaaactccttctggtacttatgatcaaaatttcaggctgacagtcctgagtatgaaatcaaaatatccatcagctcaagtgatatgcaaaaggtatgctttcagctcatagccaagtgtgtaatctctgcattgccaggaccattgtggtaactagacactctgggtgttattgtccctttcatcaatgtgtaatatcatagcataaagctatcaatatatttcaggcacaagtttggaaaaattgaatttaaagatgtaattgatcaataattaggatgtaccatccaagaaactaagtcaagatttagaaaattaagggcattaaattaaaatctagacaaaaatttttaaaaagtaataaatagtttasggttgagctatactgtttctgctctgactgtacctagcatactgtaccatactgagtttaggtgtctcttcaacacaggtggtttggcttctatctatatatagcctggggggggaataatcatgatttttaataatttatttaaattggtgttttttagtgtcatgtgtagatggagataaataataaagaaagaaaatttgtaatcatctaacaggtttttcctgctgctgcacagacaaaatgaattcactgagaccatggcattgtagtcgagaaagaatttaactgatgagaggccagcccacatgggaaaactggagttatcactcacatcagcctccctaaaagctcagaggttagggtttgcatggacaatttgatgactgggagactagggaatgggtgctgctgattggttggggatgaaatcatagggtgtggaaaatggtcctcatgcattgaggctgcctctgggtagggccacaggaccagttgtatcatgagtcacaggtcctggcagggccagtctgttgtaaaaatgtctgaaaaaatctcataagatcaagcttaggttctacaatggtgatgttatccataggagcaactgaggaagtcacaaatcctgttacctctggctacatgactcctgagcagtaaggaattatagaaaatttgcctacatcttatcagaattcagagccctcttataactttgtggcctttcattagttttacaaaggtggtctagtttgggaaagagctattattgtccatgctttaaggttaaactataaactaaattcctccctaaattagcttagcctatctccaggattgaacaaggacagcatgaagcttagaagcaagatggagtcaactgtgtcagatttctcttgctgtcataattttgcaaaggtggtttcatatttagtcattatttcttaagcaggaaagataaagaagttaaagtttactgaaaagtaatctacacaagtaatctaggagaagccatcatttttcacatggaattattgtgccaggaaaattcaccatttaccattctgcctgtgtttctcctacatagctattcacaggttaaagctttatgtttcagactctgtaacattgggaaaatcattccactggttcatttatgagtctttgtaaattctgagag

SEQ ID NO: 67810 - DNA, 759 bp, Homo sapiens
gccctgactcatggggaatttgtgctttggccaagtcaagcatctgtgcatcccagaactgaactgacatggtaccccacatcccagggaaacagaggattgaccgagctgagacacactcccatataggccaaacaactgtagtaccctgctgctctggaactagaataacaccctagagtctgagctgttgacacaacgtcctacccagggaatggaatcatcactgagctgtcccctgtcccccagggctcaagtgattgcttgctctgccattctgggtttattgctgccactgaacctgaaaacactgctgtataccaccatcttagatccagagtcaccactatgtgatgctgcatcttctggtgactgagtagccatagtgccctattggatctcattctcaaattccagctgtactctgctgggtgtgctcaaatcttcagggaatcctcttttccctggagccagggcatttctataccctgcscttcagggacagaattacagctaaaacttgtcccccagggcctgagcttctgggggttctcagagtcacagatcctagctttgtaggcaatccacatcccacactgactcagaaactgaacatatgccctgagacccaggtggcacaataggttctctggaccctgagaccaggacctcagcaccacaaccactctgagcacttgcagtctagaacccataacttctgaagctgattgtgggctgtatcatattcaacatgaagag

SEQ ID NO: 67811 - DNA, 666 bp, Homo sapiens
cattatccttccaccttttgttctcttgctcatatcctaattggcagaacccaggaatccaatgggcaaagagcttgtgctgctttcagccatttagagtgtctcagggcattgagaaagatagagtaaggtgggaaatgaagaaaaaaatatgtatgtgtgtgtgtatatatataatatataattatatattatatatatrtaaaattttatgtatatatagctcagttccaccactataacaaggttaagttttaccctattgactctccttctttttgtaaagttgagatgtgtatgtgtccttgtaactttcacatatttattccaattctaattcctggatctccagagtatgatttgatatgccttaaatatttcagtgtactcattatttttcttctaatatttatctttagtcttaactctcccagtcttctcaagaatttctcacataacatcttacctggtggtttagattctcaaggtagcaaaaggttggaagtgagcctagttgaaataagataaaattacacttgaaaattccttaacttatgtttacaacatgtacacatctcttagtgtgtgagatattaaattgaaggcccatgacaaaagcaacaaaagtaaagtttatacacagatgtctgggcattcaagctattt

SEQ ID NO: 67812 - DNA, 1564 bp, Homo sapiens
agaaaatttcaattttgttacaattcaaaagcaacatgacttccatacaaatgcaaaaataacatgtttctatacaagctagccaaaagcaaaatgaagagaacaggacaggaaaataaagccacatattaggatgtaaaaagtatatgtgacatacagaaaattaccacggaaaatcatactagaaatccacatyggggcactgaagagccagattgatgccaaaaatttggaagaccaacttaagtctacctagaattcagaagaaaagaacaaagaaacaaaaatagggaaaacacggtggatacagagaacagaaaataaagagcttgcagggatgacttgttattcttaaaaggagaacccaaacaattcaagagatgttataagagaaaatgttcttgatctgaaggtagtaattggttttagaaatgccctacaggaggcaaacacacccagggacttggcctaatttggcctctggcaatgtctcaagagcagaaacccaggggtctaatcaactgggtctagaaacataaccttggtacatcctttgtgtccttcagacaggcagaactgtctgtcccatatggaatacttgtctaaatcgctcatccaacttatgctccttgtttccaacataccttacacttctgagttctcatcacaatcagcgttaactcctgatttatttaagaaattgttctattctattactcacactagattataagctccatgaatgaagagcctgtttaccactccatcaccagataatattgaagtttagggcaaaaacttaaaacaaaagaaatttgttttatattgataaaggtaaaataccataaggtattacttgacataaaatgtaatgggctgaataacatgacatgatttatgtgacacaaatgtaaggcccttccactataggccaaacatctataacaaagggacacagaaaaaggtaacacttacaagaagaaagggtgagcaatgtcatgtcaggcaactgcaagcagaagaaagcagggtgtagtaggccacctggaggatttgggagtaggttaccactgcatgggagtggttagtttggaagtgtccgtcccgagggagaatgtatttgtgtttctcttcctatctaactagaagcaaggaaacttcaggatggcttcagtgacaactcttggcaactcaataaaagagctggctcttttcctggacataaggaccatgacagtcctgagtctcaggcagaagagatcattcatcagagcctgtggtttggttaaagattctatagcacctacatgaaatcacttgttttattttctctttttcttctgtccctgttatttccttttgtttttaatacagactgcttaactttttctctttgtaaccctgttgtgcattaggtttgatttttttctgctttgatgagcattatgtggaatcatctctcaatttctacctgcctgcatctaatactaaggaaacgagtcctggcaggttttgtagagtcataaactgcatggtcagaggaattgattgaagccaattgggc

SEQ ID NO: 67813 - DNA, 1564 bp, Homo sapiens
agaaaatttcaattttgttacaattcaaaagcaacatgacttccatacaaatgcaaaaataacatgtttctatacaagctagccaaaagcaaaatgaagagaacaggacaggaaaataaagccacatattaggatgtaaaaagtatatgtgacatacagaaaattaccacggaaaatcatactagaaatccacatcggggcactgaagagccagattgatgccaamaatttggaagaccaacttaagtctacctagaattcagaagaaaagaacaaagaaacaaaaatagggaaaacacggtggatacagagaacagaaaataaagagcttgcagggatgacttgttattcttaaaaggagaacccaaacaattcaagagatgttataagagaaaatgttcttgatctgaaggtagtaattggttttagaaatgccctacaggaggcaaacacacccagggacttggcctaatttggcctctggcaatgtctcaagagcagaaacccaggggtctaatcaactgggtctagaaacataaccttggtacatcctttgtgtccttcagacaggcagaactgtctgtcccatatggaatacttgtctaaatcgctcatccaacttatgctccttgtttccaacataccttacacttctgagttctcatcacaatcagcgttaactcctgatttatttaagaaattgttctattctattactcacactagattataagctccatgaatgaagagcctgtttaccactccatcaccagataatattgaagtttagggcaaaaacttaaaacaaaagaaatttgttttatattgataaaggtaaaataccataaggtattacttgacataaaatgtaatgggctgaataacatgacatgatttatgtgacacaaatgtaaggcccttccactataggccaaacatctataacaaagggacacagaaaaaggtaacacttacaagaagaaagggtgagcaatgtcatgtcaggcaactgcaagcagaagaaagcagggtgtagtaggccacctggaggatttgggagtaggttaccactgcatgggagtggttagtttggaagtgtccgtcccgagggagaatgtatttgtgtttctcttcctatctaactagaagcaaggaaacttcaggatggcttcagtgacaactcttggcaactcaataaaagagctggctcttttcctggacataaggaccatgacagtcctgagtctcaggcagaagagatcattcatcagagcctgtggtttggttaaagattctatagcacctacatgaaatcacttgttttattttctctttttcttctgtccctgttatttccttttgtttttaatacagactgcttaactttttctctttgtaaccctgttgtgcattaggtttgatttttttctgctttgatgagcattatgtggaatcatctctcaatttctacctgcctgcatctaatactaaggaaacgagtcctggcaggttttgtagagtcataaactgcatggtcagaggaattgattgaagccaattgggc

SEQ ID NO: 67814 - DNA, 2556 bp, Homo sapiens
acttaggacttccttcctagcctacttatttttaaaccaccatttctgaaaaagcattgattaaatatattcctaatgatcctgaacaactgttgttttattttttgagacaatagtgtcttcttctgtcacccaggatggcatgtgatggtatgatcatagctcactgcagcatccaactcctgggctcaagcaatcctctgaagcagctggaactgcaagcacaagtcatcattcctgactaatttttaaatwtttttttgtagagataggatttcactatgttgtccaggcttgtgttgtaagcctcttgcctctgtctccctagcagctaggactacaggctatgatgctcagctataactgtaattttaaaactagtatcaaaactcaaaatgaaatttggtaatcaaaaatagttatatggcatgtacaaagcatgtggtattgagaaacaggtgtgatattttggagttttttgcaaggtatggaagcatatttctaataaaagccctccagattctcctctatgtccaccctcagctaaatgcctgcccccaaacctcaagaaaaatctcccagatcttcttcctgtaggatccccctaacacaatacacttgatttcaatttcatcccatacataacaaagtgaaggtttcctgaagctgtttttcactctaggctcacagacacaagaaatccactcctttcactcctgtccccagctggaatccatgtgcttggatttgagctggccttcctaagaccttttagttgctatatccctgaaaatatggtctgtattgttaggtcccctaaattaaaaattgtcaatctgttctgagcaaggaaagagtattcaaaggccctcagcagataaaaacacacacacacacacgcacagtaaagataaatgcccacatgattgaagaatcataatatcttcccactcttggtttttctcctatcttgacagcaaaatgattatctcactttaatttgcattatttgttgttttgttgtctatttttctctactcacgtcttctggttgactttggtatttgtgattttcttgcaatgatctgtatcagtatatgtgtgtgtgtatacatatatatctttacttattatttactctcgtaaagttgtgtgtatgtgtatcttattgtgtttctaagtttttctccctgtatcgtgatactgtattattccctttttcaatggatttgcagcattgaggtgaaatttgccaggaaatacatttttattcacgtagaactattaaaaggaaagtcattttaatgcattggactattgtgtacctacgaataataagactattgagaatctagaactaatttgccaggatacactatttggcgagataaggcatctagaaaaatgaaagaaatagaattaacaaatattaattccaattaactaatattaagacaagtgaggttctagaactaatttgctatgatacactatttggccagataaagcatctagagaaactgaagaaatagaattaacaaatatatattgagggcccaaaaaataatcatgcaagaagaaacacaaaatcaggtcacaaagtactaaaggttaatggacatttatgtagatgtagcttgcaagtggatcttaaaatagattcatctttcccaagagtagtttgataatttttacagtctggaccagcgaatctcgagtttggatgactacgccccccagaagacatctgacaatgtctgaagatattttttattgccaaaaaatttttttgagtggtcacatagctaccagcatctagtatgtagaggctagagaagctgcaatgccagggcggcccacacccaaacaaaacaatatttaacctaaaaatttaataatgttaaggttgagaaaccctttttagattgacatatatatactaagaacaaatgtgttactgatggctaaagatgaaatattatttgatatagcacacttaatatatgcacaggacaatgtttctgtttttctcacaatcccaaacgtttctttgatcattttaagaagcacttagtgaaagaattctaataatggacaaactcagatattcagatttaataggttttttaagtatcccatagattggtctcctttcttagccattctctgcaatgcaagcccaactccttgacttccctagatgcaatcagctcatctatccttcgtctaactctccatttctagcccttactttgaatccaaatgtccataaggtgaaatctcaggaaacacttttattaaggtcagattaatagcaacaaatagacaagatcatgggaggtggtaattaagctaggagatggctttctagctttgggaagagaggaaaagcagagacagaagaagaaagatatgtggggagatcatgaaaatcccaccctgagcagagggctcaggcagagaaagggggtgagaaaaacccacaggctggaagttctgggctgtacagtgtcttgaatgagagtagcaaaggagagttctgagttcaaagatgca

SEQ ID NO: 67815 - DNA, 2556 bp, Homo sapiens
acttaggacttccttcctagcctacttatttttaaaccaccatttctgaaaaagcattgattaaatatattcctaatgatcctgaacaactgttgttttattttttgagacaatagtgtcttcttctgtcacccaggatggcatgtgatggtatgatcatagctcactgcagcatccaactcctgggctcaagcaatcctctgaagcagctggaactgcaagcacaagtcatcattcctgactaatttttaaatttttttttgtagagataggatttcactatgttgtccaggcttgtgttgtaagcctcttgcctctgtctccctagyagctaggactacaggctatgatgctcagctataactgtaattttaaaactagtatcaaaactcaaaatgaaatttggtaatcaaaaatagttatatggcatgtacaaagcatgtggtattgagaaacaggtgtgatattttggagttttttgcaaggtatggaagcatatttctaataaaagccctccagattctcctctatgtccaccctcagctaaatgcctgcccccaaacctcaagaaaaatctcccagatcttcttcctgtaggatccccctaacacaatacacttgatttcaatttcatcccatacataacaaagtgaaggtttcctgaagctgtttttcactctaggctcacagacacaagaaatccactcctttcactcctgtccccagctggaatccatgtgcttggatttgagctggccttcctaagaccttttagttgctatatccctgaaaatatggtctgtattgttaggtcccctaaattaaaaattgtcaatctgttctgagcaaggaaagagtattcaaaggccctcagcagataaaaacacacacacacacacgcacagtaaagataaatgcccacatgattgaagaatcataatatcttcccactcttggtttttctcctatcttgacagcaaaatgattatctcactttaatttgcattatttgttgttttgttgtctatttttctctactcacgtcttctggttgactttggtatttgtgattttcttgcaatgatctgtatcagtatatgtgtgtgtgtatacatatatatctttacttattatttactctcgtaaagttgtgtgtatgtgtatcttattgtgtttctaagtttttctccctgtatcgtgatactgtattattccctttttcaatggatttgcagcattgaggtgaaatttgccaggaaatacatttttattcacgtagaactattaaaaggaaagtcattttaatgcattggactattgtgtacctacgaataataagactattgagaatctagaactaatttgccaggatacactatttggcgagataaggcatctagaaaaatgaaagaaatagaattaacaaatattaattccaattaactaatattaagacaagtgaggttctagaactaatttgctatgatacactatttggccagataaagcatctagagaaactgaagaaatagaattaacaaatatatattgagggcccaaaaaataatcatgcaagaagaaacacaaaatcaggtcacaaagtactaaaggttaatggacatttatgtagatgtagcttgcaagtggatcttaaaatagattcatctttcccaagagtagtttgataatttttacagtctggaccagcgaatctcgagtttggatgactacgccccccagaagacatctgacaatgtctgaagatattttttattgccaaaaaatttttttgagtggtcacatagctaccagcatctagtatgtagaggctagagaagctgcaatgccagggcggcccacacccaaacaaaacaatatttaacctaaaaatttaataatgttaaggttgagaaaccctttttagattgacatatatatactaagaacaaatgtgttactgatggctaaagatgaaatattatttgatatagcacacttaatatatgcacaggacaatgtttctgtttttctcacaatcccaaacgtttctttgatcattttaagaagcacttagtgaaagaattctaataatggacaaactcagatattcagatttaataggttttttaagtatcccatagattggtctcctttcttagccattctctgcaatgcaagcccaactccttgacttccctagatgcaatcagctcatctatccttcgtctaactctccatttctagcccttactttgaatccaaatgtccataaggtgaaatctcaggaaacacttttattaaggtcagattaatagcaacaaatagacaagatcatgggaggtggtaattaagctaggagatggctttctagctttgggaagagaggaaaagcagagacagaagaagaaagatatgtggggagatcatgaaaatcccaccctgagcagagggctcaggcagagaaagggggtgagaaaaacccacaggctggaagttctgggctgtacagtgtcttgaatgagagtagcaaaggagagttctgagttcaaagatgca

SEQ ID NO: 67816 - DNA, 2556 bp, Homo sapiens
acttaggacttccttcctagcctacttatttttaaaccaccatttctgaaaaagcattgattaaatatattcctaatgatcctgaacaactgttgttttattttttgagacaatagtgtcttcttctgtcacccaggatggcatgtgatggtatgatcatagctcactgcagcatccaactcctgggctcaagcaatcctctgaagcagctggaactgcaagcacaagtcatcattcctgactaatttttaaatttttttttgtagagataggatttcactatgttgtccaggcttgtgttgtaagcctcttgcctctgtctccctagcagctaggactacaggctatgatgctcagctataactgtaattttaaaactagtatcaaaactcaaaatgaaatttggtaatcaaaaatagttatatggcatgtacaaagcatgtggtattgagaaacaggtgtgatattttggagttttttgcaaggtatggaagcatatttctaataaaagccctccagattctcctcwatgtccaccctcagctaaatgcctgcccccaaacctcaagaaaaatctcccagatcttcttcctgtaggatccccctaacacaatacacttgatttcaatttcatcccatacataacaaagtgaaggtttcctgaagctgtttttcactctaggctcacagacacaagaaatccactcctttcactcctgtccccagctggaatccatgtgcttggatttgagctggccttcctaagaccttttagttgctatatccctgaaaatatggtctgtattgttaggtcccctaaattaaaaattgtcaatctgttctgagcaaggaaagagtattcaaaggccctcagcagataaaaacacacacacacacacgcacagtaaagataaatgcccacatgattgaagaatcataatatcttcccactcttggtttttctcctatcttgacagcaaaatgattatctcactttaatttgcattatttgttgttttgttgtctatttttctctactcacgtcttctggttgactttggtatttgtgattttcttgcaatgatctgtatcagtatatgtgtgtgtgtatacatatatatctttacttattatttactctcgtaaagttgtgtgtatgtgtatcttattgtgtttctaagtttttctccctgtatcgtgatactgtattattccctttttcaatggatttgcagcattgaggtgaaatttgccaggaaatacatttttattcacgtagaactattaaaaggaaagtcattttaatgcattggactattgtgtacctacgaataataagactattgagaatctagaactaatttgccaggatacactatttggcgagataaggcatctagaaaaatgaaagaaatagaattaacaaatattaattccaattaactaatattaagacaagtgaggttctagaactaatttgctatgatacactatttggccagataaagcatctagagaaactgaagaaatagaattaacaaatatatattgagggcccaaaaaataatcatgcaagaagaaacacaaaatcaggtcacaaagtactaaaggttaatggacatttatgtagatgtagcttgcaagtggatcttaaaatagattcatctttcccaagagtagtttgataatttttacagtctggaccagcgaatctcgagtttggatgactacgccccccagaagacatctgacaatgtctgaagatattttttattgccaaaaaatttttttgagtggtcacatagctaccagcatctagtatgtagaggctagagaagctgcaatgccagggcggcccacacccaaacaaaacaatatttaacctaaaaatttaataatgttaaggttgagaaaccctttttagattgacatatatatactaagaacaaatgtgttactgatggctaaagatgaaatattatttgatatagcacacttaatatatgcacaggacaatgtttctgtttttctcacaatcccaaacgtttctttgatcattttaagaagcacttagtgaaagaattctaataatggacaaactcagatattcagatttaataggttttttaagtatcccatagattggtctcctttcttagccattctctgcaatgcaagcccaactccttgacttccctagatgcaatcagctcatctatccttcgtctaactctccatttctagcccttactttgaatccaaatgtccataaggtgaaatctcaggaaacacttttattaaggtcagattaatagcaacaaatagacaagatcatgggaggtggtaattaagctaggagatggctttctagctttgggaagagaggaaaagcagagacagaagaagaaagatatgtggggagatcatgaaaatcccaccctgagcagagggctcaggcagagaaagggggtgagaaaaacccacaggctggaagttctgggctgtacagtgtcttgaatgagagtagcaaaggagagttctgagttcaaagatgca

SEQ ID NO: 67817 - DNA, 953 bp, Homo sapiens
atgcatttcatggtcagcctctgacaattactgttgtgctatatcccactctgaccctcctcccatagttccaagtactcactatattcaaaggtaaattaccagcatatagtctatgaagactcaccatgtgtaaaagggaccattgcagcataaataccaaggtattaaaataattagaatagaaagcagaatagaaagcagttgaaaaatattcaccagaaaaattttrtcatggagaaaatgaaattaattcccaaatgtattactaaattaagcaatagacattaacaaaacaataacttctttgaaataatgtctcaaagcagacatttgggaaacagaaattcaggaagaaatatagcaaggaaatagaaggaaatgactgttaagcagataaaacaagaaaattagtatattagtttgttctcatgctgctataaagaactacccaagactgggtaatttataaaggaaagaggtttaattgactcacagttctgcattgcttgggaggcctcaggaaacttacaatcatggcagaagaggaaacaaccatgtccttcttcacatggcagcaggagagagaagtgcagagcgaagcagggaaaagccccttataaaaccatcagatcttgtgagaactcactcagtagcacaagcacaacatgggggaaactgcccccatgatctaaccacctcccatgaggattacaattcaagttgagattttagttgaggacacaggcaaaccatattaagtataggaaagaatagtagaaaagaatgttacatccaaagttacattggaaataacctaaaggagaatagaaacggaaaatatcaaaaagcatgtgaacagtgaaaaaatgaaacaaaataaattaacagtgagttaaaacaattgtcaggatagatgaaaataatctgttagaaaatccaaacagaaaaaa

SEQ ID NO: 67818 - DNA, 632 bp, Homo sapiens
acaataagtgctacaaaaattcagaagtgagagctatccctaaggaatggagaactgtaaaaagacacacagcagagatggaacttagtacaaagggagacagagcctttttgacaggcactgtttggtcagtggagaggggatggatccatagtgtttgagagtaagcaaagtaatgagtaaagtaattggtttggaacacaggattcatttacagaaggaagagaagataaggttgaagaggtacgtaggagacaattgcaggttcccctgcagctgcggagtttggacaacagggagacatttattcaacatatacatgtgtgcctgctacttgagagatgttgcagtgggtactagctagacatctctgaaaaagatattygagtttgaagagagtgtgaggaagatgaacttcactgggaaatacagaatagattaccgtgaagataagccagtttaagtagtattgaaacagcccaggttaaaaaaaaaaaaaaaaaaaaaaaaaaaagggctccacatgtaccagtggacatgaactgaagccaaagcacataagaggtttatgggaagaaattagactgcatggctgacaatgtgggaagagaaacaaagttcagcaggtaagc

SEQ ID NO: 67819 - DNA, 686 bp, Homo sapiens
agaggttctccatgaatcatctcattagcataaactcaggtgtttatgctaataaaccataaataacaaacactcctatcacgtgggaaatccaagggtttggaggcttccacccaaggaccaaagacaaaaaccagccaaattctttttttttttttttttttttttttttgagacggagtctcgctctgtcgcccaggctggagtgcagtggcgcgatctcggctcactgcaagctccgcctcccaggttcacgccattctcctgcctcagcctcccgagtagctgggactacaggcgcccgctaccacgccyggctaattttttgtatttttagtagagacggggtttcaccgtgttagccaggatggtctcgatctcctgacctcgtgatcctcccgcctcggcctcccaaagtgctgggattacaggcgtgagccaccgcgcccggccccagccaaattctttactacacaacagaatgaatttgaggtaactattagctctttcaggtggaaactccagcaggcagatgaaactccaaaaaaaaaactgaagagagagagaaatgaagactagagatgtggcttcagccacaaagtaaaaggtcacatgatatataattcatttttcatagctactcagcaagtgctgcagttgagggcagagtccttgacaagacagta

SEQ ID NO: 67820 - DNA, 686 bp, Homo sapiens
agaggttctccatgaatcatctcattagcataaactcaggtgtttatgctaataaaccataaataacaaacactcctatcacgtgggaaatccaagggtttggaggcttccacccaaggaccaaagacaaaaaccagccaaattctttttttttttttttttttttttttttgagacggagtctcgctctgtcgcccaggctggagtgcagtggcgcgatctcggctcactgcaagctccgcctcccaggttcacgccattctcctgcctcagcctcccgagtagctgggactacaggcgcccgctaccacgcccggctaattttttgtatttttagtagagacggggtttcaccgtgttagccaggatggtctcgatctyctgacctcgtgatcctcccgcctcggcctcccaaagtgctgggattacaggcgtgagccaccgcgcccggccccagccaaattctttactacacaacagaatgaatttgaggtaactattagctctttcaggtggaaactccagcaggcagatgaaactccaaaaaaaaaactgaagagagagagaaatgaagactagagatgtggcttcagccacaaagtaaaaggtcacatgatatataattcatttttcatagctactcagcaagtgctgcagttgagggcagagtccttgacaagacagta

SEQ ID NO: 67821 - DNA, 1037 bp, Homo sapiens
attggcttcaggatcaccttacgtcccctttctggtggagatcagaggttgctgaccacctacttcaggtcctctctgtggggtgagatggcaggagaaaagctggtgcctctgagcaccaattatgtgaaggcactatgatggattttacatgtgtaaaagattttacatgatcttaatccacatgtaagtcccatctacacttaataattttgaacttacagcctagaaaccgaaatatgacaaagttaagtgacttttgtgacgagttaagtgaggagtcagcatttgagctgagggctgtctgattgcaaagccatctttctttccctacaccttgctacctcttgataaggacactgtttctccaaagaagagaaacaatttccccaagttcacacagatcttcgatggatactcaaaggggctcacattacaaattgtctttcccattggctcaggagagattctgagaacttggagagggccggtgagcaagatggttaaataaatgggccaccacctccatgatgccattctgtggggctactttttactccagaatgcagtaccaacacaagcactgcctgagaactccccaccctattgtcatccctgatagaggagttcaccctaaagcctttcccccccgtcatagacagttaaaaagctatcagcctttcctcacagtcatgtacagtctcacccacacaagtgagttgtgcacaattttggagacattctgtgaccccaacttaaaacacttctcccacacacaaagttaacacttcagttaccaggtgatgattgagcagagattcttttacawcccagagcagtactaggactttgttagacaccctggagtgtatttacatcctaaggagggagaggggaggtggggatggtagtagaggacctctgtgtagagattccttttagcaaagagtctcagccatggggaagaaactcctgggagaaagggctcacccggcctggcaggggactgactttggagggaacatcaactgtgccag

SEQ ID NO: 67822 - DNA, 1255 bp, Homo sapiens
ctcaccttcctctcctcacaggttctcctctccatccagccctactcgactgccttggcctcacctcctttccccacttcttcttacttttatctgtctgcctctccctgtgagcaccagtctcctctctgaaccaccatggatgctttggtgcattcctaatgatcaaggctccttcctgaggctaatgagatagggatatgaaagttcatgctaaactggcrctgtttctcctgctgttgctgcccagggctgggtagtctcataggagttcttctccacagaaagctcagaccctatgggtcacaccctcaggatacaaatgaatcagatattatctctccatgggaagtgcaaggaaaataaacaatcttaaatgtaggcattgagtggaagtggtcaataaattgcagctgaaaattcagaaacatcagcaagtccttatacaggttttcagacagaacttgtgataccacctgagtgatctgaaaacctcaagacaagaatttcttttagagtaactcaggttgtcaaaagctgacacaaatcctatctaggatccgccttcatcctcagacgcaagtggtttccacaaataaacctctaagaatttttatagttaaaaataactgaattacaaggaaacaaaacactccgagggtgaatcagaagaagaaactgcaagcacagaactccctgaatctcagcttcttcaccaataaaacggggataacaatactcaccctaccaaggtggtgtgtggattaagagatcaggtgcatgtgatgtatttagcacaaggcctggtgtgtacagcagatgcacaatgagagctagcagctgtggttattttctccatttttttttttttttttttactattatcattcaatgaatgttggcttctttctcctatattttcactcgtgcacaggcaaaagaaagtcaatgtaaatggaaaaactgcaggatttggtgtcaggaggtttaaatttgaatccaagtctgttaaccttctagggtctgcagcctcaactgtaaattgggacagaggtacttgcacctgctcttactgggcaaggttgttttgaggatgaaatggagggagggctgtggaagcactctgcaaactataaagtgccatgcaaatgtcacctgatcatattctctcttcatttcttccgttgtctcccattttgtgtctctcttgaaacatgcggtatagggagttttcaaagatgaagtgcggacatga

SEQ ID NO: 67823 - DNA, 691 bp, Homo sapiens
tgtgtgaacttgagttagaccctgcacttctctgggtctcaatttcttcatctgtgaaataaggcctccatcattaggtgacttccacaggttctaagacattctaggatagagggcacatccctacttgggcctaggaggggttgagttcccctcttcagcatgagaaggaggtgaatagtgatgctgctgctgcaggaacccacctatcaagctgtgactgtgacacttggattccccagctctccaggggctttcaggcattgcttaagttactcctcgcaactttggtaccttttctgccttctcccttcttccccaactggcgacctctcatctgtccttggaaacttggtccagctgttgtctcttcctgcagcctactcaaarcacctagcttcctgccagtcttgtccagatacctcgtttatttgttcccggtacacgtatattctagccctgaaaacgctctgtgggaatgttgtgttatatatctccccaacaacacctgccttcctagcctgagttgccccggggtggtagtaacagcagccaaacagcctttctctggcttaaagtggaagctgcaggctcacagcagcatcctgccctgtcctggtgcaagtgctttctgatttcagactccagccatgagcaaacctctctcttatgtcccaggcagaagcacagg

SEQ ID NO: 67824 - DNA, 900 bp, Homo sapiens
cctgtcttagaaaacggacatcacaggcgctttgctctttcaggaagtgtaatgcttgggatggtcaattttgagtagcgaaaaagcaaatggtctaggccaaaatccgagagatcaccacgatttcaacgatttgggggttatcttccctgtcttttcctctttgtctgtgtggtcctcaaacaaagtgggttggaaaagttcaaactcagttcacagaagagaacattctgtactggcacaacaggctgggctgctctgtgtaaacaagatcaacagcatgatctcagctgccgcggcggaagcagcaggcaccacgccgccgacccacagcccggcgtttgaatgcagggctgtcaaagacgatctctggacagtacactgmgaaggtggggacccacacatacacacacacacacgcacacggtacgtcagaaatgactttctgccccttgtagttcaattgttacttcctctccccagagggtcaagaaagttgtttagatttttctctttggagagtaattacagctgcaacatttccaagggaacaaccccctgcgtgtgcacttcagctctggcattgattggggcttttcaatctgtttggatgttactgtaatcagatgacagcagtaatactaagtacattgctgcccgggcttagggagggaggcagtgagggaggaaagaggggatagaggatcaagttcattgttaccctaacccccactcccagcttttctattttcttctggatccaaagctttttcctcctttgtctagaatttaaagtgcaattcaacacatacttatcgagtgtttattttgtgccagggcctgtccctagaataatactagtagcaaggttgttctagtgaagtgaaatctggccctcac

SEQ ID NO: 67825 - DNA, 1543 bp, Homo sapiens
ttctccccatggatgtcccatagacccctcaaattcaacctgtctgaaacccaactcattattttccctttataaaaagagaagtaaaagaccctggtcctgtattccttctcttggctcctctctcctagcagtcactgtattaggctgttcttgcactgctataaagaaatacctgagactgggcaatttataaagataaaaggtttaactggctcacagttcttcaggctgtacaggaaacatgatgctggcatctgctcggcttctgggaaagcctcaggaagcttaaacaatcatggtggaaggcaaaagggaagcaggcacatcacacggccagagcgggtgccagagagagggaagaggtgccacacacttttaaatgaccagatctcgtgaggactcactcattattgtgaagaccgtaccaagaggatcgtactaaaccattcctgagaaatccgaccccatgatccaattgcctcccaccaggacccacctccaacactggggattacatttcgacatgagatttgggcagatacggtttggatatccaaaccatatccagtcacccaggtgagaaaattcagttatggtcaagttttctttctccctctgtcattgctgagttgagtcatttatctgtcccagtgcctcatctgtccagtctacttttccctcccactcgtactatttcagatgatttgtatatcttcttagtggtctccctgtttccagcctctcacctttcccatggatccttcccatggccatcagctacctcaccaaaacagactgaatcgtgtcattctctcatatcattctggtcttaataacatgcaataactcccaagaataaccaaaataaataaaataygtaagcatggggatttaactcccaagtcaggaatgacaaatgattccatcccaagtgccaatcccaactgattcattgagaactatgttgagaagattctgaggcttattcaaattcaagaagaaaggttagcaaggggcccaacagggggacgtgggtatacctgatataggctcaatctatttttttttgtgggtctccccacataactctaccaaccattcagccacaagaactacttatcattacccaaatataccatgcaattctattaacaacaaagactataattcctttctttactgttagcttactcttgcctcaacttcgtatcagaatcctcatcctgttcctctaccatcagagtttattatgtgtatctctactgagcatgtatcaacctcctttgtattataaatattatattttttattttttgtagagatgggggtctcactatgttgccccaggctggtctggaactcctaggctcaagtgattctcccatctcagcctcctaaagtgctgggattacagatgtgagccaccatgcccagatgtcatttgcattttaaatactatgttatggatcatgtgtgtgagtatgtatttctgcctctcccactggacaataaagtctttgaaggcagtcaacatatctta

SEQ ID NO: 67826 - DNA, 551 bp, Homo sapiens
ccccatgttcactgcagaattatttacaatagccaagatatggaaacaacctaagtgtcaatcagtggacaaatggataaagaaactgtggtgtgtatatacaatggaatattattcagccctaaaaaagagcaagatcttgccatttgccacaacatggatgagcgtggaggatattayactaagtgaaataagccagacacagaaatacaaatactgcatgatctcatatgtggaatatgacctcacatgtagaatatgctgtcacatgtggaatctaaaaacaaattcactgttgggccctgtgactcatgcctgtaatcccagcactttgggtggctgaggtgggagaatcacttgagaccagcctgggtaacatagtgagatcctatctctacaaaacaaatttaaaagatagccaggcatgatggcacccacctgtagtcccaactactgaggaggctgaggtgggaggatagcttgagtccaggaggtcgaggctgctgtgagtcatgatcatgtcactacattccagcctgggtgacaaagtg

SEQ ID NO: 67827 - DNA, 738 bp, Homo sapiens
ggatccattgcccaaaaggagagccaamaatcctccgtgactttagaatattgaatatacaattttgtccgaaatccatttgaaacacttgctttatgtgttgacttattaacctctctgcctctgggacacattatttttcaagctggtgtttaaaaatattatttaattgtgggtaagtaatctaggttggaaaggaagtctttccaagttaaggataaataacagttgcctagtgatgtttctgtggaagaacaaggctttctggtgtgtttggaattgtctctactaagggcactctttattttaagcaggcttcaagtggaaagctaagcgcaaagcctaactaatgacgcccttcacaccaactattgtggcaggataatttgtacaaggcggatgaattcatttatagaatgctgaacaatttatatattaaaaagtgtctagattaagtgatttatataatatgtatttaaataaaaatattcaacagtttcaatgaaaaatagaattttctgtgacaaatatattttataagctgtgcagtcctcacatcatttttgatttcctgaaagtaaaaatgtgtagataatagttgaataacttggagaaattcttgttcttcagcaaacattaaggagaacttcaattaaatttaagtaagttctctacccttccaggcttgtgctctttgtttactgtgtttttgaggccacaagcatgtgagcactacaa

SEQ ID NO: 67828 - DNA, 725 bp, Homo sapiens
aaagaaactttaaatcaaccatgataaatgctgaaggtaaaatattgagcaataatttggtgatagcttttctccaaggagttaaactgagtagtgttttgatgatcgaaattggtaacgggtaaagcttagaaaacccaaaagaatgtctaacaaattttttctctcaaaagtgaattatctcaaagactaatttgatcagaattgaatagcagttgattaacaactgaacccttgaaagtgctttgcattgttattagagtgagwttgttgttattggaatgagatccacatgctttaggtatcagacttgtttgtgacaatattggcatgctctttaaaaaaggaaagggccttgcattcttgtcctcctctcatggacaaggttttagggtagctatgggccaaaacattccattgtcttctaaatgactagagccaggctgagccccgagatagccacacaattgaaagaaggttttaagttatcactgaacattattttgtctagaaatgtttcatttttcctctttttttctctgtgcccctcctgtatattttcttcctgctatcaactgttttcttacttcccacaggtctccctttcttcagttatgtattagcagaaagctgaagaattggaactcttacagacacgtagcctatttctaacgcttggcatgaaagaaatggactgaactgcctttggaactggcagagcaagc

SEQ ID NO: 67829 - DNA, 725 bp, Homo sapiens
aaagaaactttaaatcaaccatgataaatgctgaaggtaaaatattgagcaataatttggtgatagcttttctccaaggagttaaactgagtagtgttttgatgatcgaaattggtaacgggtaaagcttagaaaacccaaaagaatgtctaacaaattttttctctcaaaagtgaattatctcaaagactaatttgatcagaattgaatagcagttgattaacaactgaacccttgaaagtgctttgcattgttattagagtgagtttgttgttattggaatgagatccacatgctttaggtatcagacttgtttgtgacaatattggcatgctctttaaaaaaggaaagggccttgcattcttgtcctcctctcatggacaaggttttagggtagctatgggccaaaacattccattgtcttctaaatgactagagccaggctgagccccgagatagccacacaattgaaagaaggttttaagttatcactgaacattattttgtctagaaatgtttcatttttcctctttttttctctgtgcccctcctgtatattttcttcctgctatcaactgttttcttacttcccacaggtctccctttcttcagttatgtattagcagaaagctgaagaattggaactcttacagacaygtagcctatttctaacgcttggcatgaaagaaatggactgaactgcctttggaactggcagagcaagc

SEQ ID NO: 67830 - DNA, 1133 bp, Homo sapiens
tgcatcataaagaaaatgaaaagtcaagccattagggaaagatagttttaacacatataactcacaaagggctggtatccataatatatagagaattgctttaaaaaaaataaagacaggccgggcacggtggctcacacctgtaatcccagcactttgggaggccgaggcgggaggatcatgaggtcaggagatcaataccatcctgactaacatggtgaaaccctgtctctatcaaaaatacaaataaattagctgggcgtggtggcaggcacctgtagtcccagctactcgggaggctgaggcaggagaatggttcgaacctgggaggcagagcttgcagtgagcccagatcgygccactgcactccagcctgggcgacagagcaagactccgcctcaaagataaatatataaatacattttatttatttatttatttatttattataaataaataaagacagacgaaacaatagaaaaatagagaaaagtatcctttcggctggagcagccatcttccagtaattcgccaaaatgatgaacgcaaaggaaaagaagaaaggcacctgatgtatgttctctaggccttttagaaaacatggagttgttcctttggccatgtatatgcgaatctataagaaaggtgatattgtagacatcaagagaatggatattgtttaaaaaggaatgcccacaggtgttaccacggcaaaactggaagagtctacaatgttacccaacatgctgttggcattgttgtaaacaaagaagggcaagattcttgccaagagaattaatgtgtgtattgagcacataagtgctctaagagctgagatagcttcccgaaacacgtgaaggaaaatgatcagaaaaagaagccagagagaaaggtacctgggttcaactgaagtgccagcctgcttcacccagagaagcaccctttgtgagacccaatgggaaggagcctgagctgctggaacctactccctataaagtcatggcataattggtgttaaaaaaaaaaaaaaaaaaaagacctctggactgtaaaaatgtttctcttcattgagaagaagtgtggtgtcctctctctcaaataaatatttaaagcaaattttaattgtgtcctaa

SEQ ID NO: 67831 - DNA, 1220 bp, Homo sapiens
aaaaagctagaagatttcaagccatagaagactatacagtgactagcaagtttctttccctccctggtcccagttttttccagaggtgacaccattactcttttcttttgtagccttccagggatatccaggtatttataaccatgtatatatatatatatatatatatatatatatatgaaactcccttgcctcattttatgtacaaatggtagtatgttacatgctctgttgtgtacctagattttgtcatacagaatattccggcgaacattccataacaggacatccaggattccttttaatggcagcagcatattctactggatgcaaaggcctggaagccaacagccctgggctctggttctctgttcttgatttgttgctatttgtagtattcaactcattgcaactactattcatatccaccatctctcagttacacttgtacagtagtctcttaactggtcttattgcaactgctcctgtccttcttgaaaatattcatcacctagtagttggagtggtcataaaaaggtaaatcacatctgagcttgatagtcaagagttcctagatcacatttccaaactgttttagcatattgaacaatgttaaggatagtttttaagtctactttataaaaaattagttccaggtatttgtaatcacagatatttgtaatctgtaatttatgaaaaatattccaaattttaaaatgctatataagattctatttctggataagatgaatgtgacagttaattttatgtgtcaacttgactgggccaagattgggtgccagatatttggtcaaatattattctgggtgtgtctgtgagagtgtttttggatgtgataaacatttgaatcatggagtaagtaaagtggattgccctccctaatgtgagtggtcctcatccaatcagtttaaggcctgaatagaataaaaagattgaccctttgtcgaggaagagagaattcctgctgcccaacttatttgagctgggacatargtctttcctggccttcagactcaaactgaaacatcagctcttcttgcatcttgagcctgccggttttcagactggaattacctgtcaactctcctggtctccagctcctgacagcagatcttgggactcctcagcctttatgatcatgtaagatatagatatataactatagatatagatataattccttagtttatatatctgta

SEQ ID NO: 67832 - DNA, 1301 bp, Homo sapiens
gcattaaatcatatacaaacccaataaaattgtagtattctttcaaattcattatctccttcagatgaaacaaagcttcctatgccaaattccagcttaggaaggatttgtcgcaaaataaaagtacactgtcgattccaatgtgttgggtgtttaggtcgccattccatcactttactcttcagagtcctttcgatcctaaggtaagaatccaaaggtaattttatgacaagttataactcatttggtaaatataataagagttttgtgacttttytttttttttgagacgaagtctcgctcttgtcccccaggctggagtgcaatggtgagatcttggctcactgaaacctctgcctcccgggttcaagtgattctcctgcctcagcctcccgattagctgggattacaggcacctgccaccacacgtggctaatttttgtattttcagtagagacggggtttcaccatgttgaccaggctggtctcaaactcctgacctcaggtgatccgccctcctcggtctcccaaagtgctgggattacaggtgtaagccaccgtgcccagcctgtgatttttattcaagtatgagaatgatactttttggacttaggaggaaaccagagctctatagctagaggtgtctgccaccattcacattaatgaagctggggagaggcaggctcttacttggcttgggaagacaagaagcctcttggggatagccagcaattaactctccaaggcacatctcttttccagttacccgtatgtaggcagctgcctactgggtgtgatttgacaacacctaccatccgattactgggttgacattcctactcttcaagaccctcccttgacttggacattttgtttccaagaaactgcccttatgaaaatccacgcatctggtctgggatgatgttagcagggatgggattattacatgagttaatttagcaagcagagttgggaggaaacaaggcattgaacaggtaagtttggtgatcagcttccccctatttgaatgtaagctccataagggcaggcattgttacccatatatatccagcccctagaacagtgcctggggatgaatatgccagggaggagagagaggggacacagtgtgggttggttgatggggctctcctgaaaagcctctctgtgcaggatgattgtgtggcattgattctctaactgcagtgtatgttatagaggaaggtgctggaggtctcttcttagctgagtttatagtgcaactaagtagtttggagtttgtagagggtctcaatagcggc

SEQ ID NO: 67833 - DNA, 504 bp, Homo sapiens
attcagttcaaagacttctcagtacagcataattgattttgactttcttagatcataacatatgatacttttattctctggtgtttttatgctaagctctaagaaatgttgatgaaaatacctgacctacttctctgggcaggtattgtggctatcaggctgtcaagtcaatctcaacttccactcgaccttcctcctgtggtcatggccttagcaccttgggtggtggatcctccacaatgtgtccatttctaagtagctccttaatctagtcatatatatggctttctttccatatcaaagctataaccaagacctgctttgatggagacagctcttgagaagactggcatagattattcattgagtagcttcagggttggccactctatccatagtctctgtgactagtgctcaacctgaggagttcattcctttcatattctaaggaatgcacaacctgtgcaaccacaygtggcacctgaatgcagattgcctgtgatg

SEQ ID NO: 67834 - DNA, 650 bp, Homo sapiens
tttacatttgaaaattatgaatatgggaaagaggattcattttttttttctgggtaaaagaagctccgtcttgggttgataggtgcagcaaaccaccatggcacacgtatacctatataacaaacctgcacgttcggcacatgtatcccagaacttaaagtaaaataaaacaaaaaagaaactccatctcgagaatggctcctctgaggagactgaagcagccctggtactttgtgtgctgagaaataacctggagttgagaaatgtaccagactccagaagcacccgcctcaatttggccaggaaagtgcagtcactggatgtctgagatattacgcagtgacatgaatgtgaggcacgagtgctacatggaaattatttcttccttagggttggatgttgaatattctcctgggcctctgggaacttgtgctcctatggggtgcatgtggcagcacstggagccccacaaaaccccactggatggaggtagcatcacgaccagtaatccttgcccgagggcatttcagcagcatgattcctcctcacaaactgcttcaatacattttattttaagatgatttagttgttaagaattgagtgcatgtctctctacgttgtcccgatggagttaagcctgggtggatgcc

SEQ ID NO: 67835 - DNA, 650 bp, Homo sapiens
tttacatttgaaaattatgaatatgggaaagaggattcattttttttttctgggtaaaagaagctccgtcttgggttgataggtgcagcaaaccaccatggcacacgtatacctatataacaaacctgcacgttcggcacatgtatcccagaacttaaagtaaaataaaacaaaaaagaaactccatctcgagaatggctcctctgaggagactgaagcagccctggtactttgtgtgctgagaaataacctggagttgagaaatgtaccagactccagaagcacccgcctcaatttggccaggaaagtgcagtcactggatgtctgagatattacgcagtgacatgaatgtgaggcacgagtgctacatggaaattatttcttccttagggttggatgttgaatattctcctgggcctctgggaacttgtgctcctatggggtgcatgtggcagcacgtggagccccacaaaaccccactggatggaggtagcatcacgaccagtaatccttgcccgagggcatttcagcagcatgattcctcctcacaaactgcttcaatacattttattttaagatgatttagttgttaagaattgagtgcatgtctctctasgttgtcccgatggagttaagcctgggtggatgcc

SEQ ID NO: 67836 - DNA, 909 bp, Homo sapiens
taccagacttctgatctacagaactgtaagataataaacttgcatttattttaaatacgaaatttgtagtgatttgttacagcagccacaggaaaataacacagarccattaagacttaagagtaatgacaacaatgaaaacatcaactactctttcaagatgtctgatggttgaaaacataagattttgataactggaaatatgctaacaggaaaacctttggagtcattttctttggagcgggagttgggatggtttgctgcagacacccagatgtttgatgctatgtccttttatcttcacctgcatgaggccgcttgatatgtaagtaatgctatttactgcagggaatatcgtacaactccccagatcccacgtttgaaatttatttatttatatattgactttatgtcctagagcaattttagattcatagtcaaactgagcagacagtacaaggatatcccatatatcccattcccctccacaccacctcccccactgtcaatatcctgcaccagagggtacatttgctacagtggaacctatactgacacatcattatcatctgaagcccacagtttacattagggttcatttttggtgtaatacattttttaacctaaaaatagagaggtcccatcagcaacctttcgttgctcgatttccttcttcagtgatctcactgcagtcctcactacatagctcattggagtccacaccatggcttcgtacgagtgtgcacatgcagtcaaaggcacccttaatgcctgctgctctgcgtccttcgatgtctcctgctcagcagtccagctattacagtaagtgcttaatgtgtgctccagcattattgtggtatcatttggatgattgcatgctgggccgcacaagtcagaggcagcaaatgc

SEQ ID NO: 67837 - DNA, 678 bp, Homo sapiens
cgggaaggagccccctaagtaaaggcttcttcttcttcttctttttttttttttatcatggagtcttgctctgtcacccaggctggagtgctgtggcacgatctcagctcactgcaacctccgcctcctgggttcaagtgatgattctcctgcctcagcctcccaagtagatgggattatagacatgtaccaccacgcccagctaatttttgtatttttagtagatacagggtttcaccatgttggccaggttggtctccaactcctgacctcgtgatccacctgcctcggcctcccaaaktgctgggattaaaggtgtgagccaccgcacccgacctggcaaaggctcttgagaactgaaatgaagattctctagagcagctccttaaactttcatggcaaagaagtcatctactatttagttaagctgattcggattcagaatctagggtggggactggaattctgctttcctaatgagcccagagtgctactgctggtgcgggtcaccctttaaacagcagcagcagcggcggcggcggctgcagagaaggaaaccttattcttctgaatggttctctataaagcaagtccattgagaaaggaactggccataaagaagctaccagacacaagtgggccaaagtgctaagatgaccagtggagaggcagggagaa

SEQ ID NO: 67838 - DNA, 611 bp, Homo sapiens
tatcaggggctgaggttgaaagagtgcacgagtagccttgagttagctgaagtgtagagtaagccaaaattgtgagaaagtggaaactacsattgagcagaagattaagtgtagagaagttgtgttaagtcatggtggtgagaggagaagctaaagcacatacatcaagaataaccagagccagggttggccaagccactttaatggcagagcatgggattcaccgcccccaagtgccaaggtccctagagcctcactgcctccagctctagtctctgtgtggactaaccacacagcagtttcttatgagagaacttccttcttcattaccccttgcttcttgcaataaaccagcccttattatgtgacctggttatcatgggtcatgcttccttgtaactcaatgagcccacacctgctgctcccacctgtgcctgggtggtggagaaactgacaggcagcactgccaaggggccatgccactaacttgtagctgtcattccaccatggggctcagctcacttgccccacaatgcttgtttcaacatggactggctgcttagtcaaaaactccctctcccagaactggctctccaacaagaatggctaaa

SEQ ID NO: 67839 - DNA, 756 bp, Homo sapiens
tttccaccatcattcatatgtatgtgacacaccccaggccctacactaagtgctgcaggacactttacctacaagacacagtggctgccctttttcagagaccatgtagccagagacagaagttgggtatacataaaaatgacaaaggactttatggagcagtgatcatcaaggggcagaagaggaattcacagtcctggggaaggaaggcatagactgtaaagtaaggagagagaagaatgggttgtcagaggtcacagcttgtcctcagagcctaagacagcctttagaaccttttgattaggtctaccctatgtttaacttttaaatttgttttttagttcaacatctacaaattgtaagcatccacatttttaaaaatctagatttttaacctctattaaaaaattagaagcttgggcaatgtatggcatccttttctgcaagggcagctgttgggtggaattgagcagtagctgtcagccacctttaggtgcctgggtctctccagtctgttaagtgcaaatgctctattctctcagtactgtcacccattagttatctatctgttgttggcccttggaggcatttcaatagaaacccctggtgctaataataaagtaaagatactgggcaaaccttctccactcttggtcatacaacagtacttttaraaattagctagtcgtagtcgccctgttgggaaaagccacggaagcatttgaacaaatgatgaagtgtttgcctcagtaaatg

SEQ ID NO: 67840 - DNA, 517 bp, Homo sapiens
tgtataaaacataattatagcacaacagcttttttgaacttttctttgaagttgtgtcatctaatcaacccttatggaaatcacaggtagtttatcatagggataatattgaaaaattgtccacatgtcacatggtgtcacctctgtgaagatccataggagaaatttccactccagcttgaatctccagatacctgtggttcatttgagcaactgctttgcttttatcttttgcgcattgtgcatctggtaactgatcgtattttcctttcctctggaaaccaggaatctcagagtcaagttgtagactgtaaagtttattcaacaaccataccagactctgtggcttatgttctatgcacagcccttgctgatrgaatcatcttgctctccatgtttattttccctcacccacattccttcctttgttttaattttaactgcttatgttgcatgtatccctatagctacctctgatcttttttgggagatgtagtagggatatgaataaatgatg

SEQ ID NO: 67841 - DNA, 710 bp, Homo sapiens
ggatccctttgattctggctccttgcacttagctgaagagagtgagccagtcaccttgaagaaatcatccaggcggccctgggtgctgccttaatgactcttactcagcctcttgaccccactgtggattcgctcctcagagaactgcttttcaccacacacgaacttgaccagctcttcttcatttggctcgctccacttcagctccacagactctgggcccagcacctcaggttccaagaagagctggtaagcctccttgtggagccgattttctgrcaaagggtacttgttggggtcaagtcgctgcacgatctcctcgatgctcttgtgcttctggattagatccacagcccgcttgggcccaatactccagatactcttacagtagtcactgcctagcaggatgcacagatccacaaactgttcctggttctagctcctgcagaatccagctcaggtggaattcctggattggcagctttttggcttcactggcagtcaggtgttgcattagcacagggctgccgaaggtgaagcagtccatgtcctcggtagccacaggatagactttgccagccttcaccagggcagcacagctggcctctgcctcgatgggtgcatcaaggtaagggatgcccatgaggctcagcagatgtttgcacttatcgttgtgctgcttagtgaccttcaccagccacttagtgaat

SEQ ID NO: 67842 - DNA, 1289 bp, Homo sapiens
ataaccctcaacattaggaattgaagtaggaaaagcaataaaccaacctgggttccagttctcgttctacaaattacttgcagagaaactacaggcaaggcatttaatattctagggggctgttttcccttctataagctgaaattttgaactagaatctctaaggttctttcattgtaccattcaattatttcccttgtttaaaaacatgtcagataacagaaagaataaaattacagaaattttaaaaaatgcagagtaaatcagtcatgtaaaaaattgtggtaaaaccattttaactttaaaattgcttttctagtttctaaatggtaaaaggtttacgtttccaaactgatcaatatagaaacttaaaaaaaatactttattatgtatataatttctaaataattgaagccatctactgtcataaggaggtacttcaggcaaaatactgtcagcttaattttaattcctttttaaagtaaaaatgttatagctacaacacacaatacgcaagtgcaggtttatgcacatttttctaaatctttcagaatagaatattaccaggtttttttttttttttggtttgtttccattttgttttgctaaagtacgtaggaatttttaaggtgtatgttagtttatggaaaggtttccagactgaaacaaagattgttcttttgaattatctgcttttattatgttaattaaaacaaaactttatagagcatctaagtgcctctcaagctacataaaaagaatacccagttgatgcattggaattataaagataatttacacagttggtaaaggaaacagcctatactgaaaggcaattaaacaagagctatattacattatatttaaaataggaaatgtatgtgcagaaaaccaagtaatcatcattactcttatatttgtctcctggaatggattctcttaaaattctgatagtgcctactttcctttcctttccaccttaaacaagtgcttcttacactttgrtgtgtacatcatcacctggggatcttgttaaaatgcagattcttactcagaaagcctggggtgtggcctgagatgctgagcttctaaccagctcccaggggtttcccgtgttactagtcttcagattgagtggcaaggcccttaactatgggcagccaggagttgaaatgacaaaagataagaagtgccagggttttcctttttgttttgttctacgacctattcaaaacccagactgaaattcttagcttatttacttagcgtaattcttagcttagttactt

SEQ ID NO: 67843 - DNA, 676 bp, Homo sapiens
gcatctttttcaccttttcagttgtgtatgtctttatcttcatatgcccataggttctcaataaatgctgaatgaatgattgatccagaaaatagatggagtagtgagaagtagtgagaatatgacaataaaggagagatgatatgtaccctctcagctattactttgagttacacttacagtgagtcctacaaaacaatgcaacatataatcaagatatatatgttaataaaatatatatgttaaaaatatatttttatatttattttataaatataatcaattataaaaatataaaaatataatttaaaatatattttatgacttttcattcataatctttaccaaccaaaacatttaaataygtctccattcaaaaatatctgtgctatgcattattgtaggccctgggatttcactggagaatattacagttaaggtactcttataaaatttacattgtagtggtagtaatggattacataaaatagtaaacagataaccttagattgtgatacatgctaaacagaaacgataatgtgatagcaaggctgggcaggagcattgttaggaaagagctctccaaagagttggtatctgaactgaaacctaactgatgagaaggagccaaagagttggtatctgaacttaaacctaaatgatgagaagatacacc

SEQ ID NO: 67844 - DNA, 1558 bp, Homo sapiens
acaccctcaccaactttcagtttagctttttctggagtagagaaagacttaaacacattttgagtaatctgaatgcagatctttacagtatttttccaaaaatttttttaggtttcttgcttacacctgattttttttttttttttttgcttacacctgattttacaactcatttttagcacttyttaaattgaatcttttcaagtttttcaaattatctattacagaaacacttcattataaaattatcttaatgcattttatttgtttcagagacatgtctcgctctgtcacccaggttggagtataatggtgcaatcatggctcactgcagcctcaaacttctgagctcaagcaatccttctccctcagcctccccaatagctgggactatagatgagcactaccacatccaggtaattaaaattttttttttttagaaacaagatctcactatttgtccaggctggccttgaactcctgggctcaggtgatcttccctccccagcctcccaaagtgctgggattacaggtgtgaaccactgtacccagtctgtcttaattcagtgtttaattacgttattgtttcaattcttccttaaaaaggatggtctcaaatataagatcttactatatatttagaacttagaatattttctgatacctattaagtatcagtaaatattttttgaatgaacaaataaaaagacgatgttaaaaagagtagcaaactttggagacctagcaagccagaatatggagtttgaatatttttctaagagcaataaatgaaatgaacaaatataataatttatagtatatctcccactagtgtcttttattgcatttcagagttctgtgtctcaaattttgtaggtaagtcatatttcaggaagtgaaatttcgttgataattcatggtcagtcgtgtgaacataattttcatttgtatgacaattgtggaaggttcacattccgggaaccagagatgggggtggtaaggaaggggtagaagtgagaatctgggaacagtttgatttggtgtggtagccatcctgacactttccacccctgagtacttattttattttaaatctcaagggctcattccattagtgttttgatttttttaaaaggtgcagcgtgtttaacctgttctccatttcagcgatgttctctttgagaacacagagccagcacattacttaaaacagcaaagtgtcatgattcaatagtcataacttttcttcctattaataatagtttcgcccctgaatcatacctacatgtcaatcacatcaatagactagaaaaatgatgtttggcaacattacaaaacacaggcatcttggagtctggttattttctattttgtaaacctttaatactgagctaaaatctataataaatctcaaacataatcaataaggatatattacattctgttaaaaaatttagtgtaaatctttcaatctttacaaattttgaccttatggtggtgtagacagatgaattgtaaattaggtgtttttaaaacacatatatttttaattaatgca

SEQ ID NO: 67845 - DNA, 729 bp, Homo sapiens
tcagagtcaggaatcagcttcattgctgacttgytccctttcctcggcttcatagcagccatctagagtttacctttctgctaacctccccttctctattgcccgcaaccctgctccaaccagcctcccaatttccaaaggcaaaataaaacatgactagacagaactcctcagcttcttgcagtgtttcagctacaaagaagtgtcacatagtaggctcacaaaaagagcggaagcatttgtcctaaaagtattccccttaccttactacacaaaaagtgaaaaggtaaatattgtacatagtccaatattccaatatattttaataaaactaaactaatcacattcacagcttaaatttactttgaagatagattccctatgaagcacatttataatatgcttataatcctataagggtaggtcagtatttccccagtttactgcttcctgagcaatgacatggtatgtagacatcgagagaaaatacagatcaaaagtctatatgcctcaatgtattcatattaccttatatgttgtttggggctagcttcacagggggtgacctgtgcttgggcactagaagggctttttggtttaatggcatgctgttgctgtctttaaattatgaattttttttgagcaagggaacctgcattttattttgccattggccccacaaactatgtaactggatcagccagaattttaatttggatctcctccaag

SEQ ID NO: 67846 - DNA, 729 bp, Homo sapiens
tcagagtcaggaatcagcttcattgctgacttgttccctttcctcggcttcatagcagccatytagagtttacctttctgctaacctccccttctctattgcccgcaaccctgctccaaccagcctcccaatttccaaaggcaaaataaaacatgactagacagaactcctcagcttcttgcagtgtttcagctacaaagaagtgtcacatagtaggctcacaaaaagagcggaagcatttgtcctaaaagtattccccttaccttactacacaaaaagtgaaaaggtaaatattgtacatagtccaatattccaatatattttaataaaactaaactaatcacattcacagcttaaatttactttgaagatagattccctatgaagcacatttataatatgcttataatcctataagggtaggtcagtatttccccagtttactgcttcctgagcaatgacatggtatgtagacatcgagagaaaatacagatcaaaagtctatatgcctcaatgtattcatattaccttatatgttgtttggggctagcttcacagggggtgacctgtgcttgggcactagaagggctttttggtttaatggcatgctgttgctgtctttaaattatgaattttttttgagcaagggaacctgcattttattttgccattggccccacaaactatgtaactggatcagccagaattttaatttggatctcctccaag

SEQ ID NO: 67847 - DNA, 1362 bp, Homo sapiens
agtgagccagtagggtgaaatgtttactgggccggctgcggaatctgatgggttcaaaatcaaggtggggagtaagagtaaatatgtgaaataagtcaatgcttcattttttttttaaggcaaatagttggggaaaaataaaacgtcctctcttcatgcaagtacaatgtttaatgattaaactagcatcagttacagcttacctctcctcttccttgctccactgtcacagcttcccaccagctgcacaggccttctccacccttcttcagtactacaggccgactgcaacctcagagcttgtgtgcaggttctttctgctttgactatcccccgcttcctccccctcaaacatgtctgcatgactcatgtctttcccgccttcaatcttttctcaaacctcacattctcagaccccactgactgcccctcaaacactcccaccccttcctctcctttatctttctccaaagcactttcctgtcaccttgtaacatctatacatgtttttagctgatttatttttctcttttggctagatctgtttttgaattaccctatttcttaagatcgcagagaatgaagatgattttgcaaaaatactgtagacgttgtgtgtggggcgggggtggaggtggggggtggatcctctagcagtagatagccgtgtccagttaggagcagaaagatagggaggttagctactacagttaccttaaaaattagtcaaaagatgtttccagggtatcatgtaatgactaagtttggccttggagggctatatctgacttactaagatcctataggaccattttttagaatcccccaatgtgccctacacacatcctcactctggttcaggaagaagctgattaaatagttgttttcctttgaccaaccacatctttctattactgaattttatcttcttaatgactatcagtttggtctgcctacaaacagccaaacaaaatgaaaagcaaaagtcaataattttttaaacctagagatgtcaacaactttttgttttgttccacagtaaatttatgaagccttggattcattgtgcttcttggagacagaaatccactacacaaattattattatttttaaaaaggaagatggcaggggaaatcatagattcacaggtgcaaactggtccagggttttcagctttttagtagtaatgtcaaayggtacagctgctttaactattttatcaaaggtgacttggcattctttgaagagtctatctcagaaaataggtcgatttatgcttataccaaaagcaaaatagctttagacattaaaataacaattgattttctgccatctcatctttatgaattccccagtagtgg

SEQ ID NO: 67848 - DNA, 739 bp, Homo sapiens
acatgtgaggaagagatgacttgggagaggagatgccgaaaatagttttgagtttgacatatctaggcacatacaggtattataaaaaagttaattgatatatatgatggaatccaagctccagaagaaaacaagctagagatagagatttgttttaattattttttctgtttaatggcacttgtgtgtgttttgtaaattagaaaataaactagctgaggctrctctctagactgaacataaaagcatacgattgtgcagcaataggaaggattctctctttgtatgccttagctaaaaggaatagtaactttgttcatcagctcaaagatctcactgtttgctcttactagtgcaaagatataaaaatccatttgtaagatacaactatacttgaagtcacaagtatgtagttagcatgccccttaaagtaaggtagcaattacctagtgattagctgttaatctgtctattcaaactgattttctgtctcttaaaaagagcagaaatgatacagggcttaaatcaattttgtgtggaaaattagtttttaccccatatgctagaatttcagcattaaaaagaaattgattctaaactatagagctgatatacacacacacaaaaaaaaaacatgtactactcaagaacccacatttcaaaattcgcttgttggcaattcatgaattcttgtgtttggggaattccctgtgctggaggatgcagaggaaaataagac

SEQ ID NO: 67849 - DNA, 846 bp, Homo sapiens
tgcatcccacactcttttctgccctgcctgtagaactgtttacatgctgtttgctttcttggactgctattctttctgttctatactcagacaaccttttattatcctttatgtccagatttacatgcaatttcctcaaaaggccttatgagatcatcactcccccctccccagttatacagtctgatattttctttttctcgtggtactgtgtgaccttttttggaagtatataggattttaaggttatggtttatttgtatgatgattggtttagggttttttcctctactagtttataatcaagttatttctattttgttcactcttgtgcccccagtgtacaacatcaggcacagcagcatgtaaatactcaactatttaaaactgatgaattacatgcccactgtgtgtaaggaaatgggctaagcattcatggattttttttaatagaaaacaataaatagtttatayctaatttcctgcctcttttttgattcaacaccctcctcttccagtgatgattttaatgttaccagggctctccttatgtccagggaataagagatgacacttatttttacagataagaaaactagttatcttgagtaaatatgggatcgaactcttcttattttcaacagcatttgaagactcaacatcatccttgagcacaaatacatacttttgagaagttgtaggactacaggaagcagctgtggatattcaaccctggtccttaaactcacatgcagcaacaagcaaggaatgggcctcttcttccataaacccacgaacttcaaaaacccagttcatcctatgccaaacacaaggaactctccctat

SEQ ID NO: 67850 - DNA, 1447 bp, Homo sapiens
agacattaaagaacttgtcagctgggtgcagtggctcatgcccagcattttgggaggccaaggcaggaggatcatttgagcccaagagttcacgaccagcctgggcaacatagcaagactctgtctctactaaaaattaaaaaaaaaaaaatgagccaggtgcggtaatgcacgcgtgtagttccagccactcaggaagctgtggtgggaggatcacatgagcctgggagattgaggttgcagtgggctatgatcgcaccattgcacttcggcttggctgatagagctagactctgtctcaaaaaaaaaaaaaaaaaagaacttgtccacttcccaccataccagcaggggtgggaggcagacggagaccctgttctcttagtggaatctcagttcccctccttaggccaagccatccagaaggagctcactcagacccagcgcagggtccaggccctgccctaccatggccctaatgaggcagagattatcccctttcctgctataaaagtaggaacaagactgagctcattttctccggggttcaagtgtttaaatcattgcctattctttagagaaacggtgttcttcctgcaaaataattaatgacgtgtaaatttgtataactctcatgattccctccgttttgaatgtggaaaccatttgtaggagtaccctggtgagaatgaagtccccacagtccttggttcacacataggagcgtgaccttccgagcacagtggtaggtgggccagggggtgcccaggccccgggatcctgagtccttggctccttgcaggctggccggtgcttctggcgctcacaggggtgcccgccctgctgcagctgctgaccctgcccttcttccccgaaagcccccgctactccctgattcagaaaggagatgaagccacagcgcgacaaggtatgaagtcgccggctactctcccaggccctgcccaccccgggggccaggcagagacacggtcagggccacagtcagggtcgccatgggtcaggggtgagagctgggagctgaacggggtgggggggtggcaactggggcacaaccaaggtcaggtcagggaatggtgagctcagggccagcatgggggcttggggcccagcctgcagggagacggccctctgagcgggtggttctgctttcygcagctctgaggaggctgagaggccacacggacatggaggccgagctggaggacatgcgtgcggaggcccgggccgagcgcgccgagggccacctgtctgtgctgcacctctgtgccctgcggtccctgcgctggcagctcctctccatcatcgtgctcatggccggccagcagctgtcgggcatcaatgcggtatgtgggacggtggccaggcagggagacagatgaagcagacccaggcttcatggatagcaacacacagttccacccacagaggc

SEQ ID NO: 67851 - DNA, 530 bp, Homo sapiens
gggcatgaacttcaaattccagagaccgagttcatttgctgctacattaaggatccaggtggaggagaataagtcaccgagattcaatcatcttctgaaatattgcttacctgagagtcccttcaagatagagtaactgctggagacccccatgtgcctctaacagctggactttggtccttcaaagcctaaatgatccatttggctacattttattttyttcaactcttttcactcttccagatggtaaaatgcaaaaatcttaatattctgcaatggccaagtagctgccacacagtttcatgacccatcactcactctctgattatcctgtctttatgtatgaatgagctcctacataatgccatcagagtacacgacactgcacatcagtatctagcagagtacctacaggaccaaaacaggccagtaaatctaagagatttccgagaagagctgcaaaggtgatttaagaatattgaaagttgatttaggaaggaagataaaaagatctcttgcttaagccaact

SEQ ID NO: 67852 - DNA, 530 bp, Homo sapiens
gggcatgaacttcaaattccagagaccgagttcatttgctgctacattaaggatccaggtggaggagaataagtcaccgagattcaatcatcttctgaaatattgcttacctgagagtcccttcaagatagagtaactgctggagacccccatgtgcctctaacagctggactttggtccttcaaagcctaaatgatccatttggctacattttattttcttcaactcttttcactcttccagatggtaaaatgcaaaaatcttaatattctgcaatggccaagtagctgccacacagtttcatgacccatcactcactctctgattatcctgtmtttatgtatgaatgagctcctacataatgccatcagagtacacgacactgcacatcagtatctagcagagtacctacaggaccaaaacaggccagtaaatctaagagatttccgagaagagctgcaaaggtgatttaagaatattgaaagttgatttaggaaggaagataaaaagatctcttgcttaagccaact

SEQ ID NO: 67853 - DNA, 530 bp, Homo sapiens
gggcatgaacttcaaattccagagaccgagttcatttgctgctacattaaggatccaggtggaggagaataagtcaccgagattcaatcatcttctgaaatattgcttacctgagagtcccttcaagatagagtaactgctggagacccccatgtgcctctaacagctggactttggtccttcaaagcctaaatgatccatttggctacattttattttcttcaactcttttcactcttccagatggtaaaatgcaaaaatcttaatattctgcaatggccaagtagctgccacacagtttcatgacccatcactcactctctgattatcctgtctttatgtatgaatgagctcctacataatgccatcagagtacacgacactgcacatcagtatctagcagagtacctacaggaccaaaacaggccagtaaatctaagagatttccgagaagagctgcaaaggtgatttaagaatattgaaagttgatttakgaaggaagataaaaagatctcttgcttaagccaact

SEQ ID NO: 67854 - DNA, 1065 bp, Homo sapiens
  misc_feature (1)...(1065): n = A,T,C or G
accatgggatgggctgtcactcagtcatgcccaggggccccagggctgtgcaggcacagtgctgctgctacaaggactagaaaccaggatgaccttctacctgcccaagaactgagcccctaaactagctgctttctctcctttgcattgagctatgcccagagcctgatgtrtctcttcactcaccatcgacttgtccacccacccacccacctacccacccgtccatccacccacccatccatacacccacttacccaaccatccatccacctacccatcgccccacccacccttccacccatccatacacctacccatcaccccacccacccttccacccatccacatatnnnnnnnnnnnnnnnnnnnnnnnnnnnnnnnnnnnnnnnnnnnnnnnnnnnnnnnnnnnnnnnnnnnnnnnnnnnnnnnnnnnnnnnnnnnnnnnnnnnntcccccacccacccaccgctacccacccactgttcactcattcctgcattcattctaggctgtgatctccactgggctctggagctacagctgaggctccacagctgccctgagcatgaggagggtatagaaagtgttgttgtggtccgttctccccggggaaggaacacgcttcccagagcaagtgcccctttagtggtccttaaggacacgtaggactttgccacttgagggaggaggagtgttcctgacagaactggctgggagaggagagagaaccatgcaggggaaagacctctccccaggatgtggggctcagggctctgcatcagggtggggagctgggaatcacttgccctgctcctggacacaggccagatcctgggtggaaggtgttttgtgagatagggtgccctgaaggtgagggcgctctccaggcccctgtcccccaggggacaggcagcctagggcagggtgtccctcagagacagactctcagcgttgtcatcacccagtgggagacccaggcttggaggagacaggaggggctgggtaccgatgaggattgacagaatgactgggatgcggactagtagagaggaagagactgga

SEQ ID NO: 67855 - DNA, 1065 bp, Homo sapiens
  misc_feature (1)...(1065): n = A,T,C or G
accatgggatgggctgtcactcagtcatgcccaggggccccagggctgtgcaggcacagtgctgctgctacaaggactagaaaccaggatgaccttctacctgcccaagaactgagcccctaaactagctgctttctctcctttgcattgagctatgcccagagcctgatgtgtctcttcactcaccatcgacttgtccacccacccacccacctacccacccgtccatccacccacccatccatmcacccacttacccaaccatccatccacctacccatcgccccacccacccttccacccatccatacacctacccatcaccccacccacccttccacccatccacatatnnnnnnnnnnnnnnnnnnnnnnnnnnnnnnnnnnnnnnnnnnnnnnnnnnnnnnnnnnnnnnnnnnnnnnnnnnnnnnnnnnnnnnnnnnnnnnnnnnnntcccccacccacccaccgctacccacccactgttcactcattcctgcattcattctaggctgtgatctccactgggctctggagctacagctgaggctccacagctgccctgagcatgaggagggtatagaaagtgttgttgtggtccgttctccccggggaaggaacacgcttcccagagcaagtgcccctttagtggtccttaaggacacgtaggactttgccacttgagggaggaggagtgttcctgacagaactggctgggagaggagagagaaccatgcaggggaaagacctctccccaggatgtggggctcagggctctgcatcagggtggggagctgggaatcacttgccctgctcctggacacaggccagatcctgggtggaaggtgttttgtgagatagggtgccctgaaggtgagggcgctctccaggcccctgtcccccaggggacaggcagcctagggcagggtgtccctcagagacagactctcagcgttgtcatcacccagtgggagacccaggcttggaggagacaggaggggctgggtaccgatgaggattgacagaatgactgggatgcggactagtagagaggaagagactgga

SEQ ID NO: 67856 - DNA, 577 bp, Homo sapiens
atcctgtctgttctctccactttaaagatgagaaaayagagacacagagggagtaggcagcatgtctgggtcacacaggggaggagacaggaggcaggaactcacctcgcgtcccgaggatggtttggcctgggaaagttgtgctcaacagatgatgcttctctggtgtgggagcccacagtctgctggatgtgagggcagcccttctctctataaaaatacaattttttaaactgttagaactaataaacaaacaaagttgcagggtacaaaatcaatgcacaagaatcagtagcatttctatatactaacaacaaactatctgaaaagaaatcaagagtcaatcccatttacaatagagagcaaaaaaagaaaatgcttaggaataagtttaaccaaggaggtgaaagacctgcacactgaaaactatgagacattgatgaaagaaatcaaaggttattgttttaataagccttttaatgctacagtcggttgtgtgataatgcctgctttgaaaaccaaatttgctccggcacaattaattaacttattcatttgggaaaatttgagcattact

SEQ ID NO: 67857 - DNA, 577 bp, Homo sapiens
atcctgtctgttctctccactttaaagatgagaaaacagagacacagagggagtaggcagcatgtctgggtcacacaggggaggagacaggaggcaggaactcacctcgcgtcccgaggatggtttggcctgggaaagttgtgctcaacagatgatgcttctctggtgtgggagcccacagtctgctggatgtgagggcagcccttctctctataaaaatacaattttttaaactgttagaactaataaacaaacaaagttgcagggtacaaaatcaatgcacaagaatcagtagcatttctatatactaacaacaaactatctgaaaagaaatcaagagtcaatcccatttacaatagagagcaaaaaaagaaaatgcttaggaataagtttaaccaaggaggtgaaagacctgcacactgaaaactatgagacattgatgaaagaaatcaaaggytattgttttaataagccttttaatgctacagtcggttgtgtgataatgcctgctttgaaaaccaaatttgctccggcacaattaattaacttattcatttgggaaaatttgagcattact

SEQ ID NO: 67858 - DNA, 1520 bp, Homo sapiens
tgcatagactaatctgtaggatagatttaggcaaatttgattaagcttttactgattttataatattctgaattttaccaaccctttcaggtgccattactttgaatggcaaaaaccgcagttacttttgcaccaacctaatacctgaaggatccaattctgatgatcagagaagcaaagctgtactttcctaagaaggacccctgaggaaggtctgttccttcttgggtatgccacctgatatacatccgcaaaaatatttgtaaaatgtaaccatagtgccatgtcattttatcaaaaatgaaaatgtgtccaagatttccatcatctaaatatcagccaccaactggtgttctgcagcgtcaaagctgcagggcatgctggggaaggctaaggagatactaaactagcttcaattatttgaacaccttaaatacagtaaagagcctctaattatttttcctgttattctttttttattattattattattatactttaagttttagggtacatgtgcacaatgtgcaggttagttacatatgtatacatgtgccatgctggtgcgctgcacccactaactcgtcatctagcattaagtatatctcccaatgaagagcctctaatttataaacataattttaatagatcagcaggaccatattgtcctatgtaatggaactcacaggaatattctggttttatgtttggttttctttttttttttttttttttttgagacagagtccagtcsccatgctggagtgcagtggcatgatctcggctcactgcaacctctgcctcccgtgttcaagcaattctcctgcctcagcctcttgagtagctgggactacaggcacgcaccaccacacccagctaatttctgtggttttagtagagacagagtgtcaccatgttggccaggattgtcttgatctcttgacctcctgatccgcctgccttggcctcccaaagtgctgggattacaggcgtgagccactgcgtccggccttatgtttggttttctagaccatgtagtagattttgagaagtttattgttattactcccaagttgctagtaatttttattttaactcattgtgatgacaagaacactggaaagagactaggagaggcaccttttcatgcttaactctgccagcaaatcagtgtgagaccctgggtgagtcactgcctgtcctcacccccagcttcctctccttcttctttttttttttttttttttttgagacggagtctcactctgtcacccagtctggagttcagtggcgcgatcttggctcactgcaacctccgcctcctgggttcacgccattctcctgcctcagcctcccgagtagctgggactacaggcacccgccaccatgcccggctaatttttggtatttttagaagagatggggtttcaccgtgttagccaggatgattttgatctcctgacctcatgatccgcccaccttggcctcccaaagtgctgggattacaggcgtgagccacc

SEQ ID NO: 67859 - DNA, 611 bp, Homo sapiens
tgcacatatatattcatatatattaaaaattcttctcctttaactgttcagattgcattaaatacatatctttccctctgatttaacagaatatatattcctaatgtagacagtatgagtattgctttgaataatctaaagcagtcattatcaaaatgtgatatctagaccatttgcaccagcactacctgggaacttgtgcaaattgcaaactgtacaagttccaaatgcaaatacaaatttggggccatacgccagacctatctgagtcagacactctgggaaatccgttttaataaggtctccaggtgcttgtgatatataccaaactgcatgaagcacttatctgaagtgtacagtgattcaagggaacagaaacatagagacggaatgcaaaagaagctctctctmtatatatataatattgctttgagtattttatatatgcatgtatacatatatgtatacatatgtacacacacacaaatacagaaaatacttataacaatactctatttggtttattaataatagtggcccaaaatgcaaagctactatgtcacaaaccatatttctcaaaggtcttggaaagactgaaaactataatacta

SEQ ID NO: 67860 - DNA, 670 bp, Homo sapiens
tccctgatkgatcccacagcagcatggaggctctgacttcttgcaagggagagaggcgctagggaaagaagatgttagagacagtaacaaagcaaaatttcctcatgtgcagtttatccaaggatggctcacaaatagaattattctactcatgaaggaaaaagaaatacaactagccaaatgatccacctggaattatttcctccttagctacacaaacaggtaaaaacaaatccatacattacattttacaattatattctgaagaggtgtccacttctgagcaagatggagtaggtgggactggattcaccctccagcctgaagcaataaaaaaagcaacctggcaacacatatgaaacaatggtttccgagacatcagctatcagagaatgaagagtagtcatccctaagaaatggaaaacaaacaaggtgagccctattgcttgaacttactaccatgagagagtttccgggcaacagcacagggagagggattcatagagagccgagtgtttgaggagacccagacagatgaaattcatgagacggagtacctgaggggagagctgcacagagacagaccagagatctgcagaagctccttttagtattcagctgagtttatatcagcacatgcatgtaaggaaagttcccaagacctgggaaa

SEQ ID NO: 67861 - DNA, 656 bp, Homo sapiens
aatatcttatgggtactcagcttaatacctgggtgataaaataatctgtacaacaaatctccacatcaaaggtttaccatataacaaacctgcacatgtatccctgaacttcaaataagagtttaaaaatgatattttaaaagtttaaatgtaaatccctgtccaagttcagaagatttaaatttaatatacttaatatataaatgaaatgtttgtaattgtgaacttagaattgggtaacaaagcaaaaacmaaacacaacaaaaacaataacagaaaagaagcagttttcccttgtgaaattcttctggaacttctggaactctaatgaggaaatgctaccttttcttttaaaactgtggttttctcacaaatttcattctaatgctattcaactctaccaaatgtggaacattttaattctgcataattccagtttcttagagacgactctaaagtcccagttccttggggacagtcagtgctaagaaagatcagagaacagaggaatccctgtgggcaggaggggagggaaggttggaaagattttgtgaaaaagggaaatcttgactgggacttgagtgggttgaatttggatggtaagacataaactctaaatatgtttttttttaaattttttaaaaatataagcagaa

SEQ ID NO: 67862 - DNA, 930 bp, Homo sapiens
agagatatgatgaaatcggggaacaggtagggcggtgtggattccggggaagacacatacaaacagactctaccacacagaggtaaagaccaggggtgtcaacctctgcccccaacagcagctgcgagaacaggggaagaccaggcgtccatgagacatttcagttcttcctgtcatgaagcatctgctgagaggagctgggtcaaggtccctggactctgccttcagggcacattagccctgagccaaggcagctttgatggcagccaccagcttcagaaacttgttttctgtgtccacatagccatcacctttcttcttagagtgaatcaacttcccagctaccattacgtcaaagaacccggtggcctggggagttcccttgctgcagatgtccaaagtccagaggaactcatcttctttttctttttttttctttgagatggagtctcactctgctgcccaggctggagtgcagtggtgcgatctcggctcactacaacctcgacctcctgggttcaagygattctcctgcctcagcctcccaagtagctgggactacaggcgcccgccaccgtgccaggctaattttttttgtatttttaatacaaacggtgtttcattatgttggccaacatggtctcgaactcctgacctcatggtctgcccaccttggccttccaaagtgctgggattacatgcgtgagccactgtgccggccgggggaactcatcttctaacttcttcttgagctgaagatacttggacttgtagcctcaagtgccacataaaccactcgcgagagccatggctctgggctgccaccctcgctggggagcagagacctgggtcacagagacctcctgcctggacgcatgaggtctgcaccacaaatttatttaaaaaggaattttattcatttaaaatata

SEQ ID NO: 67863 - DNA, 1908 bp, Homo sapiens
tgctgaaatggcttagaaacaatgaccaatcaaatagcaatgagtgtgtccagcacacagattctgttctgaactgttttctcctagcaaaagaaagcaatattttctggagaaatagattattccagatttggaggaggaaatgcgcaaaatgagcctgaaacatgttcccatgacatacaacaacgaatgcatcaaaaacgttgagttgtgcctgaaaaactcagaagaaaacctgaagaggtttgcagtagtcaaagatatggcaatttgagctttcaaatggattttaactgcagtacatagaaacacatcaaatatgtttcacagaaatacatcgaattatgtttaatatacaagtagttcctgagtagtttaaaaatctacttattctctttgcatgatctcttttgtagctcatggaatctgtgttgtaggagggggagatattatacttgttatttgaggctacaaaaagatgtctagggaacaggcctgaagttcttctgtgaattttagtctttctagatagctcgattggggaaaaataaataaattaacttaggggagcagtgaagctctacaagaacacatatawctctggatgagaaagaaaagggatgtggagctgcagatatgtccttggataatgacagggccactgggcacggaggctcatgcctgtaatctcagcactttgggagggtgaggcaggcagattgcctgaactcaggagtttgagaccagtctggccaacatggtgaaaccccacctctactagaaacacaaaaaattagccaggcgtggcggtgcaggcctgtagtctcagctactcaagaggctgaggcacgagaactgcttgaacccaggaggtggaggttgcagtgagctgagatcatgccactgcgttccaccctgggcaacagagtggtaatgggctctgaacttatggatgagacctgaaggggaattgaacttactcctctttttggagcatctttaaaactggattttgaaattttgaaaataatgcctctaacactatcccgagtggccatggttctgtgctgtggaaggactcttgtcctggggacagaaacgtggtcagaatccaaaggaaaggctgccgccccctcaacacacacacaccccattttacttcctatgtattttcctctaccttctgtttttgcttcacttcatttcgatccccacactgtttatcccccattcttagacagcttcatgaagaacctctggacatatactgagggcttaaccttgaatatggataaaatcaagatgatcaacaaacatgatctttggtgccataatgctttctatatcagttcctcttctgtgcacattttaatgcagtttatatctctatttctatatcagttcctctttaattcaaattttaatatagtttatatctctatgagcatttcttaatgcataaataattcagatttctaaaataccaaaataatggcatgaaatcaacaaaaaggccaatattgtacgcctaaaattagcagagaacagaaaatattgaaaacttgtgtaacaagcagaagtaagtgatgaaaacattaaatttgagaattatctgctttggtgcaagggatctaccaaattagagaaatgtttagagaagatagaagttgtctgaggaaataaccgcttaccattatttgttgtatggccttggaaaaaatattccttgaagctccggaagaatttggaggatatactgacacagaaattaaattaaatgaaaatcataagatgaaaatgaaagtcaacagtgttatgcattcagaaaattcagggagaaggaccggaaagagaactctagattgagtcaattaaagatgacaagtgagagatgaataagggatttta

SEQ ID NO: 67864 - DNA, 768 bp, Homo sapiens
aaataggacgtggttatttgagggagttccagggggtatcgaggctctgatgtgggatgggcagtgccagcagatggctttctgctcagacagtccagacattggtatgagggccaacctccaagacaggttctgaaacaaacaagaagggagagagaagcagtcccatcttttccccagaaacactcacaactattctacttttccttttttacacagtttatatgtaaacccagcacaaggccctctctcaaacagacctacatatccctacaaagacatgccaaacttcacacaggtgtgaaagtatgtgtttgctcagccaagaccagccactgaccttgtgaattgcttgtttctacactattcctaaaacaaaagtcatatttacctacacagatcttgccaaatgagtgcagttttctttttttttctttttttttttttttttaattgatcattcttgggtgtttctcgcagagggggatttggcagggtcacaggacaatagtggagggaaggtcagcagataaacaaatgaacaaaggtctctggttttcctaggcagaggaccctgcggccttccgcagtgtttgtgtccctggstacttgagattagggagtggtgatgactcttaaggagcatgctgccttcaagcatctgtttaacaaagcacatcttgcaccgcccttaatccattcaaccctgagtggatacagcacatgtttcagagagcacagggttgggggtaaggtcacagatctaca

SEQ ID NO: 67865 - DNA, 795 bp, Homo sapiens
tccagcctgggcgacagagaaagactccgtctcaaaaaaaaaaggattgcaaccctttccttagcttccctaatccctctagctctgagctgctttttctttttgccatgacaccatggcactttttaccatctcacatactatataatttattatatatgtatcatctatttctttttgtttattgtctctcttccccccacccccgaatgtaaaccccataaaaacagggacctttgtctgttttgttcactgacgtattccaagcacatagaatagggcctggtagataggagaggctcaatatttattgaatgatttttttttttttttttttttttttttttttttttagagacagggtcttactctgtcacccaggctgtagtgcagtggtgygatcatggctcactgaagcttcaacctcctaggcccaattgatcttcccggtttgacctcccaaagtgctgagattataggctcacagcttgagaggctgaggcaggaggatcacttgagcccaggagttcaagaccagcctgggcaactagcaagacccctgtctctataaaaataaaaataaaaaattagctgggtgtggtggggcacgctggtagtcttagctactcaggaggctgaggcgggaggattgcttgggacagggagtttgaggctgcagtgagctatgatcgcaccacggcacttcagcctgggtgataaagtgagaccctatctcaaaaaaaaaaaaaaatgacaaagtgattaatggatatatggattggcaagggtattcca

SEQ ID NO: 67866 - DNA, 795 bp, Homo sapiens
tccagcctgggcgacagagaaagactccgtctcaaaaaaaaaaggattgcaaccctttccttagcttccctaatccctctagctctgagctgctttttctttttgccatgacaccatggcactttttaccatctcacatactatataatttattatatatgtatcatctatttctttttgtttattgtctctcttccccccacccccgaatgtaaaccccataaaaacagggacctttgtctgttttgttcactgacgtattccaagcacatagaatagggcctggtagataggagaggctcaatatttattgaatgatttttttttttttttttttttttttttttttttttagagacagggtcttactctgtcacccaggctgtagtgcagtggtgtgatcatggctcactgaagcttcaacctcctaggcccaattgatcttcccggtttgacctcccaaagtgctgagattataggctcacagcttgagaggctgaggcaggaggatcacttgagcccaggagttcaagaccagcctgggcaactagcaagacccctgtctctataaaaataaaaataaaaaattagytgggtgtggtggggcacgctggtagtcttagctactcaggaggctgaggcgggaggattgcttgggacagggagtttgaggctgcagtgagctatgatcgcaccacggcacttcagcctgggtgataaagtgagaccctatctcaaaaaaaaaaaaaaatgacaaagtgattaatggatatatggattggcaagggtattcca

SEQ ID NO: 67867 - DNA, 532 bp, Homo sapiens
aaaaaaaaaaaaaattactgaaactactgagatattttacttttttttttttttttttggtacaagtcctcaaactccaaagtatgttttacacttaaagcaccactctgttcaggtgctcatttcaaatttcaaatgctcatagtcacatggtattaaaagctactatattggacagtacagccttaaagcataaaaatccaaattcctgaacacaatttacaaagtcccccatgccttcctggcctcgcygtctaccacttcccacatagggcctcccgctctttgctctagcttattgctactcctagactctttcacacttctgtgactgttgcctcttcctggaatgctccttatcagggtgtgccactcccacttccaacggccctctttggcactcaactactgttgtagtgccacctcatttattgagtgctctccttatattatcttacaaatctcttacagcatttatactattcctgtatatacccttcaaaaacttatttttattgacatagatacagta

SEQ ID NO: 67868 - DNA, 532 bp, Homo sapiens
aaaaaaaaaaaaaattactgaaactactgagatattttacttttttttttttttttttggtacaagtcctcaaactccaaagtatgttttacacttaaagcaccactctgttcaggtgctcatttcaaatttcaaatgctcatagtcacatggtattaaaagctactatattggacagtacagccttaaagcataaaaatccaaattcctgaacacaatttacaaagtcccccatgccttcctggcctcgctgtctaccacttcccrcatagggcctcccgctctttgctctagcttattgctactcctagactctttcacacttctgtgactgttgcctcttcctggaatgctccttatcagggtgtgccactcccacttccaacggccctctttggcactcaactactgttgtagtgccacctcatttattgagtgctctccttatattatcttacaaatctcttacagcatttatactattcctgtatatacccttcaaaaacttatttttattgacatagatacagta

SEQ ID NO: 67869 - DNA, 1127 bp, Homo sapiens
atacaaagatgattcatcaatattgtatgaacatttgttcactgcatacctgaacttgtgtaagtaaaaacaatgctactttaaagaaagacaaattactttgtccaggtaaaactactagttaaaagaatgtgaacagattgcttcatgatatgaaaggaaaatactgttttaaaaataatctctgcatttgcatctggggagagtttataactactaatgtttactttcagctaaaacataataagtgatggaactgtcattaatgctctccaatggtttattactattattggccattcttccttccctttttaataccttactctcttgggtgggtcaaattaagcttcttcaaactccatctctccctwtgtgttgtgtccaacactaaacaacatcttgattttcccatggttctcagggaccactctagacagtttgcttcaatataaattggacctttcttcaatgtcacatgaaaaacgtagctgcataatttccatggttcagggctctagtcttcatactgagaggtataaaagcatcttattttagattttactccgtgttttagaagaatcgatgttaacttaccatcttatgctgtgaaatgtataatttataaataattgactgtacttattaatggatgtggggatcttaaagtattgtcctttccttgaaattgaacaggacattccttaaaatttagtgtggtaaaggagaaaaggaattatactgcaataaagaatttcatgcaaatatgaaccttgaaagggcacaaacatttctttaacccaaatatatgctagattttgataggatggttgtgcttgggaaaaaaattgtatctagttgaccatcttccagaccctgcacaaatgctgctatgaatgataatcatggttgttgccaaggtcacctaaaaaatgatttatagtcccctttccccaaaaatgtatcagctgcttacttagaaaattaggtttctattcagttacggcaccaaatcacttctgcatgattcttctatttttcctgtacaccagaacttggaaaatgtatgtttctgcaaatgtttatccccttctaaataggaacgattgaaaataataaaagtattt

SEQ ID NO: 67870 - DNA, 1127 bp, Homo sapiens
atacaaagatgattcatcaatattgtatgaacatttgttcactgcatacctgaacttgtgtaagtaaaaacaatgctactttaaagaaagacaaattactttgtccaggtaaaactactagttaaaagaatgtgaacagattgcttcatgatatgaaaggaaaatactgttttaaaaataatctctgcatttgcatctggggagagtttataactactaatgtttactttcagctaaaacataataagtgatggaactgtcattaatgctctccaatggtttattactattattggccattcttccttccctttttaataccttactctcttgggtgggtcaaattaagcttcttcaaactccatctctccctttgtgttgtgtccaacactaaacaacatcttgattttcccatggttctcagggaccactctagacagtttgcttcaatataaattggacctttcttcaatgtcacatgaaaaacgtagctgcataatttccatggttcagggctctagtcttcatactgagaggtataaaagcatcttattttagattttactccgtgttttagaagaatcgatgttaacttaccatcttatgctgtgaaatgtataatttataaataattgactgtacttattaatggatgtggggatcttaaagtattgtcctttccttgaaattgaacaggacattccttaaaatttagtgtggtaaaggagaaaaggaattatactgcaataaagaatttcatgcaaatatgaaccttgaaagggcacaaacatttctttaacccaaatatatgctagattttgataggatggttgtgcttgggaaaaaaattgtatctagttgaccatcttccagaccctgcacaaatgctgctatgaatgataatcatggttgttgccaaggtcacctaaaaaatgatttatagtcccctttccccaaaaatgtatcagctgcttacttagaaaattaggtttctattcagttayggcaccaaatcacttctgcatgattcttctatttttcctgtacaccagaacttggaaaatgtatgtttctgcaaatgtttatccccttctaaataggaacgattgaaaataataaaagtattt

SEQ ID NO: 67871 - DNA, 1127 bp, Homo sapiens
atacaaagatgattcatcaatattgtatgaacatttgttcactgcatacctgaacttgtgtaagtaaaaacaatgctactttaaagaaagacaaattactttgtccaggtaaaactactagttaaaagaatgtgaacagattgcttcatgatatgaaaggaaaatactgttttaaaaataatctctgcatttgcatctggggagagtttataactactaatgtttactttcagctaaaacataataagtgatggaactgtcattaatgctctccaatggtttattactattattggccattcttccttccctttttaataccttactctcttgggtgggtcaaattaagcttcttcaaactccatctctccctttgtgttgtgtccaacactaaacaacatcttgattttcccatggttctcagggaccactctagacagtttgcttcaatataaattggacctttcttcaatgtcacatgaaaaacgtagctgcataatttccatggttcagggctctagtcttcatactgagaggtataaaagcatcttattttagattttactccgtgttttagaagaatcgatgttaacttaccatcttatgctgtgaaatgtataatttataaataattgactgtacttattaatggatgtggggatcttaaagtattgtcctttccttgaaattgaacaggacattccttaaaatttagtgtggtaaaggagaaaaggaattatactgcaataaagaatttcatgcaaatatgaaccttgaaagggcacaaacatttctttaacccaaatatatgctagattttgataggatggttgtgcttgggaaaaaaattgtatctagttgaccatcttccagaccctgcacaaatgctgctatgaatgataatcatggttgttgccaaggtcacctaaaaaatgatttatagtcccctttccccaaaaatgtatcagctgcttacttagaaaattaggtttctattcagttacrgcaccaaatcacttctgcatgattcttctatttttcctgtacaccagaacttggaaaatgtatgtttctgcaaatgtttatccccttctaaataggaacgattgaaaataataaaagtattt

SEQ ID NO: 67872 - DNA, 1725 bp, Homo sapiens
aacgtcagtcaaaagtttgcatttcagagatatcttsagatatcattttctctgactaccactggaggcataacaaacgtgagaaatgtgctttcattggcaacattactggcatccaaataaataggctgattaaaatattctaggaagacagagctttaacattttgatgaacaagctttgaaaagttagtaatctcttcttttgtatctttccttaaatagcgcatggtaactgacatgtttggggaatttagattgccctatgctgaatgtataattacaatatttcatagatataatattcaatattataatgaatgctgccactggaatattgttagttttgtttttagttagggtcagagaaacagatcctaaaaaaaaaaaaaaaaaaaaagagtgagagagagatctggaaagtcaccgagatcacagaaaagcaattttgtgctgctactaagtgatatttaagaaacgatagtatttatggtggcctcctgtctgagacttgattttatcacaccatggtagcaaagttgtggtagaagagacctattctcactatctgctacatttatgccaaaatcactaccaaaaatatcttaataattgtgtatgttcaattgcttggtcactttgtataataacaaagatcatacaaaggaatcaaagagttggagagcagagcaagtcaggtgggaagactctgatacagcctaggtgaacttgaggtcggttggaaagaaagcctaagtaagagtgagagaaactatttctgagtaagggagaccgtggctgcagtctgttttatttttattgcatcttcatggccttgggcttgaatggatggaagccatttgtctggaaatttgattaggcaataccttcaggctattgtaagatcccccatatatacggtatatacagtagtcacgcttattcatggtttcaatttccaaggtttcagttacctgtggtcaaccacagcatgaaaataaatgagtacagcacaataagatatttgagggaaaaaaagaaagagagagagagaacacatttgcataacttttgttaaagtatattgttatagttgatcttttattattatttattgctgttattctcttactgtgtctaatttataaattaactttatcttaactatgtatgcataggaaaaacatagtgtttaagattcagtactattcatggtttcaggcatccacgggggttcacagaacatattccccaaggataaggaggcactgttggatatagcaaatgcgtttgtcaacaaatatttcctagacaagaaaaaaagcagaaaaattagaaaaagataaattatgggaatatcaaaaggtatgaagaaaataaaaccacgacctgctaaaaaagttgtaattttggctgggcacagtagctcatgactgtaatcccagcactttgagagaccaaggcgggcggatcacgaggtcaggagattgagaccatactgactaatatggtgaaatcccatctctactaaaaatacaaaaacaaaattagccaggtgtggtggcaggcacccgtagtcccagctactcaggaggctgaggcgtgaacccaggaggcagagcttgcagtgagccgagatcgcgccactgaattccagcctggcagcctgggtgacagagcaagactatcttaaaaaaaaaaaaaaaaaaaaaaaaaattattttaa

SEQ ID NO: 67873 - DNA, 1725 bp, Homo sapiens
aacgtcagtcaaaagtttgcatttcagagatatcttcagatatcattttctctgactaccactggaggcataacaaacgtgagaaatgtgctttcattggcaacattactggcatccaaataaataggctgattaaaatattctaggaagacagagctttaacattttgatgaacaagctttgaaaagttagtaatctcttcttttgtatctttccttaaatagcgcatggtaactgacatgtttggggaatttagattgccctatgctgaatgtataattacaatatttcatagatataatattcaatattataatgaatgctgccactggaatattgttagttttgtttttagttagggtcagagaaacagatcctaaaaaaaaaaaaaaaaaaaaagagtgagagagagatctggaaagtcaccgagatcacagaaaagcaattttgtgctgctactaagtgatatttaagaaacgatagtatttatggtggyctcctgtctgagacttgattttatcacaccatggtagcaaagttgtggtagaagagacctattctcactatctgctacatttatgccaaaatcactaccaaaaatatcttaataattgtgtatgttcaattgcttggtcactttgtataataacaaagatcatacaaaggaatcaaagagttggagagcagagcaagtcaggtgggaagactctgatacagcctaggtgaacttgaggtcggttggaaagaaagcctaagtaagagtgagagaaactatttctgagtaagggagaccgtggctgcagtctgttttatttttattgcatcttcatggccttgggcttgaatggatggaagccatttgtctggaaatttgattaggcaataccttcaggctattgtaagatcccccatatatacggtatatacagtagtcacgcttattcatggtttcaatttccaaggtttcagttacctgtggtcaaccacagcatgaaaataaatgagtacagcacaataagatatttgagggaaaaaaagaaagagagagagagaacacatttgcataacttttgttaaagtatattgttatagttgatcttttattattatttattgctgttattctcttactgtgtctaatttataaattaactttatcttaactatgtatgcataggaaaaacatagtgtttaagattcagtactattcatggtttcaggcatccacgggggttcacagaacatattccccaaggataaggaggcactgttggatatagcaaatgcgtttgtcaacaaatatttcctagacaagaaaaaaagcagaaaaattagaaaaagataaattatgggaatatcaaaaggtatgaagaaaataaaaccacgacctgctaaaaaagttgtaattttggctgggcacagtagctcatgactgtaatcccagcactttgagagaccaaggcgggcggatcacgaggtcaggagattgagaccatactgactaatatggtgaaatcccatctctactaaaaatacaaaaacaaaattagccaggtgtggtggcaggcacccgtagtcccagctactcaggaggctgaggcgtgaacccaggaggcagagcttgcagtgagccgagatcgcgccactgaattccagcctggcagcctgggtgacagagcaagactatcttaaaaaaaaaaaaaaaaaaaaaaaaaattattttaa

SEQ ID NO: 67874 - DNA, 2769 bp, Homo sapiens
gttacatccccagaactagaacatatgagcataaaacataaagagcataaaatttgttatatggattatatttgaatacaatatagacccttttcaagttaaaagaaaaaacaacatgttggaagctcattagaataattttctacaagctggttagctcctgctgtcacttctccttaggtgtcttgaagattttagagtaaatgttcttactttctacaggtgatcttaagtatctgttcaggtggaatgtttaatgaacaacagactgggatattaatagtcaaagacacaatctatcaggcctaaaatattccctgatggtaaatgggctccagcagatatcaatttaattttgtcagaaagttacacttatttttctaaagttgtgactgatttctatatctatttctatttttttataatctttttaatctatctgaaatcatacgaagacatcattttaaagcataccttattttaggcaacatgatataattgaaacgaagtaaaactatatatgtataatatatatttgttatatatgtgacagtattttcataaatgtagaattacacatatacacacatataatgcatatatacatatataaatatacacacatatataacatcctgaacataaaatgagttatacagaaatatataaatgagttatatataaagcagtgagttacatataaagtagtgaaatatgtatctatataaagtggttcatataaattacaaagtaacaacactttaatcaactttgatatctagaaactctcaacttggtaaataatttgcgaaaggtgttcccgatagtaggaacagcatctaaaaaggtcgaagacaaattatgtgagatgaaggactttctcttctggaatatatgatttgattacaaaagaccaacatatttgtctaaaaacaacaagaaaagctgtttgactacaaagacggtgaggattcgaggggctcagtgaatggatatagaaagaagactttgaggtgagctttatcttgtattckgctttcttcctgaagtcatctgtctactagtaagccacacagagcaataacttaatgtgattagaggggtgtgtaaaaagtactaggtaaggtgagctttcaacagtctcatgggctcagaggatacaagtactggaataaatggtcagaaaggcatttagaacttcatacgctaaaattctgaggaaaagggacatataaaggtcaacccaatattctatattccttcttgccttgaggcatatactgatttcaaatcaacactaggttagaggtaaaaggttttttagagagtgttgtctaagaggctgagaagagaaatgcaaagtttgttaggatcaaagtgaaaagaaaagaataattgcaattcaaggagcattaaggatgagaagcactggaaaatacctaggatctgagttggatccactgaattgctataccctaggaataagggtaaattggaaataaatgtactagaatttaatacagcaactaattttaaaaactgaaaagataagcttaacaaatttagatgcatagagttgaaagctgtactggaagataaattagtagaaattatacagatggaagcacaacagggaaaagatattttcaataaatgtaaaaagttcagcatttacacacaagaacatatggaaacaacaaaaataaccctggggcagaccagagtggctacttttggaaacaaaagatggaaagggaaattgagattaaacaaaaaatataataagaggattaaatttcaaccctcaaatgaataaatttgctgaaactcaaaatcaaaatacttctaagataataattaataaattctactgaacgcagtggagaaaacaatgaattgtatctggaaatgtaagtaaaatcttaccagttgagcgttcctaaagaaaggtcatatactagttaaattccaccatcttgtctcttagagtgctgagatcttatctggaagctgctgatcaccagcttcccgtgttttctaaagctgctgatcaccagcttcaggtgttttctatctgttgggagactgcctttcaccggtaccagctggaatcaattattatgttagagaggcagtttaacagctgcctgaccatcacctgatgctctcttgacattcctggtatgtgtgggtgggcttctcctgccctgctcatgtctgcctacctactctaacagaaagaatggttttacaatcaactgtatatgaggctataccatcaatattgaaatatgctacataaataatatataaatgtccagctttgagggaattatttcgtcttgcaagtctagactgattcattgtttttcaatgagcaggcacaggacttcatagaaaaggaagttctggaactcttgttatccatagccttttcagttcatcaaaattgagtcaatcattattctagttttttatggctttaatcttgctgcttattctcactttttcttcaaaggagccacacgatcttctttgttataactctgactctcctaactcctgatgcaatacctaaggcctcctctgtttcctggattaactggaatgtcaattttaatattatcctcagttcagacctgctaatttgaagtcagatggcaaaatgttttatatacaaattttttagtgtatatgttattgaagctaaggttggttaaaaatgtatttatttggcatataattaaaatgtttaaaaataataatgca

SEQ ID NO: 67875 - DNA, 885 bp, Homo sapiens
aatcaacatttaggaagtctgtggtagggtctacaaatgagatcaccctgacacagccgaaccaggccacttaattcaaatccttcatctacctataagtgggggcatagactatgtcttgcatggatacttatctttgaacacaaatacagtcaaacgtactgatcatataaatcctactctgtctccagaaatattcattttaacaaatttcccagatgattatattaactaatttttattgagcatagaagatgtaagtactttctagaagtgtcatatgaattacctcatttgttctgcacagaaacattacaagttagctataattaaccaaattttatgaatgggaaaattgaggcaccaaaatattaaattaaatgaaaaagttatactggcagatggcagagatgggatttaaacccaggtagtgtgactccaaagcctgcatctttcctagcacccgatatctaggtaatcctgaaacactttgtctaaaatacattgagtaaaggaaagcaatgaagaaggttgagattgtacaagatttttgttgagaatctctgtagtatataacatgttctttactcttcctctctcacttaaatcatccaaacaagccctctgaatcccaactctgtaactcctcttctgattgttttaaaagcacatgttatatcctaaaacaaacagataatctttctctgaaaattgtctttttccagtgttacacatcaaaacaaatggttacaactcccacaggtattacaagcttstcatctgggaatcatgttcaacacatttttcaccaactttctccaccatgtcaatccaacaataaattagtctaacaatttatctccaaaatcctccttaaaaccatgc

SEQ ID NO: 67876 - DNA, 1197 bp, Homo sapiens
ttgctttactgtactgcaaagtctcatagcagaggaagtaaaaaactgaaacaagtaatccaattgtattagtttgttctcacactgttacaaggaaataccttagacttgaaactgggtaatttatcaagaaaagaagtttaattggctcatgattctgcaggctatacaggaaccatagtggtttctgcttctggggaagcatcaagaaatttacaaccatggtggtaggcaaaggagaagcaggcacatcttacatggctggagcagaaggaagagagagagagaaggtgctacacacttttaaacaaccagatctcacgagaactcacccattataaagtaccaagggaagggggaatggtgataagccattcatgagaactccgcccccacaacccagtcatctccaaccaggcccctcttccaacattggggattacagttcagcgagatttgggcagggacacagatccaaaccagatcactagtagacagtggccttccctcttgactgcaaacattcaccctgtgacccacatgcagaatacattcacctccatgctaagactccaaaaagtttcatcttatcccaagaacaggatccaagtcctgaatctcatgattgacattaggtccatatgttgctcttcttaatatgggcttttaaactaaaaaggcaagttaactgcttatgcccaatgcccacacacccatcactgtgtacctaatacgtaatagtaaaagaggcagagattaaattttgcaaaaacccaaaacamtcccatttgaaaaggttaagactgggaggtacatagcagtcactagtccactgcagttccaaaatccactggacaaaggttgccagggcataggtaaaagaatattctttgattacatctagttctgatccccagaaagcagctcccaccacactgttctccatggctcttcactccaccctacgagagaagcttccttttccatcctctttcccagctgcatcttaagagggcattggcaaatatgtccttcctggtgactaagaagttatctctgtctattcctgcctataaactgttggtgtcctataggtcttttaacagccaaacagtcacagtctctttcatttaaagctggcagtaccttgtcgatttaactatctcaaaagctttgaaatttaatactttgggtata

SEQ ID NO: 67877 - DNA, 1991 bp, Homo sapiens
tgcatatcatacctgtcaagctacctagcaccacgaatagaactaatattaatggatggactaatacaaggatctaatatatgacagtgatagtcttaaaaacaccgatttgttattttccttatatataatccaaattcctttctatccttctggcaatgtttctactgcctgactaccttaaataactatatagtgtcaatttcttgcttgggccaggtggtggctcatgcctgtaatcccagcatattgggaggattgcttgagcctaggagttcgagatcagcctgggcaacatagtgaaacctcatctctatttaaaaaaaaaaaaaaaaaaaaaaatatatatatatatatatatatatatatstcttaatgttaataacaattccctaggtcactagtaataagaagctatgggctttaaacttaaaaggtgctaaaccagtttaaatgtaaaacattctcataatagaattgcactgtatttcttttctactttgatgcttttccaaagtgctatagttcctgtgagatttgtgtcctgcacagaatcaaatgctaggtctttcacttttggatggctgagtaccataaaacatgatttatttggtaacaaaaatgtttccaggagtttaaaaagggaccactactcagagctaaaaaagttctaacagtcactttttaaaaaagctagtttatcatttgtttataaagaaaaacacaactctgtcctacttcctctaataaaaatggaaaatattaagatgagctgtgtgcttataaagaggtgctacacaagtcatcttacgtttctagtcaacacaaacattgcttcagtgacacttaatattcaatacatgatgcattactcttagcatttttgcatttactctccgcatataacaaggtcagatatcaaaacagtcctgatcttagacaactcactaccaatatttaaagctgtttcctcctaggactacagttcctaaactatgcacagggagcaaagtggtactcccttaggataaacttggtcaaggctcagataaccctgagatgaacttagcaaagtccttgtaaagaaatcttcagatgggaaactccacctatgtgaattttaaagctttaagactgacccattcaacagaaatagcagattttctcagagcactgagtttagtgattgtccacgtcaaggaggcacacacacaattttacccacaccctgatgtctcttctgtatggaaaatgcaatcagtgatgaagggccgaaaaaacatcttgccagctgtagctcttttacagagcacaaagtgggaggaagcaatgaatataaatgtgttggtgtgtgcgtctgtggggaaaaaataaacctgtacaaggcaatggctgatccaactatgaattttgattaaacacgtttagtaatacagttatgattcccaaaatgtctacctttgaaggtaaaaaaaaaaaagaaaaccctgaaatgaagagtaaaataaggttcccaggagaaaccttcatcacattttatgcttctggctgttctcacttatcccggtgaatttgggccaaatgtgtacttcttagaaaagcgaagcttgtactgagaatactgttctgaacctacctttttaagtccctgcaaacatatagcccaactttcccaaatctcaccactccatagtctgcaacaggtgtcagcctcacaggtatctgctgaaatttggcactgatctcattagccccaatttccctacatgatttttgttctgtctctaggaagcatagtgtgaatagaagagactgaggtctttctctgggatagtcccaggaaattgaaattaaaggataatgtggagtgcagagccaaaaacttcccttgtgaacttagtcaaacacacatggtatacatattctcctgggtataaacaaatttacattaattaatagcgcaacagaacccaaaacattggtagaacaaa

SEQ ID NO: 67878 - DNA, 590 bp, Homo sapiens
ggcgggtggatccactctcctgactcgaggtcaggacttcgagaccagcctggtcaatatggtgaaaccctgtctctactaaaaaaatacaaaaattagccaggcgtggtagtgtgcgcctgtagtcccagctactcgggaggctgaggcaggagaattgcttgtacctggggggcggwtgttgcagtgagctgagatggcgccactgcactccagcctgggtgacagtgagactttgtctcaaaacaaacaaacaagcaaacaacaaaaaccaatgagtggctgggtaatactccccgaggaggtgcatatcaagggtgatatagtttgtcccttccatatgtcatgttgaaatgtgacccccagtgttgaaagtggggcctagtgggagatgtctgggtcttgggggtggatctgtcatgaatggcatgatgcccttcctgcagtaatgaattcacatgagagctggttgtttgagggagcctggcatccctctcttgctccctctcttgccatgtgatgcctggtcctgctttgccttcctccatgcatgagtataagcttcctaagtccctcaccagaagcagatg

SEQ ID NO: 67879 - DNA, 610 bp, Homo sapiens
ccctgcagaagaggcaaaaaaacaaacaaacaaacaaaaaaaagaagtgagaattttctcataggggcagcataaatctccagtctttgccctgtcacgcagaaacaagattataatatctgctgattatgcttattggtcaatgggaagatgttgcatgttttaaaggataagatcaggtcaaatacttctagaccttccattttcttaataccttcagtagttctctgcttccattatttaggcattagcccaggagagacagaaaatccgatactatcattagctcccactttttctggtgcccctaaatgtgaagattaagcaattttttttttttttgyatatggctcatttgttttactgtatgaccttgaggctaaggcttatgaaagcataatgtgtaggtgtataactgacccaaaaaaactagtcttctgcttctgcagaaagaatcatgtttgattctttttccattttaatttccaaatcatctaaatcctactaatatttggaatcaacagccttcttccataactttcagaactttcttggtaccaatccctccctgggagcactgaaagccaaatcacttctctcattgtatgtt

SEQ ID NO: 67880 - DNA, 615 bp, Homo sapiens
gtcccatctactcaggtggctgaggcaggagaatcgctggaacccggaaggcggaggttgccgtgagcggagatagcaccaccgcactccagcctgggtgacacagcaagactccgtctcaaaaaaaaaaaaaaaatccawtttggaggttgttttgtgtccgtttttgttgttgttgttaactgtgttaattcacagatttgaagttttagaaaattaactacaactaaatccgagctattctgctgacagcatttattcaaattatgcttaaagttttcagagataaccaaagccaacagaattcaacgtgcgctcaggtctcgctttgccctcgctgtgccttctccgtaggccgctctctgggccaagcacctccccggaacgcgcgcaaccgcggcggacaggcagccgccggcgcgggagctgaggtaggagcccggggcacccacaggccgcagcggacgcacgcagctagcacggtccccgccccgggtcgcgcctgcggcctccccagcgtctgcgccgcgagtccgctggacccgccagggcgtaacggcgggtaacccgccccacccgccgcacaacacacccaactgcacggactcacgtccg

SEQ ID NO: 67881 - DNA, 615 bp, Homo sapiens
gtcccatctactcaggtggctgaggcaggagaatcgctggaacccggaaggcggaggttgccgtgagcggagatagcaccaccgcactccagcctgggtgacacagcaagactccgtctcaaaaaaaaaaaaaaaatccattttggaggttgttttgtgtccgtttttgttgttgttgttaactgtgttaattcacagatttgaagttttagaaaattaactacaactaaatccgagctattctgctgacagcatttattcaaattatgcttaaagttttcagagataaccaaagccaacagaattcaacgtgcgcycaggtctcgctttgccctcgctgtgccttctccgtaggccgctctctgggccaagcacctccccggaacgcgcgcaaccgcggcggacaggcagccgccggcgcgggagctgaggtaggagcccggggcacccacaggccgcagcggacgcacgcagctagcacggtccccgccccgggtcgcgcctgcggcctccccagcgtctgcgccgcgagtccgctggacccgccagggcgtaacggcgggtaacccgccccacccgccgcacaacacacccaactgcacggactcacgtccg

SEQ ID NO: 67882 - DNA, 535 bp, Homo sapiens
tttccagccaccctccagggtgccctgactcaccttccctacagatggaggcaaagaggctccacagacaaaccccctgcctgaggtcacacatcggctaactggccaggttcctactgaccaggtggccccaacgaggcccctaatgagcactcccccattgaccaggccccactgaccaagtccccacggaccatgyctccctaaccaggcccccattagtaggcctcatggaccagaccccactgaccaatttcccactgacctggtccccactgactgggttcgcactgacaagaccacaatttaccaggttgctgctcacctcacccccattgaataattctccatggatcagtccccagctgactgagccccctctgaccaggctctcactgaccaggctccaagccactaaggccccacactgaccagacccctaatacactgaatacaccccaccgaccagttttttattgtttatgttccaaccgatcaggccccactaataagagcaccactgaccaggtcccca

SEQ ID NO: 67883 - DNA, 718 bp, Homo sapiens
cactgtgaaagttttcgttttcacatctttcattagatgtgtgtaagaaaaagatactgaatatagtatctactaacccaacaatgaaaaggaatgccatttgctatttacactttattactaaaataaacctaaatttaattaatacattttggcaacatacttttctttgttcctgtaattatttgttctacacggtccagctccatctaaaataagtaaawaataataataataatgtttaagttaaacaagaaatattatcatgagattaatatattacaaaatgtggcccttagtatttttagtgactagacataacacaaagtttgcttaaatagaaaattaatcacattaagtaaagtaaaatttctacttattctaagtttagataatagaggatgtatctgtgtaatgctatttagagtaatctgacaaaaatagataatattggtctattggatatacataattttagaaaggtggtgttttatttgtacaaaggttaaacaatggccgggcacagcagctcatgcctgtaatcccagcactttgggaggcaaatgtgggcagatcacaaagtcaagagatcgagaccatcctggccaacatgatgaaaccctatctctactaaaaatacaaaaattagctgggtgtggtggtgcatgcctctagtcccagctactcgggaggctgaggcaggaaaatggcttgaacc

SEQ ID NO: 67884 - DNA, 680 bp, Homo sapiens
ccctgggccaggctgcccatgtggggccaggaggcagctcagagtgggaggcagagaagtgtgctcagagggcacctgtatctggatgtaatgtggtcctgagactggctgggaagtgcttccagggtatcatatgtgttatgcagttacttcctctccccagccttaccctgtaggaattctagtgactatgttgccaccatcttggagctccatgccctcatagtgtaatggcaccagcagatctgcctgtgcatggacttcctgtactacctcactcctgaggggagatgtttctgcagggcctatgacctggtgcacaactttagacaccatcatcctggagcagcactgcaccctcactagccagagtgttgacatcctcaaggccagggccacattcaagactttggacttcattgatgcacttgtgctgagcaaggtgggcatctctggtatcttaattcaggaggcagaatacagcttgagatcaggtgtctgatcaaagaacttgaacttgatctggagggctctggggagccatggaaggttctggataaaggagggwcagtcagccacgttttagaaatgactgtggaagtcttcctggaaggagtgaacaagagccaggagaccagggagggagcttgtggggcaggtctggagatggcaagggaggg

SEQ ID NO: 67885 - DNA, 805 bp, Homo sapiens
accccccatcctcatcttttgaccccactcccaaaataatctccaccattctccccacacccgtacctccaacccccatgcttcaccatgattaaatcaccttccaccaggtcccaactttcacattccccattacaattccacrtgagtatcggtagggacacagaaccaaatcgtattattctgaccctagttcccccaaatctcatatctttgacacactgcaaaatacaatgatgccttctctacagtcccccaaagtcttaagtcattccagcctttactgaagtatccaaagcccaaagtcttatctgacacaaggctgcagtcccttctgcctctgagcctctgaaatacaaagtaagttaattactttcaaggtacaatgattgtacaggcattgggtatgaattcccagccaaaagaaaaaactttgccagaaagaagcacaaaatatagatgagacttacagatccgatgcaagtcaaaaacccagcaggccagtcattccattgtacagctccaaatcatcacttttcaatccaaatcccacatccagaacacaggggtgtgatggctgggctcccaaggccttgggtagctctgcacctgtggctttgcagggtctttcccccacagctgccctcatgggctgggctagtgttgagcacttgtagctttccacactgagggtgcaagctgttggtaggtctatgaatctgggtttgcagaatggtgcctccatgtgtgggggttccaactctatatgttccttctgtaatgccctagaaaagctttcccatga

SEQ ID NO: 67886 - DNA, 1323 bp, Homo sapiens
tactctgttcttatgcttctctctgtagaactccaatggcacagatgtgtcattgtattgttacacagatccttaaggctatgctcatttttcttcaaacgtttttcctctctgttgcttatattgaatactttttattgatctatctttaagttcatggactttttcctttgtcatttctattctgctgttgagatcatcttgtgaatttttaatttcagtgtttttatttttagttctgaagtgtaactgtcttttcacttgcaagttgagattttccttgttctttacatgctgaaccattttggattatatcctgaatattttggatattatcttatgagactctgggttttgtttaaaacgtcaggacaatgtcttttgctgttgttttcaatggcaatcggctaggtcagattcaatatgcaaattcctccagtgggctgtagttctattgtggttcagagccatgtggtacaagcacacagagaaaaagagcagtgaagaatcactctgaactcctggaaccatagattctcaggtaagagagaagagtttcttccttcagagttgtaggtgcttcttgttggtagctgttgctctttgcccagctgcaaccactgaatcaccagcacagtattgcttaggttataaagaaaggaaagcagaaatataggagggaattcatcctcctctttctcacctgtaggggctcattttccttcccctcagatcagaaagtgagagatcttcgggaattctttttgtctgtaaccaggatgtatttcgtttctttaagcctcctctgactggccagttttgcatgttgcttgttttcagttttcaaagtaagaaaaatcctatgattctcctgatgctttataagtctatgctttcagattaatgcgaaagattatttaaaaacaagctttcggtaaaaatgaagggcatccaaagaagcctgctttccacttggcttctggccatctttcctttctgcgggggttcaagagcttggaggcattggatctggtatcagagcggtcaccttccccactgatggggaagcccagaggccttaggaataaacgaagcccgtactgaggaaagggaagctgagaggaccgaggaaacaccgactttacacgcctgtggactgcaggaaccatttatggcacgagcgggtctttacttatttatttttatttttagattttactttargttctgggatacatgtgctgaacatgcaggtttgttatatacacgggtatacatgtgccatggtggtttgctgcacctatcaacccgtcatctaggttt

SEQ ID NO: 67887 - DNA, 629 bp, Homo sapiens
tttccactgcattctattgtttaatgagtcacaggccaagtgcagattcgatgcagaaggggacatagaagggaatgatccattgagggccagctttggagatgagctaccacaggatgggaatgcataggtgggaataaggagacaaaatttgaattgaatttgaaattagaagtttacwtttcatattggaccagattgagtttttaaataactgaaaatgacaggaaataaagtattctagacaaatgttattaagggatgggaaaggaatattatacataacaggttagagggcatttggaataatataaaatatggtatacccctatttggtttaaatgattcaaaaaaccaactacataaaactgcataaatattaatgatgattacaagtcattaaactagcataccaaaattgaggtaagtagaggtgttttattaatctatgttaactcttacttttaagaatgaacatcttaatttctatctgaatagtgtgtgatctgacaaatgttttatatttattactttttttttttttgagacggagtttcactcttgttgcccaggctggagtgcaatgatgtgatctcggctcactgcaacctccgcctcccaggttcaag

SEQ ID NO: 67888 - DNA, 1415 bp, Homo sapiens
gaattttagattttaaatgctaaagaataaagagaggccaagcgcagtggctcatgcctgtaatcccagcactttgggaggtcgaggcaggtggatcacctgaggttaggaatttgagatcagcccagccaatggccaacatggtgaaaccccatctctactaaaatacaaaattagccgggcgtggtagcaggcgcctgtaatcccagctacttgggaggctgaggcaggagaaccacttaagcccaagagatggaggttgcagtgagccaagattgtgccattgcactccagcctgggggaaaagagtgaaactccctctaaaaaaaaaaaaaaaaaaaaaagcaaaagaaagaataaagagataaataagcaccatagtgcaaattttctagataaaattggtgttgacatttatgtctcagtaaggagatactttagactttaaaaagataaaagaatgaaagaaagcaataataataataaaacacataactaggtactgttgaagattgtttggaactaagatctctggtctatttttatgaataattctcttcgtgttatgtcaggtgagtcacttttctttctatgaatcatatttgttgtgatggttcaatatttactgactacttataacacacaaagcacaatccctgaaggtgtgataacacagccacctgggggttcattctctctctacttttgttaacttacgcaagttccaagagactaggagataatgacaatcagtacaatagtagagtgagaataacattgactacttactgatgaggtgaactttgaaatgagttgtgcaggaaagaaacagttgccaacatatgagaatagatctctgtcctaccggaagagatttaggttagcagtcatagggttaatcaaggagatwtggtgtaaaaagggagaaaatggcagttggctttaaaagagagcccataacttcccctttttgccactgtcactttactcagagggttataggttcaggcattaatggagccctgttgcagaggatggacacttggcatgatcagggatgcatgtgtgtccctacagagtaccctctgactctcccttttttactcttaacattttattgcttctttttttctctctcttggaatggccctactctgagcaggcttggggcgaatagcttagattcatcactagctctcagagagaaatgtccttcccttctccttgtaggtgtgttattcattaggtgcttctttgtgctgccccatgccccagttccaggaaactgcaacgcaaagctacaccctcccaagactgaatcaggaagaaattgaacccctgaacagaccaataatgagctccaaaaatgagtcagtaataaatatcctaccaaccaaaaaaagccaaggaccagg

SEQ ID NO: 67889 - DNA, 650 bp, Homo sapiens
aaagaaccgctgctagcattttctatgttctctgtatgttattttttctttttaactactaccactaattacatgtaggattgccaggttaaaaagaggatgactagctaaatttgagtttcagataaacaacgaataattttttggtatatgtatgtcccaagcaatctttgggacatacactaaaaaatattcattgtttatcagatatttaaatttaactggacatcttctatttttatttgcaaaatttagcaattataaatatatgctcattatacaaatttttatgtataatatacaaaaagaaagacttaaatcacaaggattctcatattctcttcactctagattcctttcttaatcccttaatataattggaactcttttgcgtatttcccagctacatttctgtaaatgaaaatgttttctaaatgattattctcaacaaataataacagcatctttatcttctttggtttttcgttctttccctggagccatctcattaagacgaatgtggatgaagcccagagcaagaaacactgacacaactatacattttcagtctgttaagaatttactaaaatgttgacagcagacccaggttatgatttccatctttggcaaccaaragaatggcaggggtc

SEQ ID NO: 67890 - DNA, 677 bp, Homo sapiens
cagagccctggggggagcatcatgaccaatgttcccctgtccccaagctctccaccatccaggccaatgactttgccgagctctgagcagctgcacccatggactcagtcctgccctcacagtattgcctgatgtggcccagtatattctgttctttgaagatgggtaggctgaccagaatgccaggcctggaggatgtgagaagggatgtggaggccatttgagagtggaactccctgcaggctggctgtggggggcccgtgaagggcttagaaggccccacaacccagasccactgcaggggcctccctacgggggctactcctgagcctggccaggctggtagttttgtttttccttggccaagctcccggtctgggatcccatccccagttctgcctctggggtcagctttccatgcaggggctgagatgaacacatggggaagggagggcaggagcccctgcgctctgcacctcatagatgccaaagccgatggtgtgcatgtcctcgcccatcttcctctgccgccgtcggtgcttctgaatgagccccaccaggaaggtgcagccgctctccccatcctcatcgtcctcatcctcctcctccagcttgatcaggtactgagggttcatccagaatgtgtctgcagccagaaaggggcagaggagcccagc

SEQ ID NO: 67891 - DNA, 917 bp, Homo sapiens
ggaaatttagatagcagaactctaaatgctgacagtaatggcaaggaaagaaatctacaaggagacactttgtaactttcaatacgtaaggcttgcagagttagccctgggtactttaaagatgaatgtgggcgctggaggcacaacacacctgctgactgtactcatttatatttgctgtttgacatatttgagctatttgactccaaagctctatttacattttccaatgcctgtgaactgacaggcgatgttttggaaatacttaaaatatttttaatcaatttcctgaaaaattattgtacatgagcacataaatcaaaaagaagaacttgtttctcaaagggcaatgtctatgagacttagcatctgacatatccaaggctattcattttaatatttgaggaaacttggctggattccttctttcatatgactgccagaatttctagtcaataaataatctaataaactcaaggactaayaggcagaaaaaagggtaaagtgaaatataccattgacagaatagacacatggtgagtgacttaatttcttcctaaactgaagaatgtgaccactgttcaagttagaaggagaagttgtgtgtatttattttttaaattatatgtcacatatataactcttgtacacgtgacaaagttctatgctttcaaagccccatgaagacactttatttgtatttagaatgaaatgactaagaaacaatctataatcatgtttttttttttaaactataaagtcatagaactagctggcatcaaatacttaccaggaagtagacgttctctctacttccatggactaattatgtgcaattctccttcattttccccatgattaataacacccaaaataaagcagggccgcatttaggcaagtctcatttgaggtgatgc

SEQ ID NO: 67892 - DNA, 1088 bp, Homo sapiens
tcatggcactattcacgatagcaaaggtctagatgcccatcaacagtggaccagataaagaaaatgtgctacatatacatcatggaataataaacagtcatgaaacaacaaaatcatgctctttgcaacaacacagatgaagctagaggccattattctaagcartttaatgcaggaacagataacacaattctgcatattttgttctcacttataattaggagctaaacattgaatacaaggacataaagataggaacaacagtcactgggggctactagagggggaaaggtgggagggggtcaaagttcgaaaaattacctatctggtaccctgctgtctacctggttaatgagatcatttgtacatcaaccctcagcaacatgcaatttacccatatagcaaacctgcacatgtatcttcggaacctaaaataaaacctaaaatcctgaaattttaatattttggaaaagtactttaaaaatgtatataaaaacatatgtgtatatatgtatccatatacaatgtatatttacacaatatacatctgcatatatattttcttttgattcagattccaatatggtttgatcaagcagtgttttccaaagttagttggtggctgattggctcacttaaaagatatgatgctgtctctgactggttgactttcagaaacatgtttattaaagtaaattttcacttcagtgagtagttaaacaggcttaaaaccaactatggacttatagtaacaattaagacggaatcagtacactaaaacgtatttcctcatctctaaaaaccatgaagagaacacaaaattcataaaacaactccctaaacactctggaaagttcataatagcagggatatcatagaaaagccaaagattgaagaatgaacaatataggagtgaatatcctttatttccttctacttttatctcccatctttgaccatagatgacctccgtgtagaaacgctcatcaggttcagaacataaatcctacaagagaaatactgtctttttggccataagaccaagaaaatgcagccttgtgaatataagagtgtgaaatgaatctttg

SEQ ID NO: 67893 - DNA, 1088 bp, Homo sapiens
tcatggcactattcacgatagcaaaggtctagatgcccatcaacagtggaccagataaagaaaatgtgctacatatacatcatggaataataaacagtcatgaaacaacaaaatcatgctctttgcaacaacacagatgaagctagaggccattattctaagcaatttaatgcaggaacagataacacaattctgcatattttgttctcacttataattaggagctaaacattgaatacaaggacataaagataggaacaacagtcactgggggctactagagggggaaaggtgggagggggtcaaagttygaaaaattacctatctggtaccctgctgtctacctggttaatgagatcatttgtacatcaaccctcagcaacatgcaatttacccatatagcaaacctgcacatgtatcttcggaacctaaaataaaacctaaaatcctgaaattttaatattttggaaaagtactttaaaaatgtatataaaaacatatgtgtatatatgtatccatatacaatgtatatttacacaatatacatctgcatatatattttcttttgattcagattccaatatggtttgatcaagcagtgttttccaaagttagttggtggctgattggctcacttaaaagatatgatgctgtctctgactggttgactttcagaaacatgtttattaaagtaaattttcacttcagtgagtagttaaacaggcttaaaaccaactatggacttatagtaacaattaagacggaatcagtacactaaaacgtatttcctcatctctaaaaaccatgaagagaacacaaaattcataaaacaactccctaaacactctggaaagttcataatagcagggatatcatagaaaagccaaagattgaagaatgaacaatataggagtgaatatcctttatttccttctacttttatctcccatctttgaccatagatgacctccgtgtagaaacgctcatcaggttcagaacataaatcctacaagagaaatactgtctttttggccataagaccaagaaaatgcagccttgtgaatataagagtgtgaaatgaatctttg

SEQ ID NO: 67894 - DNA, 1088 bp, Homo sapiens
tcatggcactattcacgatagcaaaggtctagatgcccatcaacagtggaccagataaagaaaatgtgctacatatacatcatggaataataaacagtcatgaaacaacaaaatcatgctctttgcaacaacacagatgaagctagaggccattattctaagcaatttaatgcaggaacagataacacaattctgcatattttgttctcacttataattaggagctaaacattgaatacaaggacataaagataggaacaacagtcactgggggctactagagggggaaaggtgggagggggtcaaagttcgaaaaattacctatctggtaccctgctgtctacctggttaatgagatcatttgtacatcaaccctcagcaacatgcaatttacccatatagcaaacctgcacatgtatcttcggaacctaaaataaaacctaaaatcctgaaattttaatattttggaaaagtactttaaaaatgtatataaaaacatatgtgtatatatgtatccatatacaatgtatatttacacaatatacatctgcatatatattttcttttgattcagattccaatatggtttgatcaagcagtgttttccaaagttagttggtggctgattggctcacttaaaagatatgatgctgtctctgactggttgactttcagaaacatgtttattaaagtaaattttcacttcagtgagtagttaaacaggcttaaaaccaactatggacttatagtaacaattaagacggaatcagtacactaaaacgtatttcctcatctctaaaaaccawgaagagaacacaaaattcataaaacaactccctaaacactctggaaagttcataatagcagggatatcatagaaaagccaaagattgaagaatgaacaatataggagtgaatatcctttatttccttctacttttatctcccatctttgaccatagatgacctccgtgtagaaacgctcatcaggttcagaacataaatcctacaagagaaatactgtctttttggccataagaccaagaaaatgcagccttgtgaatataagagtgtgaaatgaatctttg

SEQ ID NO: 67895 - DNA, 1088 bp, Homo sapiens
tcatggcactattcacgatagcaaaggtctagatgcccatcaacagtggaccagataaagaaaatgtgctacatatacatcatggaataataaacagtcatgaaacaacaaaatcatgctctttgcaacaacacagatgaagctagaggccattattctaagcaatttaatgcaggaacagataacacaattctgcatattttgttctcacttataattaggagctaaacattgaatacaaggacataaagataggaacaacagtcactgggggctactagagggggaaaggtgggagggggtcaaagttcgaaaaattacctatctggtaccctgctgtctacctggttaatgagatcatttgtacatcaaccctcagcaacatgcaatttacccatatagcaaacctgcacatgtatcttcggaacctaaaataaaacctaaaatcctgaaattttaatattttggaaaagtactttaaaaatgtatataaaaacatatgtgtatatatgtatccatatacaatgtatatttacacaatatacatctgcatatatattttcttttgattcagattccaatatggtttgatcaagcagtgttttccaaagttagttggtggctgattggctcacttaaaagatatgatgctgtctctgactggttgactttcagaaacatgtttattaaagtaaattttcacttcagtgagtagttaaacaggcttaaaaccaactatggacttatagtaacaattaagacggaatcagtacactaaaacgtatttcctcatctctaaaaaccatgaagagaacacaaaattcataaaacaactccctaaacactctggaaagttcataatagcagggatatcatagaaaagccaaagattgaagaatgaacawtataggagtgaatatcctttatttccttctacttttatctcccatctttgaccatagatgacctccgtgtagaaacgctcatcaggttcagaacataaatcctacaagagaaatactgtctttttggccataagaccaagaaaatgcagccttgtgaatataagagtgtgaaatgaatctttg

SEQ ID NO: 67896 - DNA, 1088 bp, Homo sapiens
tcatggcactattcacgatagcaaaggtctagatgcccatcaacagtggaccagataaagaaaatgtgctacatatacatcatggaataataaacagtcatgaaacaacaaaatcatgctctttgcaacaacacagatgaagctagaggccattattctaagcaatttaatgcaggaacagataacacaattctgcatattttgttctcacttataattaggagctaaacattgaatacaaggacataaagataggaacaacagtcactgggggctactagagggggaaaggtgggagggggtcaaagttcgaaaaattacctatctggtaccctgctgtctacctggttaatgagatcatttgtacatcaaccctcagcaacatgcaatttacccatatagcaaacctgcacatgtatcttcggaacctaaaataaaacctaaaatcctgaaattttaatattttggaaaagtactttaaaaatgtatataaaaacatatgtgtatatatgtatccatatacaatgtatatttacacaatatacatctgcatatatattttcttttgattcagattccaatatggtttgatcaagcagtgttttccaaagttagttggtggctgattggctcacttaaaagatatgatgctgtctctgactggttgactttcagaaacatgtttattaaagtaaattttcacttcagtgagtagttaaacaggcttaaaaccaactatggacttatagtaacaattaagacggaatcagtacactaaaacgtatttcctcatctctaaaaaccatgaagagaacacaaaattcataaaacaactccctaaacactctggaaagttcataatagcagggatatcatagaaaagccaaagattgaagaatgaacaatataggagtgaatatcctttatttccttctacttttatctcccatctttgaccatagatgacctccrtgtagaaacgctcatcaggttcagaacataaatcctacaagagaaatactgtctttttggccataagaccaagaaaatgcagccttgtgaatataagagtgtgaaatgaatctttg

SEQ ID NO: 67897 - DNA, 587 bp, Homo sapiens
ctaccaagtagctgggactacaggcatgcaccatcatgcccggctaatttttgtatttctagtagagaaggggtttcactatgttggccaggctggtcttgaactccccgaccttgtgatctgcctgcctcggcctccaaaattgctgagattacaagtgtgaaccactgcacccagcctctctctgctttaatcatacaaggtgagcaacactatagtcagccacctatctcagtcctaggcataccataatctagtagccattgggtcacaacccctgatgaccacctggtccctgcctctccagagtcccccatcccccagtgtcaatggggatggtgcgactctggacacttgtatgagttcatggaaagaaatcctcctctcttctggcaagagagagagggctgcttctgccatcccagagggttaagggtaccctgagaagtcaggattccagggttttctgtttaaatcatgggctaaytgtgtcttaaccaaggtatacaataatcatcataaataattgcactactcgggacccataggctagacatatgaggctactatgagtgtttcaaagtcat

SEQ ID NO: 67898 - DNA, 1430 bp, Homo sapiens
tttacatagattcaaagacagtattttgctgattcatgaaacaaaaggacaaatggccaaagagtggaggataataataataaagaatagattatatatctaatatagataggtgagaaactgcagggaggaggataggaatagacttcccaggacaaaatgatgagatctagtataggcaatctggagttaaagtgtaaaataactggaatggtaagcagttatgacatatagcaaaatgtattagaattgaagactttagaggataaacagttccaagagagtataagggttagggtgtgatcacgtattctggtggatgaaatttagagaaacaaatcatccttggtgaaaaagagttcaaataatataaagccagggtattatataagctttcaacatggacattgaattccttggatgaccgcaaatcttgaggcagaataaaagactgtgagtaaattgctcgtcttcaatagagatggaataatggccagaatgttggtaggtgaacacagcaagaagaaatataggatggtattgccagatggtgctattctcaaaggagaaatttcgtttattcaactaaagagattttatcaagctctcactctatgacaagggtaggcatttgggatccaaatctgtgtaagatgttcactaaactttgaagatcctagaaggcgagtgaacaggctctatttttttttaaaaaagcttattttgcacaaatatggaagagaaagaatttggatgcagcagcataaaattccaacctcatctcccaactccatgttaaagtgtgagaaaataaataatttacacacaaaagacaatcagagaaagaaaaaaacacaagaaagaaagaactgcattgttgtggaggaagtccaggaattgatctgtgagcaggttgagaatgtaagagtttcagtaggtgttgcagaggatgcaaatgactaacaccagtgacctatgattataacatctaatatataagtgtcaactaccgtcagccacaataatgttgcataacaaacaaccataaatccttgtgacataygagtataaaaagtagaggttcgtcttcaaagactttcctccctatctaattaagaataaatagtaacttctcttagaagcaaaatttattcaaagacctgtgctaacattcttcaatatctgctagcagtaataaagaaatcaatgtactttatgttcttagctcccacaatttagcctaaatatttgccctgacatgcttatcctattccaagcaagtattaggtcatagcctgttcctcttctttatttgaaggtgtttttacctttatcagcattccacaagttacttctccttcctttgttctcctctgcctttgcctcttttaaaaagttctaagttgctagccaatcgggacatatacaga

SEQ ID NO: 67899 - DNA, 782 bp, Homo sapiens
gttttccggctttgggtctcattcttctctggcaatacacacacacaaacacacacacacacacacacagaaatatatatacatgcaaacacactccatagcaaatttcataaatttgtatatttgtgtgtgtgtgtgtgtgtgtaatatgactacaatcttgtgatctcaggaagggagaattagtctaaaatttgtctatgcaatgaaagtatttttataatagatggaatgtaagatattttaactggtaagcaataggttgccaaataaatgttcttagtagttttaaactactgttattgaagtttgtgtcatttagaaagaaagagtaattgagtagtgtggcaataaacatacrtgtgtgtgtgtctttatagcagcatgatttatattcctctgggtttatacccagtaatgggatggctgggtcaaatggtatttctaattttagatccctgaggaatctccacactgtcttccacaatggttgaactagtttacagtcccacccagtgtatttctccacatcctctccagcacctgttgtttcctgactttttaatgattgccattctaactgtaaatgacaagttaatgggtgcagcacaccaacatgtcacatgtatacatatgtaacaaacctgcacgttgtgcacatgtgccctagaacttaaagtgtaataaaaaaaaatatatatatataaaagaaagaaagagtaattgagtaaataagtaggttatgcaagttccctgtggagaagtgatcttctaacaaatgg

SEQ ID NO: 67900 - DNA, 654 bp, Homo sapiens
accagatggtgatttatgtcttttccacattggctattattctcttctcccagacttgcattacaaataatgctttctccagacacttgtcctgcaaccagtctttcttatgacacaataaagtccctggaaaagagcctccaagaaggtgtcaattcctcttgtgtctgaagcatcccaagtttctatactcatatgtgaactatcacacacagttttgtaattacaagtaatataatatgagttagaaatttgggtgaatctgtgttaaaaaaaaaacatgttaagacaattaggattgtgttatttcatttggtgtgtatatatttatgtgtgtatatgtaaagaagtatatgtgtttaaaatgtaatatgaagtatagaaaatattgatacatttataaagtragaacatagtggtatgtctttattattaaagagaggcaactcaatgattccctgtcatctaacctaacaaagctcctagtttacatatcagaacaataatttccttataaatacaaaaagtgagatttcagtacagtaagcattgaacacttgtagtccatgaacaagagctgctgagaattttaaataaaaatcactatgaaaatcctaatctgagtattcataatgcagcatatataggggatcc

SEQ ID NO: 67901 - DNA, 893 bp, Homo sapiens
gttgcctcctaatactaaaataggatttggcaggaaggtgagcgtggcagaatttgggagaagaaacttgccttcttactagccattgtagagttccacaatttactttaaaaatgccttggttggctttttggctttagtaggaagaacaaggacaaaggatggttagttacaataacagctaatactctgcatgaaacttcgtacgagcctggcattgttctatatgcattttaggtatactaactcactaaattctcacaatattagcacgaagcaggtaatgatattactgtgaccagtttagatatgaggaaataggcacagcatggttaagtgacttccccagggtcacagagctagtaattggcagagccaggatttgaactcaggctgcgtggttccaaagtctgtacttttaagcattagtaacaacttgcattgcacttttagtcccatttgatatttcaaacagttttatgaggtaagtacattcatgacccttttttttttttaaaggagagagagatacagagatagaaatatatatatataatagatagaccaatagatgaatagataggtagagatagaatgaactttgctaactttgyacctgaagtgttctaaagacatttcagtgccaacgttctaggactctatgccttatattactggccaataacacagagaaagtgtcagagagagggtacacatttccaagccttctgacatcaagtctagtgctttttactactatactattttatggacacctccctccactgttcctgattctgtggggtgaggggtcaagagatgtggaggcttggtctctgcactacagacgccctgggctatcctaccttcccccttctttagcctcagccaca

SEQ ID NO: 67902 - DNA, 674 bp, Homo sapiens
taaggtggagaatgattgcttcagcatatcatgaatcagagagatccttctaagctaggaagaattccgatgccagcactgggcagttacttacggatggaagtggtgggagaagatggtgctaaaaacaaaactaagcctcacatagctgttcagcccagatcctctccccctcgcttcagtaaccatgatcatcaaagaaaactgcatgcccaacacacacacaaacacacacacacacacacacacgagttacttgttgctttattctcatgtatgactgtctttccctttcaagactatcttggtgtttgatctagactgaataccgtctggtaaatgtgccacaggctaggcagatggtgggattaatagtgtgatttttctctggctccacwttcctttaggaaggtgactcttagcaattgatgtgaataagaatcacctggaaaattttttaaaatataaatacctgagcaccccttgtgaggttatgatttagcaggcctggagaagagccactgtctacattttaacaaacttcacagaggctgtagatagaattggtctatgatcacaattctaagaaactttaagaacaatactgatgagaaatgggaaatactatgtgcttaagagatgcccaaaggtttcaaaaaatttgaaaagccaaa

SEQ ID NO: 67903 - DNA, 674 bp, Homo sapiens
taaggtggagaatgattgcttcagcatatcatgaatcagagagatccttctaagctaggaagaattccgatgccagcactgggcagttacttacggatggaagtggtgggagaagatggtgctaaaaacaaaactaagcctcacatagctgttcagcccagatcctctccccctcgcttcagtaaccatgatcatcaaagaaaactgcatgcccaacacacacacaaacacacacacacacacacacacgagttacttgttgctttattctcatgtatgactgtctttccctttcaagactatcttggtgtttgatctagactgaataccgtctggtaaatgtgccacaggctaggcagatggtgggattaatagtgtgatttttctctggctccactttcctttaggaaggtgactcttagcaattgatgtgaataagaatcacctggaaaatttttyaaaatataaatacctgagcaccccttgtgaggttatgatttagcaggcctggagaagagccactgtctacattttaacaaacttcacagaggctgtagatagaattggtctatgatcacaattctaagaaactttaagaacaatactgatgagaaatgggaaatactatgtgcttaagagatgcccaaaggtttcaaaaaatttgaaaagccaaa

SEQ ID NO: 67904 - DNA, 674 bp, Homo sapiens
taaggtggagaatgattgcttcagcatatcatgaatcagagagatccttctaagctaggaagaattccgatgccagcactgggcagttacttacggatggaagtggtgggagaagatggtgctaaaaacaaaactaagcctcacatagctgttcagcccagatcctctccccctcgcttcagtaaccatgatcatcaaagaaaactgcatgcccaacacacacacaaacacacacacacacacacacacgagttacttgttgctttattctcatgtatgactgtctttccctttcaagactatcttggtgtttgatctagactgaataccgtctggtaaatgtgccacaggctaggcagatggtgggattaatagtgtgatttttctctggctccactttcctttaggaaggtgactcttagcaattgatgtgaataagaatcacctggaaaattttttaaaatataaatacctgagcaccccttgtgaggttatgatttagcaggcctggagaagagccactgtctacattttarcaaacttcacagaggctgtagatagaattggtctatgatcacaattctaagaaactttaagaacaatactgatgagaaatgggaaatactatgtgcttaagagatgcccaaaggtttcaaaaaatttgaaaagccaaa

SEQ ID NO: 67905 - DNA, 674 bp, Homo sapiens
taaggtggagaatgattgcttcagcatatcatgaatcagagagatccttctaagctaggaagaattccgatgccagcactgggcagttacttacggatggaagtggtgggagaagatggtgctaaaaacaaaactaagcctcacatagctgttcagcccagatcctctccccctcgcttcagtaaccatgatcatcaaagaaaactgcatgcccaacacacacacaaacacacacacacacacacacacgagttacttgttgctttattctcatgtatgactgtctttccctttcaagactatcttggtgtttgatctagactgaataccgtctggtaaatgtgccacaggctaggcagatggtgggattaatagtgtgatttttctctggctccactttcctttaggaaggtgactcttagcaattgatgtgaataagaatcacctggaaaattttttaaaatataaatacctgagcaccccttgtgaggttatgatttagcaggcctggagaagagccactgtctacattttaacaaacttcacagaggctgtagatagaattggtctatgatcacaattctragaaactttaagaacaatactgatgagaaatgggaaatactatgtgcttaagagatgcccaaaggtttcaaaaaatttgaaaagccaaa

SEQ ID NO: 67906 - DNA, 674 bp, Homo sapiens
taaggtggagaatgattgcttcagcatatcatgaatcagagagatccttctaagctaggaagaattccgatgccagcactgggcagttacttacggatggaagtggtgggagaagatggtgctaaaaacaaaactaagcctcacatagctgttcagcccagatcctctccccctcgcttcagtaaccatgatcatcaaagaaaactgcatgcccaacacacacacaaacacacacacacacacacacacgagttacttgttgctttattctcatgtatgactgtctttccctttcaagactatcttggtgtttgatctagactgaataccgtctggtaaatgtgccacaggctaggcagatggtgggattaatagtgtgatttttctctggctccactttcctttaggaaggtgactcttagcaattgatgtgaataagaatcacctggaaaattttttaaaatataaatacctgagcaccccttgtgaggttatgatttagcaggcctggagaagagccactgtctacattttaacaaacttcacagaggctgtagatagaattggtctatgatcacaattctaagaaactttaagaacaatactgaygagaaatgggaaatactatgtgcttaagagatgcccaaaggtttcaaaaaatttgaaaagccaaa

SEQ ID NO: 67907 - DNA, 931 bp, Homo sapiens
cgcagctggatgattcttttccaatccaggctctacatgagacataaagattttcattgcacttatctgtctcctatgcacttcaataatactcatcctctttttccccgtgagatcatctccttcagtactgcatcttcaatgcccatctctgagctggcacaataatgaagctcagtgtaaatagtgaatgaataagctaatgatcctgtgtactattcctgcacaaatcaagtcaacttcactttttttctgctctccttcctcccactttatcatattccatcctcactacaatttccctcatctctataagatctttctgtacaagaaggtatttccacgtttgaattcacgagcttccacctccattttgagctgtcaatcctgctarcaatgagcaccccagtaaacaacaatagaaaaaaaaaagtaaaaacaacctctaacatgtctcactacttaggataatgattaatgatactaaaataataaaatattcatttatcattgaatactcataaatcattcctttgccttaatatgcagttgatgcttagggatcaaccaaaaatgtttcccacatttttaaaacatcatagggtttaatcttcattacaaatttcagttcaaaatgtttcttctcagaagcatgacaaagtgatttagagtagaagtagtgaaaggacctttttcaaagtgattggaacctttctggtatagacgttaaacagcataatgaatgtgttggcatttgtttcttatttgcatactataaaaataaaacagagtgtacaacaagttcctgttaaattcatattacctgtttaaataaggatattcaaaaggcaatgtgatctaattaaaatcaagaaatggtattcaagccatatttatatacttctatgataatacacatgcactaatattt

SEQ ID NO: 67908 - DNA, 543 bp, Homo sapiens
tgttcatactactgagttgtatactaccaacatttcatcaataggaaagcayagaaataagaaataagcacatacgatgtaattatatattcacaaatttaatcactaattaggaaccagataaggaaacaaaaaaagtagacctctatgaggcaaacggactactctgcaaaatcacgtatggaaaataatcttttttgaaaatggcattacataagcccaaggtggcttcattatttttgtcattgcaatttgcagaaatatgtttaaaatagtctgcacaatattttgttgtacccaccatcaaagtaagtaaaatagggtttccaaaaaaccccgcatggttacatttcatgtgccaaatttaatttccatttgttcataactccccttttgaaccagcatcacacacttctaaattgatagattaaattcaaattggaggtttagaaggaagttagcttccacatttatttctgctggtgatcctaataaaggcaagtgctcctaggttactgaaagacacagcatcacaaatcaatg

SEQ ID NO: 67909 - DNA, 543 bp, Homo sapiens
tgttcatactactgagttgtatactaccaacatttcatcaataggaaagcatagaaataagaaataagcacatacgatgtaattatatattcacaaatttaatcactaattaggaaccagataaggaaacaaaaaaagtagacctctatgaggcaaacggactactctgcaaaatcacgtatggaaaataatcttttttgaaaatggcattacataagcccaaggtggcttcattatttttgtcattgcaatttgcagaaatatgtttaaaatagtctgcacaatattttgttgtacccaccatcaaagtaagtaaaatagggtttccaaaaaaccccgcatggttacatttcatgtgccaaatttaatttccatttgttcataactccccttttgaaccagcatcacasacttctaaattgatagattaaattcaaattggaggtttagaaggaagttagcttccacatttatttctgctggtgatcctaataaaggcaagtgctcctaggttactgaaagacacagcatcacaaatcaatg

SEQ ID NO: 67910 - DNA, 557 bp, Homo sapiens
cttgtgagacttattcactatcaggagaacagcacaggaaagacctggccccatgattcaatttcctcccaacgggtccctcccacaacacatgggaatacaagatgagatttgagtggggacacagtcaaaccatatcatcctgatactctaaaacccattaagtgaagctcaaagtaaagagcctgccctttagtttcctccatagagtgtcctgaatcaactttttcagttctatgtattattatgtagagctagaacaatcaaagagactatctactttaaaagctttattttacaaasagaaaacaaaagccaaaggaggctaaatgaatatctgtaagttgctcagttactggtaaagccacaataaaatatatagtttgctgtcttgttggcttatgttcttaagccacccctcagaaataaaatgtttcaatcattgcttctccaaaatactttgtgcctccctacctctgcacttttcacattccatctttcttctccatctgctgaaaattacccattctaaagtccttcccttgtcattacagaga

SEQ ID NO: 67911 - DNA, 653 bp, Homo sapiens
ctttaactttttaggccaaactagaatttcattttatctgatgtctctgcaaatttctatggcataagagatttaagattcagagttggtagaagaaggactttatttttatgcagtatataatatgtgaattaagttgttatgaacctatagtatttcttagttaatcttcaaataagtcctttaagaaaattcatatctacaactactacctcgggatactatgacccaaaaggagggctatatatccaaagatttatcttttattgtttgtttttgagattaattatctgtttatgaagttaaatatttgttggtactatccatcaaaaggtaagttttctgatattggaagtcttaaagatcagacaaaaatgaccttcacttytttttttctgattgttatctcaagagccaacataaacctactcttatttctgcctggccaaatgactgacatttgtgtttacctaaagatctataccttcagcacatacaggcgataatataaaactcctgtgtgtctgttgtaggaaattactaagaaaacataccccaatccttcactctatactaggtaccaaaataatttcacaggtgatttaaaactcttaccctaatcttcatgccccaagtgcaatgtgacctgtcta

SEQ ID NO: 67912 - DNA, 695 bp, Homo sapiens
caaacacaaaacacaaattctaacatatgtttctcttgaaactaattactataacttatgctatgttacctgaaatgacaaggtatgataatatgattaaaacaacatagaaaaaccagaaagaaaacacagaatactaagaaatatcttcaagccaacatcccatttttccagagaaggtagtttcacgtttcaaagctctttgtaaactctgttaagatgtctttgcctcatcctaacaatcctcatagtctcccatggatggtcctttaatgctcataataaaagaagcctgcagggaaaatacagaatagaaaacagcttggaaataaaatctgttagctcagcacattaaaattattgmaaattgctatttttatgaggattatgtgtagctttgttttttctatgaactatctaagcaataacaaaaagacatgatctttttttttttttcttttttagacagagtctcgctctgttgcctaggctggagtgcagtagcgtgatctcagctcactgcaacctccacctcccgggctcaaacgattctcctgcctcagccacccacgtagctgggatcaaaggctcgtgccaccatacctggccaatttttatgtttttagtagagatggggtttcgccatgttgtccaagctggtctcgaattcctgacctcaagtgatctgcccacct

SEQ ID NO: 67913 - DNA, 1729 bp, Homo sapiens
taggaataaatgtataatactggcaccacatcacttatcctactcatataatttggatttggatattcatttatagcaggagttcccaaactttttgtataaaggaccatagaaaaagtattttaggcttgataggccaaatggtctctgtcacaactactcaactctgctgtcacaggacaaaagcagcatagacaatgcataaatgaaagagcatggctgtgtttcaataaaattttattgacaaaaacaggcagcaggctgcatttgtcctgtggactgtagtgtgccgacctctcatctatacggacttaaatgtaatacattacattatatatatacacacatacacatctaaatttaagtattatattcaaatagtttttataataacagaatcttggtcaaaattccaaggaagataaaaaataaaaagggatataaacaaaaaaatgtagatatgctgcataaaacctgggaaactggaacctctggatgtgtccatgtaatttgccccctcaggatatctctttaggccttagttttggacccacaaagcaaggtggttcaaatagacaattctgtgatcttaataattgtttcaagttaaagttatagattttaagtggaaattccatctagaaaataacaacattcacaaataatttccaatccgtggaagaacagaatacgagtacagttatgctccacagaatatttcaatgaggcaccacacgtatgacagtggttccatagattctaatactgtatttttaactgtatcttccctgtttacatgtttagatacacaaatatctaccactgtattacaacagcctacaggatccagtacagcaacacgtataggtttgtagcctaggagcaataggctataacacacttagcctaagtgtgtgggagactctaccatgtagatttctgtaagtagactctgtgatgttcacacaaggatgaactcgcctaatgatgcatttctcagaatgtattcacgctgttaagcaacacatgactgtatgccacagaaacaagtataacatattagaataaattaagatagtacctggcataattgatctaataacaaacatatgtacaaacattaatcaaaatcatattctagtacctaaaaaataaggtttcagtaccatcttgaatgaagttataaatatacctggaaaaatcaatttaataacaaacatacgttaattcacctagctggaaggggacatttagatcattaaaaacaacttcacccaaaatagaggcattggtaagatttgatattaaatgccacaaaataattaaatcactacaataactcactaaactccctaacatatttacagttaaaaatctgaagtttttaactttaattcaaatatcatgcagtatataataaaccaggtatcattcattcagtgtaayggtgattttgtaaacttttctgtttttataattactcttcaaataaacagttgagtttcagactaaaaccacttcacttgtcacaattttcaaagaactgctgggttaattaaaattctataatccatcactacccacatttacaaagccatgctaccacactgctttctgaaaaagaaatgaacagtttctggttcattaccaacttaccaaacatctggcaaattctttgttttctgaaaggaatccataacctggatgtaccttagaaatgaaagcaaaa

SEQ ID NO: 67914 - DNA, 808 bp, Homo sapiens
ggcacagtggctcctgcctgtaatcccagcagtttagaaggctgaggcaggcagatcacctgaggtcaggagttcaagaccagcctgaccaacatggtgaaaccccttctctactaaaaawacaaaattagctgggcatggtggcaggcacctgtaatcccagctacttgggaggctgaggcaagagaatcgcttgaacctggcgggacagaggttgcagtgagccaagatcacgccatcgcactctggcctgggcaacaagagcgaaactccatctcaaaaaacaaaacaaaaaaaaagctgaactaagctttatgagcatggtacagaagaatttaaactactgtatcagagaagaagagttttcattccaccaacttcattttatcaacactcaactacatatttattttggcaagctatagttaaaaggttaaagtgttttaccttcactaactgtgctaataaactgtaaacatctataatatgggttcacgaattaggctttttatttaaacattcatcttactaaaacatttctttcaaaagaaatgtgagcgctaattgaagcgctccaggcttaattgctggtgttggatgtttccatccagttttagagataactttgcatagtttttaacactatatataattagttctgataattaaaaaaagaaaaaagaaaatagaagaaaaaacactgtttctgatatcagaaatcatttttttccttggattccactctattcaaacagaactgggggtggagagaatgatttatccttgtaaattatgagcattctactga

SEQ ID NO: 67915 - DNA, 808 bp, Homo sapiens
ggcacagtggctcctgcctgtaatcccagcagtttagaaggctgaggcaggcagatcacctgaggtcaggagttcaagaccagcctgaccaacatggtgaaaccccttctctactaaaaatacaaaattagctgggcatggtggcaggcacctgtaatcccagctacttgggaggctgaggcaagagaatcgcttgaacctggcgggacagaggttgcagtgagccaagatcacgccatcgcactctggcctgggcaacaagagcgaaactccatctcaaaaaacaaaacaaaaaaaaagctgaactaagctttatgagcatggtacagaagaatttaaactactgtatcagagaagaagagttttcattccaccaacttcattttatcaacactcaactacatatttattttggcaagctatagttaaaaggttaaagtgttttaccttcactaactgtgctaataaactgtaaacatctataatatgggttcacgaattaggctttttatttaaacatkcatcttactaaaacatttctttcaaaagaaatgtgagcgctaattgaagcgctccaggcttaattgctggtgttggatgtttccatccagttttagagataactttgcatagtttttaacactatatataattagttctgataattaaaaaaagaaaaaagaaaatagaagaaaaaacactgtttctgatatcagaaatcatttttttccttggattccactctattcaaacagaactgggggtggagagaatgatttatccttgtaaattatgagcattctactga

SEQ ID NO: 67916 - DNA, 831 bp, Homo sapiens
tcttttgaaggcatgagatgggcactgtaaagctcatggctatctgtggtgggtgggtgcccttttcttttccctaagtccttttggtgtcatcccagtattgtgaaaaaaaattgtagaggcaaaaagtttgagtccagctttatgtgacttagagaagacagctttcctgaagctccctttttcatctataaaatgtaaataatataatgaagtaaattaaatttaaaataattattgataaaaaaactataagaactacattactgtacaagtgtacacagtagaattattattgtgtattaatgtgactctgggttgtctggagcatgaatctggaagataactgacttgaccytgtggtctgcatgagaagcaggtatgaccgtagatgttcttactccagtgccaagtaggtccagtttcattaacattcccacctactggaagcagcttaccttatttttatgatggaattttatccactcaaatcttcagacctggaagagagcaaatcttttttatttgagacagggtctcaccctgtcactaaggctgcagtgtagtggcatgatcacggcactgcagcctcgacctcccaggctcaggtgatcctcctgcctcaacttcccaagtagctgggactacaggtgtgcaccactgtgcccagctaatttttatagggatgggattttaccatgttgctcaggctggtcttgaactcttgggctcaagcaatttgcctgcctcagcctcccaaaatgctgggattacaggcatgagccaccatacccagctggcatacagcaaatctcgagggactctaggaca

SEQ ID NO: 67917 - DNA, 962 bp, Homo sapiens
ctgagtatcaaattcaggtatttttgatagattctgaatggagttctttattaggtcttttgatcaacaggaatgtgtttagaagagccaaagcacctctctaagtaaaacatgtacattgttgcagaaccattaacaggcatatcctcccattcaatcacagtagccatgattggcaagaatctgggtcataatccatcacccaatcttaagtgtcctctcttcatcatcctcttctggtcccgttctcttctaagttccatgttggtcctcaatattgtagagaatctctcatttttacttgtgtatcatgcctatttcctgacaccaacactttatctctcctatcccagagaaaagcaatctcttcctctgcattccctcaatgttgggacactattggtaataaatcatttctgcctttaatggagaaagattcattaatgaagttgtttttttctctaataataacagttattgttttactgagccttgctgtatcttaagcatttgcatcacttcatttcattctcacacctctaccacccattttacaggagaagccattgatattgggtcatcttccaaggttttccagctaaggcagtctgtctccagagtctagcttttgtccactgcactaacctgcctctcttgtttgatatccacatgcttgggattgcccaggctggtgtgtaggagataggtttcctccatggatggcaaataatgattcattctcatgacttagaggagacagatctagcttgtgggggaatcatttacaagtttatcaccctgggaaattcagactcttttcttattgtyctttctgcaacttcatttcaaatttttcttgtagtagctggtagcagaatcaaaggagtaattatgtgtgctgattggggtctgaggcctaaaagttaattcttttttgtctactgatctatggattgcatctg

SEQ ID NO: 67918 - DNA, 1082 bp, Homo sapiens
tcctgttatttatatcttccttgtttacatccaaatcgaggccaactagtgtgaatgcacagaaggcaactgagctttactgagcatgcaaccccagagaaaagctctagaagacaaatgagaaaggccctggagttggtcagccctgagtttgtatcctcgctttaccacttaataagtgtgtgaactcgggcaagttacttaacatctctgagctttgggttcctcatctataaaatagggtcaataattgtactgacttcatagagttgtgagtattaaatcaaatagcragtacagcaagtgctcaagaaatggaagatagtcatggacttgatgggcatttattaagtttcttctatgtgtagacaaagagtagttcaaatccagtctagtcctacttgctagttgtgcaatcttggatgagttgctttgttttacctctctgagcctcagttccgttactcttaagtgacactggtgctggtatataaatcacagaattgctgtaaggaataagtgaagtcagacatgttaaacacatgtcaggcacatataaatgtgctcagccaacatgaaatatcataattgttgtggttatcatgtcagctcttctctgagcacctttgtattatgagatttacttagcagccaagcacactttgcagcctcctccagtagaccctctccaatcttcactgtcatttccctgagggcggaggccctatcctttataccatttctggtgtctccatgacacctggcagtgagtaggtgttcagtgcatgaagcagagagcactatgctgcaagcacagccatcagaagcatcactgcctgggttcaagttttagcatgtccactttacttgctgggtgactttctagcaactcctggatcttctctgagtctccattctctcacatgtagtaagggtgtgataataattcctacctctggggattgctgcaaggattaaagctgggtacatagtgagagcttaataagggttgagtgttttaattgctgttattatttgagaaaagtcttacagtcaaggatcacaggagctactctgagaaa

SEQ ID NO: 67919 - DNA, 1082 bp, Homo sapiens
tcctgttatttatatcttccttgtttacatccaaatcgaggccaactagtgtgaatgcacagaaggcaactgagctttactgagcatgcaaccccagagaaaagctctagaagacaaatgagaaaggccctggagttggtcagccctgagtttgtatcctcgctttaccacttaataagtgtgtgaactcgggcaagttacttaacatctctgagctttgggttcctcatctataaaatagggtcaataattgtactgacttcatagagttgtgagtattaaatcaaatagcgagtacagcaagtgctcaagaaatggaagatagtcatggacttgatgggcatttattaagtttcttctatgtgtagacaaagagtagttcaaatccagtctagtcctacttgctagttgtgcaatcttggatgagttgctttgttttacctctctgagcctcagttccgttactcttaagtgacactggtgctggtatataaatcacagaattgctgtaaggaataagtgaagtcagacatgttaaacacatgtcaggcacatataaatgtgctcagccaacatgaaatatcataattgttgtgrttatcatgtcagctcttctctgagcacctttgtattatgagatttacttagcagccaagcacactttgcagcctcctccagtagaccctctccaatcttcactgtcatttccctgagggcggaggccctatcctttataccatttctggtgtctccatgacacctggcagtgagtaggtgttcagtgcatgaagcagagagcactatgctgcaagcacagccatcagaagcatcactgcctgggttcaagttttagcatgtccactttacttgctgggtgactttctagcaactcctggatcttctctgagtctccattctctcacatgtagtaagggtgtgataataattcctacctctggggattgctgcaaggattaaagctgggtacatagtgagagcttaataagggttgagtgttttaattgctgttattatttgagaaaagtcttacagtcaaggatcacaggagctactctgagaaa

SEQ ID NO: 67920 - DNA, 486 bp, Homo sapiens
agttgaacaatgagaacacatggacacagtgaggggaacatcacacactggggcctgtcgggagcgctgggggatgtgggggagagcattaggacaaatacctaatgcatgtggggcttcaaacctagatgacgggttgataggtacagcaaaccaccatggcacatgtatacctacgtaacaaayctgtgcattctgcacatgtatcccagaacttcaagtaaaaaaaaaaaatatatatatatatatatatatatacacacacacatatatatatatacacacacatatatatatatatgtgcatgtggtatggttattgtaaacacaagtttattgaaaaaggcagcatgggagaatagaaagattttgggttttgaagccagctagacttgcatttcaatcctgtttctggctgtgtgggttttggacaagccaatctgagcttccatttttctctcataaaaataatgataattataccga

SEQ ID NO: 67921 - DNA, 486 bp, Homo sapiens
agttgaacaatgagaacacatggacacagtgaggggaacatcacacactggggcctgtcgggagcgctgggggatgtgggggagagcattaggacaaatacctaatgcatgtggggcttcaaacctagatgacgggttgataggtacagcaaaccaccatggcacatgtatacctacgtaacaaatctgtgcattctgcacatgtatcccagaacttcaagtaaaaaaaaaaaawatatatatatatatatatatatacacacacacatatatatatatacacacacatatatatatatatgtgcatgtggtatggttattgtaaacacaagtttattgaaaaaggcagcatgggagaatagaaagattttgggttttgaagccagctagacttgcatttcaatcctgtttctggctgtgtgggttttggacaagccaatctgagcttccatttttctctcataaaaataatgataattataccga

SEQ ID NO: 67922 - DNA, 796 bp, Homo sapiens
ggcagacagatctgaggtgtttagtggtagaatttttaaaatatttatcttcattcctactaagttttcttcacagatacctgtggtcccttttacaaccaaactctcaagtttctccacttatattcactcttcaaaacactacagtctggtctctacacccacatccactcataactgcttaagccaggcttgtcaagaccttcttattctcaaatctaatggaaacattagtgttagtgtttcttgacttctggtacttcaacacttcaacaatttctccctctttgaaatttccttttaacttaggtactggggttgtactatcatttttttcttccgttgaaccagtttagccttagttttaaaagttttttcaaataagatgtcatccaggattccatccatggtaccatgtccaaagttgttacagatatgttttataatctaatactgatacatgcttcaatgataatggagtagatgggaccarcctgttctcccataagatagtagaaaattggacaaagtgtatgaaacaactgttttcagatattggacaacacatagtaaaggagacagtggtctctgagaggaaggaaacactcagggagtcctatgatattctgcctagaaacattttccagaacgctgcccagggagggagaacctcagcagagtaaaatcaatggcctcgctgaggttagggaaggcgaggcagtggaatttgcaggacacagtactcaaaatgaagaagcaataaggactaagagctccagaaacctacaaaggatcc

SEQ ID NO: 67923 - DNA, 658 bp, Homo sapiens
tgaggtggagagtccctagcctcccagcatacacacacacacacacacacacacacacacacacatatatacattttttttttttgagacggactttcgctcttgttgcccaggctggagtgcagtggcccgatctcggctaacygcaacctccaccacccgggttcaagcgattctcctgcctcagcctcccaagtagctgggattacatgcatgcaccaccacgcccagctaatttttgtattttttttttcagtagagacagggtttctccatgttggtcaggctagtctcgaactcctgacctcaagtgatccacccgccttggcctcccaaagtgctgggattacaggtgtgagcaaccgcacccagccagcacatatattttaaacagaatcaaagcccatcatatgtcaagcttacaaaggattttttgtgtttgagggtctatcccaaacatatatctgtaagagagaataacacatcatacatccagggcatcaagtatctgaggatatcaccattaattcatatacaaacatctgtaccatttggtactacttttcaacaagtgccaaggaaccaccaatccaactctgggtccctccttggtgagcaggcccacctataggacttactatctcctctgctcaatctc

SEQ ID NO: 67924 - DNA, 648 bp, Homo sapiens
aagaaggtatacaggcaggtgcatattgtgcattgtgagagagctaaatcagagtggaagatacccatggagaaacaagagttgttcatttggtggtgtatatattgcctatttatatgttttattcaacagactttatatataaagttcttctaagttctagcccactgattcttttctctttccttctgtgaacactgttgtctggaaggaagctgctacttagccatgcacctctgcaaatcttggaaagagtcaaggattcctgaggcaaggaagttggataatgatgagcaccaggcaagacacagctggccactggagagagagcccagtgtaggcagaaggccagaatgtgccaacagtaagtgaagtctttttttatcagaagagaaaagcttgcacttagcttcactatcagggagaagactggcatcagaccaacccgcccttcaataaatggagggaaagagaaatccagaagcctagttttgtagatgtgaattaacatcatttattctgtaaaaaaaaaaaaaaactcaagcaygtgtaaactgcaaattaaacaacccaaatatatggatatctgaatttacagaaggcagaatagtgtggttagggttgctagatttagcaaataaaaataga

SEQ ID NO: 67925 - DNA, 2573 bp, Homo sapiens
ccaggtagatagtgttggaacagaattggagggagcccagctggtatccactgcagaactgctcgcttgcttgctgtgtgaggatagacccacacacatttggtcacagaagacttctgtggtcacacagacttctgttcatcacagaagtcttctgcgatgattgttgtggtgtgaaagcagaggagaaacacagtttgaatttttctactttcacactgtgtttactgaaggttgctcaatgtaggcttgggatggttggtccggggtatgtaatagaaggtgcttaaaagtgctcctcaacagttttgaagcgtgtgggacmaaaaaaaaagtgctcctcaaagggtaggcaggatagtgtaatgcttaaatatatggaatctggatccaaactgggctctggtatttccttgtgatgtggacaactttacttatatgtaaactcagtttcttcatcctaaaatggcataataacagtatctacctcctagggttgttacaaagtttaaatctgttaacgtatataaaaaagacttttgcctgtctcatagtaagcactcaacaaatgttagctatttagattccaaacatatataacatttgattataaaccatggaaacatcttatgtatggtatagcagaaagaacagggattttcaaaatagcctaagttatataatcttgagcaagttgtatggccactgtgagccttgtctgaaaaaggaggatgattacatcataggatagttgtgagaattaaatgaaataatatatgtgaaacacttagcaaagagtggcacctaactgaggctcacagtgtttcttcccctttttcctatgtcagtagtatgctgtcttataattatttactattatgttctcaacgaggagtcttaagcttttataatctccaaactggctagcacatagtagaaactcaacagagtcattaatggttcaaatgagcctccaagtctgcggcatgagacctagaatgtctcccctgttgagtgttgctggtcagaggaaagttcccacccctccaccgccaacttcaattgttctaggtgtatatttctcccctttctttatgaaaattgctctgtggtctgtcggaggcatttatgtctgctttactcacattgctcaacccacacttggagagaaatgtgtttgcataaatactagcagatgaattttttaaatatcgctttttctttcctggcactctgtaagagaaatgagcaaatataaacagaggagtgtcacactagaaatatagcagatgggcttctgttggggatctggactttcctggagtatacacatttgggatatgtaggattacgacaaaatccacttgtaatgttcatgctttttatttcttgggcacaatattaattgcttaaagactgggcttaatgcacactttcagccccaattctccctttgggaaacaagcaggatcctataaacactctgtgtagtagggattgtcttcctaagcctaacataaatccagtttgattgaggaatcaaggagaagtaagaaaaataaagtttttcttcactccgtgctgcaatgacaggggaaaaaaggaaactcttcactcctcatttcagatggcttcatgcttgtgaccaagggcttatcatggatattaaaaagtggaaactgactacatatactcctgacatatcttgacttaggccacctcaattcagaccacacatcttgaggaatacatttatatgcaggcattgaccatgagccatccttaactccagcccacacctttcgcccggataatattttcatttatttattcattcaacaaactttattaagcatctatgctatagaatgaatgtttatgaccccctaaccccaaatcaatacattgaaagctaatcctgaatgtgatgatatttagaggtgaggcctttggaaggtgattaggttataagggtagagcccttaagaggagaattagtgctatgctgttataaaaaggactctggtgagtttcctcaccccttctaccatgtgaggacacagtgagaagactgccatctatgaaccaggaagtgggccctcgccagccaccacatctctcagcactgcagatttgggacttcccagcctgcagaactatgagaaataaatttctgatgttcataagctacccactctatggcattctgttatagcagctcaaatggactaagatcatctgctatggaccaagcactgtacaaggaatgggactatggcaatgaagaagacagacatggtccctgatattataaaactcaagtctagtgggaaaacagactcttacgttataatttaaccattcctttaaaaaatgcaccaagaagcaatagtttccatttccatcaaccatactatgtcccaaggattggcctaggaaaaactgggaggtggaagctgtcctgtggcctccttgttgtcagagcctctgtagggcctttcagaactccatggaagagttcctcatccattgttgacctggctggacccagtggtcattttttttttaaaggg

SEQ ID NO: 67926 - DNA, 996 bp, Homo sapiens
caatttacatcattttttcatacaaagactttgaaattcagcatgtatgttacacttacagcacatctgaccagagactagccacagtttaagtactcagtagccacatgtgactagtagctaccatattgatagcacagtgtagacattccagattctaaagcaagtcatgtcaccttcatgagcctcaataatctcatttgtaaaaatggagataacttyaatggctttgtttgcagaagaaaatcagtaaacttgaaagcgcatgtcaactggtaaagactgtatataacaggttttctgctctttacaacacttagactacaaaatacaatgcgattttcataaagtgatgtatccaaggtcgtgtgtgatctgagacatcactcaggatagcatcaggcagagacactctcctctaggcagatgaaagagattttagctagtagtgtttcaagaggttggaaatttcttagtcctcttctcctcctcacccagcaccttcactctcaacagcaaacacatttgcttctactcttcactgactcttgaaattccttcgaccattttcattctacaaataaagataaaattgagggataaataacccttgtgttccctctgataacatcttaatttgaggcctccttacttcttaagctcctatctttttctacaaatgatattctctgatgttaataatttaccaagtgcttattctctgcactcttataatttttataaaattctgctaccagagcaatagctcatcttcttaaagattgtattgtatatatcaagagcactgaacttggagtcagaaagcctagattcaagtttccaggttctacattttctagttatgggatttgaggtgaagcctgtagtgaccagaagacatgaaaattccctgagcttcatcaggcttttcctctataaaataaagacaataatacctctctcgaaaggtagatgaggattaaaagagataatgca

SEQ ID NO: 67927 - DNA, 1162 bp, Homo sapiens
  misc_feature (1)...(1162): n = A,T,C or G
aagcaaaatactagaaatggagatagccaagaaaaaaacttcctaatgtcaagtgataaccagagataattatgactaatgctttataaatctctgtcctagaatatttgtttacggtcttattttcaaccacaaatagatatttcaaattgtatagcatatctgtgaagaagcatttgtataaaaatataacttgtacgcaaatccatttaaaaaatagatgagcatggtgtcattttatttttcaattatggataacatttttctcaaaggcagtgttgttttatggaaaggtttttttctgggtaaagaaatgagcgtggctttacacannnnnnnnnnnnnnnnnnnnnnnnnnnnnnnnnnnnnnnnnnnnnnnnnnnnnnnnnnnnnnnnnnnnnnnnnnnnnnnnnnnnnnnnnnnnnnnnnnnnattaacttccttcccccacccccttttccagatatgaaaactggggctctcggttaggtaagttatggaaacgatacttgaaacccatgtctgtctgagcccatgactactgatatcaagaggtcttgattagaatgctggctttgacatcagatagctgtggaagattgtataagacacctcctctcagctttaattttccttatctgtaaaacagagttagatttcatctttaaaatctccttgcaaagtattccatgaagtacttgactttcactttttgcctactttctaaaataaatttaaatgttactaaaatcaagttatttagatgtttctcatttcctaaactgcactgatcattgttcaatcatttccrttataatatttaaaattataacacaacttttattttataggtactaagtagaaattctgctgttcttttttacttgaaataatttgcgattgcattcaaaattaagagaaaaaaataccaaagcaaacatacaaaaagccacaattaaaaaaattaaaagatcaaatatcacgttttcacttataagtggaagctaaacaatatgtacatttggacataaagatggagatcacagataccaggaactccaaaagtggggaaggtgggagggtagttacagttgaaaagttacttatgggctaccatgttcaatatttggatgatgtgtacactagaaacccaatccttacc

SEQ ID NO: 67928 - DNA, 2183 bp, Homo sapiens
agctaagcttacatccaatgatgagttctttcatttgcatacagctaaacctaataaagttttaaactatgagtcacctcttattaaggataaaagccatctgtcaacttccatctatgtatttgccaattttgatgcaagagccattgatacactctatttagtttcataagcaagaaaatgcaagtcaaaaactcctggtgatttgtttactggtcagtgatgcagccagaatcagactcaagtactcagcgaaatgtctatatggggagtcaccaagaacttaaaaatatttaagttggtgcaaaagtaattgccgtttttgccattcaaaataatggtaaaaccacaatcgttttgcaccaacctaatatctttccctcagtgttcactcacaggctttggtayaaacatacacactttgattccactaattttgaatttgtgacaaaagtaatacaggaaaagacagaatttagacagtaatgtatcaagccagagaaattgttttccctttttttctaggaaaagcgattttgaaagaaacactttgatagacaattaaaggtaaagaataggatcctgcagtctgctcaggctttaaaggatgatttctaaatattgtgcattaggcaaagagaagactttgttaccctccttgggaagaaaaaaagaggaaagggagaaaaaaagagggagagacttagccattgacatggtaaatggctgtgctttgaaaaaatgtgattatttcttacgactctccctgtttggtcactgtagccaaactcaaaatactttgtgtggatagaattttattgaaaccagggagctgtttaaatcttttgtccagacagattgatctacagtgaaggatgctgctctcattgagcacacatttaagacaggatagagataaatacattaacaaatatataaacaatacaatttaatagagcgataaaagtttcaaagaaagaaacacctggataatgaaagacagttgactagcattgggctggctagagatggtgaggaaatgagtctctaaggaggtgacatttatgcagaggcaagcagatacccctccttcttccaaattcatgcatattcaaatgttttgctagttgattgtagagaataaaagacgaaatgacagttctaatgtgcaaggagctcacaaactaagaggagaaacaaaatacaacaaaatgaaaggcatttaatacagttctataaactcattcagaaataactcttcaacattaatccagctggaattaatctctatgagaattggaagcatgactggctagctctatgttaacatctctctggacaaaggagagtgtgtcagtcaagtctcttggttgcaaacttcagagtccaactcaagcttgcttaactgaaatggggaattattgagggaacataaaggggctgtcagaagtggtggaaaaaatggatggcaagtctgggaagacagacaggaaacaagatggttcctaagaccatgcagcagcaaaaatctgaccaagaagccaccagatcatcttttctctaagccataattgcttctggggacactgcctccatgaatgaatgaacctcagcctggcagagtcactcatagactgtctcacatcaatcagaccaattctgacagtcctgtgcactttggatcactcccacaagcttcaaagtctcaggcaggtatatccgaacagccaagctaaaagacagttcattttccaggtctcaagggggagggagagggcaagcctggctggtttcgtttggtttccacagtgagaaatgaaactccctattctactaagacttgcacaagggagttcccttgaaacaagaaagaggattgaagtttgggtaggaaaaatgtcaaatattccaaaatatgttactatggttggcttcctagctgcattttcacctttatccccatactaatactttaaaataagaagctcttgtctaatgtaactattatttgtattgtcaaaaattacagccacccaactccaggactagaatcccttccatctctagacctgtcccaacttcacttcaacagtctctaatacagagccactctgtgccaccaggtctccctaggccaacagcatcatcatcatctgggaactggttagaaatggaaattctcc

SEQ ID NO: 67929 - DNA, 2183 bp, Homo sapiens
agctaagcttacatccaatgatgagttctttcatttgcatacagctaaacctaataaagttttaaactatgagtcacctcttattaaggataaaagccatctgtcaacttccatctatgtatttgccaattttgatgcaagagccattgatacactctatttagtttcataagcaagaaaatgcaagtcaaaaactcctggtgatttgtttactggtcagtgatgcagccagaatcagactcaagtactcagcgaaatgtctatatggggagtcaccaagaacttaaaaatatttaagttggtgcaaaagtaattgccgtttttgccattcaaaataatggtaaaaccacaatcgttttgcaccaacctaatatctttccctcagtgttcactcacaggctttggtatwaacatacacactttgattccactaattttgaatttgtgacaaaagtaatacaggaaaagacagaatttagacagtaatgtatcaagccagagaaattgttttccctttttttctaggaaaagcgattttgaaagaaacactttgatagacaattaaaggtaaagaataggatcctgcagtctgctcaggctttaaaggatgatttctaaatattgtgcattaggcaaagagaagactttgttaccctccttgggaagaaaaaaagaggaaagggagaaaaaaagagggagagacttagccattgacatggtaaatggctgtgctttgaaaaaatgtgattatttcttacgactctccctgtttggtcactgtagccaaactcaaaatactttgtgtggatagaattttattgaaaccagggagctgtttaaatcttttgtccagacagattgatctacagtgaaggatgctgctctcattgagcacacatttaagacaggatagagataaatacattaacaaatatataaacaatacaatttaatagagcgataaaagtttcaaagaaagaaacacctggataatgaaagacagttgactagcattgggctggctagagatggtgaggaaatgagtctctaaggaggtgacatttatgcagaggcaagcagatacccctccttcttccaaattcatgcatattcaaatgttttgctagttgattgtagagaataaaagacgaaatgacagttctaatgtgcaaggagctcacaaactaagaggagaaacaaaatacaacaaaatgaaaggcatttaatacagttctataaactcattcagaaataactcttcaacattaatccagctggaattaatctctatgagaattggaagcatgactggctagctctatgttaacatctctctggacaaaggagagtgtgtcagtcaagtctcttggttgcaaacttcagagtccaactcaagcttgcttaactgaaatggggaattattgagggaacataaaggggctgtcagaagtggtggaaaaaatggatggcaagtctgggaagacagacaggaaacaagatggttcctaagaccatgcagcagcaaaaatctgaccaagaagccaccagatcatcttttctctaagccataattgcttctggggacactgcctccatgaatgaatgaacctcagcctggcagagtcactcatagactgtctcacatcaatcagaccaattctgacagtcctgtgcactttggatcactcccacaagcttcaaagtctcaggcaggtatatccgaacagccaagctaaaagacagttcattttccaggtctcaagggggagggagagggcaagcctggctggtttcgtttggtttccacagtgagaaatgaaactccctattctactaagacttgcacaagggagttcccttgaaacaagaaagaggattgaagtttgggtaggaaaaatgtcaaatattccaaaatatgttactatggttggcttcctagctgcattttcacctttatccccatactaatactttaaaataagaagctcttgtctaatgtaactattatttgtattgtcaaaaattacagccacccaactccaggactagaatcccttccatctctagacctgtcccaacttcacttcaacagtctctaatacagagccactctgtgccaccaggtctccctaggccaacagcatcatcatcatctgggaactggttagaaatggaaattctcc

SEQ ID NO: 67930 - DNA, 2183 bp, Homo sapiens
agctaagcttacatccaatgatgagttctttcatttgcatacagctaaacctaataaagttttaaactatgagtcacctcttattaaggataaaagccatctgtcaacttccatctatgtatttgccaattttgatgcaagagccattgatacactctatttagtttcataagcaagaaaatgcaagtcaaaaactcctggtgatttgtttactggtcagtgatgcagccagaatcagactcaagtactcagcgaaatgtctatatggggagtcaccaagaacttaaaaatatttaagttggtgcaaaagtaattgccgtttttgccattcaaaataatggtaaaaccacaatcgttttgcaccaacctaatatctttccctcagtgttcactcacaggctttggtatamacatacacactttgattccactaattttgaatttgtgacaaaagtaatacaggaaaagacagaatttagacagtaatgtatcaagccagagaaattgttttccctttttttctaggaaaagcgattttgaaagaaacactttgatagacaattaaaggtaaagaataggatcctgcagtctgctcaggctttaaaggatgatttctaaatattgtgcattaggcaaagagaagactttgttaccctccttgggaagaaaaaaagaggaaagggagaaaaaaagagggagagacttagccattgacatggtaaatggctgtgctttgaaaaaatgtgattatttcttacgactctccctgtttggtcactgtagccaaactcaaaatactttgtgtggatagaattttattgaaaccagggagctgtttaaatcttttgtccagacagattgatctacagtgaaggatgctgctctcattgagcacacatttaagacaggatagagataaatacattaacaaatatataaacaatacaatttaatagagcgataaaagtttcaaagaaagaaacacctggataatgaaagacagttgactagcattgggctggctagagatggtgaggaaatgagtctctaaggaggtgacatttatgcagaggcaagcagatacccctccttcttccaaattcatgcatattcaaatgttttgctagttgattgtagagaataaaagacgaaatgacagttctaatgtgcaaggagctcacaaactaagaggagaaacaaaatacaacaaaatgaaaggcatttaatacagttctataaactcattcagaaataactcttcaacattaatccagctggaattaatctctatgagaattggaagcatgactggctagctctatgttaacatctctctggacaaaggagagtgtgtcagtcaagtctcttggttgcaaacttcagagtccaactcaagcttgcttaactgaaatggggaattattgagggaacataaaggggctgtcagaagtggtggaaaaaatggatggcaagtctgggaagacagacaggaaacaagatggttcctaagaccatgcagcagcaaaaatctgaccaagaagccaccagatcatcttttctctaagccataattgcttctggggacactgcctccatgaatgaatgaacctcagcctggcagagtcactcatagactgtctcacatcaatcagaccaattctgacagtcctgtgcactttggatcactcccacaagcttcaaagtctcaggcaggtatatccgaacagccaagctaaaagacagttcattttccaggtctcaagggggagggagagggcaagcctggctggtttcgtttggtttccacagtgagaaatgaaactccctattctactaagacttgcacaagggagttcccttgaaacaagaaagaggattgaagtttgggtaggaaaaatgtcaaatattccaaaatatgttactatggttggcttcctagctgcattttcacctttatccccatactaatactttaaaataagaagctcttgtctaatgtaactattatttgtattgtcaaaaattacagccacccaactccaggactagaatcccttccatctctagacctgtcccaacttcacttcaacagtctctaatacagagccactctgtgccaccaggtctccctaggccaacagcatcatcatcatctgggaactggttagaaatggaaattctcc

SEQ ID NO: 67931 - DNA, 2183 bp, Homo sapiens
agctaagcttacatccaatgatgagttctttcatttgcatacagctaaacctaataaagttttaaactatgagtcacctcttattaaggataaaagccatctgtcaacttccatctatgtatttgccaattttgatgcaagagccattgatacactctatttagtttcataagcaagaaaatgcaagtcaaaaactcctggtgatttgtttactggtcagtgatgcagccagaatcagactcaagtactcagcgaaatgtctatatggggagtcaccaagaacttaaaaatatttaagttggtgcaaaagtaattgccgtttttgccattcaaaataatggtaaaaccacaatcgttttgcaccaacctaatatctttccctcagtgttcactcacaggctttggtataaacatacacactttgattccactaattttgaatttgtgacaaaagtaatacaggaaaagacagaatttagacagtaatgtatcaagccagagaaattgttttccctttttttctaggaaaagcgattttgaaagaaacactttgatagacaattaaaggtaaagaataggatcctgcagtctgctcaggctttaaaggatgatttctaaatattgtgcattaggcaaagagaagactttgttaccctccttgggaagaaaaaaagaggaaagggagaaaaaaagagggagagacttagccattgacatggtaaatggctgtgctttgaaaaaatgtgattatttcttacgactctccctgtttggtcactgtagccaaactcaaaatactttgtgtggatagaattttattgaaaccagggagctgtttaaatcttttgtccagacagattgatctacagtgaaggatgctgctctcattgagcacacatttaagacaggatagagataaatacattaacaaatatataaacaatacaatttaatagagcgataaaagtttcaaagaaagaaacacctggataatgaaagacagttgactagcattgggctggctagagatggtgaggaaatgagtctctaaggaggtgacatttatgcagaggcaagcagatacccctccttcttccaaattcatgcatattcaaatgttttgctagttgattgtagagaataaaagacgaaatgacagttctaatgtgcaaggagctcacaaactaagaggagaaacaaaatacaacaaaatgaaaggcatttaatacagttctataaactcattcagaaataactcttcaacattaatccagctggaattaatctctatgagaattggaagcatgactggctagctctatgttaacatctctctggacaaaggagagtgtgtcagtcaagtctcttggttgcaaacttcagagtccaactcaagcttgcttaactgaaatggggaattattgagggaacataaaggggctgtcagaagtggtggaaaaaatggatggcaagtctgggaagacagacaggaaacaagatggttcctaagaccatgcagcagcaaaaatctgaccaagaagccaccagatcatcttttctctaagccataattgcttctggggacactgcctccatgaatgaatgaacctcagcctggcagagtcactcatagactgtctcacatcaatyagaccaattctgacagtcctgtgcactttggatcactcccacaagcttcaaagtctcaggcaggtatatccgaacagccaagctaaaagacagttcattttccaggtctcaagggggagggagagggcaagcctggctggtttcgtttggtttccacagtgagaaatgaaactccctattctactaagacttgcacaagggagttcccttgaaacaagaaagaggattgaagtttgggtaggaaaaatgtcaaatattccaaaatatgttactatggttggcttcctagctgcattttcacctttatccccatactaatactttaaaataagaagctcttgtctaatgtaactattatttgtattgtcaaaaattacagccacccaactccaggactagaatcccttccatctctagacctgtcccaacttcacttcaacagtctctaatacagagccactctgtgccaccaggtctccctaggccaacagcatcatcatcatctgggaactggttagaaatggaaattctcc

SEQ ID NO: 67932 - DNA, 919 bp, Homo sapiens
ttgccttgtcaaaatactgtaccatatacagttatcaataaagtgagcaatgtaatagtaaatcattatactctcataacataaaagaaagaaaatacagttaatatgtacaaataatattaatgctgactatgtaatgaagccatgttttcttatcaggatgatcatgaataaaatgaaatgacggtgcaaggacatttattacataattttctacagtagaataaattcctatatgtaacagaaagtcagatgaaattaaattaaactgaacggaaaatacttgaattagaccaaataaagaagtttctgatgaaaaattgttataggaatggtttactgaacttgttatagactcactggaatggacaattacctgtctagcataacttaattatggttctgcctagaggcatgaggctgagttgacaacttctgcactaggattttatagttttattgaaaaaaatataaaacctgcacagtttttaatttaaycttttgtttttcttttttgagatggaggtatgctcttgtttcccaggctggagtgcaatgtcacaatcttggctcactgcaacctctgcctcccaggctgaagcaattctcctgcctcagcctcctgagtagctggtattacaggtgcccaccaccacacttggctaatttttgtatttttagtagagacggggtttcaccatgttgaccaggctggtcttgaactcctgacctcaggtgatccatccacctcggcctcccaaagttctgggattacaggcatgagctaccttacccagccgatctcagtctttttttatggctgcatggtattccaaggtatatatgtaccacatattctttatccagtctattactgatgggcatttaggttgattccttgtctttgctatggtgaata

SEQ ID NO: 67933 - DNA, 919 bp, Homo sapiens
ttgccttgtcaaaatactgtaccatatacagttatcaataaagtgagcaatgtaatagtaaatcattatactctcataacataaaagaaagaaaatacagttaatatgtacaaataatattaatgctgactatgtaatgaagccatgttttcttatcaggatgatcatgaataaaatgaaatgacggtgcaaggacatttattacataattttctacagtagaataaattcctatatgtaacagaaagtcagatgaaattaaattaaactgaacggaaaatacttgaattagaccaaataaagaagtttctgatgaaaaattgttataggaatggtttactgaacttgttatagactcactggaatggacaattacctgtctagcataacttaattatggttctgcctagaggcatgaggctgagttgacaacttctgcactaggattttatagttttattgaaaaaaatataaaacctgcacagtttttaatttaatcttttktttttcttttttgagatggaggtatgctcttgtttcccaggctggagtgcaatgtcacaatcttggctcactgcaacctctgcctcccaggctgaagcaattctcctgcctcagcctcctgagtagctggtattacaggtgcccaccaccacacttggctaatttttgtatttttagtagagacggggtttcaccatgttgaccaggctggtcttgaactcctgacctcaggtgatccatccacctcggcctcccaaagttctgggattacaggcatgagctaccttacccagccgatctcagtctttttttatggctgcatggtattccaaggtatatatgtaccacatattctttatccagtctattactgatgggcatttaggttgattccttgtctttgctatggtgaata

SEQ ID NO: 67934 - DNA, 919 bp, Homo sapiens
ttgccttgtcaaaatactgtaccatatacagttatcaataaagtgagcaatgtaatagtaaatcattatactctcataacataaaagaaagaaaatacagttaatatgtacaaataatattaatgctgactatgtaatgaagccatgttttcttatcaggatgatcatgaataaaatgaaatgacggtgcaaggacatttattacataattttctacagtagaataaattcctatatgtaacagaaagtcagatgaaattaaattaaactgaacggaaaatacttgaattagaccaaataaagaagtttctgatgaaaaattgttataggaatggtttactgaacttgttatagactcactggaatggacaattacctgtctagcataacttaattatggttctgcctagaggcatgaggctgagttgacaacttctgcactaggattttatagttttattgaaaaaaatataaaacctgcacagtttttaatttaatcttttgtttttcttttttgagatggaggtatgctcttgtttcccaggctggagtgcaatgtcacaatcttggctcactgcaacctctgcctcccaggctgaagcaattctcctgcctcarcctcctgagtagctggtattacaggtgcccaccaccacacttggctaatttttgtatttttagtagagacggggtttcaccatgttgaccaggctggtcttgaactcctgacctcaggtgatccatccacctcggcctcccaaagttctgggattacaggcatgagctaccttacccagccgatctcagtctttttttatggctgcatggtattccaaggtatatatgtaccacatattctttatccagtctattactgatgggcatttaggttgattccttgtctttgctatggtgaata

SEQ ID NO: 67935 - DNA, 940 bp, Homo sapiens
tgcatgatcatgcccagataatttttttgagagatgaggcctcactatatttctgaggctggtcttgaactcctgggctcaagcaatcctcctgcctcagcctcccaaagtgctgggagtgaggccaggtgtgagacaccacatccagccaaatccattgtttttaccctcagggctctgaggcctcaggagacatgagttattcaggccagacagtgagtgaggctagaattcatagtggattttcaatacttcactaagaagcttggatttcattcaagaggttgtgaagaacaactgaagagaactgtattaatattaatctgaaggtctgcgcaaagaagtcagaaaaggaaaagctcccagaaagagagaccaattaaaagattattaccatagactgtgggagaaagcataaggagccaaaataggacagtagcatcgagaatggaaacgaacggacagatgtgaaggagacacttggtgacagaactatcccaggatatataaagcatctgcttgcycaaatcttcaatgtgttccagtccacatcctagagctttagaaactatgcaaactagcaccttaccatatgcaatccaacaagctcgtagacttttagttgttgtttgcatttactgttttaaacaattacatgatttttcccaactaaagttctaattactttattgaacactacattgaataatgattctctagcacaaatatcttagttgattttttattcccagatcattttacatttgtagattttaaactattttaccacctgctgacccattataaatcaaaaaaaattttttttttttgagacaaagttccactcttgttgcccaggctggagtgcaatggaacaatctgggctcaccgcaacctctgcctcctgggttcaagcgattctcccgcttcagcctcccga

SEQ ID NO: 67936 - DNA, 940 bp, Homo sapiens
tgcatgatcatgcccagataatttttttgagagatgaggcctcactatatttctgaggctggtcttgaactcctgggctcaagcaatcctcctgcctcagcctcccaaagtgctgggagtgaggccaggtgtgagacaccacatccagccaaatccattgtttttaccctcagggctctgaggcctcaggagacatgagttattcaggccagacagtgagtgaggctagaattcatagtggattttcaatacttcactaagaagcttggatttcattcaagaggttgtgaagaacaactgaagagaactgtattaatattaatctgaaggtctgcgcaaagaagtcagaaaaggaaaagctcccagaaagagagaccaattaaaagattattaccatagactgtgggagaaagcataaggagccaaaataggacagtagcatcgagaatggaaacgaacggacagatgtgaaggagacacttggtgacagaactatcccaggatatataaagcatctgcttgcccaaatcttcaatgtgttccagtccacatcctagagctttagaaactatgcaaactagcaccttaccatatgcaatccaacaagctcgtagacttttagttgttgtttgcatttactgttttaaacaattacatgatttttcccractaaagttctaattactttattgaacactacattgaataatgattctctagcacaaatatcttagttgattttttattcccagatcattttacatttgtagattttaaactattttaccacctgctgacccattataaatcaaaaaaaattttttttttttgagacaaagttccactcttgttgcccaggctggagtgcaatggaacaatctgggctcaccgcaacctctgcctcctgggttcaagcgattctcccgcttcagcctcccga

SEQ ID NO: 67937 - DNA, 940 bp, Homo sapiens
tgcatgatcatgcccagataatttttttgagagatgaggcctcactatatttctgaggctggtcttgaactcctgggctcaagcaatcctcctgcctcagcctcccaaagtgctgggagtgaggccaggtgtgagacaccacatccagccaaatccattgtttttaccctcagggctctgaggcctcaggagacatgagttattcaggccagacagtgagtgaggctagaattcatagtggattttcaatacttcactaagaagcttggatttcattcaagaggttgtgaagaacaactgaagagaactgtattaatattaatctgaaggtctgcgcaaagaagtcagaaaaggaaaagctcccagaaagagagaccaattaaaagattattaccatagactgtgggagaaagcataaggagccaaaataggacagtagcatcgagaatggaaacgaacggacagatgtgaaggagacacttggtgacagaactatcccaggatatataaagcatctgcttgcccaaatcttcaatgtgttccagtccacatcctagagctttagaaactatgcaaactagcaccttaccatatgcaatccaacaagctcgtagacttttagttgttgtttgcatttactgttttaaacaattacatgatttttcccaactaaagttctaattactttattgaacactacattgaataatgattctctagcacaaatatcttagttgattttttattcccagatcattttacatttgtagattttaaactattttaccacctgctgacccattataaatcaaaaaaaawtttttttttttgagacaaagttccactcttgttgcccaggctggagtgcaatggaacaatctgggctcaccgcaacctctgcctcctgggttcaagcgattctcccgcttcagcctcccga

SEQ ID NO: 67938 - DNA, 747 bp, Homo sapiens
gaccaattctttctgctttgtmcatattctaattattccagggataacctgaaagcctgggagttgcttggcaaattcttggaatcacagcctgcctttcgccactgtgtttcctcattgcctacttctggttgcagccccttcctgcacacttatacctagactctatctctctgattttacctcccttatctgtgcccctggatagtttattttgctgttgttgagtccttttccttcacattctcagctgcttggtattgcctgtattagataggtgattcgtacatgtttgttgagggaaaggagtaaatcaatggcataatcaaccatctcattattgaaaagtaccaacaaggaaaaataataacttactataaactaggcatctttagttcaaatattaattacaaaccatatgatagaacctgttgaatttttgtatgaaattcatgagtcacggccaggtgcggtggctcacgcctgtaatcccagcactttgggaggccgaggtgggtggatcacaaggtcaggagtttgagaccagcctgaacaacatggtgaaaccccgtctctactaaaaatacaaaaattagccgggcgtggtggcacgcacctgtaatcccagctagtcaagaggttgaggcaggagaaacgcttgaacctgggaggtggaggttgcagtgagccaagactgtgcactgtgctccagcctggatgacaagagtgaaactccatctcaaaaaa

SEQ ID NO: 67939 - DNA, 747 bp, Homo sapiens
gaccaattctttctgctttgtacatattctaattattccagggataacctgaaagcctgggagttgcttggcaaattcttggaatcacagcctgcctttcgccactgtgtttcctcattgcctacttctggttgcagccccttcctgcacacttatacctagactctatctctctgattytacctcccttatctgtgcccctggatagtttattttgctgttgttgagtccttttccttcacattctcagctgcttggtattgcctgtattagataggtgattcgtacatgtttgttgagggaaaggagtaaatcaatggcataatcaaccatctcattattgaaaagtaccaacaaggaaaaataataacttactataaactaggcatctttagttcaaatattaattacaaaccatatgatagaacctgttgaatttttgtatgaaattcatgagtcacggccaggtgcggtggctcacgcctgtaatcccagcactttgggaggccgaggtgggtggatcacaaggtcaggagtttgagaccagcctgaacaacatggtgaaaccccgtctctactaaaaatacaaaaattagccgggcgtggtggcacgcacctgtaatcccagctagtcaagaggttgaggcaggagaaacgcttgaacctgggaggtggaggttgcagtgagccaagactgtgcactgtgctccagcctggatgacaagagtgaaactccatctcaaaaaa

SEQ ID NO: 67940 - DNA, 1122 bp, Homo sapiens
tgcataattaaattaactcttaggcatttaagaaaattcaaagtcaattaaacaaaacaaaatttgctttgagtcaaggagtataatgtgtctgtagtaaccaaagcagcaaaatatgttaatttttaattaatttgaactttcattgctgcagtgaggttttcacaccaacaacaaacacgaaagagcatttctcttgtttgaatcaatgtttcaggaaaactctttaagaaaacaaatgagaaaatggacatccatagccattttctggccccttcatgcactttcttttttttttcttttacctttttttttttttttttttgagactgagtcttgctctgtcgcctaggctggagtgcagtggtgcgattttggctcactacaaactctgcctcccaggttcaaatgattcttgtgcctcagcctcccaattagctgggattacaggtgcacaccaccatgcccagctaatttttgtatttttagtagacacggggtttcaccatgttggccaggctggtcttgaactcctgacctcaaatggtccacccgcctyggcctcccaaagttcttcatgcactttaatagctcattcttgtcggggtgattttattccatgggcagtcttcgctccagaatgctttggggcatggcaggaagtaggcccctcgtagaaggctaatgtcagtgtcagcatcccctcgatctgtctcctgaaactgactcccagtgacctctcctgtctggctgcttcttactggaaatggattcatgctctttcagattctaccaaaaccactcatcaggcacagaaggccttgcccagagcagcttctccctgggaagctggggcatgctgagcctttccagcctgtgtctcactcgtttttgtttccagcctgtgtctcactcatttttgtttccagcctgtggctcactggtttttgttgttggtgtgaaaacctcactgcagcaatgaaagttcaaattaattaaaaattaacatattttgctgctttggttactacagacacattatactccttgactcaaagcaaattttgttttgtttaattgactttgaattttcttaaatgcttaagagttaatttaattatg

SEQ ID NO: 67941 - DNA, 1122 bp, Homo sapiens
tgcataattaaattaactcttaggcatttaagaaaattcaaagtcaattaaacaaaacaaaatttgctttgagtcaaggagtataatgtgtctgtagtaaccaaagcagcaaaatatgttaatttttaattaatttgaactttcattgctgcagtgaggttttcacaccaacaacaaacacgaaagagcatttctcttgtttgaatcaatgtttcaggaaaactctttaagaaaacaaatgagaaaatggacatccatagccattttctggccccttcatgcactttcttttttttttcttttacctttttttttttttttttttgagactgagtcttgctctgtcgcctaggctggagtgcagtggtgcgattttggctcactacaaactctgcctcccaggttcaaatgattcttgtgcctcagcctcccaattagctgggattacaggtgcacaccaccatgcccagctaatttttgtatttttagtagacacggggtttcaccatgttggccaggctggtcttgaactcctgacctcaaatggtccacccgcctcggcctcccaaagttcttcatgcactttaatagctcattcttgtcggggtgattttattccatgggcagtcttcgctccagaatgctttggggcatggcaggaagtaggcccctygtagaaggctaatgtcagtgtcagcatcccctcgatctgtctcctgaaactgactcccagtgacctctcctgtctggctgcttcttactggaaatggattcatgctctttcagattctaccaaaaccactcatcaggcacagaaggccttgcccagagcagcttctccctgggaagctggggcatgctgagcctttccagcctgtgtctcactcgtttttgtttccagcctgtgtctcactcatttttgtttccagcctgtggctcactggtttttgttgttggtgtgaaaacctcactgcagcaatgaaagttcaaattaattaaaaattaacatattttgctgctttggttactacagacacattatactccttgactcaaagcaaattttgttttgtttaattgactttgaattttcttaaatgcttaagagttaatttaattatg

SEQ ID NO: 67942 - DNA, 416 bp, Homo sapiens
  misc_feature (1)...(416): n = A,T,C or G
ttgctattggaggacagaagacttctgggaattggtaggagattaacttcaatgagaatagacagagatagaaataaagaattgttatgcagacaggaatgcctgagagcatgctttcagctgatctgatccacatggtctcagaagtggactaarcaagttgttctttcctaataatatatttcctacttgaagaaatgaagaagctctttgtttctcttcattgtaagtccagagtatacagtggacttaggttattttaagatatattagatatcgataatgtaagatcgattatttggatgtgtgtgtgtnnnnnnnnnnnnnnnnnnnnnnnnnnnnnnnnnnnnnnnnnnnnnnnnnnnnnnnnnnnnnnnnnnnnnnnnnnnnnnnnnnnnnnnnnnnnnnnnnnnntt

SEQ ID NO: 67943 - DNA, 728 bp, Homo sapiens
ccgagaaggcggagacgctgcagagaccctgccaggaaggctgagagaagcccctggcactgcgttgccagcacctcattcaggagcacagccgggctgccctcctaggacagtggcgcccgtgtccttgcccctgaagtccatctccgggggctcttgggaggcacsttcacattcacgctgaaatttggaactagagcaacccagaggccgcactgggcaacaccatgaagtctggagccggacgtccgggtatgacccaggccctgcctctcgggagctgacaccgcacagggtgtctagtctgtccgaacttctctttcctcagctttcacatgatctgaacgtccagctgatagggtggttgtagtgaaccagggtggtgtttgtgagagaaaactggaaaatcaagtgtgggaaaaaggggacttgctattgccattggcagccgccaggagcctggaatctcagtgctcaggacactacctcttagttctctctaagggctacgcgagatgcttacgtaagcccaactcggaagaaaatctcataaaagatacaaaagaatcaacaggtagctctgtttgatgacgttcatggcctggtggcattcaggaattattcaattaaaataaatgaagacaaagaataagttctagaaaacttaaagcttttaaaacagtgaaataatatttgaattggttctcaagatagacctggtaaaaact

SEQ ID NO: 67944 - DNA, 785 bp, Homo sapiens
cccattctatcagcacaaacttcaagaataaaaaaaaaatggaaaaaagtcacagaaaacatttgcagttttttttgccatcttcaagcttcagtgactctggtcgcagtcacttcccatgaaggcagctggcccgccaaccactgagcacacatgtgacagaagraggtgtccatctagggcagatgcccggggagtccttcacccctcccggatgggaactgtcttcttcccctatgggcacgttgcatgtgttaacgtgccaggcaccggggtggcccatgtccacaaggacctcgagttggagttaattcttgcagtggcatcaggatgcccagcccagcactgctgggccctgaggagaccacatcatcactggcccgcatctcagggccacggcagtttcagaagacatggaacaaggggcctccaggacggcaactcctcagctccgtggcccccctccccaggcccgacccttcacccccgcctgctgctgggcaccctggctccctcgtggggccggggagtgctgctcattcccaagtctcccctccccacagcagccacccactgcgggaaggaaaagaaggctcagacagcctgtccctgaagaccctaggactgacctgttgtgaaaacccacagaagaactggtataaaaactgagggaagatgaagcagacgttctgaaaggcaaggcataactgttagttcggtgacgggacagagggaggcagccgccacctaccgacgtggcccaccccacatgggaggagggatcc

SEQ ID NO: 67945 - DNA, 1006 bp, Homo sapiens
atgcatggattgtcccagatttacatgtcccccccattcagaggagctttgcagtgtggctaccagtgtttctaatggccagatagagtatcagcctttgtctccaggaataagactgtgtttcatgggactccctgaatctcactgaggatgtaatagaaacaattgaggctgggcatggggatgcccaactgtaatctcagcactttgggaggccaaagctcaagttcacctgagcccaggaggtcaaggctgcaatgagctatgatcgtgcccccagcctgggcgacagagtgagaccctgttgcaaaaaaaaaaaaaaaaaaggaaacagttgaaagttgagtgacttttattttatttcacatccacccctctttagcctttccagaacattctgggaccttccagtgcagctgttctcaacctgaggcttgttaggagagggctgctgggccccaccccagggtttcaggttctgactcggtaggcctgggacgatcttcctgactagtgtgatggttcctgactggctccaggtgctgctgacggcactggtggggccacctcagggacccctgctctagaggtctctcggggagtgttgctgaggctgccgggcgcagctcagtgggtctggatggggcctgaggtcccgcatgcgccaatgggaggcccttgccgctactcctggagccatgtgttcgtcccccaaagataagcccacatctgttcacatggacctgggctgacttaatcatctgaatataagcaaacctccgtgtatgccatctcctctgaaaatgagatctgctgagcaaacaagtgggtttcacgtctgcctcttgccccccgccctgcccacttgccttcgtgtccgcatcatttctgatcatcgtatctttacaggcccttaggatcggaaaacctgctgcttagaggagctacactgaagaacactgagaaaatctttggtaaatatttaattaattatwaaccattgccc

SEQ ID NO: 67946 - DNA, 652 bp, Homo sapiens
cacattctcaattcctgctttaacctcatcatagtgcttattatcttttttttttcttaagactgagtctcactctgtcacccaggctggagtgtagtggcgtgatctcagctcactgtaacttccaatcctcaggttcaagcgattctcccacctcagcctcctaagtagctgggattacaggcgcatgccaccactcccagctaatttttgtatgccaccactaattttgcatgccaccactcccagctaatttagtagagacggggtttctccatgttggccaggctgctctcaaactcctgacctcagatgacctgcccacctcggcctcccaaagtgctgaaattacaggcatgagccaccgcacccagcctccttctaacatgctgtaatttacttatcaatgatgctcatttctagtcaatcttccttcagcagaatataagccccataagggtagaggtctttgttctcttcatagatctcttctagatacagaggctgttacataatattcacctttttcaaaataaatgaaaagctcattgaagtcagaaaaaaaggaattccattgactgcaaataattgttgtcrccagagcattaggagcatgcaggataagtgcagaagggaaaattggatttgcaga

SEQ ID NO: 67947 - DNA, 1044 bp, Homo sapiens
tcaatcatgttgaagggaagaatttatatttctaagttgggagaggttttctagataatcccaaagctacatgcagcaacaattatcattagaagccaccttgcaaccatgagtgcagcaggtacaagcaaaaagccaactcaagtgggaaggagaaaataaagagtttacgagaaagcaaagtcacagctctaacatgctctgtctggattctagtctcctctgggctttttcttatataaaatgatatattttcttatcatttaaaaccatttctgaagacaaaatctttctgaccaataaaattatgcaattaaaagaattcatatattgtagacaaggcaagtacaagaaaattggctttcaccagttgggtagattgtatcctgattcataattatttaccctgctccccctgaaagaggattacattttcctatgccttggcgtgtgactgcccatgcctcctgcaacagaaatacacatcctacattggatgtgagtggacaatgaaatgtcagtggatgggcatatgttacaaatgagtaggtaatttaagaagcatcacaagttttccgtgatttttcttttttttttttttcttttttttttttttttttttgagacggagtctcgctctgtggcccaggtgggagtgcagtggcgcaatctcggctcactgcaagctccgcctcccaggttcacgccattctcctgcctcagcctcccgagtagctgggactacaggcgcctgccaccacgcccggctaatttttttgtatttttagtagagacggggtttcaccgtgttagccaggatggtctcgatctcctgacctcgtgatccgcccgcctcggcctcccaaagtgctgggattacaagcgtgagccaccgcgcccggccatccgtgatttttcttatcccttccagctgccacatacaaaattggggctgtctatcacctaagttctgaatgagaagacaaatagagagagcccaacagagctgaggagagagarccatagaagtagcaccccacccac

SEQ ID NO: 67948 - DNA, 578 bp, Homo sapiens
tcaactgggaagctacaagagtgtccagttkggctgaagcaacagagtgtaagaggcagcagtgggagataagactagaaagttctactggatttccaggaggcatttgaaatgtcagtatgaatcctcttctttaattgcccttgcttgtttttagattacatttgttccaaacccacagtcctaccctagtacactttagcttctcacaacagtatgagagttctcactctgtcttcagcttcagttctaaatgcagtctttaaaatgtagattttcaaaatctcaattgcatggtgtttatcaatttcatttccctcataagttctattatttgtaacaccaatggaaaattcacacaaccatgtaatggtacctggagaagttatagtttccctgcacatctgaaaggcagatgcctttggactgttttgaatgctgtctacaagattcttacatagtgtataaataatctgttttctatgccataaattcccttttctcactacaaaattctccacttcaaaagaatcacttgaaaccaaggctgtttagcctagtaagctatgatttaactc

SEQ ID NO: 67949 - DNA, 1442 bp, Homo sapiens
cctcctgaagtgctgggaatacagatgtgagccaccgcacccggcccttaatcacttttaagaataaaatcagtgtcatttacagagcccagcatgagagctggcatatagtagactctcaataactttttttaatgaatgaacttcaaatatctttttaaggtcttctgtatatatttatatgtaagctggttctgaaagggaagaaatctgattagaaattaatataatcctttgcctctgctattatgcttgatttcctggctttcaaacttattccaatgccaggctgcaggattgatttaaaaccccattgcccaaaaagaagcagagggagctgggacgcaatagccaaggttccttttccttgtaaagatatttagggattttatctgttactcgtatctcaagaacatgattacttaactctcataaagtaagacacaccgtaccaatgacrtatcagaagacatgggtaaaattgtgggaggaagcccagggaaacagtcaaacagctttaggcttcacgggacactaactaatcattttggccagaaagcccctctccccatggagcataatgtcttccaaggaagatttggatgaaacatttcaccagatggatccagtacctacattaagactctgccacccacacccttatgtattcatttatttctccatgaaatatttgagagtgtgttgaggtagcagagcctgtactaacagtggactaaagaatatgttgt[450 bp omitted]atccaggtcttctatatcaagagcccaggctccttccagagctacacttcagcttatagcacactgcttcatcataggttttgtttagaagtcacatacatatataaatattcaagaaacaggttggacttataaagaagacatacattttttaaaaagatttcaaaaacttaaacttctgctaagaacatactgtgataaaagaactcaggcaaaaaatattagtttttttaaccttaaaaa

SEQ ID NO: 67950 - DNA, 533 bp, Homo sapiens
tgctagtcatgctgggtgggccgggatgagagttagcagaagacctgatgggtctgtgcctcggcgggtccggactgcatgcacagttgtattggaagctaagataatcactcacctaacacgaggcccttccagaatgtgaggtctcagccaagtgaaccctgtgaacacctccacccccagacccgcggggaggctcaggagccaggcagaccgaggcagttccagaagcccttgggctggcagacgtttgcctctttgtaagtaagagtgtatgcagaagacctcacaagcagatcaccagtgaaattcagatgacccttctagagaggctgtgggcagccaaggccccaggtgtggacagggctgstgctctccaggtgctgggggccccagcatgtctcttcctacagctccatgtgcctttgccacggagccaccggcattcagtggcctcttccccacttggctgctatgtgtcccctggaactcagggcactccaggtgtcctcaggtcatgtctcagagctcag

SEQ ID NO: 67951 - DNA, 533 bp, Homo sapiens
tgctagtcatgctgggtgggccgggatgagagttagcagaagacctgatgggtctgtgcctcggcgggtccggactgcatgcacagttgtattggaagctaagataatcactcacctaacacgaggcccttccagaatgtgaggtctcagccaagtgaaccctgtgaacacctccacccccagacccgcggggaggctcaggagccaggcagaccgaggcagttccagaagcccttgggctggcagacgtttgcctctttgtaagtaagagtgtatgcagaagacctcacaagcagatcaccagtgaaattcagatgacccttctagagaggctgtgggcagccaaggccccaggtgtggacagggctgctgctctccaggtgctgggggccccagcatgtctcttcctrcagctccatgtgcctttgccacggagccaccggcattcagtggcctcttccccacttggctgctatgtgtcccctggaactcagggcactccaggtgtcctcaggtcatgtctcagagctcag

SEQ ID NO: 67952 - DNA, 524 bp, Homo sapiens
caccatgcctggtctgtttcatattcctaatgaccaagccaatttcactgttcatttgatggttttaagaaaaatttctgytcaagaaataaaacagagaagatgtcccattagagcagaaagacaagaaaaagagttgttgacattgggttgtttagcagtgggcagctgtcatcttggtcaccatcaagtaaatcctcagcagatgtgggtcatatgaaggttttggtttttgagtgaagaagtctgagaaacaatatattcaacacttaccaagttgtcttctagtcttctgagatggagagcaaaggaagggggtagtgtagaaaaaacaaatcccaagaattctgcaccacttctatgcatagcacaatgaagcagcaattaagaagaatggggaaggaagctataaatgtttgggaccaaagaaacaaggtgaggatagaaaatatgaagataattagagagtcttcatggttctcagaagtatagataggtgccacatgaagaggaagtggcatcct

SEQ ID NO: 67953 - DNA, 524 bp, Homo sapiens
caccatgcctggtctgtttcatattcctaatgaccaagccaatttcactgttcatttgatggttttaagaaaaatttctgttcaagaaataaaacagagaagatgtcccattagagcagaaagacaagaaaaagagttgttgacattgggttgtttagcagtgggcagctgtcatcttggtcaccatcaagtaaatcctcagcagatgtgggtcatatgaaggttttggtttttgagtgaagaagtctgagaaacaatatattcaacacttaccaagttgtcttctagtcttctgagatggagagcaaaggaagggggtagtgtagaaaaaacaaatcccaagaattctgyaccacttctatgcatagcacaatgaagcagcaattaagaagaatggggaaggaagctataaatgtttgggaccaaagaaacaaggtgaggatagaaaatatgaagataattagagagtcttcatggttctcagaagtatagataggtgccacatgaagaggaagtggcatcct

SEQ ID NO: 67954 - DNA, 524 bp, Homo sapiens
caccatgcctggtctgtttcatattcctaatgaccaagccaatttcactgttcatttgatggttttaagaaaaatttctgttcaagaaataaaacagagaagatgtcccattagagcagaaagacaagaaaaagagttgttgacattgggttgtttagcagtgggcagctgtcatcttggtcaccatcaagtaaatcctcagcagatgtgggtcatatgaaggttttggtttttgagtgaagaagtctgagaaacaatatattcaacacttaccaagttgtcttctagtcttctgagatggagagcaaaggaagggggtagtgtagaaaaaacaaatcccaagaattctgcaccacttctatgcatagcacaatgaagcagcaattaagaagaatggggaaggaagctataaatgtttgggaccaaagaaacaaggtgaggatakaaaatatgaagataattagagagtcttcatggttctcagaagtatagataggtgccacatgaagaggaagtggcatcct

SEQ ID NO: 67955 - DNA, 524 bp, Homo sapiens
caccatgcctggtctgtttcatattcctaatgaccaagccaatttcactgttcatttgatggttttaagaaaaatttctgttcaagaaataaaacagagaagatgtcccattagagcagaaagacaagaaaaagagttgttgacattgggttgtttagcagtgggcagctgtcatcttggtcaccatcaagtaaatcctcagcagatgtgggtcatatgaaggttttggtttttgagtgaagaagtctgagaaacaatatattcaacacttaccaagttgtcttctagtcttctgagatggagagcaaaggaagggggtagtgtagaaaaaacaaatcccaagaattctgcaccacttctatgcatagcacaatgaagcagcaattaagaagaatggggaaggaagctataaatgtttgggaccaaagaaacaaggtgaggatagaaaatatgaagataattagagagtcttcatggttctcagaagtatagataggtgccacrtgaagaggaagtggcatcct

SEQ ID NO: 67956 - DNA, 566 bp, Homo sapiens
tcccgcccttgggccgccgggaacctcgcagagcggcggggtggccctggcgaggcgcggttgttgggggttcgctcgagcctcacgacgcccgcgactggggactcggaacctgggccaggctgggacgaggccgcgcgggagggcgcgctgggcggacgctggggccgcggagcccaaccgcccttgtcctggacgccccttsgcggtccgcactggcgggtgccctctcccgaggggaactgaggcggggcgcctgccaccattcgtgattttccgtgactcaccctctcaacagtgtcccgtcagcccccgctttctggaattaagatgattttccatgggcattatagtcagaggaggttttctgtgagacatctgggaaaggtgactcaatgatcactcatattgttctatgatgttatacatttaaccggaatactggtgaacagcttttatatcttggaattttttcccatttttgaatcagaaatttaggaccaagaatcttctgtcacagaacctattactttgaggagtgaacttatattaacggtgctaaaccg

SEQ ID NO: 67957 - DNA, 574 bp, Homo sapiens
gatgccacccatcaaagtccagtggataccagggagatggtgttgtgaagtctccccctttctatgactattgtgggcttcgagctaatgtcactaacagctaatgtcataacwcttttactctgtccatattattcacaatgactcttctgagcttcaaagtagaccaattattcacaatctaaagacaaaagatgaatagttacagaagttaagacatccaactagggttgcaaagaaaaggacagaaaaagtttggaaaacaataacggcatgaatttcattggattcttttagctgcagagatgatcatgtacacaatcttgtccagacagggcaagaaccatgaacggctgtgcccatggtttttccctgttttaaggtgattctcctaattggttaagtaaatatcctgggagtagaacccaattaacgaccatcctgcccttggaaagaacaacactttacaggagctgcctcattttacccctagaaatgcaaggaagtctcaaaaaaacagattatttcaactttttaatctaggtccatccttccttaacattacgagaggaga

SEQ ID NO: 67958 - DNA, 734 bp, Homo sapiens
agctctctttgcttgtggatgtaacaagctgcttgccagagaacatctccccaggcccctgggtaaaatccatctgtttttacaggagccttatcaggatggtactgcctctcagcttggcccaagctgtcatcctgagatgtgcacttcccattgacctttccttggaggacttgctcaaatcctgcttcctccaggaagtctttgttgattgctctggtccacgctgatcttgggcttttatgacctactgagaagctggattgatgggsttgtggtcccctgcttcttctttatattaatcctcctccttccccctcctcttcttcctcctttaagaagtagtagtggtttctttgtttgcacttatggcctgtgaaaaagaaaacactatgcttgacttcctcccttcctccctccttcattttaacaaatgtgaggtccttcattatattccaataagaagcttaaatattttcacttaatgagagatcatacttatttaagcaaccaaatgaccatctttcccagtataattgcaaaagatcattagttaattcttcttgtagctgctgctttgtatgtcagtccactgaccaggagttctgttccaggagaaggtctctccagagtctctctgcccattcccttcaactcctacacacccttccatccttagctgactgccatcttcaccttttcactctgccttttctagcctagtttctaggcaa

SEQ ID NO: 67959 - DNA, 734 bp, Homo sapiens
agctctctttgcttgtggatgtaacaagctgcttgccagagaacatctccccaggcccctgggtaaaatccatctgtttttacaggagccttatcaggatggtactgcctctcagcttggcccaagctgtcatcctgagatgtgcacttcccattgacctttccttggaggacttgctcaaatcctgcttcctccaggaagtctttgttgattgctctggtccacgctgatcttgggcttttatgacctactgagaagctggattgatggggttgtggtccccwgcttcttctttatattaatcctcctccttccccctcctcttcttcctcctttaagaagtagtagtggtttctttgtttgcacttatggcctgtgaaaaagaaaacactatgcttgacttcctcccttcctccctccttcattttaacaaatgtgaggtccttcattatattccaataagaagcttaaatattttcacttaatgagagatcatacttatttaagcaaccaaatgaccatctttcccagtataattgcaaaagatcattagttaattcttcttgtagctgctgctttgtatgtcagtccactgaccaggagttctgttccaggagaaggtctctccagagtctctctgcccattcccttcaactcctacacacccttccatccttagctgactgccatcttcaccttttcactctgccttttctagcctagtttctaggcaa

SEQ ID NO: 67960 - DNA, 734 bp, Homo sapiens
agctctctttgcttgtggatgtaacaagctgcttgccagagaacatctccccaggcccctgggtaaaatccatctgtttttacaggagccttatcaggatggtactgcctctcagcttggcccaagctgtcatcctgagatgtgcacttcccattgacctttccttggaggacttgctcaaatcctgcttcctccaggaagtctttgttgattgctctggtccacgctgatcttgggcttttatgacctactgagaagctggattgatggggttgtggtcccctgcttcttctttatattaatcctcctccttccccctcctcttcttcctcctttaagaagtagtagtggtttctttgtttgcacttatggcctgtgaaaaagaaaacactatgcttgacttcctcccttcctccctccttcattttaacraatgtgaggtccttcattatattccaataagaagcttaaatattttcacttaatgagagatcatacttatttaagcaaccaaatgaccatctttcccagtataattgcaaaagatcattagttaattcttcttgtagctgctgctttgtatgtcagtccactgaccaggagttctgttccaggagaaggtctctccagagtctctctgcccattcccttcaactcctacacacccttccatccttagctgactgccatcttcaccttttcactctgccttttctagcctagtttctaggcaa

SEQ ID NO: 67961 - DNA, 734 bp, Homo sapiens
agctctctttgcttgtggatgtaacaagctgcttgccagagaacatctccccaggcccctgggtaaaatccatctgtttttacaggagccttatcaggatggtactgcctctcagcttggcccaagctgtcatcctgagatgtgcacttcccattgacctttccttggaggacttgctcaaatcctgcttcctccaggaagtctttgttgattgctctggtccacgctgatcttgggcttttatgacctactgagaagctggattgatggggttgtggtcccctgcttcttctttatattaatcctcctccttccccctcctcttcttcctcctttaagaagtagtagtggtttctttgtttgcacttatggcctgtgaaaaagaaaacactatgcttgacttcctcccttcctccctccttcattttaacaaatgtgagktccttcattatattccaataagaagcttaaatattttcacttaatgagagatcatacttatttaagcaaccaaatgaccatctttcccagtataattgcaaaagatcattagttaattcttcttgtagctgctgctttgtatgtcagtccactgaccaggagttctgttccaggagaaggtctctccagagtctctctgcccattcccttcaactcctacacacccttccatccttagctgactgccatcttcaccttttcactctgccttttctagcctagtttctaggcaa

SEQ ID NO: 67962 - DNA, 734 bp, Homo sapiens
agctctctttgcttgtggatgtaacaagctgcttgccagagaacatctccccaggcccctgggtaaaatccatctgtttttacaggagccttatcaggatggtactgcctctcagcttggcccaagctgtcatcctgagatgtgcacttcccattgacctttccttggaggacttgctcaaatcctgcttcctccaggaagtctttgttgattgctctggtccacgctgatcttgggcttttatgacctactgagaagctggattgatggggttgtggtcccctgcttcttctttatattaatcctcctccttccccctcctcttcttcctcctttaagaagtagtagtggtttctttgtttgcacttatggcctgtgaaaaagaaaacactatgcttgacttcctcccttcctccctccttcattttaacaaatgtgaggtccttcattatattccaatargaagcttaaatattttcacttaatgagagatcatacttatttaagcaaccaaatgaccatctttcccagtataattgcaaaagatcattagttaattcttcttgtagctgctgctttgtatgtcagtccactgaccaggagttctgttccaggagaaggtctctccagagtctctctgcccattcccttcaactcctacacacccttccatccttagctgactgccatcttcaccttttcactctgccttttctagcctagtttctaggcaa

SEQ ID NO: 67963 - DNA, 410 bp, Homo sapiens
cacaagctccagtgtgcttggggatgtgtccttgtccctctggggatcatgggagttctaggccctccccaccccatcctactccaatttccctttgaagggcctgacaaaggcagggtccccctcccttcacccttctgtacaaatgtgaatcatatttcattttatggcattttctttcagtgaaaaacacatagtttgaccaattaaagcctcttttggaccaagcccctgacagaactggagaggcaactgwaaaggacgtcctgttcctatggttttttgtctctctctctctctctctctctctcctgttttttttttcccttggtcacagttcagatttagagggaagcagtgatgggaataaactgtgaccactctggcctcttggcggctgtagggatcca

SEQ ID NO: 67964 - DNA, 773 bp, Homo sapiens
aatgctgtataaattataaaacttagtggtgttgccaaattatcttccagaaggattctatcaatatatatatattcactaakagtgcacagatgcctatttccctagactgtcgttgcaatggctcctattaactatttatattcctgatagtacaattagtttttggaaaggtatcttcttgttttaatttgcattgatttatttattattaaggaggtcttatgtatacaggacatttgcattataaccttctgttcttaccctcttctccattttttcccccatagaattggtagtctccttcagctttgtgcaggttttttttgtgaatttggaaggttaatcctttgacatatgtgttgcaaattttaccacccctgtttcctgttcatcttttggctttcttagtagtatttctcatccctcaaaaggacttaatttttttattatactttaagttttagggttcatgtgcacaacgtgcaggtttattacatatgtatacatgtgccatgttggtgtgctgcacccattaactcgtcatttacattaggtatatctcctaatgctatccttcccccctccccccaccccacaacaggccccagtgtgtgatattctccttcctgtgtccatgtgttctcattgttcaattcccacctatgagtgagaacatgcggtgcttggttttttgtccttgcgatagtttgctgagaatgatgatttccagcctcatccatgtccctacaaaggacatgaactcatcattt

SEQ ID NO: 67965 - DNA, 752 bp, Homo sapiens
gtcctccactgggacttttctatccatagtaagccattcccctgtccacagagatacacaggagtaaaaataccccatccttctagatattcagtctcctcccaccctgccagcagggctaggagagaaggaattcccagccccagactcccttcctctcccccagtttgctcagctgctcacgcaacggccctaaccttggagctcagtagcagccttccccaggagaggctgggacctctgcccctcacaggcctcttcgctacattataaagggtcagcgagcctctctaatacagtacacttgagccaagacctgaagaccctgtgagggagtgagccatgcatgtatttgaggaaagaaaattccaggcagagggaagagcatgtgcaaaggccctgaggcagcagggtacctgacaagttggagagacacccgggaagttaggacygccaaagtggagaaggggaggaggagagtggtaagagataaggccattttgaaggggacacagtcatggaagcctgtcaggaagaggtgacctggatatggtccagatctcaaatggattgtgaagactcgaaggggtgagtcgagggcaccgtgggcctgctataccaagccgagcctctcacattccttgcatcaccaattttctgtggtgagaggtaactgacagggtcctttcacttgagatgcgccgggtgtaggtcagaagtccttctgtgccctcgtgtttgcttcaggatcc

SEQ ID NO: 67966 - DNA, 808 bp, Homo sapiens
ggatggttgcctaattcacccaactgtatatagattttttttaaaaactccatttcctccagtaaacaagagcataattttaatcaccaagccactcaaaatcttacccccgagccaccttatttgcattttttcctgacagagcttacattttttcatttctttaattggacaattttgagcatggagcttgaccaccagctgtgccgggtgacaatatcttcactccacagccatacttgttcctcttcycccatttccagaattaaaagaatgttttatggctttaagccacctccagagctaaaagaatattgaaacatttgggggctcagtctgttgggtcagaagatgatacaaagtgagagtagaggtgctctgagccccttctaatttttggcatctcaaatagttgccacaaatattggagctcttaaccttccacaatgcttccttactaaagttctttctgagagccctggagaggctctttagaacgttaggaaaaatgaaaaggacaaaagaaaaatcagtaggtcatctaataagaaatctttcaagtgccctccaaacggtatcttcccccaactttctccttaatttaattactttatcttaaaaaaaaattgtgacccaatatttacaggcccaacatgatccatatccccagggaaatgaatcatgttgggcctgtaaatgttgggtcacaattgctggggtgataagttaacgtaagtgtccttgtcataacaagcacagatggcagatttacaattcagcagctatataaaaccttcctaaaggatcc

SEQ ID NO: 67967 - DNA, 1005 bp, Homo sapiens
tgcttacagtaaagaaggtctcaaaccatatcaaaggatataaaatgaaaagcctcctaattgctccttcatctgcaattccactccctggagataaccacttaaaacttcctaaattgccactattactctaaaataaatgcctgcaatggctattcctgattgatcaattttagacaaaatctctagacgggtcactatgaaagaagaggaatttagttcccctcccctctatgtccacctgatttttgtcagtttattttccagttcataaaaaaaaatagtattttaaatcgagtgtctatgttgttagaaacctaatcaaagaacatttacacttcccttttcatgttgacttcataaaatccactaaattagatacttcaatgggacatctagcaatggtgactttgtagtcatagtgcacctactcatcctggtttgtctaggactgtcctggtttacattttttgtcccagtgaaacttttattagtgttcctcgtcactttcaaaactatgttatgtggataagttatggggtcacctaatttataaaaataatggaggagagccttcctcaggatgagactgttggcagaaggggacctctggtggcttcttgaccactctagctctattcatataattactgagtggttacagagtacatttctttgctwtcaaagttctcctaccgcttttcgtgggcttccgtatttgcggtttatgtccctttgctgtgtttgatctaaagggcgcccttcatgtctgtgcacagttctgttgaaggcagtgttttatttaactttgaaacaataaaaagaagaatcaaattaggatatttatgccatggtagattagctactatcttgttaatattctattcttagttctttaaaaactacttgagatttatagaaaggtaaagagagtaacagtacagatactccttaacttacaatggtgttacgtgcccataaacccattgtaagacgaaaatacta

SEQ ID NO: 67968 - DNA, 1059 bp, Homo sapiens
acattaaaaataatagaagaaatttaccaatattatggtttaatttgatttaaaatttgatttggctttttaagagatagaactcttcctttgtaatgttcccttgataatgaacagcttcacaccaaarctttctgatccttaatagctcttgtaggttgggatttgttttcaaaggtgatttaaataattcccaaactgcttattttattcaaactaaaaatacttgagaaatcctgaatacaattgtttcatttcatcttttgtctcctgcacaaatgactttttactataaatcatactattactacgattgccacttttttatgagaatctgcaagtcttttttttttattacacaaagaaataggttcaacacagaagcagtacactaaaaatagggctgggaatcacaaagagattttgttgaaatctaggtgagaaattgagtaagaattcacaataaggcagaaaaatgtgccttaatttttggcctgaggttttccataaggagttaaggtaaatctttgtaggcaggagtgtggaggggttgggatggtattagttgtcaaggattttctgcagaccggcagaggatactttttctatccctggatactgaggtatgacccctgtggacttattttactttttagggtattggtaggaatttttgttagtgactcggttaggttaaccctgaacttactataacagacccaaatgctgccatggcaaaattcctttgcaaactgataggaaaataaactgcgtgagagctgagccttgtataggatatacctgttcaacaaaaacctggtattacaaaaaaaaaaaaaaaaggtgaggagcatagtgaattagcattttgtattaattcaataattcaactagctttattccaaagtgaccccaagtaaatcagatctgctgttcaaaagtaaagaaagaaaatacacttacccagaacaactccaaaagagtggagttgaaaaggaagaacaaacaaacaaacaaacaaacaaaaaccaaacccatagctgctgaagtttcagcctc

SEQ ID NO: 67969 - DNA, 1059 bp, Homo sapiens
acattaaaaataatagaagaaatttaccaatattatggtttaatttgatttaaaatttgatttggctttttaagagatagaactcttcctttgtaatgttcccttgataatgaacagcttcacaccaaagctttctgatccttaatagctcttgtaggttgggatttgttttcaaaggtgatttaaataattcccaaactgcttattttattcaaactaaaaatacttgagaaatcctgaatacaattgtttcatttcatcttttgtctcctgcacaaatgactttttactataaatcatactattactacgattgccacttttttatgagaatctgcaagtcttttttttttattacacaaagaaataggttcaayacagaagcagtacactaaaaatagggctgggaatcacaaagagattttgttgaaatctaggtgagaaattgagtaagaattcacaataaggcagaaaaatgtgccttaatttttggcctgaggttttccataaggagttaaggtaaatctttgtaggcaggagtgtggaggggttgggatggtattagttgtcaaggattttctgcagaccggcagaggatactttttctatccctggatactgaggtatgacccctgtggacttattttactttttagggtattggtaggaatttttgttagtgactcggttaggttaaccctgaacttactataacagacccaaatgctgccatggcaaaattcctttgcaaactgataggaaaataaactgcgtgagagctgagccttgtataggatatacctgttcaacaaaaacctggtattacaaaaaaaaaaaaaaaaggtgaggagcatagtgaattagcattttgtattaattcaataattcaactagctttattccaaagtgaccccaagtaaatcagatctgctgttcaaaagtaaagaaagaaaatacacttacccagaacaactccaaaagagtggagttgaaaaggaagaacaaacaaacaaacaaacaaacaaaaaccaaacccatagctgctgaagtttcagcctc

SEQ ID NO: 67970 - DNA, 565 bp, Homo sapiens
agacactgcagtggatcagtagcttcaaggggggactgggaacgaacaggtgagacagatagataaatatgtatgtatacacatacatacacacacacacacacacacacacacmcccacacccacatatacttttcaaacctctactgtctctgctttattttggtttgttttccctgaaattctctattaagattttcatgttttattagcattgcattctaatttttaaatcatttaaaattcatgttataggccctttcgttatctgtttagtatttgtatgttctgtgtgatttttttaacattgattcttcagagatatcttttttgtgtttttaaaatgtgtattgtaattttcctccttagtagtttttagtaaatttttgttttcatagtctctgttctcatagtattgtgaacagagaatatgtttcttaatatatatttaagtttttgtaagtatgccaaaaattaaaaaggacggacggatgtggtttcttcagggtccactatttgatatagtatcaatgcctgattgattatattatttaaatatagctta

SEQ ID NO: 67971 - DNA, 577 bp, Homo sapiens
tgagaagacccaacaactctttggatatccacgtgttaaccagccaggcatttacattgtttccctaacttggcttcagttcccctcagccttttgagtgttggtcrctgatcgtggttatggaggaggtgtcttcaaaagcatcaaggaaaaaatatcaaatattttgatatttgatatcaaatatcaaaatttgccatggtgcccagcatggttcaagatcataagtgtcaagcacatcaggtaaggaagataataataattcaagggcaaatgaattgccccatggacagtgaattacagtatgctacaatggatttgtttggaccatttatcttttcttttgaattgacttaactgtacatttgtaggagataagcaggaaatcagaagcactcctagggattggcactggtctaaatgacagccctaaggaggagcttagataccagattcatcctccatccaggcagaagctccccagggataaaactgcaaggttaaatgtgaaactcaaaatttgaagcaaaagcctctcctcttctgcacttcttttcttcctaagttgagcagtaat

SEQ ID NO: 67972 - DNA, 616 bp, Homo sapiens
actccattccctactcactaggctttaaacacagctgtcagacacaatcactctttgtttgaattcatttagttaccaagacctactgattttttttttaacagtctctgtcttgtcacccattccttcctttccattcttagagcccaattttctagatcagggcttgtattctcagtctctaatacttcatgtgtaggtccaacttgtctccttgcatacatttttccctccagcagctgttatgaactgaattatgtccccacacaccccagattcagatgtttaagccctaaccccatgtgactgtgttaggagaccgagcatttttggaggtaattgtggttccatgagattataaggatggggccctaatttgataggactggtgtccttataggaagaggatgagacactactctttctctctgctcatacacagagaaaaggcggccatctacaagtcagcaagagggcctygctaggatgaattttccagcatcttgatctgaacttctagcctccagaactatgataaattaaatttctgtggttgtagccacctggtctgtggtatttcatgtcagtcataacagactaataaataggctatctg

SEQ ID NO: 67973 - DNA, 515 bp, Homo sapiens
tcaggtgatccacccacctcagcctcccaaagtgctgggattacaggtrtgagccaccacgcccaacatttttgttgttttagtcacttggtgtggaacccataggaggccacacaaagtgctgaaaagaatgaaagaatggaattctgggattttagtctggagggcaatggtgcttgcataaactttggaattaacaagaatacccagctgaccaagttttcctccatggaagagaagatgaaaaccttcccaaactggacaacagcaaaggtatggggaatacaggcagaaagttatatatagttgggatctctgtcatctgaattgtcactaactccaaacttagtggctgagggcccttcaagtacagctcttgcctcacctcccaatagaagccaggtgagtttcatagacctacttattccttaagtctgagtcttaatcagtttcttgaactgctcaaaggccagattcttgaaggaaattcatcattctggagacccacactcaca

SEQ ID NO: 67974 - DNA, 791 bp, Homo sapiens
tcccaaattgatgctatatttatagaataaagacaagaaaagttgattactcaattaaagcaatcccaatattaaaagatataaaaatttctcttttttctttttttaaagaagagagctcatcgtgttgcccacactggtctccaactcctgggctcaagtggtcctaccacctcatcctcccaaagagctgggattataggcatgagccatccattgtgcctggccaagaatttctttaaggagtaataatctgtacgagtgtcacagataaaaattccagcatgttttgcattttctcaaagtacactccaaagacatgatattcagcacatcatgctccaagttaagctctattgttgattccccccttccttaatattctgccatatttctcctgttctttcttattctttttcttttttttgaaacggagtttcgctctgccgcccaggctgaagtgcaatggcgcagtctcagctcgctgcaacctctgcctcctgggttcaagcaaatctcctgcctcagccttccgagtagctcagactacaggcacttgccaccacacccggctaatttttttttttaatttttgtttgtttgtttgtttgtttatttatttatttatttatttatttgagacggaggttcactctgtcgcccaggctggagtgcagtggtacgatctcagctcactacaacctccgcctytcaggttcaagcgattctcctacctcagtctcccacgtagttgggattacaggctcctgccaccatgcctggctaatttt

SEQ ID NO: 67975 - DNA, 1776 bp, Homo sapiens
ctcccaggatggctatccaggatgggcctcctttcttctccacctccagagagagagagaagagagaagagaaaaaaaaaaagacagagaaggagagagaaaacacagagacagaaagacagagaggtgggggtggggagagagaggggaggagagagaagaagggagagggaggagagacagagagaaaaggacaggaagagataacagagcatgagaatgagcccatgtttctgcttcaagagtcaagcagaagtcctaaggtcttctctgattgcgccgacttagaccacaccctcatgagctcatcacagcaggcaaggatggaggattcacttaagactctcagaggcccccttgaaacttagacctggagtcagcttccccaaagcayagggagcatagtggacaaggtgactacccagactagaatgtgaggactgttctgaagggtagaagagaatccgtgctaagtaggagagaatcagtgcttggaggagagaatctgtgctaggtaggacactgcccgggactgaaggcttcttctccccacccccaaattcgtacattaaggccctaatgtagtggcatttggaggcagggcctttgggaggcaattgtgtttggatgaggtcgtgggactagatccctcgtgatgggagtggttccccataaagggatgaagagccaagggcttgctctctatgccatataaggacgcagtaagaagatgccctctgtaaaccaggaagtgcacccccacccgacaccagatctgctgcaccttgacttgggatgtccagcccccagaactgtgagcaataaatgtgtgttgcttaagccactcgggctttggcacatttgtgacagcagctcaaccagacagaccaagacagaaacccagcaatatcctccacccacttccaaaacggttcatgttctgcgttctcattccatagcggtgggtgacagccatctaccaggtgccctgcccaggaatctctgagtcagcctaggttacggcctctccctcactgtctgcgtcgagttcattgccaagatacactgttggtggtggtggtgctctcacttcccaaataccatgaaattgtgtcctccagctttcatcctttctttcaagccctcaccagtgcccacctgaacacagcacccaactcctgagtggtctcctgaactatccattcccccaacccagccacccccataccacgctgccggcaccagggcgctgtgacacatccttccttccttgccaagctcctgattaaaatgcttctggaggccgggcgtggtggctcacacctgtaatcccagcactttgggaagccaaggcaggtggatcatttgaggtcaggagtttgagaccagcctgaccaacatggtgaaaccccatctctactaaaatacaaaaattagccagccatgatgacggacacctgtaatctgagctacttgggaggctgaggcaggagaatcacttgaacccaggaggcgggggttacagtgagccgagattgtaccactgcactccagcctgggcaatagagtgagactccctctcaaaaataaataataaataaataaaacggcttctggtgctatcctctgcctcaaaataaagcccagccatgccttcctcctatagctcagcaccatctcctctgtgctacctccctcctcacacacccactggcttcccaaacacatgagccatttgacacgtagcacatttgtgtggctgagggaagaggctcc

SEQ ID NO: 67976 - DNA, 672 bp, Homo sapiens
tacattgctactagctgaaatgtctctctctatatatatatctatagagagaaagagagaaaggagttcaaagagttccatttcccctttcctcgcctccaaattttatacatttgtatgtttaagaagctgagttgtttgtcctacagagtttagcacagcctgagctttgatcattgcatcctcatggtgtaatttgacatatttctttgttcctgtatttctggggaattggtagacaggtagagaggcttgatcatatttaggtttgaaaatttatttggagatttaaaaacttatctctttgcattgatttataacttaattgtattgtacttagagaatactgtgtaygtaccaattttctgacagttttgaggcttgctttatggtcatgtacatgatacatttctatcagtgtttcatgaatatgttaaaagaatgtatacagtccaatgttgagtcaatattctgtagctatttattagattaagcttgtaagttatgttgcttgctgattttttggctgtttattaattattgaaaaacaggtgttaaaatctttcattatggtagagaacatttgcttcttcttctatactattataaacggttaagatttagggtacatgtgcacaacgtgcaggtttgttacatatgtatacatgtgcc

SEQ ID NO: 67977 - DNA, 1073 bp, Homo sapiens
ataataataaatgatgaaaagctaagttttttatcctaagatcagaagcaaagaaaagatgttttctctccctactcctagtcaacagagtactggacatactagccacgtgcaattcggctaaagaaataaatagcacccagactggaaaagaagaaatagaactattctaaaattaactttctccaatttcattagccatgatacttgggtacagacttaggtaggatgaggctcagagactcaacttctctctgttcttggttctgagctgccttccaccaggcaaaaggagtcatccatatggcatacaagaaaagcctgtgagatgtagtgccacagcctcacagtgatawcactggagcatttgcctgaccttgccctctgcacacactgctttcaggaacacttcagagttgtcaatgtctggcacagacagccagggactcaaaaacctaggtatctgtcacgtcttgctcaatctttccattaccagcactgtcatatgccacataacaacgttttggtcaatgacagaccatgtgacatggtcccaatgacagaccatgtgacatggtcccataagattaaaatggagctgaaaaagttctatcttctagtgacgtcattaccatgataatgttgtagcatgattactttatttttttcataaatttggtgtagcctaagtggatagtgtttataatgtctacagtagtgtagactgtagtgtacagtagtgtagtactgccctaggcctttatgttcacacaccactcactcactgactcacccagagcaacttccagtcctcaagctccattcatggtaagagtcctatacaagtatatcattttttgtcttttatgtcatattttactgcaccttttctatgtttagatgcacatacacttaccactgtgttacaattgcctacagtattcagtacaatgacatgcggtagaggtttgtagtgtaggagcaaaaggctctgccatatagcctaggtgtctagtaggctctaccatctaggttgtgcaagtgcactctgtaacgttcgcacagtgatgaag

SEQ ID NO: 67978 - DNA, 839 bp, Homo sapiens
atcagagggtaggaggttccattaattgagatgtggaagactgttggaccagctggtttgatcaggataaatcaggtgttaggttttaaatacgtcaagttcaagatgtctgtttatgtttaagcaagaatgtagagcaggccatgggatatgtttgactggaattcaaaactctgatgtagtttagttcagtttggcaatcaataagtacttcttggccagtcgcattgcctcacacctgtaatcccagcattttgggaggccaaggtgggaggatcgcttgagcccaggagttcaagaccagcctgggtgacatcgtgagaccagtctctacaaaaaaatttcaaacttagctgggtatggtggcacatgcttgtagtctcagctactcaagaggctgaggcaggaggatcacttgggcctgagaggtcaaggctgcagtggctgtgccactgcactctggcctgggcaacagagagagaccctgtctaaaaaaaacaaaaacgtacttcttgagtgagtgattatgagaccagtcagatttgtcccatgagtctccaatgaccttctgcatatcactaatccttgtagtccagagaggccacctccagcaggtgacatcagtctctgctctagaactaggactcattaaactgtttgccatgatgctcttgctaattatttgacctgrtagagacaggtagaatctagacaagtgtctttcactggcattgtaaccttttaaaacattctattgctccattcccagattctgattcagttgatctggggtgaaacttgtacattggtagtttcaaaagatcctcaagtaatcctct

SEQ ID NO: 67979 - DNA, 685 bp, Homo sapiens
acccccatgaccaaaacacctcccactgggccccacctccaacattagggatcacatttcaacatgagatttggaggatcaaacatccagactatatcatgtggcctagccaagttgacacataaaattaaccatcaccactggcctcccaatttaaatgtacttgttgtttaaatgtaccagaacctccaggacagggaccacagtctttccctatctaagcagagatgtatagyccagcaacctatccttagtgtggccagggcaaaagagagggaaggcacacaggctggccttaatggtacagtgactggttctttgtgcctgtttccctgcccaaggctccttttctctctgctcccctttaacaaagtcaccaagcaaacagaaaaaccaaagcaggagatcgtggtgggcagctgaattgcaagatggaagagttacaacaaatattttggtcaaccagccccaagtcatgaaagagagaccagccctccccactttgccctctcatctctggatgccccaaaagaaataatctggattatgtgggcagctgcctcctggagaaactccagtgttatctctggaaattctaggccctcctaagcagaggatataatatcaggatgtaaagaaattttgacaggctgaaatgagtctaactctaacaaaatgaacctta

SEQ ID NO: 67980 - DNA, 1091 bp, Homo sapiens
gcataatagtcacatcagggtaaacgggatatctatcacctcaagcatttatcctttctttgtgataaaaacaatccaattatactcttagttatttttaaatatactgtagtcaccctgttgtgctatcaaatactagatcttactcattctacctatatttttgtacccattacccatccccactaaacagtcacccaccactcctgcccctttccagcctctggtaaccatctttctactttctgcatgagaattgttttcatttttagctcccggaagcaagtgagaacatgcgaaatgttctttcagtgcctggcttatttcgcttaacatggtgaccgccagttcyatccatgttgttgtaaatgtcaagatccattcttttttatggctgaaacatttgtttcagtatttgtaatagtgtaataagaatgactcatatgtccatctttagaggaatcgatacatagaatccaatataatcatgatggaatactgtataggagataaaatgaataaatccgatatgtgtgtcaatgtcaatgtagataaatttaaacacacacacacacacacacacacacacacacatacatatgaaacagaaatgactggagggagaatacacatgaaattaattataatggttgccttggtttgaggcaggggtatgggagaggaccaggacttaggagtggaataaaaggaactgcaactttacatgtaatattttatttcctttatattaaaaaatctgaagcagatatgataaggtttttccttgtaaattccaaatatatcgatataagattatttgatacattatctgaacttttacatgtttataaaataatttttcattttgtaaacattttttaaatttcagtttaattttagaattaaacttcatgatattataaagtatacactgaaagaaagataattgtttgatccttttttccatttctagtaaacctctagataatgccagtaagcttgcacagcttgttgaaaaaaagcttgaagactactacaagattgatgaaaagagcctaataaaggtaatgtatgcaaggcaagtaatgact

SEQ ID NO: 67981 - DNA, 1091 bp, Homo sapiens
gcataatagtcacatcagggtaaacgggatatctatcacctcaagcatttatcctttctttgtgataaaaacaatccaattatactcttagttatttttaaatatactgtagtcaccctgttgtgctatcaaatactagatcttactcattctacctatatttttgtacccattacccatccccactaaacagtcacccaccactcctgcccctttccagcctctggtaaccatctttctactttctgcatgagaattgttttcatttttagctcccggaagcaagtgagaacatgcgaaatgttctttcagtgcctggcttatttcgcttaacatggtgaccgccagttccatccatgttgttgtaaatgtcaagatccattcttttttatggctgaaacatttgtttcagtatttgtaatagtgtaataagaatgactcatatgtccatctttagaggaatcgatacatagaatccaatataatcatgatggaatactgtataggagataaaatgaataaatccgatatgtgtgtcaatgtcaatgtagataaatttaaacacacacmcacacacacacacacacacacacatacatatgaaacagaaatgactggagggagaatacacatgaaattaattataatggttgccttggtttgaggcaggggtatgggagaggaccaggacttaggagtggaataaaaggaactgcaactttacatgtaatattttatttcctttatattaaaaaatctgaagcagatatgataaggtttttccttgtaaattccaaatatatcgatataagattatttgatacattatctgaacttttacatgtttataaaataatttttcattttgtaaacattttttaaatttcagtttaattttagaattaaacttcatgatattataaagtatacactgaaagaaagataattgtttgatccttttttccatttctagtaaacctctagataatgccagtaagcttgcacagcttgttgaaaaaaagcttgaagactactacaagattgatgaaaagagcctaataaaggtaatgtatgcaaggcaagtaatgact

SEQ ID NO: 67982 - DNA, 1091 bp, Homo sapiens
gcataatagtcacatcagggtaaacgggatatctatcacctcaagcatttatcctttctttgtgataaaaacaatccaattatactcttagttatttttaaatatactgtagtcaccctgttgtgctatcaaatactagatcttactcattctacctatatttttgtacccattacccatccccactaaacagtcacccaccactcctgcccctttccagcctctggtaaccatctttctactttctgcatgagaattgttttcatttttagctcccggaagcaagtgagaacatgcgaaatgttctttcagtgcctggcttatttcgcttaacatggtgaccgccagttccatccatgttgttgtaaatgtcaagatccattcttttttatggctgaaacatttgtttcagtatttgtaatagtgtaataagaatgactcatatgtccatctttagaggaatcgatacatagaatccaatataatcatgatggaatactgtataggagataaaatgaataaatccgatatgtgtgtcaatgtcaatgtagataaatttaaacacacacamacacacacacacacacacacacatacatatgaaacagaaatgactggagggagaatacacatgaaattaattataatggttgccttggtttgaggcaggggtatgggagaggaccaggacttaggagtggaataaaaggaactgcaactttacatgtaatattttatttcctttatattaaaaaatctgaagcagatatgataaggtttttccttgtaaattccaaatatatcgatataagattatttgatacattatctgaacttttacatgtttataaaataatttttcattttgtaaacattttttaaatttcagtttaattttagaattaaacttcatgatattataaagtatacactgaaagaaagataattgtttgatccttttttccatttctagtaaacctctagataatgccagtaagcttgcacagcttgttgaaaaaaagcttgaagactactacaagattgatgaaaagagcctaataaaggtaatgtatgcaaggcaagtaatgact

SEQ ID NO: 67983 - DNA, 1091 bp, Homo sapiens
gcataatagtcacatcagggtaaacgggatatctatcacctcaagcatttatcctttctttgtgataaaaacaatccaattatactcttagttatttttaaatatactgtagtcaccctgttgtgctatcaaatactagatcttactcattctacctatatttttgtacccattacccatccccactaaacagtcacccaccactcctgcccctttccagcctctggtaaccatctttctactttctgcatgagaattgttttcatttttagctcccggaagcaagtgagaacatgcgaaatgttctttcagtgcctggcttatttcgcttaacatggtgaccgccagttccatccatgttgttgtaaatgtcaagatccattcttttttatggctgaaacatttgtttcagtatttgtaatagtgtaataagaatgactcatatgtccatctttagaggaatcgatacatagaatccaatataatcatgatggaatactgtataggagataaaatgaataaatccgatatgtgtgtcaatgtcaatgtagataaatttaaacacacacacamacacacacacacacacacacatacatatgaaacagaaatgactggagggagaatacacatgaaattaattataatggttgccttggtttgaggcaggggtatgggagaggaccaggacttaggagtggaataaaaggaactgcaactttacatgtaatattttatttcctttatattaaaaaatctgaagcagatatgataaggtttttccttgtaaattccaaatatatcgatataagattatttgatacattatctgaacttttacatgtttataaaataatttttcattttgtaaacattttttaaatttcagtttaattttagaattaaacttcatgatattataaagtatacactgaaagaaagataattgtttgatccttttttccatttctagtaaacctctagataatgccagtaagcttgcacagcttgttgaaaaaaagcttgaagactactacaagattgatgaaaagagcctaataaaggtaatgtatgcaaggcaagtaatgact

SEQ ID NO: 67984 - DNA, 1303 bp, Homo sapiens
aaggtaagataaagtcagaccaggacatggatcccattcctggtttcagcctctgctgggctctgcatttaaagactaggcctccagaaccacctgaagccaggtgaccccagggtcctacctagaatccttagacaagctatgttttctgagctccacattttttccatgtttgttcaagaagaacataagctcctttggctatctcatttctcctgtacttttctattcatactattctattatttctctcccatgccccagcctccctccatgcctatccccctacatctctctccatctttgtaactctaagctccataacagacaaactattgtattcctagttgcctcctagatatgtgtcctctctggaatgttcttctgcattttccattttgtgttgctataaaggaatacctgagtctgggtaatttataaagaaatgaggtttatttggctcacatttctggagattgtacaagaagcatggcactaacatctgctgctggtgaggccacaggtagctaccactcaggtggaaggtgaagggggataagtcatgtcacatggcgagagaggaagcaagagagagaggggtagatgccaggttctttttatttttattttttattttttgagatggagtctagcagtgtcgcccaggctggagtgcagtggcattatctcagctcactgcgagctctgcttcccgggttcaagcgattctcctgcctcagcctcccgagtagctgggaatacaggtgcctgccaccacacctggttaattttgtatttttagtagagatggggtttctccatgttgatcaggctggtctcraactcctgacctcaggtgatctgctcacctcagcctcccaaagtgctgggattacaggcatgagccactgcacctggccgatgccagagtctttttaacaaacagatctcatggtaactaatagagtgagaactcattcatcaccacaaggacagtgccaagccattcatgagggatctatccccatgaccctaacaccacccaccaggcttcacctccagcattgagagtcacatttcaacctgggacttggaggggacaaatactcaaactgtatcatcttctttccgcagatcagggcattctgctacaatcatatgccatgaggaagctttctatgacccgtcaggccagattaagtcctcatattttgtatacatagccacagttgacactaaagtttatctcataccacttgtcacaacaataaatagctgcattggtcatttttttggcttaatg

SEQ ID NO: 67985 - DNA, 1303 bp, Homo sapiens
aaggtaagataaagtcagaccaggacatggatcccattcctggtttcagcctctgctgggctctgcatttaaagactaggcctccagaaccacctgaagccaggtgaccccagggtcctacctagaatccttagacaagctatgttttctgagctccacattttttccatgtttgttcaagaagaacataagctcctttggctatctcatttctcctgtacttttctattcatactattctattatttctctcccatgccccagcctccctccatgcctatccccctacatctctctccatctttgtaactctaagctccataacagacaaactattgtattcctagttgcctcctagatatgtgtcctctctggaatgttcttctgcattttccattttgtgttgctataaaggaatacctgagtctgggtaatttataaagaaatgaggtttatttggctcacatttctggagattgtacaagaagcatggcactaacatctgctgctggtgaggccacaggtagctaccactcaggtggaaggtgaagggggataagtcatgtcacatggcgagagaggaagcaagagagagaggggtagatgccaggttctttttatttttattttttattttttgagatggagtctagcagtgtcgcccaggctggagtgcagtggcattatctcagctcactgcgagctctgcttcccgggttcaagcgattctcctgcctcagcctcccgagtagctgggaatacaggtgcctgccaccacacctggttaattttgtatttttagtagagatggggtttctccatgttgatcaggctggtctcgaactcctgacctcaggtgatctgctcacctcagcctcccaaagtgctgggattacaggcatgagccactgcacctggccgatgccagagtctttttaacaaacagatctcatggtaactaatagagtgagaactcattcatcaccacaaggacagtgccaagccattcatgagggatctatccccatgaccctaacaccacccaccaggcttcacctccagcattgagagtcacatttcaacctgggacttggaggggacaaatactcaaactgtatcatcttctttccgcagatcagggcattctgctacaatcatatgccatgaggaagctttctatgacccgtcaggccagattaagtcctcatattttgtatacatagccacagttgacactaaagtttatctcataccacttgtcacaacaayaaatagctgcattggtcatttttttggcttaatg

SEQ ID NO: 67986 - DNA, 645 bp, Homo sapiens
atggaaattatgtagctcctactatgatgtcctgggaaaagtactgcatcactgctatggtgttcctgccaaaaatagaaaacctaaatctacctgtgacaggtcatgccccaaactgagggacatcatccccaattctgcctataaaatacaaaaaaacaaaaataagaaaacctgaggacattctacaaaataaccaacakgtgttctttaaaaaaaaaaaaaaaaaaaacagtcaaggtcataaaagacaaagaaaggccaagggactattccagattaaaagagactaaagagattgtcacaactggccaggtgcagtggctcaggcctataatcccagcactttgggaggctgaggtgggtgatcacctgaggtcaggagttcgaaaccagcctggccaatatggtgaaaccccacctctactaaaaatacaaaaattagctgggtgtggtggcggatgcctgtaatcccagctactcgggaggctgaggcagaagcatcgcttgaacctgggaggcagagggtgcagtgagccgagatctcaccactgaactccagcctgggggagaatagtgaaactctgtctcaaataaaataaaatgagagaaatcacaactaagggtcatgtatgatcctggatt

SEQ ID NO: 67987 - DNA, 703 bp, Homo sapiens
tgcatatacacctcaatctgatattaccactcttgagattctattccaaacaaatcaaagtaccagaatgtaaagaaatgtaagcaaggacattattgtaatattgttcatagcaggaaaagaaaactgggagaaaagataaccaaggtatagtattttagacatacacaccttgatgtgttatatagccattaaagagagtgaattattagtcccagagcagttgatttgagggcagagagtggtcagtggatagtgagagatcagtgatggggtggggggcaggggaaatagggagaggtgagggaggttaaaagggggagaatgcagtacaatatgagatttggcaaagatttcttaaacaggacacaaaaagtggtaagctttaaaaatacaaaaacttgattwcattaaaattaagaactttttaagcatgtgcttatcatatgacccagcaattgcattttggggccttttatcctggagaaatgaaaacttaatgttcaccctaaaacctgtacacagatgttcatagcagctcgtagctattatttataatagccccaaactgaatcagcccaaatgtccttcagtagatgaatggataaacaactgtgattatattccatggaaatttactcagttataaaaaggaatgaaagctaggtatggagttgagtagcctgtaattgcacctattctg

SEQ ID NO: 67988 - DNA, 602 bp, Homo sapiens
caatctataattcttccactcacccttttcataaatgaatactatcatttttccatttctgcattagtaataggtaaaagtattttcaatgctgctttaactggcaactcttaaattactggtgagattcatctagttttgctacttatagtctactgtgtttcttctgtgaattgtgattagtgactattttccagggtggtattattatgttcttattaatttgtaaaaatgtgttctatattaagagtattagcctyatgcttattaatctgttacaaatttttttggtgttactgccttttattttggtttacgtgtcttaatggtcagatcacctaacaactttcttctataatttcttctattactatattttagtaaacttttcattttggaataactttagatttacagaaaacttacaaaggtagtgtattagttcccatatacacttcacccagatggacctaaacttactattttatggtaccatggtagatttgtcaaaactacacactttgaattccacctgtttttccactaatatcctttttttctgttccaagatctaatttatgataatactttgcatttagtca

SEQ ID NO: 67989 - DNA, 852 bp, Homo sapiens
accatttccatcaacaaaacagatggctgccatgcttacctgagcaagaattccctggattgtgaaatagccagtgccaaatcttctgagatgaatgtcctcattcctacagaaggcggtgactttaatgaattcccagttcctgagcagttcaagaccctctggaatgggcagaagtttgtcgccacagtgacagaaattgctggataagcgaagtgccactgggttctttgccctcccttcacaccatgggataaatctgtatcaagacggttcttttctagatttcctctacctttctgctcttaaaactgcttctctgctctgaaaagcacagctacctgccttcactgaaatatacctcagatgtgcagtgggatagcaggtcagttgatcttctgcaggaaggtgcagcttttccaaatcagctcaactgccgacgaggactaatgatgcattttagctttgagctttgggggttattctaccaacaaacagtccactgggaagaaaacagtcccaggaattaacagatcagaacgttcacactggttaatctttttctgacaatgagcatgaaggtagcagaagctggtgtgtttccagatggttcttctaaccaaactaatttttcactattgacaagtgaggcaaggattgcactggaccaaaggctgaggcttggccatctagcattccacgcaaaattgtttcctataagcattccttttattcactattctatcctgggtctgcctcaaccatgagataggagagtctccggtactagctgctgtagcagtgcccttcatccagggcagttaaaggagtattcraccctttctttctctg

SEQ ID NO: 67990 - DNA, 629 bp, Homo sapiens
tttccagctagactccaggggtatcgggggacagagtggcagctgtgagttgaattgtgtctccctgaaagatctgttcaagtcctaatctcgatacctgtgaatgtgattttattcgggaatacagtctttgcaaatgtaatcaagttaagttgaggtcatattgggtttgatggtcattaaatcaaataaatgaagtcctttaagagaaaggagagggtgattcagacacagagatacagatatgcagagggaagaccgagaccatgtggagcgaggcagaaagtggrgtgatgcatttacaagacaaggattgcaggcaagcaccagaaacgaagagggaagcaaggaaaatcctccccgggagccttcagagagagcatggacccacaggattggacttctggcctccagaaacaacattctgttgtttgaagtccctccatgtctagtaatttgttatggctgccctcggaagctaacacactgcacccacagggattaggcatactaggtcctagggctttaccacccaggccggggctgagcagggctctgagggaagatgagacctccattgtaacacagggagccagccaggcctaggggtgtgcccagcagccagcaga

SEQ ID NO: 67991 - DNA, 629 bp, Homo sapiens
tttccagctagactccaggggtatcgggggacagagtggcagctgtgagttgaattgtgtctccctgaaagatctgttcaagtcctaatctcgatacctgtgaatgtgattttattcgggaatacagtctttgcaaatgtaatcaagttaagttgaggtcatattgggtttgatggtcattaaatcaaataaatgaagtcctttaagagaaaggagagggtgattcagacacagagatacagatatgcagagggaagaccgagaccatgtggagcgaggcagaaagtggggtgatgcatttacaagacaaggattgcaggcaagcaccagaaacgaagagggaagcaaggaaaatcctccccgggagccttcagagagagcatggacccacaggattggacttctggcctccagaaacaacattctgttgtttgaagtccctccatgtctagtaatttgttatggctgccctcggaagctaacacactgcacmcacagggattaggcatactaggtcctagggctttaccacccaggccggggctgagcagggctctgagggaagatgagacctccattgtaacacagggagccagccaggcctaggggtgtgcccagcagccagcaga

SEQ ID NO: 67992 - DNA, 707 bp, Homo sapiens
aaaagggtgccccggaaagagctgtgccgtctagcacacctcttrgtcatgtctttcacaatgtctggtgttgcctttcacaatgtcgctgttggatcataacagcgaatcaagctggaagggaagggttctgaggaagcctggcccctgagaagcacatggaaacttatacatttctgcttctttccttaactgccaattctgcctaccactctgagtggcccacccagccagctctcacttcaatctcattggcttgctcacatgccaatcaagtgctgagccagcaactcatgggaaacccaaacagtatctcacacaaactcaaatagaagcttgtatttcttatggtgctctcaggaggccttcaccaaaggtggagaacaaggacaaaagggcaagagtgctgaacttggcatccccattctgccccatctcagcctgtgaccttgggcaagttacaaccccctattttcccataattgaagcctatagcctctgtgcttccctcctccaaccagcactgagattaggatgttggaaggatgtagaaaggtattaggtattagagcaacaatatacagatacaccgagattggccttgaacctccaacagggaactacagctcagcaaggtgtttcgccaacagaaacagcctgtccctgtgctttgagcagagcagtgataagaccacagagtcgggcat

SEQ ID NO: 67993 - DNA, 649 bp, Homo sapiens
aaagacatgctgcagggcgccatgacaaatcccctcccagatgaactcagctcccttggagtccgcttctttattggagctgctcagttaggaccarcctccctccagggaacatctcagaagacagatgccatcaaaagatgtggccaagcaggacaacactgaaaggagaacatgaaagtttgctagtttacttattagtacaatatgtaattggatagaaggcacagcttttaaaaatttgtcttaccataatgactataattttttagagattgaaaatgaatctgactagaaaataccattaaactaccaagttgcttaaaatttaaagggtaattcacatataatgcttttatttaatagcccaatttacaaaacgtctaaaattaatgcagatcttttcaggacaaaatcagccgtaactgcaccaactaatttttgctcatttgaactgaattattaataagagagaaatataccatatgttccccaaagagctggatacatttatttcaaataaaagcactgtgtttggtggagtataagaggtttaaatgctttcagagaaatgggttacttatatacagatttaatagagtataaatcaagccgcgtaattaaggacacagctgcttccaaacccaag

SEQ ID NO: 67994 - DNA, 649 bp, Homo sapiens
aaagacatgctgcagggcgccatgacaaatcccctcccagatgaactcagctcccttggagtccgcttctttattggagctgctcagttaggaccaacctccctccagggaacatctcagaagacagatgccatcaaaagatgtggccaagcaggacaacactgaaaggagaacatgaaagtttgctagtttacttattagtacaatatgtaattggatagaaggcacagcttttaaaaatttgtcttaccataatgactataattttttagagattgaaaatgaatctgactagaaaatrccattaaactaccaagttgcttaaaatttaaagggtaattcacatataatgcttttatttaatagcccaatttacaaaacgtctaaaattaatgcagatcttttcaggacaaaatcagccgtaactgcaccaactaatttttgctcatttgaactgaattattaataagagagaaatataccatatgttccccaaagagctggatacatttatttcaaataaaagcactgtgtttggtggagtataagaggtttaaatgctttcagagaaatgggttacttatatacagatttaatagagtataaatcaagccgcgtaattaaggacacagctgcttccaaacccaag

SEQ ID NO: 67995 - DNA, 641 bp, Homo sapiens
cagtgcggggagtgtcacgtgagagcagggctaggaagcagtttaggaagtgggaggggtcggtctgaaaagcttattttaggggacatttctaaaaaaaatcctgaattttgttcccattgacccagagaaacatggacttcatgctcctcaaatttccaaacttcaagatccagcagaaactgatgctaaggggtgggttggggtggggatcgccttcccctgaggtcccctacccctgatttaggcttttctgctagggacagacctgtcagggtggtgggggctggggtgaaggaagctggacgggagcacagaagccttcaacccttctcatctctgattcttcctcaagggattcagaactttttttaaaatcacagcgtctgctgcaaatcacaggcaggggagtagcacccccagggccgggtaaagcagcagctattttctagcagatgcattgatttatatttctttatggaaytgtatcttcctattctgttatttttcactttgagtaaaaattaattgtcttgtttaaccaaaaacacgacggagagaagggagaaagggaaaagggaaagtggcagggtttgtgaaaggagcaggcttcggagtctcacagaaccaggacgggatcc

SEQ ID NO: 67996 - DNA, 697 bp, Homo sapiens
tctggaggtcaggaagtacaagatcaacacacccacaggttctggtctgctaagagctccagtctacttccaagatggcgccttggtgctgtatcctctggaggagacraatgctgtgtccttacagggcagaagagatgaaaggtcaaaaaggagtgaatgaagtatgaagcctcctttataagggcattaatttatttacaaggatggtctaatcctcttaatcatggcctaatcacctcttaataacactgcattgagatttacatttcaacatgaatttggaggggacacaaacatttaaaccacagcagtgattttcaaagaacaaagaagcctgccccgcaaccccccgctgcgcagagcagacattctctcacatttcagtggtctggactgggtctctggcccttcactaaaccggcactggcagggggtctaggggattattgatctgttttgaccaatcaggatttacctttgagtttctttttttgtcaggaggagtggacaaaactaggactctgtctgaagaaagaaaggcaatggccatttgtaagcactcaacagtgtctgggatacctgtcactttaaaatacagattcccaaggcatgcccccagggcttggtttaagaaccctgcatttgacacaagcacttcgggtacctcggaaaggagtgtcctgcaaccacactg

SEQ ID NO: 67997 - DNA, 776 bp, Homo sapiens
catagacgaggaagctgaggcatgatgtgatgaggtgactgggacataaacccaggccatctgcctgcctccagagggcaggatcttaagtccaacactgctggcttcacattctattctaactgagccaacaaatgcaggcgcctctgagatccggctgccttgcggaccctgtgctggaagagctgggtgtctggttgtcggggatggaaatgaagatattagggagcgtgagccaggcaaaatgatcccccatgtgttcctctccgggtcacgtgcactggttcactaatctgctgggcttttacaaagcacctcctgtgtacaaagtactgtgctgtagattggacatggaataaccagaagagcaagggtttcagaatcccactcctgctctgctacctactagtgtcatgaccttgggcttgttgcttaacctctctaagcctcagttttcttaactctaaaacaagagttgcaggggttgggatgaggaaataaaagaaggaaggaaagaaggcagggagagaggctcggtgtgaaagcttgcaggctatagaggccgcacagctgtgggttgagtaaattctgcaaaggcaaagcactcatgagtcaggagcttgcagcctgggctcgggaaattgtctcccaacccatctggcttttcagctctttgggaaaacaaagmtgacaaaagtttgcactttgtaaatgtgaattatttgggccttaggctcttagatgtacagaagtaggtgaaacctttctttcagcgg

SEQ ID NO: 67998 - DNA, 776 bp, Homo sapiens
catagacgaggaagctgaggcatgatgtgatgaggtgactgggacataaacccaggccatctgcctgcctccagagggcaggatcttaagtccaacactgctggcttcacattctattctaactgagccaacaaatgcaggcgcctctgagatccggctgccttgcggaccctgtgctggaagagctgggtgtctggttgtcggggatggaaatgaagatattagggagcgtgagccaggcaaaatgatcccccatgtgttcctctccgggtcacgtgcactggttcactaatctgctgggcttttacaaagcacctcctgtgtacaaagtactgtgctgtagattggacatggaataaccagaagagcaagggtttcagaatcccactcctgctctgctacctactagtgtcatgaccttgggcttgttgcttaacctctctaagcctcagttttcttaactctaaaacaagagttgcaggggttgggatgaggaaataaaagaaggaaggaaagaaggcagggagagaggctcggtgtgaaagcttgcaggctatagaggccgcacagctgtgggttgagtaaattctgcaaaggcaaagcactcatgagtcaggagcttgcagcctgggctcgggaaattgtctcccaacccatctggcttttcagctctttgggaaaacaaagcwgacaaaagtttgcactttgtaaatgtgaattatttgggccttaggctcttagatgtacagaagtaggtgaaacctttctttcagcgg

SEQ ID NO: 67999 - DNA, 776 bp, Homo sapiens
catagacgaggaagctgaggcatgatgtgatgaggtgactgggacataaacccaggccatctgcctgcctccagagggcaggatcttaagtccaacactgctggcttcacattctattctaactgagccaacaaatgcaggcgcctctgagatccggctgccttgcggaccctgtgctggaagagctgggtgtctggttgtcggggatggaaatgaagatattagggagcgtgagccaggcaaaatgatcccccatgtgttcctctccgggtcacgtgcactggttcactaatctgctgggcttttacaaagcacctcctgtgtacaaagtactgtgctgtagattggacatggaataaccagaagagcaagggtttcagaatcccactcctgctctgctacctactagtgtcatgaccttgggcttgttgcttaacctctctaagcctcagttttcttaactctaaaacaagagttgcaggggttgggatgaggaaataaaagaaggaaggaaagaaggcagggagagaggctcggtgtgaaagcttgcaggctatagaggccgcacagctgtgggttgagtaaattctgcaaaggcaaagcactcatgagtcaggagcttgcagcctgggctcgggaaattgtctcccaacccatctggcttttcagctctttgggaaaacaaagctracaaaagtttgcactttgtaaatgtgaattatttgggccttaggctcttagatgtacagaagtaggtgaaacctttctttcagcgg

SEQ ID NO: 68000 - DNA, 1153 bp, Homo sapiens
tctccttgagcctggggcagtcagccttcttcctcaggaggatctgagacgcacatcacagtatccaccacagtatcttatccattttattttctccctcaaaccctgggttgaaaacttcagggagacatcaatgaagagttcataaaaatcacctcataagtactctattctgaagttcctcttacataaaagagcataatatcttaggattttgcagccctatgagatgcttgtggcctcccatggctttccatttttaatcctattcttctgtctctcacctttggtgtgtgggcatagtatgtcaaacaaatgattgagggtctgggtatggtggctcatgtctataatcccagctttttgggaggctgaggtgggaagatcgcttgaggccaggaattcaagaccagcctgggcaacatggcaaaactcccatctctataaaaaatacaaaaattatttgggcatagtggtgcacgtctgtagtcttagctactctggaggctcaggtgggaagattgcttgagcccacgagtttgaggctgctgtgagcggtgattacaccactgcactccagtctgggtgacagagtgagaacttgtgtcaaaaaaaaaaaaaaaaagagggacatgatggggtgagatgatttcaaggtgttgcatgttctggaaagttcctgtgttaggtgtgaaattgaagtcaatctccaaaggcccattaccctcataagacttggatttaagatttcaggaatgccttttacattgaaatgacctagttgccatctctacctgggaggattcagtgtgggtatgtaagggcttgggagactggttggggraagtaaattaaatagattttcaagatttcttaatctcagaatttatcttgaggctaaaatcttgaacatagttaaaaaaaatcaatgatgttgtctgaattttccccttcatagttacctcaatcagtttgacatctactgagtctgacccactggaacatatagcatgctttcattgggtagatcatcagatctttgcatctaacctgccatggcacacatgctgggaagagcattcatttacaaaaagttcgtgacagagaatagtctgtcatagactttgtttggacaatgaaaggatagtatcta

SEQ ID NO: 68001 - DNA, 804 bp, Homo sapiens
agaggcagagctaggagggcaggggctcctcagctggagctctacgggcctttgttaggattccagccctaccccatcttctttagagcctgccttagacccgtgaccccagtgaagaagctgcatggcatgataaccagagagcgtgggcttcggacgcagacaaccattcactgaacaaatgtgtactgatggcccactgtgtgccaggcgctgtccatggtgcttcagacacatcagtgaacaaggcagacacagatccctgccttacccagcagcttatttaacctcactgaaccttggtgttctgtctgtaacatggaaataaggaaaatatccatctcttagggcattgtgagaattaaaggttataatgcatgtaaaaggtcagcacaacgcaataaagggtcgctgtggtcatcatcgttatcatgattgtygtcttagttttaccctgagtacaaaagcagggaattgggtctgctttatttatctctgtatcctcagtgtctagaatgacacctgatgctcagatagaacaaaggcttccttacccacctttgaataaggccttcccctgattatatattacttggtgtaacacccccaggcctgtgacgggagaaggtacccggtacaagtatgataaattaatgaataatgaagcctcattccttaagccaagagtatggttcactttcccccagaagctgccctagttttgtcaggtctagttactctgagcccacttagcacttaggtaaagaacagctttcactacatttatttaaatatatttctttt

SEQ ID NO: 68002 - DNA, 804 bp, Homo sapiens
agaggcagagctaggagggcaggggctcctcagctggagctctacgggcctttgttaggattccagccctaccccatcttctttagagcctgccttagacccgtgaccccagtgaagaagctgcatggcatgataaccagagagcgtgggcttcggacgcagacaaccattcactgaacaaatgtgtactgatggcccactgtgtgccaggcgctgtccatggtgcttcagacacatcagtgaacaaggcagacacagatccctgccttacccagcagcttatttaacctcactgaaccttggtgttctgtctgtaacatggaaataaggaaaatatccatctcttagggcattgtgagaattaaaggttataatgcatgtaaaaggtcagcacaacgcaataaagggtcgctgtggtcatcatcgttatcatgattgttgtcttagttttaccctgagtacaaaagcagggaattgggtctgctttatttatctctgtatccycagtgtctagaatgacacctgatgctcagatagaacaaaggcttccttacccacctttgaataaggccttcccctgattatatattacttggtgtaacacccccaggcctgtgacgggagaaggtacccggtacaagtatgataaattaatgaataatgaagcctcattccttaagccaagagtatggttcactttcccccagaagctgccctagttttgtcaggtctagttactctgagcccacttagcacttaggtaaagaacagctttcactacatttatttaaatatatttctttt

SEQ ID NO: 68003 - DNA, 698 bp, Homo sapiens
ctgtgtcttttttcccatgagggcctcggggctcaaaagaagccaccaaacagggcctgctggacaggggagtcctgcctcagccctcctgccacacgtaccacgttgaggctggctgctgcaccactctcttcttgcctcttgtagagggggctgttatgtcccgtgaccttctcccaagagccatggaagtcgtaggccataaggttgacaaaatccaggttcctgcaggaggcatggaagaggaggtgagaaacaagggattgggggtggggtagcccttctttctcactcctaccccctcagtgcatggcctagggaggaaccactggggtcagaggcaaaggtggcaggctcacctggctctgcagaaggtgacccagacagcagtcccagccagcccccttatgaaggccattctcattctcactcaaacttgtcaccctcaccccactgtcccctcagcacccccaggccctccctattccactcaagaaaactcctgctacattgctattctggagggaactctagcttagggtttctcccacttcagtgtgcacacagatcacctgggaatctcactaaaatgaaggttcttcagaaggcctggggtggggcctgagagtccataattctaatgagcacctggttttaatgagggctgcgagtccacatgctgtactttgagragcaag

SEQ ID NO: 68004 - DNA, 651 bp, Homo sapiens
gcccattccgcagggggctccctttgctctgcttccagaaaattagggacagtgtgggagtcaaaggatggctgttgcagtttggggtgttgggcaagtctcatgggaaatgactgcttaaaacaggggcatgttttgagtcccaggcccttgctttctacggggtgtttgtgggggcaggggcttctgtctatcatctgtgaggaccacacactgcctccattccaattggcagtgggtggggccctcacccagcaagaaccagaaggaggagsagagacagcttctgttgaggtctgggcactcatttggggggttatatctccctgggagccaggaacagttgatcccgcagagcttggtccctcgtggcctctctgtaccctcaaagttgcccatgcccccagcttttccacctgcttcctgggctcccggcacctcctgctggacctgtgggcaggagcaggttgggatcagactcagaggccttggctcacttaggtgttgtgctgaggggctggggtccttgtttgccaacccccacactcccgctccaccaaaccagtttatgaaactgcagaaccacagtaaactccttcccctggcaagccaaggtggttgggcggggttggggtgacaatatgtttccag

SEQ ID NO: 68005 - DNA, 688 bp, Homo sapiens
tgttagggctgctgtagagactgccgtgcatatggttcagagctttggacaagacagcctttagatcctttcccattctaagcttctaacattcacaattccggtgcctgtctgcttcatgcactatctcccagttgcataacgaccaaagccaagttcccttccttccctccctccttcctttccttcctcaactatactttggtttctacctgccaagctgtgtcaggttctgggaaggtggggagggagagatcacgatgattgctgcagagataagtgctccacacccttgggatgcaaatgatgttacttaaatcgcctcagactagaatgtggtagaacccccgtgccccgccatgggctggatatacaatctacacttggggggctmccccgcctcctaccccacctccctaagtggttcatgaaccctagggtttgcccgatcccaaaggagggcttccactctcaaggaacccagagccacgccgcctctccccactgctgtccttgcctttgccgcgcagggtgccgccatcaggtcctgttgtgcttctgctcagggaaagtctcccaggctcctgcccaggggtggcagctccctgagctgccagccttctatgcaggtgcccccagggagggcccctatccctcggcaaccaagactgctcctcaggggccctct

SEQ ID NO: 68006 - DNA, 688 bp, Homo sapiens
tgttagggctgctgtagagactgccgtgcatatggttcagagctttggacaagacagcctttagatcctttcccattctaagcttctaacattcacaattccggtgcctgtctgcttcatgcactatctcccagttgcataacgaccaaagccaagttcccttccttccctccctccttcctttccttcctcaactatactttggtttctacctgccaagctgtgtcaggttctgggaaggtggggagggagagatcacgatgattgctgcagagataagtgctccacacccttgggatgcaaatgatgttacttaaatcgcctcagactagaatgtggtagaacccccgtgccccgccatgggctggatatacaatctacacttggggggctaycccgcctcctaccccacctccctaagtggttcatgaaccctagggtttgcccgatcccaaaggagggcttccactctcaaggaacccagagccacgccgcctctccccactgctgtccttgcctttgccgcgcagggtgccgccatcaggtcctgttgtgcttctgctcagggaaagtctcccaggctcctgcccaggggtggcagctccctgagctgccagccttctatgcaggtgcccccagggagggcccctatccctcggcaaccaagactgctcctcaggggccctct

SEQ ID NO: 68007 - DNA, 1652 bp, Homo sapiens
acatgggaagcactcacattggagggggtgcttagagtaagcttgaagattcattaggagctggccaggcagaggcaagattgggcgggggggatgacccggatgggcacccgggcagagaaggtggctgagcaaaggccagccagtctgcgaggttgtggcgtgctcctctaagtgaagacctgagagcactgaagaggttggagaggctcatggcgacaggctctgcatggttctgtgtaggttcccctggggagcccagttcccagctctgctccatgaaggaagtagacttggacttggcccaacttgctttccgccttccctgcaacacttctgtccaccagaagggggcagggccacctcaggaaacgagacccattctgtggggggctcagtcaaggttcagtcctgagttaggtgagacctttcaatcctcagtggacaggtactgagcttcaggccccgtgctgggacctgggtgcactaagacgagccccaccccttgcagcctgtgtccgcagtgtcccaggccgaagggattgtgggggtttcaaggaggcagtgggcagctctgcctagggggaggccggaggaaaatgaggaccagctccctagaggaggcaactcttaagctgaagcaagagaagaagttgccttctcggctgacagggttgtgaggtgtgccactctgagggggcacagcaagcggcatggaggtgtgaccgcgggcatgtctggttgctggctatgtcctggatcctagagcacagggtgcaaggggctggggtgactggccatggctcgtggggggccctggagccacatgcatgaactccattctggtgcagcagggagaacagacagaatttcctttttaaaaaacaaaaaaaaaatttcttatgaaaactatcaaataggcaccaagtacagagaagagttcatggacccccatgtacccagcacctggcaccaacagagatctaccagcttctcatccattctccctccacatttgtacaaaccttttatagatagaaattgttaaacataccaaagaagggagactggcataacgatccccacagacgcaccagccagctccaccaggaagtttccaggctggtctcggccgcccactccttcccaccctcagattattctgaagcaaatcacatagcattttatatttaaatatttcagtgtatatctctaaaaatgagagactctttaaaaacacaggcttgcactactatgataacacctgaacaatgtgcacaccattgttttttcttgttttttttttttgagatggagtctctctctgtcacccaggctggagtgcagtggcacaatatcggctcactgcaagctccacctcccaggttcacgcctcacgagtagctgggactacaggcacctgctactacccccggctaattttttgtatttttagtacagacggggtttcaccacgttagccaggatggtcttgatctcctgacctcgtgatcctccygcctcggcctcccaaagtgctgggattacaggcgtgagccaccgcgcccagcctatgcatgtcattctttcacttcatgccataccaggactgacagatttcaagcccaggaatggccaggttcagattggca

SEQ ID NO: 68008 - DNA, 831 bp, Homo sapiens
tcctttgattggaatatttgcctcctaacagctcrgaggtgttaggggaagcagtggatggttggatggagatgatgagtcattttagagcctgggacatggcagacatacatggcaggcagacactggggctttggctttgatagagggaaggctcaggacctctcagacagaacacagctgtgagaagtgatgtggtagtgggcataatcaaattcctgctttgtaggtaaaaaaaaataaatgttggtgtgggttacaggcattctgaaaaatcatctcaagtgtcagaagctaccatttatacctgtaatagttttactaaagaataccaaacatttttgatattagaatactatcttgccaggctttttcctccttaaaaaatgaatgttaattggttacttaacatttacatatctctctttttaggtggttctttggagcaatcggaagatcagatgcagagaaacaactattatattcagaaaacaagaccggttcctttctaatcagagaaagtgaaagccaaaaaggagaattctctctttcaggtaagggtattgttttgtgtcattcaatatgagcttgagagtctgcagtcatgagctttctgtgtgaacatggacacgatcatttaaaatttgccttatttcttatctttacagtagcaccaaaattaatactaaactacttaagagtaatataaaaattagccaaaaagatactgtctatggctagaagtctctataaacagtttcaaatatatatgctctagatatgaaatggagaacatggatctgctgacagtttctaacttttgcattatct

SEQ ID NO: 68009 - DNA, 715 bp, Homo sapiens
atttccattggaaaaacaacagtattatttaaatccatgtatagaaaaaaattactgtgaaaataaacaataaaggcttagagacatcactctggaaaatatatttttacaataatctgcatcaacaacatatatagtttatcttttcaaactcaatatctacattcacataatttcataatttctcactaaggatgatgagtgagagcatgtgattagaccaagggctgatgtaagtttttttttccttaaaaaaggcagcatcagttgtaatggtgaattcatgtcttctcctttagggagaacaaaatgacctgcagctactttctcagctctcatgattttcttcctcttgtttgcttctttctcctctcattctgtccgctttcccccctgcaaactttttgtctgtccatgggttctttaagtgggggactaaactaagggaacaaccttccatagcagttctttctctctctttttagtctttttattatgcaatatttcaaatacacacratagtagcatagtaaaatataccctcatgtacccattaaccaacttcaaaagttattaaattttgccaatcttatttcatctatcccctccccccatatcttcatagtctggtggcatatttaaaacaaatccatgaaatattttactcataaatgctttacgattgacatttgaacaatatggatttgaactgcat

SEQ ID NO: 68010 - DNA, 2798 bp, Homo sapiens
cgcccccactcctcctcacctacctcgtactgctctgactaatgagccaaggccaaggagggagggaacaacctgcagagaaatgttttctcccttcttccaataaactttcaaaaaggtttctgagatccacggttggattctcccatgcatacagccccaggtgctgagggacagaggcgcacagtaacagctcatttagcagggaacaaatggtctcctttcaggccaaccaataaaacattatgcactcagtcaggctctgggacccaagacgagtgtcgatcggaaagacgcatgggggacacagcacccgcttacttaagatactctgtgactgcttcagggcaaaaaacaaaaacaaaaactgaaaggcagtgtttccttcaaacaacccagaaggccaaatgcaaaagtgctcattggaataacatagtgaaatcaaggtgattatttacagaaataagagattatatgtgtgcataaatagtcctttgttattcataattcactttcacatgcatcatctctttgaagcttcacaacaacttcagcagcaggaaaagcaagaggcagtgtcccagttctatagagaacggccctgggaggctgaagctcaaaccgaacaccacacaggccaaatgtcaatgctatagttcaaaccaagctcctaatgccaaatccgctagacttttcacattaacacagcaaatccaaactttacgttgcttttacagttttttgagtcataatatattggggctgaaagattcttgataacagctggaaactgaaacccagagaagttaaacaacattctcaagatcatacatcaaattgggactaggtccttggtccttatactccctcttcccactatacttcaatatagaccccaataacaagaaatatttccacaaaataaaaaatgcttatgctgttcccgtagatgccagctactcccatgtttcctttaacacaagcctttacttctaataaagcagtaatgttaatgcaggaggagaaacaggcacagaaggagggaatcagtagagttccttgcacacagtaggggttcaataaatgtctgctgaattgaatgtagtgaaataagtatggatccacagggaaaagagaggaaaaagaaggtattttgcacgtacgtagatgaaaatgcatgtactctatgtaagacactatgctgggaggttggcacgaagaagacatttgccatattccaagctgatttttgacatcaacttgaagctcctactgtgttaacattgcacaggcacagagagaacacagcaggatgtgtgcttccaggcaatcccttggaaagtgtttgaccttcactaaagttttgacactgttttcagtatcaccttgggggtcatttttttcttttttctttttttttaagtgaaaaaaaattctaaaggaaagaaaaaagtatgtaaaggaggcagaattgttcataaaatcctggtgacagcacaactactgaaacccggtgtcaagaggcattctctcacactgtcactgaaatgctccgtaacagattttgcctgatagtgacttctatcaatttctgtctattttcattcctcttctgcagccactggtggcttcagcatattttggtgtggttctatagcaaatagaaatgtcatagatgaccactttacatgttagcccagaaagtagactggtgatcattaccatatattgagcacatgagataatcatgataatcttatcataatcaaaataatagccaactcattgtttactatgtgttctttggtaagcacttcacatgcattatttcattatatttagccttcttagaactattatgtttaacttgtctgaagctatacaaccatgcggtggcaaagtcaagttctaacttcaaagcccatgtcctttggcagtaccccgtaattcattattgtattcatttgcacaaacagtaagtacctggaattgtgctagctatcgggatacaaagatataaaccatgctctcaggaagctcacagtaagtaatacaagcagtaggatagaccaagggtctctatgtgctaagttaaaaacagaagtggttgctgggtgctctgactacatccagggaagtcacctcacccagtccaggaagtaacaaagaatgcttcccagaggaaatgatgcttccatcatgaacggtaaatgtgtcaaatgacgcaaggcacaaagggcattttgctcatgattgggggagaagggacagcaggtacagagaatagagacatgggagagcagggcatattcaagtgacttccaggtagttcagaatagatggagtccagaggagaggaccagatagtaaacagaaagaatactacaaaggaatgagatggaaaaaaattggttacgagccaaggagggacttttatgccatgttaagaagtgtgggatatcctgtttgccattgtgccccctgaggattwgtaaacaaatgtgtgatgtttaatgggagcataacagcctacttccactcgaatgcccagagaagaaaagcagggcagtggtacttccagcctctctcttcaaagaaaaaggatccatttatattttaggtgaaatcaggaagagagcaaatttgtatggctatagcagacatgctatagggtctcacagcatcactgaagccccattaatgagcaaactaatactccggcaggggaaccagaattgactagacgaactctggggacactaaacagatacacttacatgaggcttagaagggcatgt

SEQ ID NO: 68011 - DNA, 2798 bp, Homo sapiens
cgcccccactcctcctcacctacctcgtactgctctgactaatgagccaaggccaaggagggagggaacaacctgcagagaaatgttttctcccttcttccaataaactttcaaaaaggtttctgagatccacggttggattctcccatgcatacagccccaggtgctgagggacagaggcgcacagtaacagctcatttagcagggaacaaatggtctcctttcaggccaaccaataaaacattatgcactcagtcaggctctgggacccaagacgagtgtcgatcggaaagacgcatgggggacacagcacccgcttacttaagatactctgtgactgcttcagggcaaaaaacaaaaacaaaaactgaaaggcagtgtttccttcaaacaacccagaaggccaaatgcaaaagtgctcattggaataacatagtgaaatcaaggtgattatttacagaaataagagattatatgtgtgcataaatagtcctttgttattcataattcactttcacatgcatcatctctttgaagcttcacaacaacttcagcagcaggaaaagcaagaggcagtgtcccagttctatagagaacggccctgggaggctgaagctcaaaccgaacaccacacaggccaaatgtcaatgctatagttcaaaccaagctcctaatgccaaatccgctagacttttcacattaacacagcaaatccaaactttacgttgcttttacagttttttgagtcataatatattggggctgaaagattcttgataacagctggaaactgaaacccagagaagttaaacaacattctcaagatcatacatcaaattgggactaggtccttggtccttatactccctcttcccactatacttcaatatagaccccaataacaagaaatatttccacaaaataaaaaatgcttatgctgttcccgtagatgccagctactcccatgtttcctttaacacaagcctttacttctaataaagcagtaatgttaatgcaggaggagaaacaggcacagaaggagggaatcagtagagttccttgcacacagtaggggttcaataaatgtctgctgaattgaatgtagtgaaataagtatggatccacagggaaaagagaggaaaaagaaggtattttgcacgtacgtagatgaaaatgcatgtactctatgtaagacactatgctgggaggttggcacgaagaagacatttgccatattccaagctgatttttgacatcaacttgaagctcctactgtgttaacattgcacaggcacagagagaacacagcaggatgtgtgcttccaggcaatcccttggaaagtgtttgaccttcactaaagttttgacactgttttcagtatcaccttgggggtcatttttttcttttttctttttttttaagtgaaaaaaaattctaaaggaaagaaaaaagtatgtaaaggaggcagaattgttcataaaatcctggtgacagcacaactactgaaacccggtgtcaagaggcattctctcacactgtcactgaaatgctccgtaacagattttgcctgatagtgacttctatcaatttctgtctattttcattcctcttctgcagccactggtggcttcagcatattttggtgtggttctatagcaaatagaaatgtcatagatgaccactttacatgttagcccagaaagtagactggtgatcattaccatatattgagcacatgagataatcatgataatcttatcataatcaaaataatagccaactcattgtttactatgtgttctttggtaagcacttcacatgcattatttcattatatttagccttcttagaactattatgtttaacttgtctgaagctatacaaccatgcggtggcaaagtcaagttctaacttcaaagcccatgtcctttggcagtaccccgtaattcattattgtattcatttgcacaaacagtaagtacctggaattgtgctagctatcgggatacaaagatataaaccatgctctcaggaagctcacagtaagtaatacaagcagtaggatagaccaagggtctctatgtgctaagttaaaaacagaagtggttgctgggtgctctgactacatccagggaagtcacctcacccagtccaggaagtaacaaagaatgcttcccagaggaaatgatgcttccatcatgaacggtaaatgtgtcaaatgacgcaaggcacaaagggcattttgctcatgattgggggagaagggacagcaggtacagagaatagagacatgggagagcagggcatattcaagtgacttccaggtagttcagaatagatggagtccagaggagaggaccagatagtaaacagaaagaatactacaaaggaatgagatggaaaaaaattggttacgagccaaggagggacttttatgccatgttaagaagtgtgggatatcctgtttgccattgtgccccctgaggattagtaaacaaatgtgtgatgtttaatgggagcataacagcctacttccactcgaatgcccagagaagaaaagcagggcagtggtacttccagcctctctcttcaaagaaaaaggatccatttatattttaggtgaaatcaggaagagagcaaatttgtatggctatagcagacatgctatagggtctcacagcatcactgaagcccyattaatgagcaaactaatactccggcaggggaaccagaattgactagacgaactctggggacactaaacagatacacttacatgaggcttagaagggcatgt

SEQ ID NO: 68012 - DNA, 1237 bp, Homo sapiens
ttaaaatatatatttattatacatataattatgtatgtatgtattgtatataaccacctacactgtgcagagtactggtgagatggtacagggataaaatactctatccttgccttctgggtgagctggtctccagtccagtagggggacagagagaaaggctgacgtaagaaagaaacagagatttgggcagcctatgaagaggatattcatgcactcaagagaacaaaaccatgaccaagtgacaccacctgtttaggagtccaactcctggaactgggatgagggtcagagcaggagccagagccgcctggagtaggacaccttgtgctctaaagtgggcattctagaacccctagggtcagggttgagccaagccagggctgagggtgaggttaagaatttccagctttggggagcagaaagtttctgggacattacatcaggccaggtgaggcatgttttgcttcctgaaggtaaaagttgtgggtgtttggtgtctgcatgtgtatgtgcaggagagtgaggaggccagtggatacttgtacatgagaatgtttgtgttttagaccatgtctctgtgggtacctgcatctgctggtctctctgtccttgaatctgagattgaaacctgggctggtaccagtgtattgtctggttaggggagaaggtgctgagaaatgaggaagaagagagaaaaagctaacagagtcaaatatttaaattaaatgctcaatgaccacaacctctgcatgttttccagagggaggcttctgtgcatggcattttactcacagagagaaaagtccatttccccaacttcctgagacacacatccacacttcccaaaagcagattctatcaacacgcagtgcatcagagactccttttagattgtgggtggtttttaaaaaggtatttaagacagggttatacacactctccmtgtggttttctaaggagtaatcccccataattctggccattctctctctctctctctctctctctctctctctctctgtgtgtgtgtgtgtgtgtttcaatttaaaatacagatacattttttcttaaaagcataagaacatagtgatatgagcgctagaagaaagagaaaagggctctgcacccacagcccagcttcccaaggctcctcctctgtctacgggtttccatctatgttcctcctctcctcccctcctcacacagaactctcccactggaagctgttgatgca

SEQ ID NO: 68013 - DNA, 754 bp, Homo sapiens
ggatcccttgagcccaagagttcaagaccagcctgggcaacataatgagaccctgtctctaccaaaaactttttwaaaaattagctgggtgtggtggtgtgtgtgcatgtagtcctagatacttcggaggctgaggcaggaggattacccgaatccaggaacttgagtctgcagtgagccatgatcctaccactgcactccagcctgggcaacagagcgagactcagtttctatgaaagagagagagaaagaggaagaaaggaaagaaagaaagaaaagaaagaaagagaaagaaaagaaggaagaaagaaaaggaaggaaggaaggaaggaaaacaaaaaacaaaaaaccaaaacaacaacactatattttaaaatgtgttggaaaattctttgcaaagatatgttctttgccagaacataagctccttgagggatttaacgtgagccatttctgtattcccagtgccaggcccatcataaatgctaaatgaagttttgttgaataaatgaatgaataaataagaggatgactgaatggagaggaaaagtgctggttacgtgaactaagcaaatggcagagaggctcagaattgcctttttggagtgagttgcttatacatgtttctctttcctgctgcatggatagtttcttgaagtggggggactttttcttactttcctcattattcctaagtgccttgcacagccttagtcagcatttgatgaaacacttaggaatttgaagtgaattt

SEQ ID NO: 68014 - DNA, 1560 bp, Homo sapiens
tagaaaactgaattggaggcagattttttggctaccttcgcacatgaatttcttcagagtagtggcagaaatcaatggcttccttaaataaagcactccagggacagaagaaatcatagcctggctcagttcctggaatttgtgtttttgcttgtatgatcattacttagcaagtactttcaaagtcaaatccctttttctacatttataatcaaaaagaataagaacctaaactcagatataaaattctgatgcttaaagtaattctcatcctggtgttatcaaatcttcattttctagtctcatctatggcagctgagcttatgccaaattaacaagagcagcagtaaaccactcaatttctgagcttattaaaattattccatattttagtgtatgtgaatgcatctctgcatgagttttatgagttctttataagccgttaggtctttttttttttttcttttcctctggtttgttttgtcttccttatattaactcatttattcacacttaattcattcatttattcattaggcaaaacttcataagtacttaatgtttatcactcaccatagctaagtgctaagaaattggaggtttaactttatttctgcatttttattttgaacttttttgagacattaatggtacatcttagtaaaattttctaagttccatccaggcacttgggtaaattttccaaatattactcagcataatatggctgtccttaggtaaaagataatgatacataacaaaaaattatcaatgttgataacctaataataatcttattagctaacatttattaagtgatactaaatggtttcacctattttagcttttctgatcctcagtaaacccaggaaaactgagaagttgtgggacttgacccaaattgcacagcaagtgatggtggtagtagaactctggttgtccaactcaagaactcattcttttcaagacaacattgtacggtactgcaataataatgacataatgttgactgaaccattacttcatggtcctggacacagtggtatgataattagagcttttatacattacartgaaaagctatacacatatatttgtaattttaaaatgctcaagagtaaaaacaattacaaacatttattgagcactttctgtatgcaaggcatatgtagtaccttatactatatgaaaaattaccctctgcagcaggtattattattacctgcatttaacaaatgagagatttaaggttctgagttctttggtaacaggtacaggggtttacaatgggtagcagtgctagaatttgcttttaatttgcttgtttccagaaacttgttttaattggtatgctttacttcctctcttaaaaagtgaaaaccatttataccttatcaaaatagaccatttagatacatattgttggtggtgaattagattgcattgaataatgacaagtttctgacaattataaagcagtgacattcaggaagaattttttttatttagttgcatactagttattatttcaggaataatattttaaaaatctagtttttc

SEQ ID NO: 68015 - DNA, 697 bp, Homo sapiens
cattccctgccactgaacagagctgactgaagcaattgccggtagctttggggtacctgttgcccctctctctgtaggaattgtgtgcctcaagagtatctccagctggatagaagggccaatatttctcagaggccgagaatattcttccacgctgtatcccctgcaaacaactagaattcacggtgatgccaaccgactgtccctctcttcacccacctcctgccaccattgctgagagagaattggccagtgtcacagtatctgacccaccatgcattctgtggagggtggcaaagaatcctacggaaagttccaagggctgactcctatctgacagatgtatgacgttgatcgcaacttatcctttcagggaagacgaatatcaatatttcaccaggyctggacaatcctggaaccctgcacgcttgacactgaaggcagaattctggaagttgaacatagtgctacagatttcactggggctggaaggtcgtgctgcagaggtgggcgggtcaatgagagtcttaggcacctcttaaccttctgcacttaggactcaaaagacatggagtccacccagaggccagagttttttttcttgagcatcacgtatgcttggcagagcccctgtggaatctctctaagttctcattcctcctcatttggcaacaggcattcctagatctggggtggg

SEQ ID NO: 68016 - DNA, 749 bp, Homo sapiens
gaaaattaaactttgtcgccttccccgttcctgttttaaagacctgaattgttttgatatgggggacttttcttctcaggcttgcttttccagttggcacgctgggatttggtaagtctgaagaacatgttgggttggagggtggggcatgaggataaatgatgtccccttgcaagggcactccagaaaaagtcacagccttatcagacaagcgaagagcattgtccgacatggggagaagttgcataagcttgtaagggaagctcagtgacaggggggcctgagttagtctgaatcttctggacatcccttatatatccccagcccaactctcgaggtcctgcttttttctaatccatgttctaatttgataggactgtgatttgtctaacattaagagccattagggtcagatttcaagattggttttcatttacgtcagccctgatgctacaagagataaggtctagtttcagccatgattgaaagtccatgggtttaattcattactttgagctaatgtagagtttgagcttgttatccaatttctataagctgtcctatagcattagaagcagcactctaatccaagatggtctcccaaagcgtggtcctcagtggacatgtcgttttattttacctatttatttatttagagacaaagtctagctctctcaaccaggctggggtgcagtggagtgcagtagcrtgattacagctcagtaaatccttgaactcctgggctcaag

SEQ ID NO: 68017 - DNA, 1167 bp, Homo sapiens
gcatacaaccacacaggtgtgcatgtccacacaaaagaacacgcacacataaatacacaaccaacccatacgccaagcattgtttccaaaggtgatgctgccatggaatatcccggagtttgccagggttgagaaacgtggcttctcttatccttgatgggaattctgtgtacatattataatgtgttcaacctatctgggccttgtgcaattgtacgacagtattggtaaaaaccactccccagaaggtacctgggctatgagtcwtcccagaggacctggagaagtaggaagagcaaaaatctgtgctgaggggcgtggcctattcattggaatcagaacctgcccatcatctgcactctgtaagccaactgaagagcttaaaatgggaagtaggaacctagtgggcaggctccagtggggtgtggactttgaaaaaagaaaggaaggccaggcacagtggctcatgcctgtaatcccagcactttgggaggctgaggcgggcggatcacttgaggccaggagttcaagaccagcctggccaacaaggcgaatcccatctctgctaaaaatacaaaaattagccaggtgtggtggcacatgcctgtaatcccagctacatgggaggctgaggcacgagaatcccttgaatctgggaggcagaggttgcagtgagcagagatcgtgccactgcactctagcctgggcaacagagagactcttgtctcaggaaaaaaaaaaaaaaaaagaaccctgtgctctcaaactcccacttttgtcctcaggtagctgtgttttttttctcttaggaacaagttacccttttaagtcttcatgctgcttgagggtttgtaagggaaaagtagctatttcttcatatgttgctgctaattggttccatcctccctgggttatgtaacaaaaaatacagtactgttcatattctttgatcagttaatccctcttttgggaccatatcccaaggaaatgaaaaagcaatttgtacaaagatgtttatagcagcgctattcataatagttccaccttggaaacaatccaaatacccaacactggggaagtggttaagtcagctaggggacatcagcacaaaggaatagcacacagcccatcaaactgctaaacacaacacaggaaaatggtgtgatg

SEQ ID NO: 68018 - DNA, 1167 bp, Homo sapiens
gcatacaaccacacaggtgtgcatgtccacacaaaagaacacgcacacataaatacacaaccaacccatacgccaagcattgtttccaaaggtgatgctgccatggaatatcccggagtttgccagggttgagaaacgtggcttctcttatccttgatgggaattctgtgtacatattataatgtgttcaacctatctgggccttgtgcaattgtacgacagtattggtaaaaaccactccccagaaggtacctgggctatgagtcatcccagaggacctggagaagtaggaagagcaaaaatctgtgctgaggggcgtggcctattcattggaatcagaacctgcccatcatctgcactctgtaagccaactgaagagcttaaaatgggaagtaggaacctagtgggcaggctccagtggggtgtggactttgaaaaaagaaaggaaggccaggcacagtggctcatgcctgtaatcccagcactttgggaggctgaggcgggcggatcacttgaggccaggagttcaagaccagcctggccaacaaggcgaatcccatctctgctaaaaatacaaaaattagccaggtgtggtggcacatgcctgtaatcccagctacatgggaggctgaggcacgagaatcccttgaatctgggaggcagaggttgcagtgagcagagatcgtgccactgcactctagcctgggcaacagagagactcttgtctcaggaaaaaaaaaaaaaaaaagaaccctgtgctctcaaactcccacttttgtcctcaggtagctgtgttttttttctcttaggaacaagttacccttttaagtcttcatgctgcttgagggtttgtaagggaaaagtagctatttcttcatatgttgctgctaattggttccatcctccctgggttatgtaacaaaaaatacagtactgttcatattctttgatcagwtaatccctcttttgggaccatatcccaaggaaatgaaaaagcaatttgtacaaagatgtttatagcagcgctattcataatagttccaccttggaaacaatccaaatacccaacactggggaagtggttaagtcagctaggggacatcagcacaaaggaatagcacacagcccatcaaactgctaaacacaacacaggaaaatggtgtgatg

SEQ ID NO: 68019 - DNA, 593 bp, Homo sapiens
cagagtagtaccaygctaaacaaatggcttactcattgcattgatattccaaataacttttgttctttcttctccagaagtgaattttcaatgattgcatctgaaattagtaactttcctttgtatattaatctgccttttttcagattattgactattgctggtaacatttcatttccagggagctgcaagatttgttttcattcacaaggtctgctcattaggaatttaatctaaatctgatggtgtttcacaaaatatttctctttattactgatccattgtacttgtattactgtacattgaatagttaagtcagcaatatttaagattcaatcattacaatgaattgatgttgatatactcaaaatgaaaaagtagcttaaggaaaataatcctcaaaatatctgaattatgggggtgagatttatatgagaaaatataggaaatttgcttattataaacttaatttaaaccaatatttataaaacttggaatttaaacaaatattggaaataattttcatttcaccctctgtcaattgtcacaattatagatgttaaagtgctaaattatagagagttttagactcc

SEQ ID NO: 68020 - DNA, 655 bp, Homo sapiens
ctgtgtttcaatagtattttctttataaaaactgtgggactgcagcttgttgaccsttgccatatgagaaagtgtaaactaaaaatagaatatggtattaaaaacatgatatcagtcttcaaataatgttattccctgattggatgggtatcaaaaaagaaaccactagaaaaattagaaaatacttggagatgaatgaaaacaaaaacacaacataccaacacttttgggatgcagtgaaaatagtgtttagatggaaatttgtagttataaatgcccacattaaaggggatggaagatatcaaatcaacaaccaaaaatcacaccataaacaactacaagaagaaaagtaaactaaacccaaagacagcagtaagaaatttaaaaaaaaaaaaagaaagaaaaaaatagaatttacaaaactaaatttagttctttaaaaaaaacaccaaaactgacaaacctttagctagactaaaaaaaaaaaaaatcttaaagagaatgagagagagagatgatgcaaaaattagaaataaagtaacattattacaaacttacaataattgagttacaggagaatactgtgaacaattgtacagctaaaagtaataatctaaattaaatgtacacattcctagaaacacacaaatcacaa

SEQ ID NO: 68021 - DNA, 992 bp, Homo sapiens
caagtagaacaacctctaccgttatgaactgaatttttgtgtttcccccaaaatcatatgttgaaatcttaatccccaatgtgatgctatttggagacggggctttgggaggtaattagggttaggttaggccatgagggtgggaccctcatgatgaaattagtggtctttcaagaagaggaagaaagtgttctctctctctctctctcgccccccccctcctaccccctatcttcaccaaggaatagtcatgtgaggaccagagagaaggcagccatcttcaagccaggaagagagacctcatcagagctcaacaatggcagtgccttgactttggacttccagcctccagaactgtgagaagataaatttctcttgtttcagccacccagtctatggcattttactgtggtagcccaagatgactaggacacctaccattcaacactctttaaatgctcaggggcagttcttcatgaaggcaggtaactyaataaactctaaagtctgctccaagccatagacttttgattgtctactgtgaactgtccagttgaattcccacagggtgacttgatcaactttccaatcatgcttatcctgtcagctttgaactgacccatgacatttcagattggaagtaaaaagtctagatcttaaagtatattctttatattaaccacttcttttgaataaatctaaatactaccgaaaattttatacatgtaacataaaataatcatgacaaatataacataaaatcgttttaaagtttaattttaaggtaattcttcactgggaaaattcaagctattttgatgttttaggaactatgtcaagataatcagaaacccattatttggatgaaacaaacaggagagtattattagctacaagggatctatacaaaataactctgcttttagttccatcactgtggaatttggagaacttttatagcattctgtgggatgttgtcaattgttttgata

SEQ ID NO: 68022 - DNA, 992 bp, Homo sapiens
caagtagaacaacctctaccgttatgaactgaatttttgtgtttcccccaaaatcatatgttgaaatcttaatccccaatgtgatgctatttggagacggggctttgggaggtaattagggttaggttaggccatgagggtgggaccctcatgatgaaattagtggtctttcaagaagaggaagaaagtgttctctctctctctctctcgccccccccctcctaccccctatcttcaccaaggaatagtcatgtgaggaccagagagaaggcagccatcttcaagccaggaagagagacctcatcagagctcaacaatggcagtgccttgactttggacttccagcctccagaactgtgagaagataaatttctcttgtttcagccacccagtctatggcattttactgtggtagcccaagatgactaggacacctaccattcaacactctttaaatgctcaggggcagttcttcatgaaggcaggtaactcaataaactctaaagtctgctccaagccatagacttttgattgtctactgtgaactgtccagttgaattcccacagggtgacttgatcaactttccaatcatgcttatcctgtcagctttgaactgacccatgacatttcagattggaagtaaaamgtctagatcttaaagtatattctttatattaaccacttcttttgaataaatctaaatactaccgaaaattttatacatgtaacataaaataatcatgacaaatataacataaaatcgttttaaagtttaattttaaggtaattcttcactgggaaaattcaagctattttgatgttttaggaactatgtcaagataatcagaaacccattatttggatgaaacaaacaggagagtattattagctacaagggatctatacaaaataactctgcttttagttccatcactgtggaatttggagaacttttatagcattctgtgggatgttgtcaattgttttgata

SEQ ID NO: 68023 - DNA, 714 bp, Homo sapiens
ggtttcaccattttggtcagcctggtcttgaactcttgacctcaagtgatcagcccacctcggcctcccaaagtgctgggattacaggtgtgagccgctgtgcccagcttttttttgcttttttttttttttttttttttgagccagtgtcccacgagctctgtgatctcagctctgcctcccaggttcaagcaatcctcctgcctcagccttccaagtagctgggattacaggcacccrccaccacacccagctaattttttgtatttttaatagagatggggtctcactgtgttaaccaagctggtctcaaactcctgagctcaggcacccagccccaatttcaactttcaaagttaaattacaaaaggtatttatttgcatattaatcataagtaggtataatcattacactagcggaacaaacaacacgcccactgactttagagttcaaatttaaataaaatttctactaatgtttattgttcgccccttacctgtctcactctcactttttatctgcactttattctgcttaccagttctcttgacccttccatctatgtatatacttggactttgctgtttttacaggaaatcattacccttgttattcctgataccagtaaggataagttattgtaaactcttccttggtagctataggctactctttcctcctcctctctccatttccaactgtctccgttttct

SEQ ID NO: 68024 - DNA, 714 bp, Homo sapiens
ggtttcaccattttggtcagcctggtcttgaactcttgacctcaagtgatcagcccacctcggcctcccaaagtgctgggattacaggtgtgagccgctgtgcccagcttttttttgcttttttttttttttttttttttgagccagtgtcccacgagctctgtgatctcagctctgcctcccaggttcaagcaatcctcctgcctcagccttccaagtagctgggattacaggcacccaccaccacacccagctaattttttgtatttttaatagagatggggtctcactgtgttaaccaagctggtctcaaactcctgagctcaggcacccagccccaatttcaactttcaaagttaaattacaaaaggtatttatttgcatattaatcataagtaggtataatcattacactagcggaacaaacaacacgcccactgactttagagttcaaatttaaataaaatttctactaatgtttattgttcgccccttacctgtctcactctcactttttatctgcactttattctgcttaccagttctsttgacccttccatctatgtatatacttggactttgctgtttttacaggaaatcattacccttgttattcctgataccagtaaggataagttattgtaaactcttccttggtagctataggctactctttcctcctcctctctccatttccaactgtctccgttttct

SEQ ID NO: 68025 - DNA, 1577 bp, Homo sapiens
ctactattttcagggacccaaataaatggctgcctacacacagagatgcaagcattcatttagaatgaaacagctctctgtaatacaccatattctctgcattgctgtcccagaccagagaacaattctaagtaaggaacagcccacagtcaggtacagctatagctttcccctacatatggggaaaactctgattaacatatgcaataaaaacagagaagctgggcayttccaatgttcctgccaactccacaccggagggaatcaagctgggatttcctccaccaagagttcttccccagggctcctgctgactggtattcaggaaaatgggtaataaagtctttacatctggagccatttcagaccatagcatattagagtataaaatacataaatagatgcttctagactatagcataaagtgagctagtaggcactcggcaaaatgtacacacttgttttctccaggttgtgacttttttaatatttaaaaacttctaattttaaaatgtaatatttcctaaatattctacaataaacaggtatttcttacgcaattatttaaatacatatctttaaacaataattcaggagagcataaacattcattagcctagatttctaagttattttctttgcccttccctagttgtctgtaatgatgttggctagctttacttcattaatcgtccatattcctaatggagggggaaaaaaacgacttaacttggatccaatccagcaatcctagcgttctgaagttaattttgctcaatgaagcgctacttcaagactttttttacagcttcacattcaaatccctgttttgatatcacattttaaaatcctactggaaagggtacagactgccctatcctaggactgcagaatagaaatcctttagagtccttaatatccagttacgcagataccagttacagcaatagaactcaccgtcacacatcaggcatttctgacatgatttttcctgcttccctaccaagttcttaaaggcctccatggtgacagccctacctgtgtctcattatagaaatgagggaacttgttctattcaacatgatttatcacacagtaaatacatttgtcaccatttcactgctagattttcaagtgcctgaacatagaaataaattcttataattttcagaaaagacatactgtcaaaagagcaaatctacagacaggactttggtaactggtccagatctttaaataaggtttaactcttcattttgcagatgtgtaaaataagtgtcattaatgcctggcccatattaacatcaaattgtctaaagtgtaagtataaatgacatttataaaaccatatacatagcatataatacaaaaccaaaagtataacagtcaaccccgtttcagagggcaacctggcccgcaggaggactcagccgggctggtggccccacagccctccagtcacagggctcactttcacggtgttctacaaagcttggtcttctaaaagatttatgaattaaaagattcagaattactagactatatatgagatatatatacatatatctcaaagtatt

SEQ ID NO: 68026 - DNA, 1577 bp, Homo sapiens
ctactattttcagggacccaaataaatggctgcctacacacagagatgcaagcattcatttagaatgaaacagctctctgtaatacaccatattctctgcattgctgtcccagaccagagaacaattctaagtaaggaacagcccacagtcaggtacagctatagctttcccctacatatggggaaaactctgattaacatatgcaataaaaacagagaagctgggcacttccaatgttcctgccaactccacaccggagggaatcaagctgggatttcctccaccaagagttcttccccagggctcctgctgactggtattcaggaaaatgggtaataaagtctttacatctggagccatttcagaccatagcatattagagtataaaatacataaatagatgcttctagactatagcataaagtgagctagtaggcactcggcaaaatgtacacacttgttttctccaggttgtgacttttttaatatttaaaaacttctaattttaaaatgtaatatttcctaaatattctacaataaacaggtatttcttacgcaattatttaaatacatatctttaaacaataattcaggagagcataaacattcattagcctagatttctaagttattttctttgcccttccctagttgtctgtaatgatgtyggctagctttacttcattaatcgtccatattcctaatggagggggaaaaaaacgacttaacttggatccaatccagcaatcctagcgttctgaagttaattttgctcaatgaagcgctacttcaagactttttttacagcttcacattcaaatccctgttttgatatcacattttaaaatcctactggaaagggtacagactgccctatcctaggactgcagaatagaaatcctttagagtccttaatatccagttacgcagataccagttacagcaatagaactcaccgtcacacatcaggcatttctgacatgatttttcctgcttccctaccaagttcttaaaggcctccatggtgacagccctacctgtgtctcattatagaaatgagggaacttgttctattcaacatgatttatcacacagtaaatacatttgtcaccatttcactgctagattttcaagtgcctgaacatagaaataaattcttataattttcagaaaagacatactgtcaaaagagcaaatctacagacaggactttggtaactggtccagatctttaaataaggtttaactcttcattttgcagatgtgtaaaataagtgtcattaatgcctggcccatattaacatcaaattgtctaaagtgtaagtataaatgacatttataaaaccatatacatagcatataatacaaaaccaaaagtataacagtcaaccccgtttcagagggcaacctggcccgcaggaggactcagccgggctggtggccccacagccctccagtcacagggctcactttcacggtgttctacaaagcttggtcttctaaaagatttatgaattaaaagattcagaattactagactatatatgagatatatatacatatatctcaaagtatt

SEQ ID NO: 68027 - DNA, 833 bp, Homo sapiens
caacagaatttcattataatgttgattagaaagaaaatactggttttgttacatattgtctcagtcaaagttgcaatttctgagaacctgtcaacgatgttacaagaggactttgttgtgtaggcttctctgttggatatctgagcattatcttggctwactgcagcctccacctcctgggtttgagcgattatcctgtctcactctccccagtagctggggctacaggcgtgtgccatcacgcctggctaatttttatatttttaaagtagagttggggtttcaccatgttggccaggctggtcttgaactcctgacctcaagtgatctgctcaccccaggcccccacagtgctggcgtgagccactgcactgggccaacccaagacatttctaacaaaaattttacctaggagtgattgaacactttttgtttgagactgaaattgctcaccagacaggtttcttctctgacagagttggtgtaagagcagagacaaaatctgcgggcttgcagccctttatcacagagagtgacttctactcaacctgtgacctctctgcatcagtgtggcatgtttctcacagccatctcttaaccggttgattgaaatgagctatggaaagaatgatatgtttcagagatgttgaatggggggtacatgttcaagaaattcatacgccttccctctcactcctcagctcatacatgggaagtggaagttacgtggcaggtgtttaggaacagctgccttcagcttacttgtttaccttctgtccctgccacctttctttatttggtttcttacaaaagatcatgttcttaaactatgc

SEQ ID NO: 68028 - DNA, 2320 bp, Homo sapiens
cccagagtctcaagctgtgaaggtctaggtaagacttggacatctgcagttttttaaaactccatggaatttctaataaccccccatgagaacccgtggattagaggcaaaggaaaggtcattaagaatcaagagtctaaaacggccaagcgtggtggctcacgcctgtaatcccagcatgttgggaggccaaggcaggcagatcatgaggtcaagagatcgagaccatcctggccaacatggtgaaaccccgtctctactgaaaattcaaaaattagccggatttgatggtgtgcgtctgtagtcccagctactcgggaggctgaggcaggagaatcgtttgaacctgggaggtggagtttgcagtgagctgagatagtgccattgcactccagcctgggcaacagagcaagactccatctcaaaaaaaaaaaaaaagaaaaaaagtctaataaaatgattagagaagaccttactggcaaggttaatagttgagccatacaaatggccaggcaaacccttgtgccatctggttggtaatacagaaatgcttgacataactgagttttaaattagagcatttggcttggtattcattcctgctgtataccagattcatctatgttcatggaaataagctggaaatgagctctttacaggcttcatatgaaaggaaacaaatctaagtgatacggagtcagaaacatgtattttcagaagttgctagttgttaccaggctgacaaagattcacccacagcttccctggattatttgacaagaagacactgagttcccactgtgtccttgagctctttcgggttccctggagcctacacaataattatactgctctgagacattttcatatttcagatggagtcagcagagaagacagcgtcgtttttcctttttagattcattaattaataactcaatccttaagcaactgacagaccgttattctttttaaggtgctaggagttgcgatttgtcagtgacccctggccatgaattccctctgggatttaagtcttttaggagttacctccccagcagtgcagacctccttgttgtaaaatggatggaatgtctgggagtacaccaaggcatactcgcaaatccttttgcatggctgggaacttccaagaaaccacagtggcagatattaaaaagccaatataagatataagatatataagatataagaaaaccaattgtcatggtcttgttaaaagaaaaacttcagacaaatttaacagagttgagttgaacaaagaacaatttgtgacttgggcagcccctgaatcagaacaggtacagagcagctctggtgctgctgcatgagaggacttggggactgaggggggaaagtgaggcgcagaaactgctggattggttacagcttggtgtttgccttatgtaaacaatttgaacagttggctgcctttcattcaccaaaacttggtgatcggtacaaaagtaggttacaatctgtttacacatccagtgaggttacagttcactgtgtatggaaaaacctttaggctgaacttaaaatatgtcaggaggcagatttaggctaacctttatttaacagtctttgcaagacaagctaccagaggagaaagattctgtaaatagttgtagacgggagaaaaaggagattatatgcatacttagtataaacaacgaaatggtattatggttctgaaatcagatatatgtattataaaggattggggtggctgtgataccaggttttgcttactttaccttttctatccctcagttattgtcacaagcatgaattgctcatgagggagattagtamcagaaaatcccagagcatcaacaagagatattaaccatcaaaatggctttttaaaaatgtatttaaacataggcagttctttttagctattcaattagacgatcaccattggacaaccaaacagcataggctagtgtgcttctgagaccacaatagtgttcaggtttttatagataaaacctgcagtggccaggtacggtggcttacacctgtaatcccagcactttgggaggctgagttgggtggattgcttgggttcaggagttcgagaccagcctgggcaacatggtgaaacttcatctgtacaaaaatgcaaaaagattagctgggcatggtagcatatgcccatactcccagctactcgggaggtgggggtgggaggattgcttgagcccagggaggtcaaggtggcagtgaaccgtgaccatgccactgcactccagcctgcctgggtgacggagtgaaagcttgtctcaaaaaacaaaaa

SEQ ID NO: 68029 - DNA, 756 bp, Homo sapiens
cagtggggtatctcctagcgccttttctcctggctaagctttgaatgtgattgttttttgtttgtttgtttgtttgagacagagttttggtcttgttgcccagggtggagtgcaatggcacaatcttggctcactgtaacctccgcctcccaggttcaagtgattctcctgcctcagtctcccgagtatctgggattacaggctcccaccaccatgcccagctaagtttytgtatttttagtagagacggggtttcaccatgttggtgatggctggtctcaaactcctgacctcaggtgatccacccacctcggcctcccaaagtgctgggattacaggcataagccaccgcaccccgccatgtgatttttttttttccacttagcactgtgatactgagaactccactaaaaatggtttttttgcttagtctcttgcagtatacagtctaatatttggcaaatgcttcaaaggggacaacgactggagtatccagttcacttttctgtctcttcctcccaggatcttgatctcttaagtcttgtccgccttggcaggtctgaatcccaaattttgtcttttaagcctcattatactgccaaaagttctgctgccttctcagcagatgaacagggagagaaaagcaccttctccactctctatagttcccttctatctcagatcttggccactcaagacctggttgccttggcagctctctgagacaattctggctcagtaggaagcttctgcaca

SEQ ID NO: 68030 - DNA, 728 bp, Homo sapiens
ccttatttagtctggcgtgccgcctttgtttttcttttaaaaatatcatgtgaactactgtaatgttggctttgttttagcccaatttacccacattctcttattagctctagttatacacaaagagaaactgaggttattgaagggtctccctaaagatgacggttgatagttgaacactgtatttaagagaacctcttccctctccccatcagaagaaagcttataaagcttgtagatatcatcttcaacaaaaagaacgttagagaacctgagactgcttcaacaaaacacccagagaacccagggaggcctcccaaagtggcatttctgaccactccgaagggtttaaattgtgttttgggaaagagctgacgcggctcagcccttgtcttcaagggttcagaggaacaagccccaagatgcagagwgtacaacagcattgctgcttgtcccgctgtaaaagcagacatcaggaagggcctgggcacagagtatcgtggaagcttcaaactcttaaaacttggcaggaacttaaagattttctggcttgtgtctccattttacagtcagagaaactgaggtgaagagaaatttggtaacttagccaaggttacacaggaggtaagatctgaagatctgacccggaattcagtttaccagattttttttttttcttttgagattatctgctctgttgcccaggctagagtgcagtggaaggatcc

SEQ ID NO: 68031 - DNA, 728 bp, Homo sapiens
ccttatttagtctggcgtgccgcctttgtttttcttttaaaaatatcatgtgaactactgtaatgttggctttgttttagcccaatttacccacattctcttattagctctagttatacacaaagagaaactgaggttattgaagggtctccctaaagatgacggttgatagttgaacactgtatttaagagaacctcttccctctccccatcagaagaaagcttataaagcttgtagatatcatcttcaacaaaaagaacgttagagaacctgagactgcttcaacaaaacacccagagaacccagggaggcctcccaaagtggcatttctgaccactccgaagggtttaaattgtgttttgggaaagagctgacgcggctcagcccttgtcttcaagggttcagaggaacaagccccaagatgcagagagtacaacagcattgctgcttgtcccgctgtaaaagcagacatcaggaagggcctgggcacagagtatcgtggaagcttcaaactcttaaaacttggcaggaacttaaagattttctggcttgtgtctccattttacagtcagagaaactgaggtgaagagaaatttggtaacttagccaaggttacacaggaggtaagatctgaagatctgacccrgaattcagtttaccagattttttttttttcttttgagattatctgctctgttgcccaggctagagtgcagtggaaggatcc

SEQ ID NO: 68032 - DNA, 728 bp, Homo sapiens
ccttatttagtctggcgtgccgcctttgtttttcttttaaaaatatcatgtgaactactgtaatgttggctttgttttagcccaatttacccacattctcttattagctctagttatacacaaagagaaactgaggttattgaagggtctccctaaagatgacggttgatagttgaacactgtatttaagagaacctcttccctctccccatcagaagaaagcttataaagcttgtagatatcatcttcaacaaaaagaacgttagagaacctgagactgcttcaacaaaacacccagagaacccagggaggcctcccaaagtggcatttctgaccactccgaagggtttaaattgtgttttgggaaagagctgacgcggctcagcccttgtcttcaagggttcagaggaacaagccccaagatgcagagagtacaacagcattgctgcttgtcccgctgtaaaagcagacatcaggaagggcctgggcacagagtatcgtggaagcttcaaactcttaaaacttggcaggaacttaaagattttctggcttgtgtctccattttacagtcagagaaactgaggtgaagagaaatttggtaacttagccaaggttacacaggaggtaagatctgaagatctgacccggaattcagtttacyagattttttttttttcttttgagattatctgctctgttgcccaggctagagtgcagtggaaggatcc

SEQ ID NO: 68033 - DNA, 1586 bp, Homo sapiens
atgtagagtactcaagcagagaacctgtgcagagtaagcacacatcaggaaaagctgctgggggagcagagggcttgggtgggaggaagcgtttgttactgagcacacttaccaatgtgctgcatacctggaaggcgggaaggctttgtggagaagagtcctggcatgggcggccccacctgtaccccagggtgtttttacagaagggaagtattgccaggtttctcatcagagcttcctgctaggtgcattcattctccatggtattcaatcatgtcttttaacaagctgatttttaaataattgagtttttaaattatttttatgtatttatttttttgagatggagtcttgctcagcccaggctgaagtgcagaggcgtgatctcggctcactgcaacctccacctcctggtttcaagtgattccccagcctcagcctcccgagtagctggaattacaggcacgcgccaccacgcccagctaacttttgtatttttagtagagacagggtttcaccatgttttgtcaggctggtctcaaactcctgacctcaagtgatccacctgcctcggcctcccaaagtgctgggagtacaggtgtgagccaccacatctggccaccgactttttattttaaatgtattttctttgtgggaaacttggaaaataaagaaaaaatatttaaaaattaaaaataattcatattcctacctacattaagcattttggttcatttgagatcattctgtatatagttttgtaatttttttaaaccatatttacttggtaaacattcagtggatatatgtgatttatcattaggmtatatcattaccagattatgtaattgtagtcattgctggatgtcttggaggttttctgattttgtagacaactcttgagatgaacatctttatgcatcaatttttagttcctgaaggtggaattagagccaattttcttgtgcaaagttcatgtcagtttctttaacacacctttacctacactgggcattatttggttgccattttgataagtaaaaatggtacttttccttacttctgaggcataatcagattggcatttaatcaaactattacatacatgtggtagaattcattttttttaaatttaactttgttgttgttgagagggagtcttgctctgccgcccaggctggagtacagtggtgcagtctcagctcactgcaacctctgcctcctggtttcaagcaattctcctgcctcagcctcctgagtagctgggattacaggcaccttccaccatgcttggctaatttttgtatttttagtagagacagtttcaccatgttggccacgttggtatagtggtgagcatagctgctttccaatttactttatttatttatttatttatttatttatttatttatttatttgagacggagtctaactctcctacccaggctgtagtgcattggcacgatctcagctcactgcaacctccatctcccaggttcaagcaattctcctgtctcagcctcccaagtagctgggactacaggtgcacaccaccatgccgagctaattttttgtatttttta

SEQ ID NO: 68034 - DNA, 702 bp, Homo sapiens
ggatcccacagccaaggcctgggggagcacctgactagtcggtcgggaaagacacagccccaaagagaaaaacccaggagagaaattagaggggaaaggtgtgatcatgtcaggatttgatggctacactgtggttcctcttggtgaccaagacctcaattccacgagcatttgccaaacaccttttagggsaggtaggttccattcctatactgccatcaatccataggaacacaaggatgagaagagatagtcctgcctcaggggtttcctatctgtcagggaaggtaggtgcacaaatagccatacttctacggttcatgttaatcttcctttatgcaaatcttcagaatacagtgtggttgtttagatagaatctaataggaccatgtaggatctattgtctaataggtaattgtgtcatggaaaaataaaatgtattaattcaacatttcatggaaactttgcagcagcttcaattggtcctgtttgtacctctcaccccaccttgtggccatttatctgagttgcaaggtcagttcttgggtgaatcctcttggaaaatgaatttgcagatctaaatgtatcttgaaatgttaccaaacgtctcagagaatgacagcctaactgttgaatgggacatcttttgtactttggagccctggaaacttctcagtacattttgtctggctgttttttgaa

SEQ ID NO: 68035 - DNA, 702 bp, Homo sapiens
ggatcccacagccaaggcctgggggagcacctgactagtcggtcgggaaagacacagccccaaagagaaaaacccaggagagaaattagaggggaaaggtgtgatcatgtcaggatttgatggctacactgtggttcctcttggtgaccaagacctcaattccacgagcatttgccaaacaccttttagggcrggtaggttccattcctatactgccatcaatccataggaacacaaggatgagaagagatagtcctgcctcaggggtttcctatctgtcagggaaggtaggtgcacaaatagccatacttctacggttcatgttaatcttcctttatgcaaatcttcagaatacagtgtggttgtttagatagaatctaataggaccatgtaggatctattgtctaataggtaattgtgtcatggaaaaataaaatgtattaattcaacatttcatggaaactttgcagcagcttcaattggtcctgtttgtacctctcaccccaccttgtggccatttatctgagttgcaaggtcagttcttgggtgaatcctcttggaaaatgaatttgcagatctaaatgtatcttgaaatgttaccaaacgtctcagagaatgacagcctaactgttgaatgggacatcttttgtactttggagccctggaaacttctcagtacattttgtctggctgttttttgaa

SEQ ID NO: 68036 - DNA, 613 bp, Homo sapiens
tgacagcagagggttaaacgaagcacggggactctctgagcactgacaggtgactgcacaggctgcactctcaggcttagtgctagtgctactcccctccctggggcacctccacccctggggaaccccatagccctgcccagacctgtgtagatcatctcatctttaaacttggcccacttatcttgtggaagatgccatcttcctgctgggactctggctgatataaatacctgtgagcaaaaagaaaaattcttcaagataaaacagtcrcagcataaagaaaatcaagtggaaacactgggcccctttgaagctactattattagtcataataataacatcagtagagtgatctaccatctacaatggacttttatgcatgtttgatcttcatggaaaatcttatggagtaggcagggtattatgggaaaaataaaaaaacactaaagtctccttatggggtagataacgggggaaaaggcagaggaaactgtgcaagtcacactcaggctgagcatgaccctgtcttggatggagcatgtcctccgttctgcatctctctggggagccctttggaaagaagaacggggtagagcaaatgcgtccccaa

SEQ ID NO: 68037 - DNA, 613 bp, Homo sapiens
tgacagcagagggttaaacgaagcacggggactctctgagcactgacaggtgactgcacaggctgcactctcaggcttagtgctagtgctactcccctccctggggcacctccacccctggggaaccccatagccctgcccagacctgtgtagatcatctcatctttaaacttggcccacttatcttgtggaagatgccatcttcctgctgggactctggctgatataaatacctgtgagcaaaaagaaaaattcttcaagataaaacagtcacagcataaagaaaatcaagtggaaacactgggcccctttgaagctactrttattagtcataataataacatcagtagagtgatctaccatctacaatggacttttatgcatgtttgatcttcatggaaaatcttatggagtaggcagggtattatgggaaaaataaaaaaacactaaagtctccttatggggtagataacgggggaaaaggcagaggaaactgtgcaagtcacactcaggctgagcatgaccctgtcttggatggagcatgtcctccgttctgcatctctctggggagccctttggaaagaagaacggggtagagcaaatgcgtccccaa

SEQ ID NO: 68038 - DNA, 1628 bp, Homo sapiens
tcactcaacagtgcattcactccacaaatattctctgagctcctttttgttttgttttgagacagggtctcattgtgtcacycaagctggagtgcagtggcaccatcacagctcactgcagccttgacccccgggcttaagtgatcctcccacctcagccttctgaatagctgggactataggcaggcaccaccatgctaattttcgcattttttgtatagatggagttttgccatattgcctaggctagtctcaactcctgagctcaagtgattcactcttctcagcttcccaaagtactgggattacaggcgtaagccaccatgcctggcctctgagctccttctacgtggcagttcctgggagccactggggatagttgtctgatgaactgtatattctagcagagactgggggctgggtagtggatagagagagatggtaaacccataaaataaatgtagaaaacaagattataagagcaagtaaccatacttttgagagacaatggattaaaaaaaaaagagagcttcttcactatctcaaagaaaaacatgtatgttgaataacacctcccaaaatgtagtcattgaaatgtgttttaggtttttggaaaaattatcctgaaggagctggcattgatttccttcctgaatctgtaagcaggtaaataatggaatcaccatgcggcatcagactgcgaggcaccgccacctgattgagggtcctggaagaagcagcgaagcctgcagcaagctcagctcacaaggccgcccaggtgcctctgcagcaggcagtctttttcactttgccattgagtttgctgccccctagctttcataaggcataatcccgagagtaggttatgattagtgatggaggaaagaaaaatctccatgaagcccgcatctccagtatggtgactgggtctgataagcgcgccatgcatgtcttgtagaggcagcttccagaacttcctggtcaggtttagaggtggtgatctgattggaaaagctggagaggggcaggcggggaagtgtctggaagctactcattgcttttacttagatgtttgttatttggaggcttggaaagaggtcgatggggtaccccttggccactgagtcccctatcaacgggcatcagcatctcactgggtggggatgctctgcttccatggttggctctgtagtcataggaacttgccgtggtggttgttgtttagaatataatatacaagcctttattaatatattaaataccaagagctagtagtagctctataattttaaagtagtgatgaatgtaatgatattttaaaatatctataacaactgtaaaatgatatgaaaataactgtggatttcattggtgataaagtcatagatattgctaacactactgtggtttgctgcctacatttataaaggaagaaactgctaaatttcagttagatgttagtgaatatgaaaactttttttttcaaattcaagttcatggacctgctaaattcaatccttggccctttgggggtctgaggattccagttaaaaaaatcctgacctataataagaccaaagtactcacatcgagagagtgaaagataaaataataatagaagtcaactt

SEQ ID NO: 68039 - DNA, 1628 bp, Homo sapiens
tcactcaacagtgcattcactccacaaatattctctgagctcctttttgttttgttttgagacagggtctcattgtgtcacccargctggagtgcagtggcaccatcacagctcactgcagccttgacccccgggcttaagtgatcctcccacctcagccttctgaatagctgggactataggcaggcaccaccatgctaattttcgcattttttgtatagatggagttttgccatattgcctaggctagtctcaactcctgagctcaagtgattcactcttctcagcttcccaaagtactgggattacaggcgtaagccaccatgcctggcctctgagctccttctacgtggcagttcctgggagccactggggatagttgtctgatgaactgtatattctagcagagactgggggctgggtagtggatagagagagatggtaaacccataaaataaatgtagaaaacaagattataagagcaagtaaccatacttttgagagacaatggattaaaaaaaaaagagagcttcttcactatctcaaagaaaaacatgtatgttgaataacacctcccaaaatgtagtcattgaaatgtgttttaggtttttggaaaaattatcctgaaggagctggcattgatttccttcctgaatctgtaagcaggtaaataatggaatcaccatgcggcatcagactgcgaggcaccgccacctgattgagggtcctggaagaagcagcgaagcctgcagcaagctcagctcacaaggccgcccaggtgcctctgcagcaggcagtctttttcactttgccattgagtttgctgccccctagctttcataaggcataatcccgagagtaggttatgattagtgatggaggaaagaaaaatctccatgaagcccgcatctccagtatggtgactgggtctgataagcgcgccatgcatgtcttgtagaggcagcttccagaacttcctggtcaggtttagaggtggtgatctgattggaaaagctggagaggggcaggcggggaagtgtctggaagctactcattgcttttacttagatgtttgttatttggaggcttggaaagaggtcgatggggtaccccttggccactgagtcccctatcaacgggcatcagcatctcactgggtggggatgctctgcttccatggttggctctgtagtcataggaacttgccgtggtggttgttgtttagaatataatatacaagcctttattaatatattaaataccaagagctagtagtagctctataattttaaagtagtgatgaatgtaatgatattttaaaatatctataacaactgtaaaatgatatgaaaataactgtggatttcattggtgataaagtcatagatattgctaacactactgtggtttgctgcctacatttataaaggaagaaactgctaaatttcagttagatgttagtgaatatgaaaactttttttttcaaattcaagttcatggacctgctaaattcaatccttggccctttgggggtctgaggattccagttaaaaaaatcctgacctataataagaccaaagtactcacatcgagagagtgaaagataaaataataatagaagtcaactt

SEQ ID NO: 68040 - DNA, 1628 bp, Homo sapiens
tcactcaacagtgcattcactccacaaatattctctgagctcctttttgttttgttttgagacagggtctcattgtgtcacccaagctggagtgcagtggcaccatcacagctcactgcagccttgacccccgggcttaagtgatcctcccacctcagccttctgaatagctgggactataggcaggcaccaccatgctaattttcgcattttttgtatagatggagttttgccatattgcctaggctagtctcaactcctgagctcaagtgattcactcttctcagcttcccaaagtactgggattacaggcgtaagccaccatgcctggcctctgagctccttctacrtggcagttcctgggagccactggggatagttgtctgatgaactgtatattctagcagagactgggggctgggtagtggatagagagagatggtaaacccataaaataaatgtagaaaacaagattataagagcaagtaaccatacttttgagagacaatggattaaaaaaaaaagagagcttcttcactatctcaaagaaaaacatgtatgttgaataacacctcccaaaatgtagtcattgaaatgtgttttaggtttttggaaaaattatcctgaaggagctggcattgatttccttcctgaatctgtaagcaggtaaataatggaatcaccatgcggcatcagactgcgaggcaccgccacctgattgagggtcctggaagaagcagcgaagcctgcagcaagctcagctcacaaggccgcccaggtgcctctgcagcaggcagtctttttcactttgccattgagtttgctgccccctagctttcataaggcataatcccgagagtaggttatgattagtgatggaggaaagaaaaatctccatgaagcccgcatctccagtatggtgactgggtctgataagcgcgccatgcatgtcttgtagaggcagcttccagaacttcctggtcaggtttagaggtggtgatctgattggaaaagctggagaggggcaggcggggaagtgtctggaagctactcattgcttttacttagatgtttgttatttggaggcttggaaagaggtcgatggggtaccccttggccactgagtcccctatcaacgggcatcagcatctcactgggtggggatgctctgcttccatggttggctctgtagtcataggaacttgccgtggtggttgttgtttagaatataatatacaagcctttattaatatattaaataccaagagctagtagtagctctataattttaaagtagtgatgaatgtaatgatattttaaaatatctataacaactgtaaaatgatatgaaaataactgtggatttcattggtgataaagtcatagatattgctaacactactgtggtttgctgcctacatttataaaggaagaaactgctaaatttcagttagatgttagtgaatatgaaaactttttttttcaaattcaagttcatggacctgctaaattcaatccttggccctttgggggtctgaggattccagttaaaaaaatcctgacctataataagaccaaagtactcacatcgagagagtgaaagataaaataataatagaagtcaactt

SEQ ID NO: 68041 - DNA, 1628 bp, Homo sapiens
tcactcaacagtgcattcactccacaaatattctctgagctcctttttgttttgttttgagacagggtctcattgtgtcacccaagctggagtgcagtggcaccatcacagctcactgcagccttgacccccgggcttaagtgatcctcccacctcagccttctgaatagctgggactataggcaggcaccaccatgctaattttcgcattttttgtatagatggagttttgccatattgcctaggctagtctcaactcctgagctcaagtgattcactcttctcagcttcccaaagtactgggattacaggcgtaagccaccatgcctggcctctgagctccttctacgtggcagttcctgggagccactggggatagttgtctgatgaactgtatattctagcagagactgggggctgggtagtggatagagagagatggtaaacccataaaataaatgtagaaaacaagattataagagcaagtaaccatacttttgagagacaatggattaaaaaaaaaaragagcttcttcactatctcaaagaaaaacatgtatgttgaataacacctcccaaaatgtagtcattgaaatgtgttttaggtttttggaaaaattatcctgaaggagctggcattgatttccttcctgaatctgtaagcaggtaaataatggaatcaccatgcggcatcagactgcgaggcaccgccacctgattgagggtcctggaagaagcagcgaagcctgcagcaagctcagctcacaaggccgcccaggtgcctctgcagcaggcagtctttttcactttgccattgagtttgctgccccctagctttcataaggcataatcccgagagtaggttatgattagtgatggaggaaagaaaaatctccatgaagcccgcatctccagtatggtgactgggtctgataagcgcgccatgcatgtcttgtagaggcagcttccagaacttcctggtcaggtttagaggtggtgatctgattggaaaagctggagaggggcaggcggggaagtgtctggaagctactcattgcttttacttagatgtttgttatttggaggcttggaaagaggtcgatggggtaccccttggccactgagtcccctatcaacgggcatcagcatctcactgggtggggatgctctgcttccatggttggctctgtagtcataggaacttgccgtggtggttgttgtttagaatataatatacaagcctttattaatatattaaataccaagagctagtagtagctctataattttaaagtagtgatgaatgtaatgatattttaaaatatctataacaactgtaaaatgatatgaaaataactgtggatttcattggtgataaagtcatagatattgctaacactactgtggtttgctgcctacatttataaaggaagaaactgctaaatttcagttagatgttagtgaatatgaaaactttttttttcaaattcaagttcatggacctgctaaattcaatccttggccctttgggggtctgaggattccagttaaaaaaatcctgacctataataagaccaaagtactcacatcgagagagtgaaagataaaataataatagaagtcaactt

SEQ ID NO: 68042 - DNA, 1453 bp, Homo sapiens
acaaggcaggtggcacagatttttcctgaagtcatatgtacttgcagtcccccgactaaggcgagttggagccccttggtaaaagcactagattctaagttttctcgtctgctaaagcaaattgaaaaccccacaaaaaataaacaaattcatctctatctagtgttaggattttcaacattgctcacatttttgaaaataagtaagtggtacgtgtgtcacaaaactcaaaaggacaaagagccaaagtttatctcccttgtcacgtattccctcaccaaagacaaccacagccagtgatttttgcctatctttccagaggtagtctatgcttatagaagtgcagaaataaaaggtctctcttcccccacctcctttcctctctgttatctcggtatggttgcatttgcaagaatcacatcccagttaatctgtaaatttcacgcacccgattctgccttccctgggactggatctacagtctaggggtctcccatgatgtgtatggggaggggtccagacagaggcccagattgtcacgggtcctcctgggtcactgctgaaacatccctcatcctgccccaatgggaccacatggtctgccaggctcagtggctctttctgatgccccttagccatgttgtgaggctgcccaaggccccagctgcctgaccttcccgtgggccttccccactcccacctaagccccctgaccaccctgggttctctaggaagagtggagagcaggaaccctctcagtgggatcctctgcacccacatccacccctttcctcaccttcctcttccttcctcagcccccagggaactctttcaagtttaatggaaggagaccttctaaacatttttcctgaattgggagtcccttgcattcccctaacacattttattttattttattttattttatttttatttttatttttgagacagggtctcgctctctcacccaggctggagtgcagtggtgtgatctcggctcactgcaacctccagctcctgggctcaagtgatcctcccacctgagcctccgtagtagccggaactacaagcatgagccacaatgcctggcttatttttgtattttttggcggacagggtttcaccattttggccaggctggtctcaaactcctggactcaaaggcatctgcccacctcggcctcccaaagtgctgggattacaggcgtgagccactacactaggcacccactaacacttttttttatgaaaaccaaagccagaggagccttgcagttcttttctgccttgtcacattcctctaagcaggagatctacttactttytgagaggagcaggggaacagagcatgttaccgattcactcccgacacggccctcagagccctgcatcttccaggtcctaccagctcacagcctgcgccgcagccacactgctctttcacaggcccttg

SEQ ID NO: 68043 - DNA, 515 bp, Homo sapiens
cttcccccaaaagagtaggttcttatgaactaagaggttgagattagttaagtgcctaataagaataaaaagtttcttcctttaagtaagtcaaacaatatctgatgattctttgaacactgagtttcaataatctatacaaactagatttaagaattttgaaattcattaaatactcttctaaattaaaatttcaaaaataaatatattagaaaaatgtttaccaaatgtcccttaatacaaataagttaagaaattaacttgaaggcaagacaagaaaataacttggatttatgcaagcaaggattttaaaaagttatttgcaaccttgaaaaacaaaaatgagctatgtttagaaaacattaaaataattggttccatgtctgttatagttcttatgtgtccattaacctaataaactctgaaatctagtaattaactgaccccggaartcacaggccaatgaataaacgaacttttcaagattaaaaaaaaagtcattgatttatactcac

SEQ ID NO: 68044 - DNA, 751 bp, Homo sapiens
aatgctggaattcaacaaagaagtgaaagaaaacatcaaaagtggggaaggagaagagagagaggcagtctgcctggctggmatcagctgggagccaggagtgacttccaaatatagggaaagggtaagccacagactttcaatgccccacatcctgactgtggaatcatgcaatcctggctatggagaaccctttgacctttgttcccctgtcccatggtctcctggaagctttcttggtcccaaaactaacatacgaagctgccagaagaccgtgagacagtattgctccagagaggaagctcatgttgggtcacacaccctttttgaggcctaagccactacagcaaggtgccattttcaaacctagcctttggcagactgcatgctgtcctggagcccagtgacactgggactgaggtgttacaaaaacttggactgtcactactagaattgggaagcaagtttggagtcctcctacagctgggattagagagcaagtgaggcatgaactgcagctaccagtgccaggaagtgagtaccaccggaatggagactggaatatgagcagaacatgagttgctgctgggacttggttgccagttgggtgaggctcctgcaactggggaggagcatgagctaggtgtgggctactgccagcatggttggggaataagacctgctgggacttgggcatgtgtgttcttcaactgccagcccaggctgtggccatcaaggacagccctgccct

SEQ ID NO: 68045 - DNA, 890 bp, Homo sapiens
tggaagggaattttgtttcagacaggcagcttcctccctagtgcctactgggtaaattgccgttatatcaagtcagtaggcagaaagatttagatggctttttggtgctagtgctttcttcctcctttctggaactgtgcaataaatgcattattattccagagcactcggagaatgtggcagtagtcaggcattattgaaagagggccatttagcggaaacattctatagagatgaattatcaacactatttttctttattatttaacttgcttgaaatgttgaaatagtgtagacaagcttttattttgtgacttttgtcttcctagtgatcaaattgataatgcctacaaatgaatataccttgcccatccggtttccctaataagacagataattattgtagcttaagggtacaactgactgaaaattcctaaatggtctttatagtaaatattatgctatataattaaaatgtgacacaaagcatatttttactccaaagtttattttataataggaaaaaatgactattagaaagccaataaatcatttagagattactactttaaagttgacattcagaagccataattgatacagacctctaaaaataatttaaatgcactactgccataatattccactgaggggagggggtggaactgttatagtagtggagaaataggctacaggtttgtgaagatgctgaggcccagtaacaaacactaggtaacttatccaagatctcagggctggtcctcgttgaaaggaatgattggtctgctatgcagtggcraatctgaaagacatcttgccaaatcaaccattgacttcagaatgtgaatataataaagaatagaaacatcctgcttctataaattgggttg

SEQ ID NO: 68046 - DNA, 634 bp, Homo sapiens
aaatgaagtattataatgtattcaactgactctccagtaattcagcaatatctatatatctgtamtatcaatatcagtatctatacaatatattaatgtctatttctctttatatttagagagcaagaaagcaaatcttcaaatttaccaacataagtttcaagatgtgatcaaagtagaaaaaaatttcaataattacattaagcaaacacattattaaataatttaatcaatttagtaattattaaattattattaaataaaattattttaagagctacattaaaaccaatcacagagcagtattaatttttgaggattattattgtctatttccagccgaataatgaatcatcaggactaatgatattaataccataacatgccttattttacatcatggaagtcatccaaatgggctgtgtgacagatagagaagtaaatatactttattatttatgcaaataagtactatttgctcatgccaaaatactgcctttattaaagaggataaaataacttctttagatggactttttaaaaatttcttccatatatctatatccttcatgatgtcttgggtaggagtctacaggcaatatagtggaattaaggccataggatgcactacctt

SEQ ID NO: 68047 - DNA, 706 bp, Homo sapiens
taagaactttgaatagtgaaaacaactttctttcagtaaccaaggggcttgtgctggacctgttaccagagggtgggaaagtcctaggacactttgtctgtagctcacattaatccagtctccactcaataactaatgtagcctttaaaaaataaaaccaagtctcaacactgtcttgcycaaaacctttcagtggctccttactgtctttggaataaagttccacctctctaacaagaccccatcttctctcctcagccacaatgtacttctctcagctcctctaaagggctccctccaactgctcttgcctgagtctatcccagttactaatgctgtgtaacaaattaccaccaaaatttagcggcctaaaaccaccatcttattatacgcatggggcctgtgggtcaggaatttggagatgaaacagtagaatggctctctctgctccccagtgtgtggggcctcaacaggaagactctacagctgacagtgatgcagcatctggggtgactctgtggctaagggctgggatcatctacaggcatctttccttgctcacgtgtctgcggctgatgctcctgtcagctgggacctacactgtgtgtggcctctagctggacttcttaggctccagcttagctcggggcttcaaaagagagtgccctggtgaacagggtagagactgcgctgcctttcctctccc

SEQ ID NO: 68048 - DNA, 706 bp, Homo sapiens
taagaactttgaatagtgaaaacaactttctttcagtaaccaaggggcttgtgctggacctgttaccagagggtgggaaagtcctaggacactttgtctgtagctcacattaatccagtctccactcaataactaatgtagcctttaaaaaataaaaccaagtctcaacactgtcttgcccaaaacctttcagtggctccttactgtctytggaataaagttccacctctctaacaagaccccatcttctctcctcagccacaatgtacttctctcagctcctctaaagggctccctccaactgctcttgcctgagtctatcccagttactaatgctgtgtaacaaattaccaccaaaatttagcggcctaaaaccaccatcttattatacgcatggggcctgtgggtcaggaatttggagatgaaacagtagaatggctctctctgctccccagtgtgtggggcctcaacaggaagactctacagctgacagtgatgcagcatctggggtgactctgtggctaagggctgggatcatctacaggcatctttccttgctcacgtgtctgcggctgatgctcctgtcagctgggacctacactgtgtgtggcctctagctggacttcttaggctccagcttagctcggggcttcaaaagagagtgccctggtgaacagggtagagactgcgctgcctttcctctccc

SEQ ID NO: 68049 - DNA, 706 bp, Homo sapiens
taagaactttgaatagtgaaaacaactttctttcagtaaccaaggggcttgtgctggacctgttaccagagggtgggaaagtcctaggacactttgtctgtagctcacattaatccagtctccactcaataactaatgtagcctttaaaaaataaaaccaagtctcaacactgtcttgcccaaaacctttcagtggctccttactgtctttggaataaagttccacctctctaacaagaccccatcttctctcctcagccacaatgtacttctctcagctcctctaaagggctccctccaactgctcttgccygagtctatcccagttactaatgctgtgtaacaaattaccaccaaaatttagcggcctaaaaccaccatcttattatacgcatggggcctgtgggtcaggaatttggagatgaaacagtagaatggctctctctgctccccagtgtgtggggcctcaacaggaagactctacagctgacagtgatgcagcatctggggtgactctgtggctaagggctgggatcatctacaggcatctttccttgctcacgtgtctgcggctgatgctcctgtcagctgggacctacactgtgtgtggcctctagctggacttcttaggctccagcttagctcggggcttcaaaagagagtgccctggtgaacagggtagagactgcgctgcctttcctctccc

SEQ ID NO: 68050 - DNA, 572 bp, Homo sapiens
cagagctttcctccagggctgcctccaccctcagcctgtggtatttccactgtcctaagccactgcctcctgctaacttcgagcagctccgatgccacagcttctgtgtggacagccttggactcctttccccagggtttagagatgagaatgaggcctccacgaagggcggctgatggggagaggcgctctgggctgagctgccccgcccgccagcctggggctcagtggggcagtgcccaacgaggcatccagggggaggacccgctgcctgctgctcgcacgcggctgcacgcacagctggagcggatctaaacccattccctgagtcaaaggggaagcgctccgcctcgcagcacgcgggagctgcctgagctttggggagagggcgggccagggagcagagctggccaggctgcccgtgccaaggaaggagggggcctgccgaggccgccaaagcrggctgggcgggaggggccaggccagctggggccggagctcgtgtgacatcaccgggcggcccgcctctgtctggggctgaggggaggcccggagcctttctggggcctggg

SEQ ID NO: 68051 - DNA, 670 bp, Homo sapiens
cccacctcctagcagagcccaaaccagaagctcccacacacctttctctgcctagcctcagagaggcctgagcaggccataggaatcatgcttgggctttgtcatttaagtggaaaacagctcagcaaggccccagggagcacagggtctcttttgtaactgctcactggctggtccaaggtggagcccagacccagggtcctcactggagaagcccccaaaggggttcagggaggacaaaatctttaggtcctgtgtcatacttgttattttagcacagattaatgtgaaatcagaaagtagtgatgctaatacccttttactagtaaaaaccagattaaatacatgcctgtgtcatcgttaagagttagcaggttccaatccagcagaccagggttgagcyctggttctgccaccttctagctttctgattttgggcaagtcactcagcctcactgagtctcagtttcctcacctgtaaaatgtaaacagcaacagtatctaccttaaaaggagattatgagaacacgggaaactggaaaacacttgcaaaatgtttagtccagggtcaggtatatagcggaccttggtcaatggatgttattaataaatacacacataggccctcctctgcgcagctctgacctcctcaggcagtcacttgtccatg

SEQ ID NO: 68052 - DNA, 1465 bp, Homo sapiens
tgcattttacaaataccaaccatcatctcccaccgcattaaaggagaccctcccagtgatggggcacccggaaggggtgttgtctgcacaaacacacacacggatacatgtgactgcacacacatataaacccatgtgtgtaaacacacacacacacacacacatcctggtacaactactttgtgcttatccataagagacggtaaaaaagtatatattggccttgtatttgacaacactcaattcagtcctaaccgttcgacaacttctttttttttcttgagactcctctctgtatcgcccaggctggagtgcagtggcgctatgtcggctcactgcaagctccatctccagggttcacgccattctcctgcctcagcctccggagtagctgggactacaggtgcccaccaccacgcccggctaattttttgtattttttttttagtagagacgggctttcactgtgttaccgggatggtctcgatctcctgacctcgtgatccacccacctcggcctctcaaagtgctgggattacaggtgtgagccaccgtgcccggccccgtccaacaacttctaaatttgcctacaaccctcagtgatcctgctcttgctgtgcagatttctgcacacagatgagagcaccttcataagccagctttgctgtttactgtgatgaaacagaagatggcattcgtcttcagggatgtcamtctggaagcttttaggaacactagcctgcacttaaagatcaaagacgactgagatgactcttctgaaatagaacctttcctcaggactcaggagaccaaaggccattcttgacccctgcccctccttcatctcttgcatccaatacatatgcatgccctgttcttctattctctttatataccctgaattcatcacttatttgcattatcaccaccttagggaaggccactgtcatctctcaacctggatgactgaaacgacttcctcactgtccgttgcctatctgtggttttcctccattcattctccatgatactaccagagtgtctctccaaaatgtcactcctctgcttaaaacccttcagtggctctccattgccttcaggatgaggtccctaatccttagcttagccaataagatttttaggatttcacccctgtgggctccttcattgtcattcctgtaagaagcatgcttccaatggctaggcatgaattgccactttctaccgcttccctagttactgttaaatgatccttcttgactcaacctagctgtcatttcttccagagggtatcctgatccttccaaattctaggttgggtgttattcttatagccctatcatttcactttccacctatactagaatctccttcaggcagaatctgaatcttattcactgtcaagtccctggttagtaatatctagattgtaataatatgaataaataaatgaggtcagaatttt

SEQ ID NO: 68053 - DNA, 501 bp, Homo sapiens
tctatctatctatctatctatctatctatctatctatctatctagtgttcaatatcattttgattttattactcaaagttgacttttttcttctgggtcctggcctattctctgagaaactgaggaatttagatgcttgaaaaggcaaaaatcttaggataaacttcattttatatgcatggcacagtgagtggatttctattaaatcacaataaacagggttaaggtggctgaatccaggaacgtggcaccaacccatcactcttcacctgcctgacactacttgtatagcaagggtttattttgcatcatatttctttggctctctcatcttaattatccaaataggagaatcaagtaaatggtggagacatyaagaagttcagaggaaagggggagttgctggactcatgaaatcttttaagagagtctacattatcttccaaattaaatataactttgcaaagatatttgtgaaccttcacaatatgacttcaatca

SEQ ID NO: 68054 - DNA, 1081 bp, Homo sapiens
ctgatccttctcagtgcctcaaactagaccctattcagaaatattataacaagttagtgtgagtttattttggtgtaaaaaaaatttgaagtccatgcacagttttttcataatacacattttccatgaactttttgaagccccctcataaataattcaaaaatacatttgggaaaatttgagaaattatgtagggcctggtggtaattgggcatttggactggcagggtcatgtggtggctcaatgagaagccagaaagcaactctttcccattttctgggtgggggctccagcccctgagtggggataaggaggaaagcagcccttcatggaagctggctcaggagttcacccaggcttcctggagaaggggacagaagaggatgtctccttcccatgaactccacatttgagttcactggaaacataggctctgggaatggaggggaagagggcagaggaaaggctggcagctgaggtggggtataaagggaggggagtgtcagaggaggctgcgtccacgcctggaggtcagagggcaaatgcccccaatcacgctccatctgggttatcagctgcttgaggatccatgtccagaaactcggggaatcactgtgtccgttttccttgcctcgggactgtgcctcttgtctggagatgatgaggtttctttcagcctcccatgctctccaccaatgatcatgagtttccattcgagacacagaatctggctttgagaataagamacagttccctccagcttttcttcaagagcctcaagtcaccttctgtaactccagatcacaagctggacccatccagggcagcaggcactcctgggctttgacctcctctgtctcgaggtgaaactcggtgagggttttacattccactgaactactgctggactgcagtggcacgtccctgatctctgcacagaatgtctttcatcccctggttaaacaagtctgtcaaaaacaagagaactttcaccacacgcataccatgacaccctcaccacctcccagggtgatccaggccgagcaaaacttgtgctcacctgcttctgcctcaagctcc

SEQ ID NO: 68055 - DNA, 1081 bp, Homo sapiens
ctgatccttctcagtgcctcaaactagaccctattcagaaatattataacaagttagtgtgagtttattttggtgtaaaaaaaatttgaagtccatgcacagttttttcataatacacattttccatgaactttttgaagccccctcataaataattcaaaaatacatttgggaaaatttgagaaattatgtagggcctggtggtaattgggcatttggactggcagggtcatgtggtggctcaatgagaagccagaaagcaactctttcccattttctgggtgggggctccagcccctgagtggggataaggaggaaagcagcccttcatggaagctggctcaggagttcacccaggcttcctggagaaggggacagaagaggatgtctccttcccatgaactccacatttgagttcactggaaacataggctctgggaatggaggggaagagggcagaggaaaggctggcagctgaggtggggtataaagggaggggagtgtcagaggaggctgcgtccacgcctggaggtcagagggcaaatgcccccaatcacgctccatctgggttatcagctgcttgaggatccatgtccagaaactcggggaatcactgtgtccgttttccttgcctcgggactgtgcctcttgtctggagatgatgaggtttctttcagcctcccatgctctccaccaatgatcatgagtttccattcgagacacagaatctggctttgagaataagaaacagttccctccagcttttyttcaagagcctcaagtcaccttctgtaactccagatcacaagctggacccatccagggcagcaggcactcctgggctttgacctcctctgtctcgaggtgaaactcggtgagggttttacattccactgaactactgctggactgcagtggcacgtccctgatctctgcacagaatgtctttcatcccctggttaaacaagtctgtcaaaaacaagagaactttcaccacacgcataccatgacaccctcaccacctcccagggtgatccaggccgagcaaaacttgtgctcacctgcttctgcctcaagctcc

SEQ ID NO: 68056 - DNA, 1081 bp, Homo sapiens
ctgatccttctcagtgcctcaaactagaccctattcagaaatattataacaagttagtgtgagtttattttggtgtaaaaaaaatttgaagtccatgcacagttttttcataatacacattttccatgaactttttgaagccccctcataaataattcaaaaatacatttgggaaaatttgagaaattatgtagggcctggtggtaattgggcatttggactggcagggtcatgtggtggctcaatgagaagccagaaagcaactctttcccattttctgggtgggggctccagcccctgagtggggataaggaggaaagcagcccttcatggaagctggctcaggagttcacccaggcttcctggagaaggggacagaagaggatgtctccttcccatgaactccacatttgagttcactggaaacataggctctgggaatggaggggaagagggcagaggaaaggctggcagctgaggtggggtataaagggaggggagtgtcagaggaggctgcgtccacgcctggaggtcagagggcaaatgcccccaatcacgctccatctgggttatcagctgcttgaggatccatgtccagaaactcggggaatcactgtgtccgttttccttgcctcgggactgtgcctcttgtctggagatgatgaggtttctttcagcctcccatgctctccaccaatgatcatgagtttccattcgagacacagaatctggctttgagaataagaaacagttccctccagcttttcttcaagagcctcaagtcaccttctgtaactccagatcacaagctggacccatccagggcagcaggcactcctgggctttgacctcctctgtctcgaggtgaarctcggtgagggttttacattccactgaactactgctggactgcagtggcacgtccctgatctctgcacagaatgtctttcatcccctggttaaacaagtctgtcaaaaacaagagaactttcaccacacgcataccatgacaccctcaccacctcccagggtgatccaggccgagcaaaacttgtgctcacctgcttctgcctcaagctcc

SEQ ID NO: 68057 - DNA, 1081 bp, Homo sapiens
ctgatccttctcagtgcctcaaactagaccctattcagaaatattataacaagttagtgtgagtttattttggtgtaaaaaaaatttgaagtccatgcacagttttttcataatacacattttccatgaactttttgaagccccctcataaataattcaaaaatacatttgggaaaatttgagaaattatgtagggcctggtggtaattgggcatttggactggcagggtcatgtggtggctcaatgagaagccagaaagcaactctttcccattttctgggtgggggctccagcccctgagtggggataaggaggaaagcagcccttcatggaagctggctcaggagttcacccaggcttcctggagaaggggacagaagaggatgtctccttcccatgaactccacatttgagttcactggaaacataggctctgggaatggaggggaagagggcagaggaaaggctggcagctgaggtggggtataaagggaggggagtgtcagaggaggctgcgtccacgcctggaggtcagagggcaaatgcccccaatcacgctccatctgggttatcagctgcttgaggatccatgtccagaaactcggggaatcactgtgtccgttttccttgcctcgggactgtgcctcttgtctggagatgatgaggtttctttcagcctcccatgctctccaccaatgatcatgagtttccattcgagacacagaatctggctttgagaataagaaacagttccctccagcttttcttcaagagcctcaagtcaccttctgtaactccagatcacaagctggacccatccagggcagcaggcactcctgggctttgacctcctctgtctcgaggtgaaactcrgtgagggttttacattccactgaactactgctggactgcagtggcacgtccctgatctctgcacagaatgtctttcatcccctggttaaacaagtctgtcaaaaacaagagaactttcaccacacgcataccatgacaccctcaccacctcccagggtgatccaggccgagcaaaacttgtgctcacctgcttctgcctcaagctcc

SEQ ID NO: 68058 - DNA, 611 bp, Homo sapiens
agaaacagaaatgagatcaaaacgaattaaaatgtcttagaaactgtgaaggctttgatgcaaaaatccaaaaacaaaaaaaaatggcttctttcctttcttttaagagaggagcagaaatatacaattaaagatgagatcaaacagaaaaccaaagacatagaagagaactaagttcagagctgctttgtagagctcagtgctagaggtggagagagctggccatgcctgctgggaggggcggggcagcccaggaagtgggagtggggtcggcctggtgggggtcgggaggtggggccctgaagctgctgctgggctacttttcgcccaagggtgaagatggaacagccctgggttgtctatacaggtcgaggcctccacctcatcccaccccacttactctcccgaggagggcatggataccatgccagggggcctgaagagggttgcagagccctggaggaggccagggccaggggctgccacgggaagtggaaggcagcggsccccactcctcccagagaggcttctgggaagcctgcacagagcctgggagtccagggctgcccctcctgctggagaatacactgttcagaactaaaggaacagcg

SEQ ID NO: 68059 - DNA, 475 bp, Homo sapiens
ttttatttttaacttgaaaccatattgagatatcccattagtttgctttcctactgacccacrtaactgttaggcacagtgcaggctattgaccagtgtcagctacaaaggatcagtatctgtgccctgcaggttgttgtatacggtagggccccgccaccctgctctgcagtggaacacagaaggtcaggcattctctcagatgcaaataacctgatgtgggtatcatggactaggagtagttttagtagacaatgaatactgctatctaatgacctccagaaacaagggctaccaaatctggatctgaaataatcattttaatggaaatcccccaaatttagggagatttataggaaataatgataaacaataaatcatttagttactttgggtgcacacttcacaaccagttttaacagggcttattgctcaaaattagatggaccgcaggtatgtgtgtgtgtgcacatgc

SEQ ID NO: 68060 - DNA, 1254 bp, Homo sapiens
cacttcaaggacagttataagataacgctgttcgagaagttgaaaccaaaggaataggctccagacaccccacctcaggagcaagggtgaaggaaaagaaaaaaaaaaggacaaatatctgtatttagccagttcttgttttttcttttgatgcagctagaaggccaccagctatgcaaggccacaagttatgccaagtcatcagttatgctatagattatgtgacctgtcattatatgattaactgcctttgttttgcttctgtagattgcctataaaaatcctgctcagtctttgttcaaggctcagctttttggatgtgaatccactgagccagtgcacaccttaaaataaataccctcctatattcacccatactggtctctctagtcctctgtgaccygtaacggtataaatccttatagtcacagtgctatgctcttaacaggtgctttaaaaaaacagctctgtggaatgattgacatttacatctctgagcagctgagcctggcaagacctaccaaagggcaagcaggatccttatatcttgcagaatatcttgctaaggagagctcaggaggcagaacagatggacacacctcaaattcattctctgatatgacccgtgctacaccaagcacctactctgtgccaagccctgcattgaaggcaagtatgagacagcagacaaggccagatgaccttggaaagccccaagtcctatgggggcaacaggtataaataaacaagcattgacatccataaagaattccaacctttgagagtaactgtgtgtgatgatgtgttcataattttgattgtggaaattattacacagtatatacatatagcaaatcacattatataccttgaatacatacaatttttatttgtcaattataccttaatgaagctggggaaaaaagctttcttatttgggttgatacatcatcttcagagtgtgagcaatagaattattgccataacattattattaataattaatgaaaatatttagttatttaaagaactacaacctttgagagcccggtaccagatggagacagcattgggtgtgatttatggaaggtgcttgggagcatcttcctgggagattgggagcatcatggagggtggcttgtcagctgagactgcagggatttggaggacccgcatgtgaagaaggaagggagagtgaatgggtagggaaggattcaagtgaaaggctccaaggaacatcatgttaaacactga

SEQ ID NO: 68061 - DNA, 641 bp, Homo sapiens
cctttccaaaatatgtggggyttccttttttttttttttgctgtgattttcttttctgctatgaggtaagtgattaaccttcagaatatccgccgtaatcccagaagtgaaaactcattgatccaacattaatatgtgctttgtgcaattttgaatgttctttggcaaagtcaattccataattcatcacagtcccatctctgttgttaactgtgttgagcaaaaacgcccccaccctcacccagtgttgcccttgatctaatattctaagtgtcagaggttccatattttaatagaaaatgtgccctggctgtgaggtagtggagagtgaacgtcactcattacctacagggacaattctcaatgaaggccttaaatgatgctcaattaagctggttctcatgtggcctctgtgtcttcgacagctgctgaatcctctgatcacacacgatgggacttgtacacttgaaatcaaacatatttttaaaacttctgttgttgagaattcccacctcatttttccatggacaaaattattctttatgtcatagtgcacttaaaatttggtattacctagaagttaaagaaatatgataaccgtgccaaactgctatctctaggtaagattattccgtcagaaa

SEQ ID NO: 68062 - DNA, 641 bp, Homo sapiens
cctttccaaaatatgtggggcttccttttttttttttttgctgtgattttcttttctgctatraggtaagtgattaaccttcagaatatccgccgtaatcccagaagtgaaaactcattgatccaacattaatatgtgctttgtgcaattttgaatgttctttggcaaagtcaattccataattcatcacagtcccatctctgttgttaactgtgttgagcaaaaacgcccccaccctcacccagtgttgcccttgatctaatattctaagtgtcagaggttccatattttaatagaaaatgtgccctggctgtgaggtagtggagagtgaacgtcactcattacctacagggacaattctcaatgaaggccttaaatgatgctcaattaagctggttctcatgtggcctctgtgtcttcgacagctgctgaatcctctgatcacacacgatgggacttgtacacttgaaatcaaacatatttttaaaacttctgttgttgagaattcccacctcatttttccatggacaaaattattctttatgtcatagtgcacttaaaatttggtattacctagaagttaaagaaatatgataaccgtgccaaactgctatctctaggtaagattattccgtcagaaa

SEQ ID NO: 68063 - DNA, 641 bp, Homo sapiens
cctttccaaaatatgtggggcttccttttttttttttttgctgtgattttcttttctgctatgaggtaagtgattaaccttcagaatatccgccgtaatcccagaagtgaaaactcattgatccaacattaatatgtgctttgtgcaattttgaatgttctttggcaaagtcaattccataattcatcacagtcccatctctgttgttaactgtgttgagcaaaaacgcccccaccctcacccagtgttgcccttgatctaatattctaagtgtcagaggttccatattttaatagaaaatgtgccctggctgtgaggtagtggagagtgaacgtcactcattacctacagggacaattctcaatgaaggccttaaatgatgctcaattaagctggttctcrtgtggcctctgtgtcttcgacagctgctgaatcctctgatcacacacgatgggacttgtacacttgaaatcaaacatatttttaaaacttctgttgttgagaattcccacctcatttttccatggacaaaattattctttatgtcatagtgcacttaaaatttggtattacctagaagttaaagaaatatgataaccgtgccaaactgctatctctaggtaagattattccgtcagaaa

SEQ ID NO: 68064 - DNA, 641 bp, Homo sapiens
cctttccaaaatatgtggggcttccttttttttttttttgctgtgattttcttttctgctatgaggtaagtgattaaccttcagaatatccgccgtaatcccagaagtgaaaactcattgatccaacattaatatgtgctttgtgcaattttgaatgttctttggcaaagtcaattccataattcatcacagtcccatctctgttgttaactgtgttgagcaaaaacgcccccaccctcacccagtgttgcccttgatctaatattctaagtgtcagaggttccatattttaatagaaaatgtgccctggctgtgaggtagtggagagtgaacgtcactcattacctacagggacaattctcaatgaaggccttaaatgatgctcaattaagctggttctcatgtggcctctgtgtcttcgacagctgctgaatcctctgatcacacacgatgggacttgtacacttgaaatcaaacatatttttaaaacttctgttgttgagaattcccacctcatttttccatggacaaaattattctttatgtcatagtgcacttaaaatttggtattacctagaagttaaagaaatrtgataaccgtgccaaactgctatctctaggtaagattattccgtcagaaa

SEQ ID NO: 68065 - DNA, 907 bp, Homo sapiens
tgcatggattttgtctgcttcctaatatacctgagtcctaaaacctgtgaaactatagaaaaccattttaatatttctttgtcttcattttccaattgaaacatgaagagaaaaaattctgcccctattttttaacttcacaaggatgttttagagtgtcctgatgacagattattataattatttttaacatgtcagtgagcaatacattacaacagaaaacttaatgtaagctacagaatgaatcattaaaattactaaaagtagtgcaatgctttacacaaaattttcttacaagtattatttcatttaattctccaaatagtccataaggcgataattatcttcattttgcagataagtaaactgaggctcagtgaggataactggctaatcctggatttcaaactaaggaatgtggaagagaaaactaaaataataatattaattgaatattatgagaagagccaagcagatggtttttgaatggtcaagaattgtgaagggtctgatattttaccctacttacaagctaacaagttagcctgctacagttctatgaatgctggtagaatatgagtctcttgggtcagagacaaaagatagtttattacagcaatagcagtagcyagaatgtcagcatttgcactggttccccaagctccaattcccacaaagtgacataaagaggctcaggtgacatctgcacatggagtaggctgtattacagaagaaaaaaaactgaagttagtgaaaccaagccttttaaaatgaacactaatagagcctattctttgctccagagggagatactgtctccatctttcaaggctgtttactataggaatactgaagaaatagccgggaacaaaagcggtcagtgcttaactctcaagacatgcagaaa

SEQ ID NO: 68066 - DNA, 764 bp, Homo sapiens
cttccttacatcttatacaaaaatcaattcaagatggattaaagatttaaacgttagacctaaaaccataaaaaccctagaagaaaacctaggcattaccattcaggacataggcrtgggcaaggacttcatgtccagaacaccaaaagcaatggcaacaaaagacaaaattgacaaatgggatctaattaaactaaagagcttctgcacagcaaaagaaactaccattagagtgaacaggcaacctacaacatgggagaaaattttcgcaacctactcatctgacaaagggctaatatccagaatctacaatgaactcaaacaaatttacaagaaaaaaacaaacaaccccatcaaaaagtgggcgaaggacatgaacagacacttctcaaaagaagacatttatgcagccaaaaaacacatgaagaaatgctcatcatcactggccatcagagaaatgcaaatcaaaaccactatgagatatcatcccttcccccttcttttcaatgatgcctttaaaaataaggacatacactacatccagggctgaacaggcaaaaataaggataaattatagcagaagggacctaagagataaggatgaactttctgattaaaagggtaattaaacattgttacagcctctgagcagaggatcagtcagtcaaacatgcttattttgtcatattgtgggaatcaagcaaggactgagtgtgccatttggggcaggagtgggagaggaacacttcctaaagaaatagaac

SEQ ID NO: 68067 - DNA, 830 bp, Homo sapiens
gtttgtccatcagttaatgacaaaagcaagaccttgagcatcttttcattattgagtccagcaaagaatatcaatataatacagccttcagaattatttctaccatttggtgaaaatagaaaagttaattataaaaaaagaaatcacaaaggggattacaaattcgacttcaaaaggtaaaatttcatgttatttttacccattggataggaaaaaaattatctagtagataatttgctcacaagttaaaccaattatctagtggtttcgaattttctatttgatcccacttcaatagtttgtctctgggaaagattccaattcagtctggagcactgttttttccatgggaaaatatrtaaaagaatattcccatgtattctctaatatactaattaagtgtcaccatttagactataaacttatttcagaatttaattgacttgtggttaaagaagatgaaagtattttgttttaaagaagtatgtctttcaagcaatttttccaataccagtatctgtacaattagtatcaaaggggttaacttggacttataacccaagcatattttttaatttcctgggattctaaaaattgttacaagcattagcattttggttttaagttttactttcagctaagcaccatgaacaccttgtataagtttctctttttggtgtctgtaatgattgctaacattatgctgattgaaacttgtgtgagagaagtagtaactgctctacactttttggtaggacatttgcatgttagaggatgagtgataaaatggactaaaattcagaggccttctacctcagtgaaatttctag

SEQ ID NO: 68068 - DNA, 830 bp, Homo sapiens
gtttgtccatcagttaatgacaaaagcaagaccttgagcatcttttcattattgagtccagcaaagaatatcaatataatacagccttcagaattatttctaccatttggtgaaaatagaaaagttaattataaaaaaagaaatcacaaaggggattacaaattcgacttcaaaaggtaaaatttcatgttatttttacccattggataggaaaaaaattatctagtagataatttgctcacaagttaaaccaattatctagtggtttcgaattttctatttgatcccacttcaatagtttgtctctgggaaagattccaattcagtctggagcactgttttttccatgggaaaatatgtaaaagaatattcccatgtattctctaatatactaattaagtgtcaccatttagactataaacttatttcagaatttaattgacttgtggttaaagaagatgaaagtattttgttttaaagaagtatgtctttcaagcaatttttccaataccagtatctgtacaattagtatcaaaggggttaacttggacttataacccaagcatattttttaatttcctgggattctaaaaattgttacaagcattagcattttggttttaagttttactttcagctaagcaccatgaacaccttgtataagtttctcwttttggtgtctgtaatgattgctaacattatgctgattgaaacttgtgtgagagaagtagtaactgctctacactttttggtaggacatttgcatgttagaggatgagtgataaaatggactaaaattcagaggccttctacctcagtgaaatttctag

SEQ ID NO: 68069 - DNA, 821 bp, Homo sapiens
atccaagaaaaaatttaaaaagtaatagcaaaatttttggatatcatatcctaatttcatttacatttagttggctttctttaaaaccatgagctttgctgacatagatgtttatggggtaatgttagccttatatcatataaaaatcactattttttagttactatagtatattatatctctctcttcccagtagactatgaggaggtctacattgatgttaggtaccatgatktttattcatctttgtatttcccccaagactttgcacaagacctagcacatgctaacatgtgcctaccactaatttaaaaatgcaataaaatataggtaatgtggttaacaaatttttaaaaacctagaaccaagaggaccacttatttgattaactaactaaaataaaatacaaagaggtcctagaatgtcatggaatgatgaaaaaatcttgtaagatgaaatgttgttaaataaagttctgtcatttaggaaatattgagtaagtatggagaagtatgtgtttagaaatcaaaattctgtaaataagaaaaacttttattcattacgagaaagaatatcctaataaatttttagagattggtcaagacaatttattataggtttctttatgttgcgaacattcccttaacctcttcctgcctgtttcccactctactccttccaaactcagtctaagtttaaaatcactcatcttaaattcagcatcactttctcagcagttttctatctgaggccagttttcctattaaaaataagaaattagttaagtaataatatacttgcatagcatttcacagattaca

SEQ ID NO: 68070 - DNA, 584 bp, Homo sapiens
tgaaaacacatattccatctgagcatgaatttatttaaccatccaaatacatcatcatggaattctgatcagtgaaattgagtatatttggttaaataatgaaattttcttcatcacacatgtagttttgaaygcttaccaggtcagtcaggcttcctgcttagtaccctgtgctccctcctatagaggtacaatacaatttgggactttcccaggtaaaatttttcctcttctggcatatttacctttactacatttttatagtttttcacagtgttataatcatttgccatcacattttttacttgggaagcacacatttgtatgtctcatattaaggattcagtcttcttggaattacattttcaaagtcattattggaaatgtaatttttagtaagcaaactatttgctttcctgtataactgaaattatgactcattcagtggagtgctcagagcttgctcaatttaagagaattttattatgaaaacataaatctctttaaaaaaccatggcatgtttctcccctaacccccaagcagttagttcaagtagagaccctctagaaaacagcaccttgtg

SEQ ID NO: 68071 - DNA, 584 bp, Homo sapiens
tgaaaacacatattccatctgagcatgaatttatttaaccatccaaatacatcatcatggaattctgatcagtgaaattgagtatatttggttaaataatgaaattttcttcatcacacatgtagttttgaatgcttaccaggtcagtcaggcttcctgcttagtaccctgtgctccctcmtatagaggtacaatacaatttgggactttcccaggtaaaatttttcctcttctggcatatttacctttactacatttttatagtttttcacagtgttataatcatttgccatcacattttttacttgggaagcacacatttgtatgtctcatattaaggattcagtcttcttggaattacattttcaaagtcattattggaaatgtaatttttagtaagcaaactatttgctttcctgtataactgaaattatgactcattcagtggagtgctcagagcttgctcaatttaagagaattttattatgaaaacataaatctctttaaaaaaccatggcatgtttctcccctaacccccaagcagttagttcaagtagagaccctctagaaaacagcaccttgtg

SEQ ID NO: 68072 - DNA, 584 bp, Homo sapiens
tgaaaacacatattccatctgagcatgaatttatttaaccatccaaatacatcatcatggaattctgatcagtgaaattgagtatatttggttaaataatgaaattttcttcatcacacatgtagttttgaatgcttaccaggtcagtcaggcttcctgcttagtaccctgtgctccctcctatagaggtayaatacaatttgggactttcccaggtaaaatttttcctcttctggcatatttacctttactacatttttatagtttttcacagtgttataatcatttgccatcacattttttacttgggaagcacacatttgtatgtctcatattaaggattcagtcttcttggaattacattttcaaagtcattattggaaatgtaatttttagtaagcaaactatttgctttcctgtataactgaaattatgactcattcagtggagtgctcagagcttgctcaatttaagagaattttattatgaaaacataaatctctttaaaaaaccatggcatgtttctcccctaacccccaagcagttagttcaagtagagaccctctagaaaacagcaccttgtg

SEQ ID NO: 68073 - DNA, 513 bp, Homo sapiens
tagttagtaattttagcaatacctagattgtttacttttaagactatgaagttattttgttttactttgttttgtctccaggtggatccgatattgaatatctggacttctataagcctgtcgtgtggttctggatccttgtagggcttgcttactttgctgctgtcctgagcatgattggagattggctccgagtgatatctaaaaagacaaaagaagaggtgagaattaagaagtgtgcaaaaaacttctatttagttaattcaataaaggttattttaaattatttttatgtttacrtttaaaatatttaaacattttaaaatgttaatattttctatttggcatgaatttgctgtattaggctatgagcaaatatatgagttgtaatttattcacttagaaaatgtttctgtgccaattgctgtctcagaactgagggtaatttctaatgaaaaaggatgtaactagaaacattttcttcattatttctttttttttttgttttctttc

SEQ ID NO: 68074 - DNA, 838 bp, Homo sapiens
gcctttgggacttttttctctctagttttcaatagtttaattaagtgtgtttggatgtggatttctttgaggttatcttatttagggtttctctgaacttcttgaacctgtatgtttataagtttcactaatttgagaaagtttttggcaattatttctttattattttctgcacagttttcctctctttctaggactctgatgacacaaaatttagatattctacaattgtcccgtatgtctctgagagcactgtttattttttgatcatctgtatttattgaccatactggataacttctattgatctactttcaagttcactgactttcctttttcatctccacttttctaatgagctcataccttgaaggttatgttattgttgttatttcttattcatccttggtttttggggcatttttaaatagttgcttacraaacccttgtaataatagttacaacatctatgttacttcagtcttggcaaatattgatggttttttcacatcaggtgtttttctgattcttcacattacaagtaattttggattatatcttgatattttgtatataatgttatgaggttctgcttcttccttaaattctgtggagactgatatttctagtttagaagtcaatcaacccagttggaatcaggctataagttctgacaagctttttttgtgttgtgtttgcaataatagttttcaaaatctttactttgctgtttgaatgtggtctgcatgtaacatacacagtggccagtctgggacctgggcagtgatttagttttagttcaattctaaagcatttttgtgatttttttaagtatgga

SEQ ID NO: 68075 - DNA, 1092 bp, Homo sapiens
ctgtccagggcagtatcaccagcatgtgaacatagtagagtcgcaaaaatctttgttgatttaacagacatagtgcctgaattttcaaaaaggcagagatatgaaatttaaaacaactgccatgatttttattttaaaataaatacttgtgtaataattggcaagataaaagttccagtgaaaagtcaatgaattataaataaaatttagagaaaaaatggagctgtttctcataagatggagaactatatctttgcttctgtggcaatatttttaattgctgcacaacgttaatattgaaaattgaaatccttaaatcattcaaaataaaatagatttatgaccagcaccaattttcacctttgttgattctttttttttaagtgattttcttctcagctacattccctctcattataccttgttcttatttttattggcttattgatcaattcctcaacctagtaaactctattaaggatattagcatatactctggtttaccactgttgatgyacaatgaagcacaaaaaattgctcaataaatgattattgaataaatgaattaaaaatgtgattgtaggcctgaaatacttagtactccattatcagttattattgccatcttaattttacaacattatcaccaattccataaatttttaactgagtagaagtgatttctccttcactgaacatttaagagttttgtgtgactctttttttgaaacacttataatattatacatatttttgtcaaatatatagcaaaacagtgtgttatttctttattggaaagaattcacatgtctatcatgggactttatattggcattagttttttaaaattgctagcaaaatgagaagtggggtgcctttggttagccaaagattctcttccatcttgtcagcataaattcacttatatgggcactctattgcataaactgaaataatatttttcaaaaatattccagaggagagatacagaaggagaattcctcaaggtcaaaaggtacaaggtttcagttagaacgagcagcaagttttagtgtctattgcacagaaaagtgactacagttaataataatg

SEQ ID NO: 68076 - DNA, 993 bp, Homo sapiens
gagcagcagcaagatggggtgacatgctacatacttytacacaaccagatgtcatgagaattcactcactatcacaagaacagcaccaagagaatggtgctaaagcagtcataagaaattgtccccatgatctaatcaactctctccaggccccaactctaacattgggaattacaatttgacatgagatttgggtgagaacacagatccaagccaatctcatttaaaaatgttctgatgggcttacaccggtgtattgggttcagagagaccagatgggatagtagcatagtgtttgttttgaaatatgagggagttaaccatgtgtatgttaagaagaggttttcacattcaggatacatttaagaagccattaaaagagttagcaaactatagctcttggttgaaaccataactttgtctaaatttttgtaaataagatttcattggaacacagctatacccattcttttacatattgtctagtgctgctttcacattgtaatagtagagttgagtggttatagcaatggttatattgcatacaaagactataacacttagaatattcccctttagagaaaacatttgctggttcctcatatagaccagaggattttccaatgaacagcttgcgtggtattaaataatgatgagagtaaaggataacactgccatttttagcctgagcaactagcaaatttgaaatttgaattaccatttactgccatttattgaaacatggatcacttagaatgcaacaaagtcagggtgatgaagactaaaagattcagtagaatataggataattccctgagtatgtctgcaagactacgtgtccacagatcccagtttgagaaacagttgtgtagtaggatatgaggagtaggataggaggagggtaattctaaagttctaaaactaacaaacctttgaccaaattgtttaaactttctgattcttgactttctcacaaataaaatcatatgttca

SEQ ID NO: 68077 - DNA, 993 bp, Homo sapiens
gagcagcagcaagatggggtgacatgctacatacttctacacaaccagatgtcatgagaattcactcactatcacaagaacagcaccaagagaatggtgctaaagcagtcataagaaattgtccccatgatctaatcaactctctccaggccccaactctaacattgggaattacaatttgacatgagatttgggtgagaacacagatccaagccaatctcatttaaaaatgttctgatgggcttacaccggtgtattgggttcagagagaccagatgggatagtagcatagtgtttgttttgaaatatgagggagttaaccatgtgtatgttaagaagaggttttcacattcaggatacatttaagaagccattaaaagagttagcaaactatagctcttggttgaaaccataactttgtctaaatttttgtaaataagatttcattggaacacagctatacccattcttttacatattgtctagtgctgctttcacattgtaatagtagagttgagtggttatagcaatgrttatattgcatacaaagactataacacttagaatattcccctttagagaaaacatttgctggttcctcatatagaccagaggattttccaatgaacagcttgcgtggtattaaataatgatgagagtaaaggataacactgccatttttagcctgagcaactagcaaatttgaaatttgaattaccatttactgccatttattgaaacatggatcacttagaatgcaacaaagtcagggtgatgaagactaaaagattcagtagaatataggataattccctgagtatgtctgcaagactacgtgtccacagatcccagtttgagaaacagttgtgtagtaggatatgaggagtaggataggaggagggtaattctaaagttctaaaactaacaaacctttgaccaaattgtttaaactttctgattcttgactttctcacaaataaaatcatatgttca

SEQ ID NO: 68078 - DNA, 712 bp, Homo sapiens
ctccattcacttgacctgctgtgctgcacccctcttgggagagggagcacacaggtgagtaggtgcaggagcctggacaakcactttggggtgctggcaagagcaaactctgtactggccttgtggcagcatctggggtgtgtctgcaacccctgaagccccagaggaagtgctacagtgctcttttagctttgctgcccatggatggcttaagtgttaacatctcagtggagggtcagtgtgacagccttttgtacccacacttgtggcacctgagttcttgtccggcatccaggaggaatgatgttgcacgaacgaattgaaaatggtaaatcagcagattttattgctgatgaaagtggctctcagtgggagagggagcttaaaatgggttggagcaggaagtccccactccaccatccccagccagacttctctctgaagctaggccatcaagctatcccttggaagtcaagctgcttctctcttatgtccatttgtagtctctgacatccagttgctattctcctcttctgtgtcagctgagtctgggatttttatggacgcaggatggagggtgggggttttggaaaaggcaacattggagccggaaaacacgggtgtatgttctcactttgggccatggtatcaggttttttggcttgagggtggggcccattccgtttacccactctctctttccagtaatttc

SEQ ID NO: 68079 - DNA, 712 bp, Homo sapiens
ctccattcacttgacctgctgtgctgcacccctcttgggagagggagcacacaggtgagtaggtgcaggagcctggacaatcactttggggtgctggcaagagcaaactctgtactggccttgtggcagcatctggggtgtgtctgcaacccctgaagccccagaggaagtgctacagtgctcttttagctttgctgcccatggatggcttaagtgttaacatctcagtggagggtcagtgtgacagccttttgtacccacacttgtggcacctgagttcttgtccggcatccaggaggaatgaygttgcacgaacgaattgaaaatggtaaatcagcagattttattgctgatgaaagtggctctcagtgggagagggagcttaaaatgggttggagcaggaagtccccactccaccatccccagccagacttctctctgaagctaggccatcaagctatcccttggaagtcaagctgcttctctcttatgtccatttgtagtctctgacatccagttgctattctcctcttctgtgtcagctgagtctgggatttttatggacgcaggatggagggtgggggttttggaaaaggcaacattggagccggaaaacacgggtgtatgttctcactttgggccatggtatcaggttttttggcttgagggtggggcccattccgtttacccactctctctttccagtaatttc

SEQ ID NO: 68080 - DNA, 653 bp, Homo sapiens
gaaacatgattttactttatctgctagaaaataacatgatggatgcctttctctgagttcccacatgccctgcgcaggcctcagtcataatacttgctgatttacttgccagtccccattaccggaatgtctgcatattgaaagtgcttggcatacagaaagtgtgcaataattgctttttgaatgagtagatagtaagctgaccgatccatttggtgggtgacaatggtgatcataatagctttggccaaataaagcaaagcaactctcagggaaagaggctacatsttttaaaaaatattttaaaataacaatagctactgtaatcaaatagtagattttgatgtatttggctttagcagaagtgtaattcgatcggaagtcttgaacaacatagatgatgctgttttatactccaagggccaagctgccaaactcacatgcttcttctcatttctagaaaacagcaataatcaactcccaacaaatcctcaaaaaacagtttttccaaggttaaagcacacacagagatcaggaataaagaaaggatgtttctgtctttcattagtgcactacatttctaaggcacctacaattatattttctagaattcataaaagtattatgctaaatataaaaattgattgcaaatt

SEQ ID NO: 68081 - DNA, 653 bp, Homo sapiens
gaaacatgattttactttatctgctagaaaataacatgatggatgcctttctctgagttcccacatgccctgcgcaggcctcagtcataatacttgctgatttacttgccagtccccattaccggaatgtctgcatattgaaagtgcttggcatacagaaagtgtgcaataattgctttttgaatgagtagatagtaagctgaccgatccatttggtgggtgacaatggtgatcataatagctttggccaaataaagcaaagcaactctcagggaaagaggctacatgttttaaaaaatattttaaaataacaatagctactgtaatcaaatagtagattttgatgtatttggctttagcagaagtgtaattcgatcggaagtcttgaacaacatagatgatgctgttttatactccaagggccaagctgccaarctcacatgcttcttctcatttctagaaaacagcaataatcaactcccaacaaatcctcaaaaaacagtttttccaaggttaaagcacacacagagatcaggaataaagaaaggatgtttctgtctttcattagtgcactacatttctaaggcacctacaattatattttctagaattcataaaagtattatgctaaatataaaaattgattgcaaatt

SEQ ID NO: 68082 - DNA, 653 bp, Homo sapiens
gaaacatgattttactttatctgctagaaaataacatgatggatgcctttctctgagttcccacatgccctgcgcaggcctcagtcataatacttgctgatttacttgccagtccccattaccggaatgtctgcatattgaaagtgcttggcatacagaaagtgtgcaataattgctttttgaatgagtagatagtaagctgaccgatccatttggtgggtgacaatggtgatcataatagctttggccaaataaagcaaagcaactctcagggaaagaggctacatgttttaaaaaatattttaaaataacaatagctactgtaatcaaatagtagattttgatgtatttggctttagcagaagtgtaattcgatcggaagtcttgaacaacatagatgatgctgttttatactccaagggccaagctgccaaactcacatgcttcttctcatttctagaaaacagcaataatcaactcccaacaaatcctcaaaaaacagtttttccaaggttaaagcacacacagagatcaggawtaaagaaaggatgtttctgtctttcattagtgcactacatttctaaggcacctacaattatattttctagaattcataaaagtattatgctaaatataaaaattgattgcaaatt

SEQ ID NO: 68083 - DNA, 1088 bp, Homo sapiens
accacatgttagtggtgaattataaataaattataaaaatgtattcttaaaagtgctaataaaatataaaattctgtgattattatgaaaaaactggactcaaatgaggaaatgcaaaccaatatcacagatattgtaaaaaacaatgataaaaaactgtgattcagaatcacatatctttaatcatgcaattaaagcagtgatcagaaaaaactyatggtagtgatatagaagggctgggctcccagctaaacctgtgaggagtggccagtggcggactgagtgaaataagttactccaaagggggtcaagggaactatcctatctcagtattaaatatatatgtcaataaaaatggacaatgacaataaatttggaaaacaaaataaagagaacaaaggagagaaatcagaatacaaacagaaactaatgaagtagaaaaagaaaaatagctataccataaataaatattggtttaaaaaataaacaaaatagacaatcactagctaatctaatcaaaaaggtaagattgtatatgggaaggggataagaggaaagaacacaaatatacaagataaaaaatgacaaagaaaaataaccattgaaacagagaagatttaagtaatgaaaaagtgaataattttgtagaaaaacataatttgtcaaaactgattccaataaagaaaacagaccaagtactatagaagaaatagagaaagtcaactgttacttctcactctcaaaaaaatcagaaggtcaagatgatttcacaggggaattctacagaaacttccaaatccatgtcatcctatttgtataagaacatagaaaaatgatcttccaaacgtttctgacaaaaacaatgaacattaacaacaaaacttgatgtaaaaaatatttttttcctcaaacctaaagactattttcacttacaaatgttgatgcaatagtctaaaataaatattaacactgccaaacagcatattagcaaaataataattcattaggacaaaagagagtttatataagaaaggcaggataaatcaagaattaaaaatctgcaaatatactagacctgtggagaaaag

SEQ ID NO: 68084 - DNA, 991 bp, Homo sapiens
tttgggatggagttagtaggcagaggataaaaatgtattgagaacaccgttagtgaggcttataggaaagtgagtaaatactgttggaaactgcaggaaaggggacctctgttacttagaggtggagattttgtcaacaccgttgtctgcggtgacttggaaaggagaaaatctgccaagtgaactcaatgatctatgtcaggagatgtgaaggcagaataatgaaataccatttggcttctttcattgcctgtagaaaaatgtgagatgaactggcaaaaaaaaaaaaaaatttaaaaaattaagaaatggcttctggtcagaaatcaaaaacagtgcactttcgggacgatatctaaagatggggtaaaaaatgtgaccgcaggccgggtgcggtggctcacgcctgtaatctcaggactttgggagcctgaggcagggggatcacctgaggtcagsagttcgagaccagtctggcctacatggtgaaaccccgtctctactaaaaatacaaaaattagctgggagtggtggctcatacctgtagtcccagcttctcgggaggctgaggcaagagaatcacttgaacctgggaggcggaggttgcagtgagctgagatcacgccactgcactccagcctggtgacagagtgagactcagtctcaaaaaaaaaaaaaaaaaaagcctgacttcagaatcctttattaagacctcagaaagatttaagagttacacaagtaatccaaaatagagaaaagtttatccagaagagacttgtagctgcggcttttgcctaacagagcaaactccagcaagattcatagaaaacccacaacattttaaggtaattggtctggtcaaactgcctccagcttaaatgaaaagggacaggacagagaaagtacaacatcaaaagagacttttaaacccctatatatatataatattataatatttattatataataatgcattatataatatatatta

SEQ ID NO: 68085 - DNA, 558 bp, Homo sapiens
aaagatattcaatcaatatctttttaaaatctacacaacactgagtcacaacacaaggcagattttaatcatctttctctcaaggatcatttctcttctgccaatctgattctcttatttgacaatcttccttttagccaagacctacttttaatatattttgggatttatttcaatatccacaattaagagactgcagacaaacacaaaacagcaactcttgagactctaaaaatggaaacccaaaycatcttccccctatagatagtacaggcaggagactgactgtgtctctgtcctatccggcaggtccttgaaacctctgaattattcaaaacgacaagtgcatatggcggtataaagcagcattttattacattcacggggacaactggaggattaaaataagagtttggaatctgggatggagaggagacaagcagtacacactggtcagataaccacacaaacaaaattaggcaagatgccagtcagtatcctaattctacaggcactaagcttagatatgtaagtttagtaaaaagtaaacccaattaa

SEQ ID NO: 68086 - DNA, 608 bp, Homo sapiens
tcccctgacagttatgggaagttacatgcaaagcagaaagatttaggaacagagtgattatcaaaatctgcaaatagaagaccagagagtttgtagataaggccccctattgtttcttacttcttgtcttattttattactttattttattttattttatattgttttgagacggagtttcgctcttgttgcccaggctggagtgcaaaggtgcaatctcagctcactgcaacctccacctccccggttcaagcgattctcctacctcagcctcccaagtagctgggattacaggcgtgtgccaccatgcccggctaattttctatttttagtagagacgagggtttcaccatgttggtctggctgtttttgaactcctgacctcaggtgatccacctgcctcggcctcccaaagtgctgggattacaggcatgagccaccgcgcccagcctttacttcttattttaaatcaggaactaggaattctagttcctactagatayatacaagaggagcaggaatacatgtggatatatagaagaataggaattcaaacatgacttctatttgaaaagtcattcagaataagacatgtattcacaaagaga

SEQ ID NO: 68087 - DNA, 1923 bp, Homo sapiens
gatcccctatgttgtttttaattctaaagtaacttttcccagcttcaggtattcaagatcttccatactttgcctcaactgatcttggcccctgttgtccttcccacacttactattctggctcactcactcacctgctgctcctttcacctgctctctcctcagctgtgccaaggactggcccaggctgcaaccctgcctggaaggcccttccagcacatccatgcatgtactgactatggcctatgtgccaggcacaatgccaagtttgacacaccttttcttgcttatactacatccttcagggagcttcctatcccctttctccacccaactatcctccccaacaaaaagtaacttaaaatagctttccattaatagaaataactttccctttctccactcccactgcatttagtgaatattttctcatgttcatctttgcatgactggtgtttatgtatgcattttatttcccctatcgtaattcgaagctcactgggagcatctgagattcatctgcattccccagttgtcaggcacaatccttgtgcacagcagctgatcaaagtttatcagatacatgcttgcttatatttataccaacatgaaaaagaagatggcatattttgtgtttgcttgttccatctttgaagttctcctttcctctcttactttagakagcagacatggttagcaagagaatgagagacagtttcatgtagtagtgaatatcctgaataccagagctaaatttctctgagcttaagtcctatctctgcctcttgtaacactgatgagtaactttatttttattattacttttttattttttttgagatgggagtctcgctttcttgcccaggctggagtgcagtggcacaatctcaactcactgcaacccccccatcctgggttcaagcaattctcgtgtctcagatgggatttcaccatgttggccaggctggtcacaaactcctgacctcaagtgatccacctgcctcggcctcccagagtgccgggacaggtatgagccactgcgcccagcctgatgagtgactttaattgctctatgcttcagtcatctcagctaacacagggattatcttaatctatggtataaaggtaaagattaaattacacaaaaactctcagaacagtgactaacacaaaataaactctcagtgaatattagctattgtgatgaggataatgactttggaatagagtttgaatgaaatttcacgtaagagagggaagggtctgttttcttactccacgtaggaatacagttgtaaagggcattaatgtgttaattatactatcagttgcaaggaaaacagatctaaatcttaatttagctacagaaggtatttgatattttttatgttatttgcaatcgagcaacataagtatcttagggtttaaaggacaatgcattcactttaataaaactcttattaagcatgcttatttttctaggacagaaacactaaaacaactcattgcattcaaactgatgggaagattttattggcagacgaacccacattcactaggcccactgtaacacagacaagaaggcttgctgctcaggccgctgtggatgacctcaccactctagccacgccctctattgtctactctccccctgcacagccagtgacttgtacctcttcttatcacccttcccgggctgagaaagccaaggtaccagaaaaacatatgtttggcaaaaaggtccatgtcacttacattctgcacatgataaaaggccaggggacttcctctgccattgtttttgaggggctccgtggagaatgcttcatcatggcgatgcaaaaagcttcataaaaaaaataaaaagactcgtgaacaatgcattaaacggttttatcagaatctctttcaagagcccaatgt

SEQ ID NO: 68088 - DNA, 1208 bp, Homo sapiens
  misc_feature (1)...(1208): n = A,T,C or G
cctagatcacttttgtaaactataatcactgcccccttcaatgacacacactctgctcctgttagaagcaaactccctcttaagtaaacaaagcccagtatgagtccaaaggacaaaaccagaacctgacccataacttctgtttttgcccaatgttctttcataacacaccacagccaatgacagaaaccacagtcgcaccaacatctctcagagacaggaaagtaagagcgaaagagctataaaactgattcactggctgaattcttcctcaagctaaagaggttctcccacagcctcagtgtccttcctcaacccaacaggcagctctttctatccaagacaggaggcatctctagtttcctggaactgagggcaagttctgatataatctgccttgtagccagggaccctccccatatcaggaagttgtctctttcccagaccctacttaatagcccctaatgtgcaactgtctctgtcattggaagcggcttccaaggaactcagaaactttttcgtgggagcacaaagcgggaaggatcccagttagcagaccaagcactgatgctttcatctgctgccaagtgaactggccttgaactaggtctcctaatctttgacatgcatctcctcatctgtcaaaggtcttacctttgacatatttatagactataaaagacttcaaacaacataaaatgctaaatgaaaataaggtatccttattgttgctgctgttattgaatttagcacaagaatttaaaaggacatgagtaaggcagaggggtccttggctggcatttgacagatctccatagtgctccccacagtgcatcttgatgtaaatttatttatatttatcctgctgatgattcattatttcctgaatctcagaattcatgtctttcatcagtttgggagcattctcagaaaaagcaaaaatattgaacattgtccctctcccaatgtctattgtctctttctggtactccagttatatgtatgtttgatcattttataatatcctccatgttattaacktctttttcatattttccatctccttttttttttttttttttttttttnagagacaggaccttactctcttgcccaggctgcagtgcagtggtgtgatcatggctcactgcagcctcgacctcctggtctcaagctgatcctcacaaggaggagcaaagtcatgtcct

SEQ ID NO: 68089 - DNA, 501 bp, Homo sapiens
tcttaaatgacacttgtgtatctcatgttagatcagtcgacagtaattgagctgttggagcatgctctctggataatgcttcagatgacagtcctcatcatagggtgtcatctgatcctttgtgcattccagccccatcctggaagtgttcttctgcattctgcttccctctggagttctacctccaatttggtcctccaaagaaaagagtggaaatatttgtaaatacaatgttccctccaaacgttatattggttattttctaagaatagttttccaaattagatctgcatgtttttccagggcctgagaaaaatgctgtcagaagcaggaagggatcttatgggtcattgactccaacccacatccactaraccacatatttgttaagtaactttccagcttttgcttgaacacttcggtgaccagtaggtcactacacgtctaccttggttgaaccggaatttgttgtcctgtagtttttctaccagtttgtcctca

SEQ ID NO: 68090 - DNA, 730 bp, Homo sapiens
ttttattttttgagacagggtcttgctcttgtagcccaggctggagtgcagtgatgtgatcttggctcactgcaacctccacctcctgggttcaagcaatccttgtgcctcagtctcccaagtagctgggattacagacatgtgccaccacacctggctgatttttatatttttagtaaagacagagtttcaccaagtagtccagtctagtctcgaactcctcgcctcaagtgatcctcctgccttggcctcccaaagtgctgggattacaggygtgagccactgtgcctgacaactatgattgcttatctatgaaaaatgtctagaagaatgcttttgttacgggtagttcactctgggtaatgagaccaaatagttgtgggacatttgaactgtttgaattttttaaatgagaattatattgtttaacctaggggtttttgttcattttgtttgtttgtttaaacatgataaagtaagaggagaaacataagaaagaccagtttacaactacgtcatgtattgctgcttcattcccacattcaaagccaacagccaaatataagaactggtatggaaggaacaatttttttttttttttttttttttttttttttttgagacagagtcttgcctatcaccaggctggagtgcagtgacacaatcttggctcactgcaacctctgcttcctgggttcaagcgattcccctgcctcagcctcccaagtag

SEQ ID NO: 68091 - DNA, 528 bp, Homo sapiens
caaagagtaaaaagaaaatatctcaagttataggagatataactagcagggaggccaaggtggctagagtttgcaaagcagcgtactggaaaggagggagttatacatagagagttccagaaatctgcagattcccctttttgtcttcaactaagtaccaattagcacatgacaatgagaaaactacctgtggctggagaaagaaccattagaaaggattcaaggaaacagtgttggagtttacaaagagcctgggacagttgctaatttccccagcctgagagaaaactcataattcatggggcattgagtagagtactcagaagaatttagcttcagtggtaggacaaaatcatttctagaaaaaaggctgctctggttctgtctaacaaatattaaaarcaagatctgaatgtatcaaagtgtttccaagtaactttaactgtggcccagaaaaaaaagctcaggaataatatttataagaatataaaaatgggccaggcagggtggctcatgcctgtaatccca

SEQ ID NO: 68092 - DNA, 2079 bp, Homo sapiens
catatccaggccctatgtcctactgcgttttcctgaaaatatgcttcctaagagtgggaaagagtgagcacacattcagttggctccttcccttactcttgggtctctagataaacaacagaaatcttccacccaaatgataattctgtgggcatccctttaaattctgaagctcttacctagtcccataatggctcctttcttgcaacatgtgtgtgtatagggagctcaggtgtttagaacatttttactctggggccaacatcagcaattccctattactccccctcctgttgataaatgggcttatctctgtggacagcaattcagggcatcagcatcctatggaattgctataggaagctacattggagtgtggagggaggasatggatgtccgggtagaaagactttctttagttaaaggtggtcccagtaggcatttttaaggttattgctagttacagaactagcaataggttatggctagtaacaaaaatatatatttgcttatgtgtgtatatcttggtttcttttatgtctttgtactgtatatttttgtgtatacacacatacacacatatatatgtttgtggatacacacacacacacacacacacacatatatatatacatagagtgacgatcccttcataacacaacatagggtagagttttgtacgtatgctgttgctttaattgcagagaagaaatactgctaatgtcagcctgcatgatctgcacctaggtgttttctggtaggcagggagcagaattgaggcactggggtggaagccttttcctcatttttagcatcttaagtgtggtgaccacattcagaagggtagtacttggcactgccaggagaggaaaattaggattcatctgcttctcttaccagccactgtgagaatgctgaattttacatttggtcaattagacttgttaatataattctgtctgaagtactcaaaagatatgtgctcaaggtaaaatcaccatctgggttagcataataggtattcctaaatatcacgcctactaaacagagcatgatctggtctttctgagggagaaccagaaacaggaatttctcatgagatgatggtggttgtttctatataatttcttgaaaataatctaaccttcaaacaccacctaaacacacctacaaatgcttacaaatgtataggttctttcaccataggtccgtggaattactacttaattcatcaggctctgcagattttcccttcaagatatgttaagtcctattttttttccatttcatgctttgtactactacaataaccttttattttattaaaatgtaatttaacataactataactttataggacaagttgttaggactagttacagaagaagaatcaaacatgaatttttaaaatacaagaatgcttggctcgttttggattaaaaactgcatctcctgagcttgttgacattgctggaaaatttcctctttcattcattagcataactctctgagacgaatttctgtactttttttgatatgtttacttttgaattgtgttaaaatatacataacttaaaatttaccattgtaaccattttgaagtgtacagttcagtgctattactgctgtgcagccatcaccacaatctatcttcacaacttattttatcttgtaaaactgaaattttgtactcattaaacaacagctatgcgttcctccctctcccagcccctggctactatcactctactttctgtctctcatgaatttgactactctaagtgccttatataagtggaatcttagggtatttatcccattgtgaccatcttatttcatttaacgtaacatcttcacagttcatctatgttgtaacatgtcagaattctcttgtcttaataacaatccactgtatgcatatctcacattttatttattcatttatctattgatgggcatttgggttgcttctaccttttggttaatgtgaataatcctgctatgagcatgggtacgtacgtatttgttcaagttcgtgttttcatttcttttggggctatacccaaaagtagaattgct

SEQ ID NO: 68093 - DNA, 2079 bp, Homo sapiens
catatccaggccctatgtcctactgcgttttcctgaaaatatgcttcctaagagtgggaaagagtgagcacacattcagttggctccttcccttactcttgggtctctagataaacaacagaaatcttccacccaaatgataattctgtgggcatccctttaaattctgaagctcttacctagtcccataatggctcctttcttgcaacatgtgtgtgtatagggagctcaggtgtttagaacatttttactctggggccaacatcagcaattccctattactccccctcctgttgataaatgggcttatctctgtggacagcaattcagggcatcagcatcctatggaattgctataggaagctacattggagtgtggagggaggacatggatgtcygggtagaaagactttctttagttaaaggtggtcccagtaggcatttttaaggttattgctagttacagaactagcaataggttatggctagtaacaaaaatatatatttgcttatgtgtgtatatcttggtttcttttatgtctttgtactgtatatttttgtgtatacacacatacacacatatatatgtttgtggatacacacacacacacacacacacacatatatatatacatagagtgacgatcccttcataacacaacatagggtagagttttgtacgtatgctgttgctttaattgcagagaagaaatactgctaatgtcagcctgcatgatctgcacctaggtgttttctggtaggcagggagcagaattgaggcactggggtggaagccttttcctcatttttagcatcttaagtgtggtgaccacattcagaagggtagtacttggcactgccaggagaggaaaattaggattcatctgcttctcttaccagccactgtgagaatgctgaattttacatttggtcaattagacttgttaatataattctgtctgaagtactcaaaagatatgtgctcaaggtaaaatcaccatctgggttagcataataggtattcctaaatatcacgcctactaaacagagcatgatctggtctttctgagggagaaccagaaacaggaatttctcatgagatgatggtggttgtttctatataatttcttgaaaataatctaaccttcaaacaccacctaaacacacctacaaatgcttacaaatgtataggttctttcaccataggtccgtggaattactacttaattcatcaggctctgcagattttcccttcaagatatgttaagtcctattttttttccatttcatgctttgtactactacaataaccttttattttattaaaatgtaatttaacataactataactttataggacaagttgttaggactagttacagaagaagaatcaaacatgaatttttaaaatacaagaatgcttggctcgttttggattaaaaactgcatctcctgagcttgttgacattgctggaaaatttcctctttcattcattagcataactctctgagacgaatttctgtactttttttgatatgtttacttttgaattgtgttaaaatatacataacttaaaatttaccattgtaaccattttgaagtgtacagttcagtgctattactgctgtgcagccatcaccacaatctatcttcacaacttattttatcttgtaaaactgaaattttgtactcattaaacaacagctatgcgttcctccctctcccagcccctggctactatcactctactttctgtctctcatgaatttgactactctaagtgccttatataagtggaatcttagggtatttatcccattgtgaccatcttatttcatttaacgtaacatcttcacagttcatctatgttgtaacatgtcagaattctcttgtcttaataacaatccactgtatgcatatctcacattttatttattcatttatctattgatgggcatttgggttgcttctaccttttggttaatgtgaataatcctgctatgagcatgggtacgtacgtatttgttcaagttcgtgttttcatttcttttggggctatacccaaaagtagaattgct

SEQ ID NO: 68094 - DNA, 2079 bp, Homo sapiens
catatccaggccctatgtcctactgcgttttcctgaaaatatgcttcctaagagtgggaaagagtgagcacacattcagttggctccttcccttactcttgggtctctagataaacaacagaaatcttccacccaaatgataattctgtgggcatccctttaaattctgaagctcttacctagtcccataatggctcctttcttgcaacatgtgtgtgtatagggagctcaggtgtttagaacatttttactctggggccaacatcagcaattccctattactccccctcctgttgataaatgggcttatctctgtggacagcaattcagggcatcagcatcctatggaattgctataggaagctacattggagtgtggagggaggacatggatgtccgggtagaaagactttctttagttaaaggtggtcccagtaggcatttttaaggttattgctagttacagaactagcaataggttatggctagtaacaaaaatatatatttgcttatgtgtgtatatcttggtttcttttatgtctttgtactgtatatttttgtgtatacacacatacacacatatatatgtttgtggatacacacacacacacacacacacacatatatatatacatagagtgacgatcccttcataacacaacatagggtagagttttgtacgtatgctgttgctttaattgcagagaagaaatactgctaatgtcagcctgcatgatctgcacctaggtgttttctggtaggcagggagcagaattgaggcactggggtggaagccttttcctcatttttagcatcttaagtgtggtgaccacattcagaagggtagtacttggcactgccaggagaggaaaattaggattcatctgcttctcttaccagccactgtgagaatgctgaattttacatttggtcaattagacttgttaatataattctgtctgaagtactcaaaagatatgtgctcaaggtaaaatcaccatctgggttagcataataggtattcctaaatatcacgcctactaaacagagcatgatctggtctttctgagggagaaccagaaacaggaatttctcatgagatgatggtggttgtttctatataatttcttgaaaataatctaaccttcaaacaccacctaaacacacctacaaatgcttacaaatgtataggttctttcaccataggtccgtggaattactacttaattcatcaggctctgcagattttcccttcaagatatgttaagtcctattttttttccatttcatgctttgtactactacaataaccttttattttattaaaatgtaatttaacataactataactttataggacaagttgttaggactagttacagaagaagaatcaaacatgaatttttaaaatacaagaatgcttggctcgttttggattaaaaactgcatctcctgagcttgttgacattgctggaaaatttcctctttcattcattagcataactctctgagacgaatttctgtactttttttgatatgtttacttttgaattgtgttaaaatatacataacttaaaatttaccattgtaaccattttgaagtgtacagttcagtgctattactgctgtgcagccatcaccacaatctatcttcacaacttattttatcttgtaaaactgaaattttgtactcattaaacaacagctatgcgttcctccctctcccagcccctggctactatcactctactttctgtctctcatgaatttgactactctaagtgccttatataagtggaatcttagggtatttatcccattgtgaccatcttatttcatttaacgtaacatcttcacagttcatctatgttgtaacatgtcagaattctctygtcttaataacaatccactgtatgcatatctcacattttatttattcatttatctattgatgggcatttgggttgcttctaccttttggttaatgtgaataatcctgctatgagcatgggtacgtacgtatttgttcaagttcgtgttttcatttcttttggggctatacccaaaagtagaattgct

SEQ ID NO: 68095 - DNA, 2079 bp, Homo sapiens
catatccaggccctatgtcctactgcgttttcctgaaaatatgcttcctaagagtgggaaagagtgagcacacattcagttggctccttcccttactcttgggtctctagataaacaacagaaatcttccacccaaatgataattctgtgggcatccctttaaattctgaagctcttacctagtcccataatggctcctttcttgcaacatgtgtgtgtatagggagctcaggtgtttagaacatttttactctggggccaacatcagcaattccctattactccccctcctgttgataaatgggcttatctctgtggacagcaattcagggcatcagcatcctatggaattgctataggaagctacattggagtgtggagggaggacatggatgtccgggtagaaagactttctttagttaaaggtggtcccagtaggcatttttaaggttattgctagttacagaactagcaataggttatggctagtaacaaaaatatatatttgcttatgtgtgtatatcttggtttcttttatgtctttgtactgtatatttttgtgtatacacacatacacacatatatatgtttgtggatacacacacacacacacacacacacatatatatatacatagagtgacgatcccttcataacacaacatagggtagagttttgtacgtatgctgttgctttaattgcagagaagaaatactgctaatgtcagcctgcatgatctgcacctaggtgttttctggtaggcagggagcagaattgaggcactggggtggaagccttttcctcatttttagcatcttaagtgtggtgaccacattcagaagggtagtacttggcactgccaggagaggaaaattaggattcatctgcttctcttaccagccactgtgagaatgctgaattttacatttggtcaattagacttgttaatataattctgtctgaagtactcaaaagatatgtgctcaaggtaaaatcaccatctgggttagcataataggtattcctaaatatcacgcctactaaacagagcatgatctggtctttctgagggagaaccagaaacaggaatttctcatgagatgatggtggttgtttctatataatttcttgaaaataatctaaccttcaaacaccacctaaacacacctacaaatgcttacaaatgtataggttctttcaccataggtccgtggaattactacttaattcatcaggctctgcagattttcccttcaagatatgttaagtcctattttttttccatttcatgctttgtactactacaataaccttttattttattaaaatgtaatttaacataactataactttataggacaagttgttaggactagttacagaagaagaatcaaacatgaatttttaaaatacaagaatgcttggctcgttttggattaaaaactgcatctcctgagcttgttgacattgctggaaaatttcctctttcattcattagcataactctctgagacgaatttctgtactttttttgatatgtttacttttgaattgtgttaaaatatacataacttaaaatttaccattgtaaccattttgaagtgtacagttcagtgctattactgctgtgcagccatcaccacaatctatcttcacaacttattttatcttgtaaaactgaaattttgtactcattaaacaacagctatgcgttcctccctctcccagcccctggctactatcactctactttctgtctctcatgaatttgactactctaagtgccttatataagtggaatcttagggtatttatcccattgtgaccatcttatttcatttaacgtaacatcttcacagttcatctatgttgtaacatgtcagaattctcttgtcttaataacaatccactgtatgcatatctcacattttatttattcatttatctattgatgggcatttgggttgcttctaccttttggttaatgtgaataatcctgctatgagcatgggtacrtacgtatttgttcaagttcgtgttttcatttcttttggggctatacccaaaagtagaattgct

SEQ ID NO: 68096 - DNA, 1100 bp, Homo sapiens
gtagcatcagagcaggaaatacataacatctagttagtctaccgatagtgatgctaatattggcaccctctagaatagggctgtgatagtctgacccttccattttctagttacattttttaaatcacatgatagaaacctgattgtaaggtgttattcatggtgccagcctacaaatattgggtgccagttcagtcattcatctgataattttagtatcagttgataattttagacaagytactttttgtcatctctgtacctctcttacttgactataagatgcctctctgaggctgggcacagtggcttatgtctgtaatcccagcacttgggaggtggaggcaggtggatcacctgaggtcaggagtttgagaccagcctgaccaacatgctgaaaccctgtctctactaaaaatacagaaattagccaggcgtcgtggtgtattcctgtaatctcagctactcaggaggcttagggaggagaatcgcttgaacctgggaggcagaggttgcagtgagccaagattgtgccattgtactccagcatgggtgacagagcaaaactccgactcaaaaaataaataaataaataaataaataaaataaaaatgcctctctgagaaaaggagaggattgttaatacagctcatcaggcaccatgcaaatagtagtttgtaaaaacgtattagtcttgggagaaaccacacacacgaatagtgtgcaagctgactaggtgtcaatttgttattattaagaatcacagcaataatttttttaaaaaaagcataattctaaatgaatgctaaccatgcctagggactgtgctaggtgttttacatgtattaacctatttaatctcatcacaacgacactttgagatgagtactggttttatcatccccatttgtagataagagcatgggcaaagggtttaagcaatttactgaagattatacagctggttgatgggagaaatgggattcaagcctaggcagttggcttcccctgatctcttcacatcatcatgctctgctgccttgcatgtaggaaggtggcagtcatattggtaagctaaagaaccagtgcttgtgcaggga

SEQ ID NO: 68097 - DNA, 728 bp, Homo sapiens
cccatcagcctcttccaaaacactgggattgcaggcatgagccacctcacccagccctttgagtagtttttgactggcttgagttgaaaggactaaattccccttaaactattagtgccatttatgttaattattagtttcctttaagcattttaaactgcagtgataaacttaatacacttaattagctttctaagcaactcaaatatctgatctggcttaagttaataaccctaacaaacaaaaccttccaacgattttaaagttttataaatctggttaaattgggagttatgaatattgtgactstcaagttctatcaagtattctaatagtgtttaaaagttagtaaacttataacattcagtttaccacttaaaagtctcaaaatcacacttataaaattgtagtcggcaggttgcggagcacgaaagaggtgcagggccaaggtgacctgggttgtgggttgacagagactatgtcttatgtcttacaaagagctggattgtgtacataggacagtgggagggtggtgggggcggagagagagaggcggcaggtaattctgttttacatgcaaatatcgagaagtgtctagtaggcagctggagatatgggactgaaggttgaggtaaagatttcattgtcagagagagtatagggagaggaaagagcaaaggtccaactgagcctaggacattgggagccccacacaggctcatgatgga

SEQ ID NO: 68098 - DNA, 564 bp, Homo sapiens
gaataggagaggaagctcggagttttctagaaactgaaaagaagccagactggaaaagagcaaggcaggtgagagtgtcttaagatcagggctggacaggtgagcgggagccagacacacacacacacacacacacacacacacacacacacacggaatctggggaggagaattatgaatttaaaagtgcctaacactgtgcctaaggcataagaaaatatattattttccctctttctgtacccagcataggtctgtctgtttgactggtctatggagtctgcaacttcatcctggtctccaggagtgtattctgtcctatcggctctgatatttatttctaacctaattttccagcttgtcccctgcgtctgtgacarctcatagtttttggtatgattacccatctgtgtgatggagtagctcattcattcaattatatattcaacaaatgcttattgaacaccacttttgtgcagaagtccattcctcattgagcttacagtatagcaaaggcgtacggtacatgcataaaaattataatggtgaacatgatagtggagg

SEQ ID NO: 68099 - DNA, 978 bp, Homo sapiens
tgctttaaaaatagatcagttagaaggcaaaattgtacgagtggatattattaatgatactgaatttccatgtatgtgaactagcattgagtggcactttgataacactcatctaatcctatttagtgccctttctctcttttgctgtcaaagcctaggtacgggttcgtgctttgtctcataacctcttggttaaaatgtaacatctgggccgggcgtggtggctcacgcctgtaatcccaacactttgggaggctgaggtgggcagatcaagaggtcaagagatggagaaccttgtctcttgacatggtaaaaccccctcgctactaaaaatacaaaaattagccaggtgtggtggcaggygcctgtaatcccagctactcaggaggctgaggtaggagaatcgcttgaacccgggaggtggaggttgcagggagccgagatcacgccactgcactgcagcctggcaacagtgcgagactccgtcaaaaaaaaaaaaaaagtgacatctgtacaagaaaggtaggaccacatagccagctgaacactgatgcaggtatggatgaagtaaggaaaaagaaagaagtaaagttggtcttctggaagtccaaaggcaatgccagcttgtaattctgcacagggtgttactggggttcaaatataaatagtttttctaactcagaaacaaatctaacatattaagtgtttcattgaaggccccaattatgtctagagttttgcagagtttattttaaaatgtatctcgaaaagctggtggtccaaatttttccctagacttacacatgatgagaatctgtctctttatatttagctgcagggcacctaacaagttcttaggcgaaacacattattttgctagtacaagaagaataaatactgtatttggaaagttccagtgttctttaaaatatcgctgtttccatagcaataacataatgtactaaagagtagaatggt

SEQ ID NO: 68100 - DNA, 1021 bp, Homo sapiens
tgtttgcttaatgctcttcaacaagtgttccaggacagtgagttcatcttcttggggtcattttcaatgtcactctaattagtatcattgcagcatatgcaaaaggcaaaagaatatggaggagcaaatgtgggggatttgtggtcagacatggaagcagcgcccatcaggtccactcctgacctgattgcactagggaaaacatcgtcagagagctattcataattgcaagggatgctgggaaaaagactgtagttaggcagccatatgtccagccattgttctatttctstcagagaagagaaggatttttttcttgagtcctctaagagagattgccagagcacacacaggttgtaaggaaattgcctgctttttgagtatatgagccaactatagtttctagttttgatttttttctcttattaaattagtgagtggaaataaatagcttgcaatatggtttccagttctcaatgttatagaattacataatattagcttgttagcaaaataccaccttgaataaatatcttccccaattgaaaaattataggatacaaaaatagaggataagtaccatgtggatttaccttttgtttttcatttgcaaatgtgaataatgttgtcaggttgtgacaaacgactgtcatatttattcattcaaacatttaaaaaacagatagaatagtttaataaagctaatttttctaatatggaaaattctgaaattactctgaaatgtgataataattttatttttgacctttttttcactaggcttaaactataatagggttcaaacatcagaagtcaaacaggaaagaagaattagggtcagggtttaaagggttaacctttcataccttgataaagaaaatgtgaagcttcaagatatatatcatttttattgatacttacatagaagaagataggcaatttttttaaatttctctctggggaagcacaatatttgtttgaaagaactatttgggtaatctgcctcaggtagagggcaaga

SEQ ID NO: 68101 - DNA, 567 bp, Homo sapiens
agccaagatggacaaaatattctgaagtcattaaatgtaaatttttaaaataacaagcctgggtgaggatgcaaagctaaaggattcctcacccactgaacgtaagagctaaattgggaacagtcactttggaaaatagttaggaattccccagtgtagaaaggcagtaaaatcaaacaccacaagatcatgatgtaaaggcacagaattggctttggtgaggaaacagagggtcagcaaaacgggcatggttcatggttagctcagtctcccgcctaaaagtgtgagagccagggtactactgtacataccagggggctctactccagaggcaggaccccatgagaatggcttgaccagtgggtagggagggaggggagttgattggtgtaagcagtstggatttagatgccaactattcagagttgtctggcaacaccactgctagcatcctgtgacctcgtgtgaaactgggtggggaaaggggtagttcctaagcccagctctcttggtgcttggcaacctgagccccccgagcatttatcagacaatcatatttgcctcttc

SEQ ID NO: 68102 - DNA, 698 bp, Homo sapiens
ttaggaggtctcagaaatagtcaaagttagaggaagaaaatatgatggtgattgccagggactggaggaaggagaaatgtggaatttttgctcattgagtatagttttagttacataagatgaataagttctagagaacagctgtaagacattgtgcctaaagttaaaaatakggtattgagaactttaacagacattaaaaggatagatcttatgttaaatgttcttaccataaacacacacacaccacaagaaaagttttggaatggacagatatgtttagtgtcttgattgtggcaatggcatcacatgtgcatgaatatgtccaaacgcatcaaaatgtatacattaaatatgtgcagttttatgtaaatcagttatatttcaataaagccttaaaaatgctatggcatacttactagatttggaagttttctatgcagcaagaattctttgacatttatttgtcttaaccattacttaaagggtatgccacagtcatatttataaagtttctctctagttttatttttctaatgagaattaagaatttagtatttgctaaggggcctcccaaatttattctattttaaaattttctattaaatatgaatcctaagatgttgaataaggcttggactatctgaagtacttgttactcctatgtctataagatttacttctggtatgattttctg

SEQ ID NO: 68103 - DNA, 698 bp, Homo sapiens
ttaggaggtctcagaaatagtcaaagttagaggaagaaaatatgatggtgattgccagggactggaggaaggagaaatgtggaatttttgctcattgagtatagttttagttacataagatgaataagttctagagaacagctgtaagacattgtgcctaaagttaaaaatagggtattgagaactttaacagacattaaaaggatagawcttatgttaaatgttcttaccataaacacacacacaccacaagaaaagttttggaatggacagatatgtttagtgtcttgattgtggcaatggcatcacatgtgcatgaatatgtccaaacgcatcaaaatgtatacattaaatatgtgcagttttatgtaaatcagttatatttcaataaagccttaaaaatgctatggcatacttactagatttggaagttttctatgcagcaagaattctttgacatttatttgtcttaaccattacttaaagggtatgccacagtcatatttataaagtttctctctagttttatttttctaatgagaattaagaatttagtatttgctaaggggcctcccaaatttattctattttaaaattttctattaaatatgaatcctaagatgttgaataaggcttggactatctgaagtacttgttactcctatgtctataagatttacttctggtatgattttctg

SEQ ID NO: 68104 - DNA, 680 bp, Homo sapiens
accggcaatgggtaattgctgagcaatgtgacccagagatcaatatttcatcagaaaaactgttattctccttggcggccttccctcaaagtcccattgcatcaatgatcacttttttcctgagtgttgtgtttatctttgtacctgggaaggagcgggagtgggctttggctcctgggcccagtggtgttgcggtgcctgaatggcatgcactgtgatacagcaccagaaggtgccccacgcccggggaggcagctgggtcattttctgagccatcaagctgccrgtgcttgtttgccgcctcctctgttttgtaccaactcttcgagtgacccttttgacccatcctgtgcctgtaacttcagatccgagacagccagaaagcttcttttcatttgtcccagtttatcgctatccaatatttgtggtgaattgaggggaaaaggccacgtgaagaatgtttacagtgggaaatggaaagaagatactgtcttctgcctgggcacactcagcagcttgggcaagtcaggcattgggcgggatggattgaattgcattacccatttgctgagcgtgagaagtaggtcctgaaacgtcctccacagtcagtcccagggtaagtgcctgatctctccctcctggggaggcaaggggagccagggtcagggtggaagctgagg

SEQ ID NO: 68105 - DNA, 680 bp, Homo sapiens
accggcaatgggtaattgctgagcaatgtgacccagagatcaatatttcatcagaaaaactgttattctccttggcggccttccctcaaagtcccattgcatcaatgatcacttttttcctgagtgttgtgtttatctttgtacctgggaaggagcgggagtgggctttggctcctgggcccagtggtgttgcggtgcctgaatggcatgcactgtgatacagcaccagaaggtgccccacgcccggggaggcagctgggtcattttctgagccatcaagctgccagtgcttgtttgccgcctcctctgttttgtaccaactcttcgagtgacccttttgacccatcctgtgcctgtaacttcagatccgagacagccagaaagcttcttttcatttgtcccagtttatckctatccaatatttgtggtgaattgaggggaaaaggccacgtgaagaatgtttacagtgggaaatggaaagaagatactgtcttctgcctgggcacactcagcagcttgggcaagtcaggcattgggcgggatggattgaattgcattacccatttgctgagcgtgagaagtaggtcctgaaacgtcctccacagtcagtcccagggtaagtgcctgatctctccctcctggggaggcaaggggagccagggtcagggtggaagctgagg

SEQ ID NO: 68106 - DNA, 680 bp, Homo sapiens
accggcaatgggtaattgctgagcaatgtgacccagagatcaatatttcatcagaaaaactgttattctccttggcggccttccctcaaagtcccattgcatcaatgatcacttttttcctgagtgttgtgtttatctttgtacctgggaaggagcgggagtgggctttggctcctgggcccagtggtgttgcggtgcctgaatggcatgcactgtgatacagcaccagaaggtgccccacgcccggggaggcagctgggtcattttctgagccatcaagctgccagtgcttgtttgccgcctcctctgttttgtaccaactcttcgagtgacccttttgacccatcctgtgcctgtaacttcagatccgagacagccagaaagcttcttttcatttgtcccagtttatcgctatccaatatttgtggtgaattgaggggaaaaggccacgtgaagaatgtttacagtgggaaatggaaagaagatactgtcttctgcctgggcacrctcagcagcttgggcaagtcaggcattgggcgggatggattgaattgcattacccatttgctgagcgtgagaagtaggtcctgaaacgtcctccacagtcagtcccagggtaagtgcctgatctctccctcctggggaggcaaggggagccagggtcagggtggaagctgagg

SEQ ID NO: 68107 - DNA, 680 bp, Homo sapiens
accggcaatgggtaattgctgagcaatgtgacccagagatcaatatttcatcagaaaaactgttattctccttggcggccttccctcaaagtcccattgcatcaatgatcacttttttcctgagtgttgtgtttatctttgtacctgggaaggagcgggagtgggctttggctcctgggcccagtggtgttgcggtgcctgaatggcatgcactgtgatacagcaccagaaggtgccccacgcccggggaggcagctgggtcattttctgagccatcaagctgccagtgcttgtttgccgcctcctctgttttgtaccaactcttcgagtgacccttttgacccatcctgtgcctgtaacttcagatccgagacagccagaaagcttcttttcatttgtcccagtttatcgctatccaatatttgtggtgaattgaggggaaaaggccacgtgaagaatgtttacagtgggaaatggaaagaagatactgtcttctgcctgggcacactcagcagcttgggcaagtcaggcattgggcgggatggattgaattgcattacccatttgctgagcgtgagaagtaggtcctgaaacgtcctccacagtcastcccagggtaagtgcctgatctctccctcctggggaggcaaggggagccagggtcagggtggaagctgagg

SEQ ID NO: 68108 - DNA, 866 bp, Homo sapiens
tgctattgtaagtagagttttcccaagtggtatatattaaatgttgaacttggctttggttttctccaaaacagttccatttttttttttttttttttttgagacagagtttcactcttattgcccaggctgaagtgcagtggtgcgatcttggctcactgcaacctccacctcccgggtccaagcaattatcctgcctcagcctcctgagtagctgggactacaggcacacgccaccatgccaggctaatttttgtatttttagtagagacggggtttcaccatgttggccaggctggtcttgaactcttgacctcaggtgatccgcctgcctcggtctcccaaagttctgggattacaggcgtgagccaccatgcccggccaaaagagctactattaagccagtagtgcatcatacaatctctaactagaacttcttacaattgagaaatccaatcactcatcatatccgcaggttccacatgggtgcattgaaacaagcttgggttgaaaatgctgggaaggaaattaaaaaaacaagaaaaataatacaaataaaaggaatacagcataacaactatttacaaagcatttacattgcattaggtattataagtaatctagagatttaaagtatataggaggatttgcatatgttacatgcaaatgctacamcattttatatcagagacttaactatctgtgaattttggtatcccaggggtgtcctgaaaccaaggcttcacggatatggagagacaaccgtgctctaataatgtaagttgccaaatattgaatcttattgttttccaggcaatgtaccaagggcttttagtgaatcatcttacttacccttcatcttactt

SEQ ID NO: 68109 - DNA, 638 bp, Homo sapiens
cccacacttttcaagaaagggaagttttctttgagtactagctcatttcatggaactgtcagggcaaagggggattttgttcactgcctgttaatactcttatacttgctctgggaatgtttgttttctttgtttctttctctttccttccttcctttctttctttctttctttctttctttctttctttctttctttctctttctttctttctttctttctttctttctttctttctttctttctttctttctttctttctttctttctttcttgtcatggtcttaccctgtcactgaggctggagtgcagtggtgcaatcatagctcactgtacttgaactcacttgaactcctggactcaagcaatccttccactccagcctcccaagtagctgggactacaagcatgcaccactatgcctggtgcgcgygcgcacgcacgcttgtgtgtatagagatgagatctcactatgttgcccaggctgctatcaaactcctggcctcaagcaattctcccacttcggcctcccaaagtgctgggattacaggtctctgtcaccacacctggctggaatgttcagtttctgattcacacacatcaagatagaagaggaattagctcagaaaggaccaatg

SEQ ID NO: 68110 - DNA, 1095 bp, Homo sapiens
gcataataaaaaataagcatcttaataacaaagaagaatccaaatgatttgaaccaatattagaaaaggttggctttatttcctcatgaattttatgtaattattttctttcacctatatttctatggaaactcttgaacaaattataatggtgccaaactttgaaatcctagtaaaagtttactaggatttaccacttttgattaatggctccatcatccactgccagtgaggattctgcagacgttttttatcaggaacagctggttcttgaacacaggtgcaggctgtttctgccacatgatctaagaygtattaataaaagaatgatggtttaactcttcctgttgctatcgaaaagtcaattcaacgctttcttgaaagagaaaggataaatggctcataattttgttcatgttgttcaatgtcttgttttatctcagaattctcatactttcaagcacagaattatttggtgtgctgaaagaaaattttgatacagttaaaatgatttttgtggaaaatggtcagaatattcaaataaaggagcctcaaatttgtaaccattcttaattaaacagatctaggagtaaaaacatttatctatgtgaagtgcaaaccatttttaacagaaaatatcaatttaaatttttaagacaagaagcactctgctctccttgtgatttagcaattcataccatctttactaatgacttatatctttatttttatcatcatttgcttgggtaaattacttttgatagcccaatatggaaatggagagattttgtactaataaatatatacagtcatacaatgattaataaagcatcaaatatagaactaaggaataagaaaatgctaattaaaaatgcataggaactctacgttattgtaaatatgttatgttgggcaaaataatgtttgccataaaatgtaaggtaaaaggaaagttccattttgagcagcaaaataaagaaaaaaaccaatggagcttatacactcaggttcaattctcagctctactacttaccacatagtggttgagtgattatttaactctgaaaatccctacaattctcatctgaacttggg

SEQ ID NO: 68111 - DNA, 980 bp, Homo sapiens
tatatagcaatataaaatgaactattgacacgtgacaaaatgggtgaattttaaaaaacatgttaaatgaaaagtgattcaatctagataaaattttaaaataggtaaaattactctctggtgatacaaataagattagtggttttctttaaggtcagagtttgactgcaaaagggaatgagaaatttctaggttagtagaaatgtcctatgtctcaagtgtagtattggttgcatgagtgtagacgtttgtcaaaactcatgccactgtatacttaagagctgtatattttacaatatttaaattaaatctaaatttaaaaagacaaataatttgtttaatataagaataaatcctgtcataattgtggcccctgtattagtcatagttctcaagagaaacagaaccagcaggatatattaacatgtagttatatagaaagagatttattttgatgggttggcttatgtgattatggaggctgataaatcccatgagctgccatctgggagccagagatccgggaaagctagcaatgtagttctagtccaaaccagaggcctgaaacccaggacaatcagtgttataagtcycagtccagtttcaagacctgagaaccaggaatactgaagcctgagggaaggtaaaaatcagaggtcccagctcaagcagacagagcaaatttcccctgcctccattttttcttctatttaggctttcattggattggatgaggcccgcctgtattggtgagggcagatctccactcagtctaccaactcaaatgccagtctctttcagaaacaccctcacagacacacccaggcatcctatagcccagtcaagttgacacataaaattaaccattacagcccctagatttcagagtatacatgaaaataaatgtaaggttcttaaaatttttatttaggagttttctattgtttaaatagcattttccatgttatgtgagtattgat

SEQ ID NO: 68112 - DNA, 980 bp, Homo sapiens
tatatagcaatataaaatgaactattgacacgtgacaaaatgggtgaattttaaaaaacatgttaaatgaaaagtgattcaatctagataaaattttaaaataggtaaaattactctctggtgatacaaataagattagtggttttctttaaggtcagagtttgactgcaaaagggaatgagaaatttctaggttagtagaaatgtcctatgtctcaagtgtagtattggttgcatgagtgtagacgtttgtcaaaactcatgccactgtatacttaagagctgtatattttacaatatttaaattaaatctaaatttaaaaagacaaataatttgtttaatataagaataaatcctgtcataattgtggcccctgtattagtcatagttctcaagagaaacagaaccagcaggatatattaacatgtagttatatagaaagagatttattttgatgggttggcttatgtgattatggaggctgataaatcccatgagctgccatctgggagccagagatccgggaaagctagcaatgtagttctagtccaaaccagaggcctgaaacccaggacaatcagtgttataagtcccagtccagtttcaagacctgagaaccaggaatactgaagcctgagggaaggtaaaaatcagaggtcccagctcaagcagacagagcamatttcccctgcctccattttttcttctatttaggctttcattggattggatgaggcccgcctgtattggtgagggcagatctccactcagtctaccaactcaaatgccagtctctttcagaaacaccctcacagacacacccaggcatcctatagcccagtcaagttgacacataaaattaaccattacagcccctagatttcagagtatacatgaaaataaatgtaaggttcttaaaatttttatttaggagttttctattgtttaaatagcattttccatgttatgtgagtattgat

SEQ ID NO: 68113 - DNA, 1681 bp, Homo sapiens
cccagcactttggggggccaagtcagatggattgcctcaagaaaaaaaaaaaagtttcaagatttaattattgtaaaataatgctgctgtgaatatccttatatgctgcatttatgtatttcttttttttaatttttattcatttatttatttttttttttgagacagagtctcactgtgtcacccaggctggagtgcagtggtgtaatctcagttcactgcaacctccacctcccaagttcaagcaattctcctgcctcagcctcccaagtagctgggattataggcatgtaccaccacgcccagctaatgtttgtatttttaatagagatggggttttaccatgttggccagactggtctcgaactcctgacctcaggtgatccacccacctcgacctcccaaagtgctgggattacaggtgtgagccactgcacctggccttatgtatttatttagagaatacttatgtgcacatacacatatatgataaattgctagatatgaaattgctaagtcagagtacatatgcattttaattttgatagatattggcaaatattaacaaattaccccccaaagaggtaatgactctttcaattctacctttatgtgaactttatatcaacaaggagattgttatcctccttcctctatttctttcacagtatctgaggaaggcttttatacaggataacactaaagatgcagagacgcagtgagggactgcagcacctgggcagactgaggccacctcagtctgggtttggctgggagaaggggaagaaatggaatcacctccaatggatcactagactttatgactccatttaacaatcccctcccttcctactccatatacggaaacattccagtcaccccagtaccttgaacgatgtcatcctgccgctggaggatgggtcggggagggcgagtaggctctctgtcagaaaaccctttttcaggggtcctggagccaccactcccctcactaaaggatgggggtaggtttccagcatggacttgacgtagctgttcaaaatcactgagggcggcattcacatcccaattctttcctgtcaggagacaaagcaaaaagcaaactgtgcaaccatagtatagagacacaaagatcacactaactatcctatcaaaaccagtatgcaaatacgcatgcacataatcattcttcttttccttaccctgctttaattttctttataacacttcaatctaacttatcaaatgtctttacttacttatttgttgtctatttcctaagtaagtgccatgaaaatagaaactttgtccctctgaactaaaagagcccttaaagatctagtaaccgaaaattaaaacttccttttacagataaagtctagagaagtaaattatttgcccaaagtcacagctagttcacaccagacccagcaggactcaggcccaggtctcctaattctgagatccaaagaggttcttagcctacatgtactctagtgtgtcctaaaccactaaacctgcatataagatcatgggcttgtgcattttctagtgaaagagttcatagctgtcatcagcttttcaaaggaaacagtgtttcccccaaatttaagaatcaccattctactaamgaaatgaccttaaatgataagatttgtcataatggatttttctgatgctt

SEQ ID NO: 68114 - DNA, 579 bp, Homo sapiens
gggattcaccactggtattactattttgaagtcgtgtgactcagatacgtttccctgctgacacaatcatagacttcccccagctttctgactgcatccaattgagagcatattcccgcttccttagatgctcycccaaatcaccacaaagcccaaatcgtataataggttctttcttaacacccttttaccgaggcagcccattcttcctcaaggtgtgtgttcttcctcactgcaaccagaaataattccaacttggttaactacagatgtgttcctggaggtctctgcctgaaggacattgacacttgagaagcttttatttcttgaagagtctatcgaaatcccaaaactctcaggatctggtgacactgaggagacagatattttaccattagtgtttcccttcacccattttttgggaaagatagtacagttgaccctggaacaacacaagtttgaactctgtgcatacatttatacacgggtttttttctacatatattggaaaaagttttggatatttgcaacaatttaaaaaacacagataaactgtatagcctagaaatattgaaaaat

SEQ ID NO: 68115 - DNA, 786 bp, Homo sapiens
ttaggggatgaatcccatcagccctaggaaaggggaagggcgaagaaaccttttaataaaaaaagaggcacaatatgattttattagagaagtagaaatgtcagtgttgaagataaacctttcttccattaagctcaaggcaccttcatttgtgatcgcacatttgttatgctcagagacgtgtccttaagtcccagaaatgagagaatgacttttataatccaacatcctcaagagcttccctcttaaaggcttcaagatgacagtgaaaggttcagaaattccccagcacagcatacataaacacatttcatgctgcattttctcatccttaaaaaaatgtgcattgccagacatgctgaatctcaaattgcttatagatatacaattttttcagttggatgaacacctttatgcttaaaaaccctagaagaccctggggggagcaatttcaacatccatgcagagacaatcacagatgattttgcccctcactaactatctctctgatgttgtcaatgggaggaaggatggagttcagcagtgccatttatattatgytagacaaacactggatttatatttctattgtgtggcatcattgtctaacacctaacatggttttcctgtgggaaagtcgagatggggtggtgaaggctggggtggcaagcagagggaaatcagtggattcaatgcatttgagtgcctcttccggacaaggttctcctcgctttctggatttaagagttgctctttgctctctagtgagaaaaaagttgggggtgg

SEQ ID NO: 68116 - DNA, 1120 bp, Homo sapiens
caacctttttggcaccagggatggattttgtggaagacaagagggcaggtggtttcaggatgaactgttccacctcagatcatcaggcgttagattctcataaggagcgtgcaacctagatcccttgcacttcacaatagggcttgtggtcctatgacaatctaataccactgctgatctgggacagagctcaggagctcacaggagcagggctcagggctggggtccctgccgtagagtgattgagagacaggactgccacacatgaaagagagagaaccgttatgtaagtcagcactaaatcgtgtgctcagaattgttgctgcctcaggaattcaggaaacaggaaagatctgtgaggcctggagttgagagagaggccagtgcttcctggagatgggagctagcccagagggatggtgagatttgaacagaaaaaagtgagagagatgggcatttggcaggtgagtgaaggcatgtgagaaagccattagggcgcacttgcaggacagtggtttagggtaaaatgaattgattgggaagctgggagggaaaaggaaaaatgagcagtgaaatgataaagccatagtagaataaacctccagttttccgaggataaaraaatagttttagtctggtctttcatttgtaccctgccttccccctggaagttgtttatttgttgattgagaccgggtcttaccctgtcacccaggctggagtgcagtgccactatcatagctcactggagcctcgaacccctgtgctcaagcaatcctcctgtctcagcctcccaaataactgggactacaagcatgcaccaccactcctggccccctggaagtaattttaggtagctatgaaagttattgtcgaagtgttggagtggaattttggcttagttaaaataattgagaacgggaaggatggatgactttgacattaatttaatttgatgactacaatccatctattaaaatggcattccgctgacttgtttttctttttcctttatccctttgctcttcataatattctcaggactttattgctcagtattggctataatgaaattgtattatcattctacatatcaaagtatttcatagttatccaatgc

SEQ ID NO: 68117 - DNA, 1120 bp, Homo sapiens
caacctttttggcaccagggatggattttgtggaagacaagagggcaggtggtttcaggatgaactgttccacctcagatcatcaggcgttagattctcataaggagcgtgcaacctagatcccttgcacttcacaatagggcttgtggtcctatgacaatctaataccactgctgatctgggacagagctcaggagctcacaggagcagggctcagggctggggtccctgccgtagagtgattgagagacaggactgccacacatgaaagagagagaaccgttatgtaagtcagcactaaatcgtgtgctcagaattgttgctgcctcaggaattcaggaaacaggaaagatctgtgaggcctggagttgagagagaggccagtgcttcctggagatgggagctagcccagagggatggtgagatttgaacagaaaaaagtgagagagatgggcatttggcaggtgagtgaaggcatgtgagaaagccattagggcgcacttgcaggacagtggtttagggtaaaatgaattgattgggaagctgggagggaaaaggaaaaatgagcagtgaaatgataaagccatagtagaataaacctccagttttccgaggataaagaaatagttttagtctggtctttcatttgtaccctgccttccccctggaagttgtttatttgttgattgagaccgggtcttaccctgtcacccaggctggagtgcagtgccactatcatagctcactggagcctcgaacccctgtgctcaagcaatcctcctgtctcagcctcccaaataactgggactacaagcatgcaccaccactcctggccccctggaagtaattttaggtagctatgaaagttattgtcgaagtgttggagtggaattttggcttagttaaaataattgagaacgggaaggatggatgactttgacattaatttaatttgatgactacaatccatctattaaaatggcattccgctgacttgtttttctttttcctttatccctttgctcttcataatattctcaggactttattgctcagtattggctakaatgaaattgtattatcattctacatatcaaagtatttcatagttatccaatgc

SEQ ID NO: 68118 - DNA, 765 bp, Homo sapiens
gggatcccacaacaaaatgcctccatgttatccaatacattggcttttcttaaaaaagaaacattttaattctttcttccatagtagatttagggtaattacgttagatgaaactattttgataaccatctttcttgaggacgcagcacctctgtagctttaaaacctaagttaattagatatctgatgttaacaaaagcttccattaaaaaaaaattctcataagctgcatcccccagactcctgctgtagcagaggagtcaatgctaagtacagcttttatcatsaaactggcatttttgtatagttaatcatagacgtctgctgcctctgagatggagcaggcacccccactctacccccaaggatgaaagacccgtcaacgtggtaaaatccgtgttttttacatgacaatttctgagagttgaggcttacatacactaagatattaactttgcttggcattcaagggctatcaagtttgtggggaaagggcatgtcttggaattataaaggagatagtcttagttaactctaagataaatatccaagtgagcatgaaaggatttattgagttacctggaaatgaccaggcttctagaagtgttcctagcaacggattctcaggaatgtgatacctcctgacaataaacaaataaaatttagaagagactgctttatcatgtataaatccgcccaccccaccccatcccaaacagacaagtacatacatgcatacatgagcacatgcacatgtgtgcacac

SEQ ID NO: 68119 - DNA, 670 bp, Homo sapiens
tttgtttaggccttatcacaagcctattaagcagttattattataaaatacatttaattcaaacaaccgaggcttaagggggttaagtaattgatccaaaatcaaattggaagtatagtgggagaggggagatttgaacctaagcggaatctctaaaacctatatacttttcactataccacacwgggatgactcacaaatcacagaaaaacatgacattagatctgatatgattaattgaacaacatcagcaatttgccattaaatgctaccgattaacatctgtcatattcttgctgagcattttcctaaactgagggttcaggttacgtaactaaaacgagtaatcttccaaaataagtctgtgagtttgaaaaagttctccaattaaattaagtttattttttaacaagttaattttttaaatgagaaatagaaaattctttctctctggcatttgttctttgcttctgcccttagaagcctatcctgtgtatgtaatatttattaatatataacaatgctaccttttacagtatgtacagtccattccccattggtaagcttcttatgtttgcatttggatagctcagctagtttgactgtatgactaagaaatcagttgaattttttggagtgactttatttttgcacccccattccctttcag

SEQ ID NO: 68120 - DNA, 837 bp, Homo sapiens
gcattagttatttgtcctaatgctctccctcccgttaccctccaccccttgacaggccccagtgtgtgatgttcccctccctgtgtccatgtgttctcattgttcaactcccacttacgagtgggaacatgtggtgtttggaacatgaggtgtttggttttctgttcctgtgttagtttactgagaatgatggcttcaaggatgaagctggataaaatgattttgaagtataaatagaagactaaatgattgaaaatattatagaaaattgtggaagaataatgaggtggtactttctgtagtatgtaaacttactttaaagccattgagttataataatatggtattggcatgaaaaagacaaatggtcattggaaccaactagagagtttaggtatagataacgagtatttgttgaaatgacttattgtaggtagaatctgcattttatttcattggtaaagaatggtttgctttaaaaaatgataccagcccgaccaactatcaatgtgtacggaaaaaacagatccctttatcatatcatattataaataaattcccataaattaaaaatgttaatgttaaaaaagtaaaaatcttagaaaaaaaggagaatttcatgtaatctaaatgtaggggagcactttctaaagaaaaaaagaaactcagtagcttaaaaraaaaagatagctatatgtagctagaaacaatctgattgattttctaaggcataaacttcccccccacccaccaaaaaaagttaacatccaaaagatagatctggaaagtacatctgtaacacatactacagacaaatcaatttcaccttaatatgca

SEQ ID NO: 68121 - DNA, 969 bp, Homo sapiens
caaaatactgtttttttttcttttttttttttttttttaatatggaggtttactatattttctcagtagttgggtctatggtatggaagtagccatggttaatatgaaccacttaaaatattgttagtgcttaacattaattcttatttcaaaaaagaaacaattttaggcaaatgaatatgctattttaagtatctgagcatggtttcttaatagcctatcatccaaagcgcattcactttatactattttctggggaggctaacagatttcttctgagctctctagttcttcactgttaggctgaggatcatgctggaaatatagttaactgcagttaggtatacaaatcagtgaaatgttttgttctataaaaaaataaatatttcattgccttttatttcatttttttccaataagttaatacttcacattccatgtagaagwgtgtcccagttttcaaatgcttatctctctttatttatgcactcattcctttgttacccatgtattcaataaatatttattgaaactttattctgttctcagcaatactttgggcactaagttatagtgacaattttaaattgacatgtatcctttcctcttggaacacagtttcctgccagaaaccaagtttattcgaataaatacaaaagtgaatgtaaaaccaacagtattaaaaatgaaaggtatgcggtgatgtgagaacataggaggacatgacctaacctacgagagtaagggagtaggaggaaatatttaaatttagatctaaataattaaaagaagttaactagtaaaaatggcaaatgaccagaaagattgtcccagtacaaaaggatagcatgtgtttgggtgcacatatacagcctgtttgtccatcaatatagaggacttattaataaaagaatgacactaatgtaacactagtgcctcagaacaattatatttactgtcccctgaaat

SEQ ID NO: 68122 - DNA, 695 bp, Homo sapiens
atttggaaagtttcagatactggccattgtaattctaagttatccttggtgtaattcgtccatcagtttcaaacacgtaggtgaggatggatcataatgtttgaacatattgaggtctagagttcctgtggggcaattatctttgcatgccttagaatttgatgatcctttctgttgtttggacatttgatgcttccaaatctcatgttaaaatttgattacgaatgttggaggtggggcttagtaggaggtgtttgggttatgggagaagaaccctcacaaatagcctggtgtcattctctcttgcaagagtgagtgagttctcatccaactctcatgggaactggttgttgaaaagagcacggcacttctctctcttctctctctcctgccttcccctcatcatgtgatatgtacatactagctccccttcacaatatctaccatgagtgaaagcaatccaagtccctcaccataagcagatgctagcaccatgcttcctgtatatcctgcagaatcatgagtcaaaaaaaaaagtccttttcttaataaatgacccagcctcrgatattcctttgtagcaacagaaattgactaagactatcacattatgtatcttataaattctttgagggcaaaaaggaaattctataatcttgtaagaaaattaggaattgtaggtaaagtattttgct

SEQ ID NO: 68123 - DNA, 1567 bp, Homo sapiens
ctctctagatgctctgaaattcattcctgggctaagccaaaatacttagatattaaagaaattttaaaaattaacccattaacttgctgagctttagtttccaaaatgcaaaatgaaggaagactcattcattcaactaacactcagtggacttctatactcaaagcattaggtctacgaaatagactaagacacagtcccacttctcaaagactctgtctgtccacctatatttctaagtatctttatctataaagaccaaatgtataattataattctatacgataaatgcaaacawggaagtatacacaggttacagaaacacaaggagggataccttacccacctacagtgcaaaagggaaggagaataacgactgaaggatactgagacatcttcaggattactgtcatccattctcacaagaaagtttagtaaatatggaaatttattatttcacataacaaaaggtccagagataaggtaggctccaaagttgattgacttagtgcctcaattatgttatcaaacacccccattcttcccctctctcagctctgcctttctcagagctggctttctgctcaggacagagcatcttagtcacaggtaactgtagcagtttccggcatcactgtatgacatgcaagggtcctgaggaagaaagagaccatcttttcctgtttctccttaggagggaggaaatactcccagatgataatgaaaatttcccctcacatctcaaaatcctggatttggatatatgtccatttgcaaagcaatcactagtaggaaccatgagattgtcattataggcttacagtaatcatttgagatgctgtctgttttagaggatcaactacgcatgttactacactggtgttatatgagcacaaactagctgacttgaaagaagttaccctttcttctgggaatctctcatttgccaaattatctctgcacttcttacctcaataagatactactgatttttcctctatttccaatacctagaaaggaaggccattcgaaaaagatcaaatcatatcatactagttcattatggagttaaaactcatgcattttaaacaaaacttaccaaaatctactagtttcactccaccttccgtggtcaatagaatgttattgcctttcacatctctgtggatagttttgttgttatgcaaatgttgaagtccctagaagataagaaatatataatgactcttaacaaaagcatcaaacaataaaaattttcagatgatgtacctgtacaaaatcaataggaaacacataataaaattaacattcagacactcaaatgtttcacattgagttagtcacatcaaagaacatcatttccactttgaattatataaaaattcacagaatcaaagcatgctccttaattcttagcaaatatcgtattacaaatgtgtgagtttcaatggaagaaaatatttcatatacctatctaagataatggccaaaaaaccctattattagttttctaccttcatcactatcacagtctcagaaatacacttaagaggtcagaattcagga

SEQ ID NO: 68124 - DNA, 1567 bp, Homo sapiens
ctctctagatgctctgaaattcattcctgggctaagccaaaatacttagatattaaagaaattttaaaaattaacccattaacttgctgagctttagtttccaaaatgcaaaatgaaggaagactcattcattcaactaacactcagtggacttctatactcaaagcattaggtctacgaaatagactaagacacagtcccacttctcaaagactctgtctgtccacctatatttctaagtatctttatctataaagaccaaatgtataattataattctatacgataaatgcaaacaaggaagtatacacaggttacagaaacacaaggagggataccttacccayctacagtgcaaaagggaaggagaataacgactgaaggatactgagacatcttcaggattactgtcatccattctcacaagaaagtttagtaaatatggaaatttattatttcacataacaaaaggtccagagataaggtaggctccaaagttgattgacttagtgcctcaattatgttatcaaacacccccattcttcccctctctcagctctgcctttctcagagctggctttctgctcaggacagagcatcttagtcacaggtaactgtagcagtttccggcatcactgtatgacatgcaagggtcctgaggaagaaagagaccatcttttcctgtttctccttaggagggaggaaatactcccagatgataatgaaaatttcccctcacatctcaaaatcctggatttggatatatgtccatttgcaaagcaatcactagtaggaaccatgagattgtcattataggcttacagtaatcatttgagatgctgtctgttttagaggatcaactacgcatgttactacactggtgttatatgagcacaaactagctgacttgaaagaagttaccctttcttctgggaatctctcatttgccaaattatctctgcacttcttacctcaataagatactactgatttttcctctatttccaatacctagaaaggaaggccattcgaaaaagatcaaatcatatcatactagttcattatggagttaaaactcatgcattttaaacaaaacttaccaaaatctactagtttcactccaccttccgtggtcaatagaatgttattgcctttcacatctctgtggatagttttgttgttatgcaaatgttgaagtccctagaagataagaaatatataatgactcttaacaaaagcatcaaacaataaaaattttcagatgatgtacctgtacaaaatcaataggaaacacataataaaattaacattcagacactcaaatgtttcacattgagttagtcacatcaaagaacatcatttccactttgaattatataaaaattcacagaatcaaagcatgctccttaattcttagcaaatatcgtattacaaatgtgtgagtttcaatggaagaaaatatttcatatacctatctaagataatggccaaaaaaccctattattagttttctaccttcatcactatcacagtctcagaaatacacttaagaggtcagaattcagga

SEQ ID NO: 68125 - DNA, 1043 bp, Homo sapiens
tttaaactctcaggagcagagttttccacctccaagggacgccttccaaggcgtgcggcgtgcttctgccagagacagtgttcagttttaaacaaatgcaggtcattctgtttcattttcggcgccgcaggtgcgttcagcgcccaaacccaggtagcgtgtgaccctgactggtcccgagccgggaagctccggcaggtggagagcagagagagcaggtgcgcgtcccgcagcgtctgagctccgggcattggcagctcagtagcagctgattgtagatgggcaaagtacagaagacttcccagtacggatcccttcacccctcccattaggggtcggtagagccctgagtttagggccgagcaccccctcacctggatgaggacagtggctttactctgggtgggacttgggagagaggaggaggactccagtgcccggtgtaccggacacccaggtaacgcagtctaccgtgcctggagctgggaagagtagttgcaaccggagcccccttttgggaactcactaccctgaggcttagacaggtcgggaatgatcgcctcccggttaaggaggaggaaacaggcacagtgatgtgtggtgacttgcccaaggtcacacgcagtacagatggagccgggcctcggagccaggactcctgggctccccttcctcttataccgtctctttatcctgccagggctaaggamccccttccctgctgtccagctggggcgccaagcagcagggccctccgaataggcgagctgtgcttggatctcagagacgggcaccgactgccgagccccagacgaagtgccccagggtcggggatcaggcttgtgcagggtagcacctggggacctgagggacctggaggccttcttgtatcctgaagtaggaccttctaagacttcatgagtcctggcccccttgcaggggttggggagctggggatcccagatctgcctattgcgcccgatgccccgaggctctctcttggactctggccctgagttcttctgcgcgatccttcggagacg

SEQ ID NO: 68126 - DNA, 712 bp, Homo sapiens
ttttcttactttctttgtaaatgtcattctttttgcttggaatggcattttccataaggcgttgcctagttttcttctactcctcttgcattatttcagctcctgtgtaactttctcatgtcttcaggtaaaccttccctgagtgtccactttgccacgccatgccccctctcaccctcccatgttgccagatggcaattcccagtgttctgtgctttccttggctgtgattgatttttccagagaactttgttttttagttcagaattatctattcttttcttgatcagttatttaatttttgttctcacactggaatataaacttggtaagaacagggcagcatctgtttatttccccccccgctttatcctcgaaacctagaacaattttgcctggggtcaaaactgctgcaagaaatgctaaagatgtcccactactttccaggtagacttttgatatatggtcatgtgccatataatgatattttggtcaacaaggtaccacatatatgacmgtggtcccataagattaaggtcatgatgccatatttttactgtggcttttctatgtttaaataaatacttaccattgtgttacaattgcttacaatattcagtacagtaacacgctgtacaggtttgtatcctaggagaaatagcctataccatatagcctaagtgtatagtactttttaccacctaggtttgtt

SEQ ID NO: 68127 - DNA, 2246 bp, Homo sapiens
ggttcacaggtttgcattatagaaagcatggggaattatgtctaaggatcaccttggggcattctgtttagaaggagactgaggatagagaatacactgagttgtatggactattcaatacactagtaattcaattttctttttctctggaaactggtaataggtgctttttatattgagtttaaatctttaaaaatctttcaatgaccacaaaaggttttgctcaggaagtggttgagtgatgacttcttcagagcttagggagctatttggaaaattggcaatgattttaaaagaatcttcccatcacacatgtctccargcctctgtggcctggctgaacaatgccagatcagtttggaagtaatttcatgactaagtaaatactcactgacttctggcaaggtaacaggatatagggcaaaattataaatgtagatcgggcataagttcaaatctgtcagaaactaagatgtcactccacctctctgagaataaagtttactcattctgtgaaaggaaattggaatccagtttatatgcattaatgtatacaaacacttggcacagaaattgaggctataatattagttattgttcccatgaggcctattctgaactcactgaataggtcttctagcctccctgtgctttttaggcagtggcgggcaatttcaaagtttgtatttacctggctcacactctgaggatgctctgtggagacagatattcacacttcattttgggaggctggcagtgcagtttctgctggcaggaagtcagcacactaagctgcaaatgagcaaacgccgaaggatccatgtgatgcatgtatggaaccctggtggagcgtgggatcagatcttggtggtgtcagtccttggaccagtcgtgatacctccctgtattagtcaggactctccagagaaacagaaccaataggatacacacacacacacatacacacacacacacacaccctctctctctctttctctgtatatgtgtgtgtgtatgtgtgggtgtgtgtgtatctccaataggatatatataggatgtgtgcgtatgtatatcatatggtaaaaagaagattttatgtggtgatatatatatgcatatatgaagttgatatagacatatatagagataactacataaaaatttccataaccccataagcctacattgtcccctgagccaattctcataataaatctcatacacacacacatacacatagatatagatcagtggataaataaatatatagatataaatatatggatatacatggagtttatatgcgtatatctctctatataaagatttattatgggaattggctcacatgattatggaggccaagaagtcccatgatctgccaaatgcaagctagaaaataaaaaaagccagtggtacaatttagtctgcatctgaaagcccaaaatgaaggggagggaggagccaatagtgtaagtctaggattgtatctgaaggcctaagaaccaggagccctggtgtccaaaagcaggaggagatgaatatcccagctcggagacaaagtgtgtcctacctttactgttttgttctattcaggccttcaaggaattggataatgtccacccacattgtggactctgggtcttctttatttagtctactgattctaatcccaatctcttcaggaaaactctcagagaaacataaatcatgtttcatcaactatttgggcatcccttaacccagtcaagttggcacacaaagttaaccattacactccattgttgattcagtaaaacccagcataaaagtcacaacatgacagacagcatgaccttggtgatgaatcactcactttctacctgcttggagcacttgctcccaccctgactctgattctgcaggcatggatcttgctgatttgaagcctatgtcctgcctctgagtcttttctcttcaaaataaattgcatacttgaatcttaagattccttctgaccccatcaacctctaagtagcatagttttagagatcaaaacttcgtgcagcattcccaaatatcagtgactgatgttaaggctttgttatttaaacagaggcagactgtttacactttagcttatgcagatgctaactcctattagagtgtgtttatatacattccatgctatagtgttagctatgtataaatagaatacaaattaatagattttttgatgatacagttttaaatttccttattaaaaa

SEQ ID NO: 68128 - DNA, 755 bp, Homo sapiens
attgttaactctcctccagcctgcactgtggcctgtagtctaagttttctggactgtatcagcaaagtcactgtcttggcttctggttagatcaggccaatgaggagaatttgcagagcagatagaattaagttctgtttagggaatttaatcttcggttctgtttttgtgaaagtctctcaggktggttgcataatctgattgaagctttcatctctgcccgccagcacttccgcccgccagcacttccgcccgccagcacttccgccggccagcacttccgcccgccagcacttcccccgatctctttctcctttttgctttactcctttactgcaccatttcagccgtaaagatggctgaggtgttctaatgtcactagcagtaactttataaataaccagctttgtaaatatctatatttacattcaaagatcactgcacactcaaagaggcggactaccatgtctgagtttcatttaaaaaaaaagatcataaatttgattccaagttacacaagtatctaaatggccaatgttcaaatatggtagagatatttacatgtaaaagtgtaaagcatgtaattagagactcagtaaaattaggaagctataagtggcaatcaggcatggaagcatggtcagacatcttggttaagaattgaagtcagttatataaagttgaaatatttaaaattacaaatatcaaattcaaagggacaactacataaagagatatgcaaatatgaagggatt

SEQ ID NO: 68129 - DNA, 755 bp, Homo sapiens
attgttaactctcctccagcctgcactgtggcctgtagtctaagttttctggactgtatcagcaaagtcactgtcttggcttctggttagatcaggccaatgaggagaatttgcagagcagatagaattaagttctgtttagggaatttaatcttcggttctgtttttgtgaaagtctctcaggttggttgcataatctgattgaagctttcatctctgcccgccagcacttccgcccgccagcacttccgcccgccagcacttccgccggccagcacttccgcccgccagcacttcccccsatctctttctcctttttgctttactcctttactgcaccatttcagccgtaaagatggctgaggtgttctaatgtcactagcagtaactttataaataaccagctttgtaaatatctatatttacattcaaagatcactgcacactcaaagaggcggactaccatgtctgagtttcatttaaaaaaaaagatcataaatttgattccaagttacacaagtatctaaatggccaatgttcaaatatggtagagatatttacatgtaaaagtgtaaagcatgtaattagagactcagtaaaattaggaagctataagtggcaatcaggcatggaagcatggtcagacatcttggttaagaattgaagtcagttatataaagttgaaatatttaaaattacaaatatcaaattcaaagggacaactacataaagagatatgcaaatatgaagggatt

SEQ ID NO: 68130 - DNA, 755 bp, Homo sapiens
attgttaactctcctccagcctgcactgtggcctgtagtctaagttttctggactgtatcagcaaagtcactgtcttggcttctggttagatcaggccaatgaggagaatttgcagagcagatagaattaagttctgtttagggaatttaatcttcggttctgtttttgtgaaagtctctcaggttggttgcataatctgattgaagctttcatctctgcccgccagcacttccgcccgccagcacttccgcccgccagcacttccgccggccagcacttccgcccgccagcacttcccccgatctctttctcctttttgctttactcytttactgcaccatttcagccgtaaagatggctgaggtgttctaatgtcactagcagtaactttataaataaccagctttgtaaatatctatatttacattcaaagatcactgcacactcaaagaggcggactaccatgtctgagtttcatttaaaaaaaaagatcataaatttgattccaagttacacaagtatctaaatggccaatgttcaaatatggtagagatatttacatgtaaaagtgtaaagcatgtaattagagactcagtaaaattaggaagctataagtggcaatcaggcatggaagcatggtcagacatcttggttaagaattgaagtcagttatataaagttgaaatatttaaaattacaaatatcaaattcaaagggacaactacataaagagatatgcaaatatgaagggatt

SEQ ID NO: 68131 - DNA, 791 bp, Homo sapiens
ccctatgtaaatcagacaccacttccccaagcctgcctataaaatccagtgaactctgatgctggctggtccctcctttcggaaggccctgtttcttactagagagagctctattttcttttctctttcctttgcctattaaacctctgctcctgaactcctggtgtgtgtccgtgtcctaaatcttctttgtgggagacagtgaatcctggatatttaccccagacagtgacaccacttcaattgtaaaggtattgttggaacggtattaaattttacagcttatctggatgatatactgatacttagaacaatatgaatattattttatttatttttatatttttgctttwaattcaattcaattttatgatattaataactttaaattcgaattttggattggtgcttaacttttgagtgggtgtctcctccaattctggatgcttccaaataggaaatacatatttatcgtatccttcccagtaaaaaatagttgcatagtatttttccactaatattcattcagaattgacagttttgtgctctgatgtccactgcctaaaaacattttttcccatattatatttattttctgtatgcatgcttgaagacctactgcagcacttacggtattatttaattgtcatgctagatgttggggtaactattttattttatcatcttttgtcataatattttagaggcagggtcttgctctgtcacccaggctggagtgtagtgtcatgatcatggctcagtgagtgcagcctcaacctcctgggctcaaa

SEQ ID NO: 68132 - DNA, 791 bp, Homo sapiens
ccctatgtaaatcagacaccacttccccaagcctgcctataaaatccagtgaactctgatgctggctggtccctcctttcggaaggccctgtttcttactagagagagctctattttcttttctctttcctttgcctattaaacctctgctcctgaactcctggtgtgtgtccgtgtcctaaatcttctttgtgggagacagtgaatcctggatatttaccccagacagtgacaccacttcaattgtaaaggtattgttggaacggtattaaattttacagcttatctggatgatatactgatacttagaacaatatgaatattattttatttatttttatatttttgctttaaattcaattcaattttatgatattaataactttaaattcgaattttggattggtgcttaacttttgagtgkgtgtctcctccaattctggatgcttccaaataggaaatacatatttatcgtatccttcccagtaaaaaatagttgcatagtatttttccactaatattcattcagaattgacagttttgtgctctgatgtccactgcctaaaaacattttttcccatattatatttattttctgtatgcatgcttgaagacctactgcagcacttacggtattatttaattgtcatgctagatgttggggtaactattttattttatcatcttttgtcataatattttagaggcagggtcttgctctgtcacccaggctggagtgtagtgtcatgatcatggctcagtgagtgcagcctcaacctcctgggctcaaa

SEQ ID NO: 68133 - DNA, 787 bp, Homo sapiens
ttacagatttatatttgaataaattagtcttacctttatagaatgatctgttatatttccacacttattctttttctttttttttaagtgacagggtctctctctgttacccaggctggagtgcagtggcaagatcatagctcactgcagccttgaacttctgggctcaagtgatcctcctgcctcagcctcctgartagctgcgactacagccacgtgccacaatgcctagttaactttatacttttgtagacatgaagtgtcactgtgtttctcaggctggttttgaaccctcggcctcagtaatcctcctgtctcggccttgcaaagtgctgtgattgcaggcaacagctccccacccaacccatgtttattctgtcagatttacttctaaaactgcagcagcttgtctctcattttgagaaacttgaatgatctttgtgcaataatgccaagtcaaacttcttttgtcagttataatttggtcctcctatttagaaacctagaataaatccttattgctatgtcccttttacggaaagtcatattaatccacactcttgattttcaatattcatcatcatccattctctttggcctcctcgcctaatttcagaatactctatttaaagcagaccccttaccaaatatgttacagattttgtcttttgcttctctagtgattagataacattacacattgctttatggatccttcaaaagaatgcacttggaggagcatgcaattgcctaaataaaaaaaagaaactaaaattctgacagactt

SEQ ID NO: 68134 - DNA, 666 bp, Homo sapiens
  misc_feature (1)...(666): n = A,T,C or G
atattagcccattcattgcagattcattgcrgaagtctgtatatctggaaaaatgcctcagtgcctttctcctcctcattttacacagaatagagatagcaagggggtgttgagggatcacttcaaactcattggagagctgnnnnnnnnnnnnnnnnnnnnnnnnnnnnnnnnnnnnnnnnnnnnnnnnnnnnnnnnnnnnnnnnnnnnnnnnnnnnnnnnnnnnnnnnnnnnnnnnnnnnatgggtgtttgtgcattcatcagctggaacaatgcgatctaggcaaagacagttggatctgggctgcctccaaaggctatcagaaaaccccacaactttgctgtcccattccaaccaccccagccaccctagagcatcattcggacagacaaagcctctaattcacagtaatccacaggatgtcaatgctggcaaccactgggaaagagaaaagtagggtctatataccacatccagtggtgataattgtgagtgtcattgatatccattgcctaccaataaagactaaactgtttggcatagcatacaaaattagccatgatctctttccctgcattgccacctgagtgggagccacatccagtcatactaaaaatacaaaatcagccaggcgtgatggcatgtgtctgtaatcccagctact

SEQ ID NO: 68135 - DNA, 666 bp, Homo sapiens
  misc_feature (1)...(666): n = A,T,C or G
atattagcccattcattgcagattcattgcagaagtctgtatatctggaaaaatgcctcagtgcctttctcctcctcattttacacagaatagagatagcaagggggtgttgagggatcacttcaaactcattggagagctgnnnnnnnnnnnnnnnnnnnnnnnnnnnnnnnnnnnnnnnnnnnnnnnnnnnnnnnnnnnnnnnnnnnnnnnnnnnnnnnnnnnnnnnnnnnnnnnnnnnnatgggtgtttgtgcattcatcagctggaacaatgcgatctaggcaaagacagttggatctgggctgcctccaaaggctatcagaaaaccccacaactttgctgtcccattccaaccaccccagccaccctagagcatcattcggacagacaaagcctctaattcacagtaatccacaggatgtcaatgctggcaaccactgggaaagagaaaagtagggtctatataccacatccagtggtgataattgtgagtgtcattgatatccattgcctaccaataaagactaaactgtttggcatagcatacaaaattagccatgatctctttccctgcattgccacctgagtgggagccacatccagycatactaaaaatacaaaatcagccaggcgtgatggcatgtgtctgtaatcccagctact

SEQ ID NO: 68136 - DNA, 694 bp, Homo sapiens
  misc_feature (1)...(694): n = A,T,C or G
aannnnnnnnnnnnnnnnnnnnnnnnnnnnnnnnnnnnnnnnnnnnnnnnnnnnnnnnnnnnnnnnnnnnnnnnnnnnnnnnnnnnnnnnnnnnnnnnnnnntaatttttacaacaacccttctaatatattatacacatttcccagaaaaagcactaaaaaaactaaaatttgagccaagttattctaaatctaaatatgatgctcttttctggaaaactaatctccctcccatttctatatggttacactgtggctggagagctggtgaatttgttgtctttcrctttaaacatgcttcttctatagtcctggactacagtacaagcttggttggtggaaccattctctatcaagttgcttgagacagggacctaggactcaaacttgactatttactttttctttcccacctctgctcaaacccgttgattttagcttttaagtacatctcaaaaatttctcttccctccagctcaccctcattttttcagtttaatctttaccaccttttaactgaattactaaatcatttccctcttagattttcttctttcaaaattacttaagtccaacccggaaccagagtgtagagctttaagcaggagatcaaactggttagattcccatggaaatccctggcctagagccctttgacagtacccccctccagtctcccataatgcatcttaga

SEQ ID NO: 68137 - DNA, 1094 bp, Homo sapiens
gttgtaggaatcaattgctcattcttttttattgcagagtagtgtaccatggaatgtatacaccacagtttgtctatccattcccctgctgaaagacatcttcaytgtttccagtttttagtaattatggataaagctgctccaaacatttatgtgcaagtttttgaatgaatataaattttcaactcacttgagaaatacctaggagtatgacttctgggtcatatggtaagtgtatgtttaactttatgagaaactggcaaatggctttccagaggcttttaaaaaatattacagcatagactgcaggttgaaaagcagtcttaaatcagttcaaccataaaattcaatatagcattaagcattaatagtttatcaacataatttttaaaactattctagttaaaagctcctctaaaaatgtcaacaattgtgggtaactgaagatctcaggccaattatttatctgtgaatagtgctgtgttactcacaaacaaaaattaccaggttaaattagtctctgttttgaggatgtgtagccaatgtagctagttcatatgagtaaactaatatcagacaaagaagatggtaattctctacaaagcacaataaaattctgcaaatgttaaagaacagcttgtttgcattactttaaagcatcatgcctctcaaatataacagtaccaaactattaattttcagaaaaattacatgatggtctctcagactcattagtgaaactcatcttttgtatatcatgtgtcttaaatggtaccttttccattgaccctctgattcatgtagaattactccaaaattatttgaaagttgtctttatattatcctcaaacttcttcattaagttcagtcatacactttcttaagaaattttctaaatatgtttgctaaaatgtaagctaagttgtcagctcttcaaaaagaagcttgtttctcttatttctttactttctctgcagctccagaaagtcagaagataattagtaggcattttcaatattttcatttacaactcaatatgtaatttatgtgcaacttttcttttattctctccccaaaaaaagaagatataaaag

SEQ ID NO: 68138 - DNA, 1094 bp, Homo sapiens
gttgtaggaatcaattgctcattcttttttattgcagagtagtgtaccatggaatgtatacaccacagtttgtctatccattcccctgctgaaagacatcttcattgtttccagtttttagtaattatggataaagctgctccaaacatttatgtgcaagtttttgaatgaatataaattttcaactcacttgagaaatacctaggagtatgacttctgggtcatatggtaagtgtatgtttaactttatgagaaactggcaaatggctttccagaggcttttaaaaaatattacagcatagactgcaggttgaaaagcagtcttaaatcagttcaaccataaaattcaatatagcattaagcattaatagtttatcaacataatttttaaaactattctagttaaaagctcctctaaaaatgtcaacaattgtgggtaactgaagatctcaggccaattatttatctgtgaatagtgctgtgttactcacaaacaaaaattaccaggttaaattagtctctgttttgaggatgtgtagccaatgtagctagttcatatgagtaaactaatatcagacaaagaagatggtaattctctacaaagcacaataaaattctgcaaatgttaaagaacagcttgtttgcattactttaaagcatcatgcctctcaaatataacagtaccaaactattaattttcagaaaaattacatgatggtctctcagactcattagtgaaactcatcttttgtatatcatgtgtcttaaatggtaccttttccattgaccctctgattcatgtagaattactccaaaattatttgaaagttgtctttatattatcctcaaacttcttcattaagttcagtcatacactttcttaagaaattttctaaatatgtttgctaaaatgtaagctaagttgtcagctcttcaaaaagaagcttgtttctcttatttctttactttctctgcagctccagaaagtcagaagataattagtaggcattttcaatattttcatttacaactcaatrtgtaatttatgtgcaacttttcttttattctctccccaaaaaaagaagatataaaag

SEQ ID NO: 68139 - DNA, 1277 bp, Homo sapiens
aaagagtaaattattaatgaaaaaaggaactacctagtgaaagaagtgggaaacattttgataaaaaatttattttaaaaagtctatcaaaagcttgtcagaaaagtttaccacacagaaaattaagtcaatataagtagtggattcgtgtattgtgatagtggtgtctttactctgagaattatttgatgcaattatatagtgcatataaatggatttattttaaaatagaagtttaagtttttgaaaactaaggtttatacaaagttggtctcagtgctctgtaaagcctccgttctcatcattggcactgcatctggtggcagtaatttgaaggatgaggtaaaatttctggctgagacttttgaagtcaaaccagaaaccacctcaaatactcaagggctcaaataatataacagggatacacacagaagaaaaacagtaaattctgttagttgtcaagttattaatataatttaaagtagctgcaaataggaccctaggaattgggattgttgatgggaaagagaatgaatatcaccaaaaaagatggaaaagatacagcaagaatgcggacccayaagtgtgtgtttgggagcttttgacagcacatggctaaggtgtctaggaggagagctccctgaaggcagggactgaaggagagaagggatccaagaatgatgcagcctcctttaacaccaagcttagatgcaccccttagagacacactcagggtttcctaggcaattcctgttgcaacttttaataatatctttaaagtaaatgccccacttcttagaaactcaagcactttcccaagcattgcatgtgatactcaattataatgattacattttgaagaaaccagcacaggttttaagatttttgaaaactgttggctttaaaacttctttctcttctcctcagttcaattcaacagacactagtaagcattactatgtgccaggcatgtgctggccaccagaggtaaaaagataatcaatgaatgattggtgagtgattttgagggatagatggataggtggagcttaggtagagataggagatgacatggaggctttatgaaagataaaatatttgtcagataaggaagagaggaagaaggtttcaaataaagccatggcttcttcaggaaatactaatttggagttgaaatataggatgcgggaaataatctagagagaaagatagtaaatatatttatagctattatttactgagtactttctttgcacataaaactagattaaagtcag

SEQ ID NO: 68140 - DNA, 1361 bp, Homo sapiens
tgtctttagtaatgtactgcaactctgctcaagtttgttaagcatttctcaggttccaaagaattttctgacactagcattacaaaagtgactaagacgtggtccctattttccaaaatttgtttaaatcccagctcaaatcatgtcactcctctgatctaaaccctgcattgttgctccatctcactcagacgaaagccaacatccttgcagtggccaccggctcccacctgatctcctyggcccttcctcactgacctcatcacatactactctctctgttgctgatactgaatatgccaggatcctcctgcctttgttaatgaatgcatttttctttcaggaaaagagatgagctctatgaggaaatgcaaaaagcaattataatttcaattgtggaaaaagaaaactcagaagtcaacttaagaacttgccagtcagactgctttttgagggagctgtccgatgagctggtgttgctatttgaggtgaaccacccagctagctgggtggcttgactacctagagggaaaacttgaccattcatacagcagagaaagacgtgactaaagaacactgtccccactatacacttccaccctgcatgacatcagtgaatctttgacttcctttaggttagcaaagcatggaaacgaatttcaggccaaatgacgatacattcatgatcgctggacaattttattatctggatcctggggcagtgcatgcagtgtttgtcctggagcaacctccttaaggggccacctctgcttgagcaacacgctggaagcttcatagataggtaacattctctagcttgctacccagcccccttggtgtcatgtttctcttctcccccatcctcctgtgtagtgcatgtgctctccagactctccccaaggctctgtccctgtcccaccttccctctctgagaacttcccacctccgctccactccttcaggtgaggatttttttttctctctgactcaacacatatgcagataacttactggtcagacccttctttgttgtattcggtctctaagatcctgggcctatttgttactcatattgtctagatcttgggagcagagccatgtccaaagatcatggaattctttgcacacagagtggacacctgacctgccatcagggtgtaggctttcctgatgcccctcccacccgagccaggtgtgagtggaagggatgaatctcagagggttgaataagttatgagccttagttcatgatatatcatcatctttgatttgggttaatctttgatttaattagctatcacttttattcccattcttcattcccatgccccatccataggcagtcatatctatgtgtttaa

SEQ ID NO: 68141 - DNA, 600 bp, Homo sapiens
ccaccatacccacccctaacatcagtttggccagcgcaggaacagatttttcagtggactcattaaagagatcagcacacagagaaaccagcttcagttttcttttccactctgactcatcactgggccaaagaccaatttcctccagttcccacatctcacttcagatttgcatgggaagtctaatcagttgttgattaggctagggtgattaaattaaccaccctgtggtcaagtatccaccccaaaagcagtcagctctgatcaatggtgggcatcacctggcaccaaatggccgtccagtccaaccaaggagcctttcccaggaatggggatgcagtggggttctcaggaaactagattctcccctgggctctaacaacttaacctttggttgacacttcttccattgtgtttctgtgttcttgacttgagcagggagatggtatcrtttagagagttgtaatgaagtgcctactcttaggcagcaacaccattttctggctgtaaaaccaagagcaataacttaacctccctgagcttccatttttttcaactgtaaaatgagtctttctcatgggattgtcatgacgattaaaa

SEQ ID NO: 68142 - DNA, 600 bp, Homo sapiens
ccaccatacccacccctaacatcagtttggccagcgcaggaacagatttttcagtggactcattaaagagatcagcacacagagaaaccagcttcagttttcttttccactctgactcatcactgggccaaagaccaatttcctccagttcccacatctcacttcagatttgcatgggaagtctaatcagttgttgattaggctagggtgattaaattaaccaccctgtggtcaagtatccaccccaaaagcagtcagctctgatcaatggtgggcatcacctggcaccaaatggccgtccagtccaaccaaggagcctttcccaggaatggggatgcagtggggttctcaggaaactagattctcccctgggctctaacaacttaacctttggttgacacttcttccattgtgtttctgtgttcttgacttgagcagggagatggtatcatttagagagttgtaatsaagtgcctactcttaggcagcaacaccattttctggctgtaaaaccaagagcaataacttaacctccctgagcttccatttttttcaactgtaaaatgagtctttctcatgggattgtcatgacgattaaaa

SEQ ID NO: 68143 - DNA, 738 bp, Homo sapiens
actcaataaaccagcagagatggaattctaaaggtaaatctgatcttgtgtcaagaagtccacttggaaagaaaatactccctaagagtagaaagatgtttcagagggctcatcaataaacctgtaaaaaagaagaggctccttattgtgactttgtgggttttgatgatatcgcaaagcaatccaaccattggtctgctcaggtggcaccctaaacaccaagtgattgagaaagaaacccatgaccgaggttaccaggcaccttcctttagcagccccctgtggcaagaactttgtctggagatggaattgaataacttcaaaggagcttacaatctaaatcagagcaggatcactgtggggtgagcacaggaagacaagtaggcaaggcytctactccagatcttggagaattgattttgagtcctggctctgccatgtaccagctcagagaccctgggcaaacaactcaatttctacgtaacgggagagaattgaataaaatcaataatgttcaagcgcctccaccacgccctgtagtctctctgtataaattcagaagccactgcaggttttggggaaaaattgtataaggagtcctagcaggggtaagcctctggttcccaccaccatcacaatcccttctgctagacaatctctgcccttttgctttagatgtcaccgtttcagattgtttttttcattttttttctaggcaaaaaaaggagaagatcccaa

SEQ ID NO: 68144 - DNA, 738 bp, Homo sapiens
actcaataaaccagcagagatggaattctaaaggtaaatctgatcttgtgtcaagaagtccacttggaaagaaaatactccctaagagtagaaagatgtttcagagggctcatcaataaacctgtaaaaaagaagaggctccttattgtgactttgtgggttttgatgatatcgcaaagcaatccaaccattggtctgctcaggtggcaccctaaacaccaagtgattgagaaagaaacccatgaccgaggttaccaggcaccttcctttagcagccccctgtggcaagaactttgtctggagatggaattgaataacttcaaaggagcttacaatctaaatcagagcaggatcactgtggggtgagcacaggaagacaagtaggcaaggcttctactccagatcttggagaattgattttgagtcctggctctgccatgtaccagctcagagaccctgggcaaacaactcaatttctacgtaacgggagagaattgaataaaatcaataatgttcaagcrcctccaccacgccctgtagtctctctgtataaattcagaagccactgcaggttttggggaaaaattgtataaggagtcctagcaggggtaagcctctggttcccaccaccatcacaatcccttctgctagacaatctctgcccttttgctttagatgtcaccgtttcagattgtttttttcattttttttctaggcaaaaaaaggagaagatcccaa

SEQ ID NO: 68145 - DNA, 549 bp, Homo sapiens
tttaactaaccctcgaaggaataagcaaagaatgaaaggaaagggcatttaaggagcacaaaaatgctagatgtggctgttacacgtcaaggcattctaactcattagacatcagagaaattcaagttaagaaccacagtgagaggcaagaagccacaaaagaacattacttcccttctatcaacaagaaaaaaagccagacaatagacagtcctaacttcctttaacccatcagagagccgagattacaaggcaatcaggagaactgaattccagagtgacaagcccctccatagagacagaatatacatactctcccacctttgccagagcctctttggagaaagcggtggctgcatatgaaagaagaagagctaacactgtaacaagttctttttttaaaattgatacataattaytgttcatatttctggggtacttgtgatattctgaatacacatatacaacatgatcaaaccagggtaattcgaatacccatcacctcaaacagttgtcatttctttgtgttgagaacattcaaaatcttct

SEQ ID NO: 68146 - DNA, 2152 bp, Homo sapiens
  misc_feature (1)...(2152): n = A,T,C or G
gtggagaagttgctgggcatggtgtccacttattggctttggggctgagggagaggctgtggaggcttgtgagatttcagctggtgactaactgcctacttagaagagtggggtcctggcccctttcctacccttaccttccaatggagttcatgacccagttggtgccatctatgggatcagacatccatgagctgcatagtcttggatgggctgagacttaaatatccctgagtcacctcttaccttaagcaaagggtcctgatttggggcaccccatgaggctgcctctgtcctgggcccagtgctgggggctgcagacttgggcaagaaccagacatagtcattatcacctaaggccctgctctttagtccttccccattgtccagaattgggcatctagcctggagtttgaatacccctggtcaaacagggcgttggcagcaggcatggaacctgggctctttcctatagagggatgttgcagactggaggcctggaggctgaaggtggccaatagacatgtttcatgtggccatcacagtgtacaagtgttttcttgaatgtgaatttttttatgtggggctgcatttnnnnnnnnnnnnnnnnnnnnnnnnnnnnnnnnnnnnnnnnnnnnnnnnnnnnnnnnnnnnnnnnnnnnnnnnnnnnnnnnnnnnnnnnnnnnnnnnnnnntgcccactgatgtcttcatatatatttgctgcttcaacacaacttcttccttagcattagtttctgttgcttgtaacccaagtgattgtaaaaagcctgatgaaatacagagagggaagctgaggcttatagagggaaagtgatatatcccaaatcacacacgcagtaagtgctacgtgtgaaccccattccctccttatctcctctcctcactccacacatcytcagcaacttctcctgtctctagtcactgcttcagtccctccaacacatggtcatctcctcaaaagcatccctcatgtggcaggggctgtaaaaacactaattgctagatccctgacatgaacttatttaagctaaccagaggattcagcaggagatttatttttggtggaaaaacacgggtcagtgacttccagcttaagatgacctcctgaccctgtgtgtttatctcccctcccttctcagattccatggagtcatagtagagaatataaatgcataagctcagtgcaaataaagagaatggtaggggaactacagggactagagatttctacctgattctggaagaaagagagtggaggtgggaaccaaggaaagaagcaagggtaggaatttcctgtcctgcagaatgggcaggaatttgcaacttggaaatgccagacaggaaagacatagcagtgaagcatgtgagagtgggaacgggctgaggaggggtggtgcccgtggtctctatctgaagaattgtggctttccatgctcacaggtagagagaggggtaagaacactggctgcctctacaggtatgtttcttaggaagaaagaagttgaattctctctctaaaagtggtgctggtatagaaaaaggaggagggaagcatgtgaagaacagacaaggagcctcacctgcacccccttgtcccttctccagaccaggaatcacacttgggactagctcatattcccgaggtagaatagttgatgcctccaactttcctgttatcactttccacaactcctggtttctgcatgggcatcggacgtggcccaggactgacttcccttccagcaccgagggcagagcatgtgatttaggctcagccagtcggagcatccatctccttggccataatgattggttctgggtgaacatgcgatctcagtagagtgagtcctggagagtgaatcctacgctttttgcttggaagcttgatgtgaagttnnnnnnnnnnnnnnnnnnnnnnnnnnnnnnnnnnnnnnnnnnnnnnnnnnnnnnnnnnnnnnnnnnnnnnnnnnnnnnnnnnnnnnnnnnnnnnnnnnnnaaagaagccagcttgaagctgacccaccaaggattgtggagctcagagaaacaaagctggtgccctggggacgaagtgaacctctgaatcaaaccatgcctagagtttgaacccactcccaggtatttcagtt

SEQ ID NO: 68147 - DNA, 1533 bp, Homo sapiens
  misc_feature (1)...(1533): n = A,T,C or G
gagaataccagtaccttctcatggcatgttgtcctgcccttagcaaatggaagtaaatgctaatactgtctcaatgtcacaggactgtaaaaaaggagaatcacaggctctaaagccaattgaaagttgtggagcctctgatgtgtccttgtgttgctcatcagaacagcttgttccaaggcgtaatgtctactttgagaaagccccagcatggctcctagggctaggctgccacaacactcataaatcgcagtgacactcatgtttacaacatctctgtctgctcttcataaatggaattcacacaattcaggtgagctggagaattaggcttatgagcatggcatctggatatgaaagtgaaaaaatgtccacgctggaaagatattggaaatacccagcccagtactcttattctacccataaagcagctgaagttcaagatcctagcctgactctggccctcagactgcccatctgagggaaggrtgaactcactcctccactgaggttcattctaatctaactatctgtgagactagaggccccactgaggctcaaacccagctctctggcctggaagtgcactaatctctggactggaagggaacatggcagaaacaataaacaaaaatggagccaagcatgcttcttctaagacaggagaaagaaggatccatggcccatttgggggctacagatggctgtcttttgttgcataaaatagaatccatcacgattggtttcactttccttcccacaaataatccaaaccttcggatcaagacccaagacacatgctgtcagccaagtgtgttgagcatacacagaacaaagtgaaggccaagctttaggtactcagctcacaaggagctggtaccccacgtggagagcagcaagaaataaacaaaaaggtgccaactcttcactagccggctacactgtcttaatcttaatgacagtgatttgaatggaaaaggaatgcaggagcaggccatttatcactcttaaataataagttaaagttacagagattgaattgggccaagactggcttttaataccgagaggggggataaatcaattatggaactcgcacgcctcctagtggcatatctggattactgctggggaggcttcctctcccacttggaaccatcggccctgccccaaggttcaccgggacatgatcagtccatatcaactgagagcttcctttagaccaggctctgggctatgtgccattgcataattagtatcattaatgctcacactaggtgactctcattagacccattttatagacaatgaaagaaaagctcaaaaagcttccatcacttgcccagacttacggtggaaaggattccaaccaagatttgtggaattccctgttcagagctccctccccacatcacactgagtacagagtgttnnnnnnnnnnnnnnnnnnnnnnnnnnnnnnnnnnnnnnnnnnnnnnnnnnnnnnnnnnnnnnnnnnnnnnnnnnnnnnnnnnnnnnnnnnnnnnnnnnnna

SEQ ID NO: 68148 - DNA, 703 bp, Homo sapiens
cttctaaagcctaaggttcaatcctcggacctttctgctgttcattccataggtggttttctctaatctcatggctttaagtatgattcttcatatgctattgacgcgcaaattttgaaaatgtaacaagatgttaaaaaggaagtttggccaagactccaacacaacagatatcaaatactaaggtcagaagctaatgcaaatgagtatttccaaggtagatatctgagaagagtttgacttgggcccctcactgtaatcaagggcataaaatggtctcgtcactagagattaaggsgggtagtaaggatttgtgaaaggttttctttgaagaaagctgtgctgtgaataattcctctccatggaaaatagagatctattgacagaggatgacttggagagccgacatgtgttccctgcagtttggagagggggaagaagcacttaattaattggagtgtgactcctacctggggagtgtaaaggtaggaggctgctaaagccgtggatggcagcagaaaagagatgacccctcagggatcagccaaggtacagggtgtgtgtgtcccgtggacaagaggtgggccgtgcaggagaaagaatgggctaggacccttatcattcttgctcaagtgttctgcttggcagaataataggacaatacttgagaacagtcttgtgtgtagtgagctgcagagaaccc

SEQ ID NO: 68149 - DNA, 703 bp, Homo sapiens
cttctaaagcctaaggttcaatcctcggacctttctgctgttcattccataggtggttttctctaatctcatggctttaagtatgattcttcatatgctattgacgcgcaaattttgaaaatgtaacaagatgttaaaaaggaagtttggccaagactccaacacaacagatatcaaatactaaggtcagaagctaatgcaaatgagtatttccaaggtagatatctgagaagagtttgacttgggcccctcactgtaatcaagggcataaaatggtctcgtcactagagattaaggcgggtagtaaggatttgtgaaaggttttctttgaagaaagctgtgctgtgaataattcctctccatggaaaatagagatctattgacagaggatgacttggagagccgacatgtgttccctgcagtttggagagggggaagaagcacttaattaattggagtgtgactcctacctggggagtgtaaaggtaggaggctgctaaagccgtggatggcagcagaaaagagatkacccctcagggatcagccaaggtacagggtgtgtgtgtcccgtggacaagaggtgggccgtgcaggagaaagaatgggctaggacccttatcattcttgctcaagtgttctgcttggcagaataataggacaatacttgagaacagtcttgtgtgtagtgagctgcagagaaccc

SEQ ID NO: 68150 - DNA, 703 bp, Homo sapiens
cttctaaagcctaaggttcaatcctcggacctttctgctgttcattccataggtggttttctctaatctcatggctttaagtatgattcttcatatgctattgacgcgcaaattttgaaaatgtaacaagatgttaaaaaggaagtttggccaagactccaacacaacagatatcaaatactaaggtcagaagctaatgcaaatgagtatttccaaggtagatatctgagaagagtttgacttgggcccctcactgtaatcaagggcataaaatggtctcgtcactagagattaaggcgggtagtaaggatttgtgaaaggttttctttgaagaaagctgtgctgtgaataattcctctccatggaaaatagagatctattgacagaggatgacttggagagccgacatgtgttccctgcagtttggagagggggaagaagcacttaattaattggagtgtgactcctacctggggagtgtaaaggtaggaggctgctaaagccgtggatggcagcagaaaagagatgacccctcagggatcagccaaggtacagggtgtgtgtgtcccgtggacaagaggtgggccrtgcaggagaaagaatgggctaggacccttatcattcttgctcaagtgttctgcttggcagaataataggacaatacttgagaacagtcttgtgtgtagtgagctgcagagaaccc

SEQ ID NO: 68151 - DNA, 714 bp, Homo sapiens
ggtcaccaaccagctcagagaacatgaagaaaaagagcaggtttcaggaggagatcgttcgggcactctgattttgaagtgcccttggtcaaagtyaggggcaaaactgtctccaaaaccaatgtccagttccttcaggggaatatgcagttcccatcgcctcaaagagacaaggaacacagagtgtcctactgctccaatcagtctctaagagtttatgtctttgcctttgattttaattcttgatcacagctccttctgagcttagtgttccaggaactgacccataggtatgtcccgactgcatccaaagcttcagctgaaatcaaacagcatgaaaggaaattacagaatttcattttttgtgtgtcatcagaaaaagagtagcaaagattattaccaactctttccagaagatgggcacttactttaggaagcttttaagtaaaggatgaaataacaaagaaaaagatgactcacagatttgactaaacaaatattcagttattgacaagaaaacagagaaaaatatttgcaagaccaacagcaaagcattaacatctaaacaatataaaacattacattttaacggaaagcagtgataaatgtgaaggaaacaggcattatacaaaggaagcaaaggaaaaagtcttacttgctagtactcaaaaaatacaaattatgacaaccataggtatgattgttattattaat

SEQ ID NO: 68152 - DNA, 653 bp, Homo sapiens
ctgctggggattacaggtttggggctgcaggagtctgaactggaggaggaggaggagccaggactcacccagtgccaagctggagagagacaagagacacctcacaggaaggatgggctggtccctggttctgtttgggctgggatggggaattcagtcacctgacattaccagaactgtgtgtgtgtatgtgcrcatgcgtgtgtgcatgcatggacgcacctctcccgaggggcaagggctatgtcctgctcatgcaatttaatccgcccaagctcatttttcagatgaaaaagacaaaactcagaaagggcaggggactggcctaggtcacacagcagtttagaggacagccaagtctgggctgcctggctgcctccagctgctgcctgatgcacccacctccttcttgcccacctccaggagaaggtgggggccaggagtatcgactgggtgactgcagacccccgagagggcctgcttctcgagagagctctgtgggtgaggtatgggctgggtttggggggagagtgtcagctggactcagagtgcagcagcattggttctgggtgtgcaggagctaggaatgtctcccaggggtccacaactatgaatactgggatgggattaaataccagcaaggtgaccccagt

SEQ ID NO: 68153 - DNA, 653 bp, Homo sapiens
ctgctggggattacaggtttggggctgcaggagtctgaactggaggaggaggaggagccaggactcacccagtgccaagctggagagagacaagagacacctcacaggaaggatgggctggtccctggttctgtttgggctgggatggggaattcagtcacctgacattaccagaactgtgtgtgtgtatgtgcacatgcgtgtgtgcatgcatggacgcacctctcccgaggggcaagggctatstcctgctcatgcaatttaatccgcccaagctcatttttcagatgaaaaagacaaaactcagaaagggcaggggactggcctaggtcacacagcagtttagaggacagccaagtctgggctgcctggctgcctccagctgctgcctgatgcacccacctccttcttgcccacctccaggagaaggtgggggccaggagtatcgactgggtgactgcagacccccgagagggcctgcttctcgagagagctctgtgggtgaggtatgggctgggtttggggggagagtgtcagctggactcagagtgcagcagcattggttctgggtgtgcaggagctaggaatgtctcccaggggtccacaactatgaatactgggatgggattaaataccagcaaggtgaccccagt

SEQ ID NO: 68154 - DNA, 574 bp, Homo sapiens
ttcacttgggtgcccattatgcagamttcctcagcacagggaaggtcactcatcacccacaggcccttgatcgttatccaccctttgatgctgtcagattccagaacacgctgcactagtctcttccttcatagggagagaggggaggtgttatgagaaaatctctcatcaatctgacctagctcccccaaaagatgtaacttttaaaatgtcagatggaaatatttaaaaagtgttacatgcctgtatagttttagtattttacttaaagggaatgtggctgtctttactggctacaaccagtttaattcaagaagggctgctggtcatcaggagaacaagcaagggttgatgctgcccagagtctccagctaatacacaatatggacatccccttccagggcagcgggaagagagtggctccttgtgcagtgaagctgacatccaccaactaaggcttctggaagcatgtggagactcacagggagtgggcagggtctcagcatctggatagcggtgaaagaccctgagaagaaggtgctttccgtgtggattggctcactgttcttgccca

SEQ ID NO: 68155 - DNA, 574 bp, Homo sapiens
ttcacttgggtgcccattatgcagaattcctcagcacagggaaggtcactcatcacccacaggcccttgatcgttatccaccctttgatgctgtcagattccagaacacgctgcactagtctcttccttcatagggagagaggggaggtgttatgagaaaatctctcatcaatctgacctagctccccmaaaagatgtaacttttaaaatgtcagatggaaatatttaaaaagtgttacatgcctgtatagttttagtattttacttaaagggaatgtggctgtctttactggctacaaccagtttaattcaagaagggctgctggtcatcaggagaacaagcaagggttgatgctgcccagagtctccagctaatacacaatatggacatccccttccagggcagcgggaagagagtggctccttgtgcagtgaagctgacatccaccaactaaggcttctggaagcatgtggagactcacagggagtgggcagggtctcagcatctggatagcggtgaaagaccctgagaagaaggtgctttccgtgtggattggctcactgttcttgccca

SEQ ID NO: 68156 - DNA, 574 bp, Homo sapiens
ttcacttgggtgcccattatgcagaattcctcagcacagggaaggtcactcatcacccacaggcccttgatcgttatccaccctttgatgctgtcagattccagaacacgctgcactagtctcttccttcatagggagagaggggaggtgttatgagaaaatctctcatcaatctgacctagctcccccaaaagatgtaacttttaaaatgtcagatggaaatatttaaaaagtgttayatgcctgtatagttttagtattttacttaaagggaatgtggctgtctttactggctacaaccagtttaattcaagaagggctgctggtcatcaggagaacaagcaagggttgatgctgcccagagtctccagctaatacacaatatggacatccccttccagggcagcgggaagagagtggctccttgtgcagtgaagctgacatccaccaactaaggcttctggaagcatgtggagactcacagggagtgggcagggtctcagcatctggatagcggtgaaagaccctgagaagaaggtgctttccgtgtggattggctcactgttcttgccca

SEQ ID NO: 68157 - DNA, 2228 bp, Homo sapiens
  misc_feature (1)...(2228): n = A,T,C or G
gctaaaaagtttgcaaagattgctcatctggctcaggtaaggggcaaactttcccgttttattgagagagcactttttccagacttccaactcctggatactatctgggtatatcctttccaatagatttctgaaacttgaagtgggcattgagtaattctgcaccttactacaacacaggtgcactaggcctcttctgtagtggatccaccttcagaggtagctcaggcattcatgcagtgtactttccttcaggcagaggtctatgaacaccttcaagggctggcactctcccatccttggacagttctccactgtctgcctcttactcatggcctctggggagcaggggaggaccctgactccagaccatatggtccagaaattctcatcaacatccctcaaatccagcacttgaagtttccacctcctgtgagtaacataagggaaaagctcagaatgtaggcaaggaccgacccttgacctgaactttcactccgcatccaggacatgagtcagctgctcctgtcccagtgctcctccttctgtcttttctccatcctgttcccccttggattctgcatggtacccacttctagtacctttaccttccactgggaggaagcaggttcctgtttcctcagtggaccctgtatggtaagcagtccttttccagaggatctgggcaatggccaaggcttctcatgggcaccatcagaagcctctgagccaccctagctcccacacactgccactcctcctgagccagctgtcccttccctggatgtctggacccttcccaccaggccacctgagtcacctcaactggggcaaaccttctgggacactagtgtatcaagtcccttcagcacagcttgcaaggtctccagatgaggtgtcttcatcagggatcccagagggaggtgaagggagggccaggcctgcaccatcagcttcagggcctcacaacatctcatgctgaaggcctccatgaacagaggggagacctccctgggcagctcatccagggtgaagatagtcaagaactggttcctcagcaggctctgccctgccagctccaggagtctggatggggtctggaggctcattctgacaaatctacaaggaaaaactctacagcacaatccagcaaaaaggcaagttcctcagaccaatcccctgcaacccccaattctcccagggccaaagtcatttctctagcgtgtgtgaaagagcccttagtttactccagttcctttctgcaataagtggccacagagacacagttctacccttctggtaccatgaagaatgtgtcccaacttctaaagagcaggcaagatccctcgtagtccatgaattattagccactgatccactaaactcatagcactggcaaatgttaccgaggatctctgaagctcagatctcgtacccagctaatcttttattttttgactttttgtaaagacagtgggtttcactatgttgtccaggctggtcttgaactcctagactcaaacaatccacccactttggcctcccaaagtgctgggattgcaggcatgagcctctgcctggtctcattattgaaaatttcnnnnnnnnnnnnnnnnnnnnnnnnnnnnnnnnnnnnnnnnnnnnnnnnnnnnnnnnnnnnnnnnnnnnnnnnnnnnnnnnnnnnnnnnnnnnnnnnnnnnaggtggattatctgaggtcaggagtttgagaccagcttggccaacatggtaaaaccctacctctaccaaaattagaaaaattagcaaggtgcagttgtctgtgcctataatccaagctactagggaggctgatgcaggaggctcgcttgaacccaggaggcagaggtcgcagtgagctgacaatactccactgcactccagcctgggaaataggctagattcaaagaaaaaaaaaaaaagaaaagagagagaactacatttgattcgacttcttaaactctacccagttaatcctgattggatttttggctttcttccagattaactgattgaattagatattcatccatcagagtgaaagatttagggatagggtgaaagtccaggactcattcactgattccctccacaarcatggaggtttactaatatgtgtccttcatagtcctgagtgtgagatagggaagggttgaatctcttcctgatattagatagaaagaaagaaaacttgaaagtatctttgttgag

SEQ ID NO: 68158 - DNA, 1509 bp, Homo sapiens
gggattacaggcgaatgccaccacgcccagcaattttttttgtattttgagtagataagggggtttcaagaagttggccaggctggtctcaaaatcctgacctgaagtgatctgcccgcctcagsctcccaaaatgctgggattacaggtgtgagacaccaagcctggccatgacaatggcctcagcctcccatagtgctgggattacagacatgagccaccgctcctggctcataatagtgaagttaaaaaaataccatataatataatccttgcaacattaaattacaccatctgatctgatctaccagcagatggcacccgagacctatggattggacattttactcttcttaggaatgaatccagtccagaaatgcccaccctgccccctgctggctcctggggctctgctgtttgggggagtcatgatgaagttgtggcagagggtagaagatgagccccattgcatgccctgggttcttgttgcctccctgttatcaggaataggaggtgagatagattgaaagatgaaaattgctgggacttctgctgagaagagaaaaaagaacaagatgtattcatctaactgtatgccagtccccatgccaagccctaaacatgaaccatcttattggatccttgcagggtcctataagccgttggacatcatcctcattttacagggacctgaggctcttggttaagatccctgacagcaataccagcccctgaatcctcagcaggatccttcacttgggtgcccattatgcaggcttcctcagcacagggaaggtcactcatcacccacaggcacttgattgttatccaccctttgatgatgtgagattccagaacacgctgcactggtctcttccttgatagggagagaggggaggtgttatgagaaaatctctcatcgatctgacctagctccctaataagaagtaactttttaaatgtcagatggaaatatttaaaaagtgttacatacctgtgtagttttagtattttacttaaagggaatgtggctgtctttactggctacaaccagtttaattcaagaagggctgctagtcatcaggggaacaagcaagggttggtgctgcccagagtctccagctaatacacaatatggacatccccttccagggcagcgggaagagagtggctccttgtgcagtgaagctgacatccaccaactaaggcttctggaaccatgtggagactcacaaggagtgggcagggtctcagcatctggctagcagtgaaagaccctgagaagaaggtgctttccacgtggattggctcactgttcttgcccagtaatgttccagacccttggtttccacctagtgtgtattaacccactgaacagccacagaaactaacaaggaattaacagacatctaaagaagtgaagaactggaggaggccaagccaatcgtggtggtccacgcctatactccctgcattttgggaggccaaggcaggagaatcacaagctca

SEQ ID NO: 68159 - DNA, 1509 bp, Homo sapiens
gggattacaggcgaatgccaccacgcccagcaattttttttgtattttgagtagataagggggtttcaagaagttggccaggctggtctcaaaatcctgacctgaagtgatctgcccgcctcagcctcccaaaatgctgggattacaggtgtgagacaccaagcctggccatgacaatggcctcagcctcccatagtgctgggattacagacatgagccaccgctcctggctcataatagtgaagttaaaaaaataccatataatataatccttgcaacattaaattacaccatctgatctgatctaccagcagatggcaccygagacctatggattggacattttactcttcttaggaatgaatccagtccagaaatgcccaccctgccccctgctggctcctggggctctgctgtttgggggagtcatgatgaagttgtggcagagggtagaagatgagccccattgcatgccctgggttcttgttgcctccctgttatcaggaataggaggtgagatagattgaaagatgaaaattgctgggacttctgctgagaagagaaaaaagaacaagatgtattcatctaactgtatgccagtccccatgccaagccctaaacatgaaccatcttattggatccttgcagggtcctataagccgttggacatcatcctcattttacagggacctgaggctcttggttaagatccctgacagcaataccagcccctgaatcctcagcaggatccttcacttgggtgcccattatgcaggcttcctcagcacagggaaggtcactcatcacccacaggcacttgattgttatccaccctttgatgatgtgagattccagaacacgctgcactggtctcttccttgatagggagagaggggaggtgttatgagaaaatctctcatcgatctgacctagctccctaataagaagtaactttttaaatgtcagatggaaatatttaaaaagtgttacatacctgtgtagttttagtattttacttaaagggaatgtggctgtctttactggctacaaccagtttaattcaagaagggctgctagtcatcaggggaacaagcaagggttggtgctgcccagagtctccagctaatacacaatatggacatccccttccagggcagcgggaagagagtggctccttgtgcagtgaagctgacatccaccaactaaggcttctggaaccatgtggagactcacaaggagtgggcagggtctcagcatctggctagcagtgaaagaccctgagaagaaggtgctttccacgtggattggctcactgttcttgcccagtaatgttccagacccttggtttccacctagtgtgtattaacccactgaacagccacagaaactaacaaggaattaacagacatctaaagaagtgaagaactggaggaggccaagccaatcgtggtggtccacgcctatactccctgcattttgggaggccaaggcaggagaatcacaagctca

SEQ ID NO: 68160 - DNA, 1509 bp, Homo sapiens
gggattacaggcgaatgccaccacgcccagcaattttttttgtattttgagtagataagggggtttcaagaagttggccaggctggtctcaaaatcctgacctgaagtgatctgcccgcctcagcctcccaaaatgctgggattacaggtgtgagacaccaagcctggccatgacaatggcctcagcctcccatagtgctgggattacagacatgagccaccgctcctggctcataatagtgaagttaaaaaaataccatataatataatccttgcaacattaaattacaccatctgatctgatctaccagcagatggcacccgagacctatggattggacattttactcttcttaggaatgaatccagtccagaaatgcccaccctgccccctgctggctcctggggctctgctgtttgggggagtcatgatgaagttgtggcagagggtagaagatgagccccattgcatgccctgggttcttgttgcctccctgttatcaggaataggaggtgagatagattgaaagatgaaaattgctgggacttctgctgagaagagaaaaaagaacaagatgtattcatctaactgtatgccagtccccatgccaagccctaaacatgaaccatcttattggatccttgcagggtcctataagccgttggacatcatcctcattttacagggacctgaggctcttggttaagatccctgacagcaataccagcccctgaatcctcagcaggatccttcacttgggtgcccattatgcaggcttcctcagcacagggaaggtcactcatcacccacaggcacttgattgttatccaccctttgatgatgtgagattccagaacacgctgcactggtctcttccttgatagggagagaggggaggtgttatgagaaaatctctcatcgatctgacctagctccctaataagaagtaactttttaaatgtcagatggaaatatttaaaaagtgttacatacctgtgtagttttagtattttacttaaagggaatgtggctgtctttactggctacaaccagtttaattcaagaagggctgctrgtcatcaggggaacaagcaagggttggtgctgcccagagtctccagctaatacacaatatggacatccccttccagggcagcgggaagagagtggctccttgtgcagtgaagctgacatccaccaactaaggcttctggaaccatgtggagactcacaaggagtgggcagggtctcagcatctggctagcagtgaaagaccctgagaagaaggtgctttccacgtggattggctcactgttcttgcccagtaatgttccagacccttggtttccacctagtgtgtattaacccactgaacagccacagaaactaacaaggaattaacagacatctaaagaagtgaagaactggaggaggccaagccaatcgtggtggtccacgcctatactccctgcattttgggaggccaaggcaggagaatcacaagctca

SEQ ID NO: 68161 - DNA, 1509 bp, Homo sapiens
gggattacaggcgaatgccaccacgcccagcaattttttttgtattttgagtagataagggggtttcaagaagttggccaggctggtctcaaaatcctgacctgaagtgatctgcccgcctcagcctcccaaaatgctgggattacaggtgtgagacaccaagcctggccatgacaatggcctcagcctcccatagtgctgggattacagacatgagccaccgctcctggctcataatagtgaagttaaaaaaataccatataatataatccttgcaacattaaattacaccatctgatctgatctaccagcagatggcacccgagacctatggattggacattttactcttcttaggaatgaatccagtccagaaatgcccaccctgccccctgctggctcctggggctctgctgtttgggggagtcatgatgaagttgtggcagagggtagaagatgagccccattgcatgccctgggttcttgttgcctccctgttatcaggaataggaggtgagatagattgaaagatgaaaattgctgggacttctgctgagaagagaaaaaagaacaagatgtattcatctaactgtatgccagtccccatgccaagccctaaacatgaaccatcttattggatccttgcagggtcctataagccgttggacatcatcctcattttacagggacctgaggctcttggttaagatccctgacagcaataccagcccctgaatcctcagcaggatccttcacttgggtgcccattatgcaggcttcctcagcacagggaaggtcactcatcacccacaggcacttgattgttatccaccctttgatgatgtgagattccagaacacgctgcactggtctcttccttgatagggagagaggggaggtgttatgagaaaatctctcatcgatctgacctagctccctaataagaagtaactttttaaatgtcagatggaaatatttaaaaagtgttacatacctgtgtagttttagtattttacttaaagggaatgtggctgtctttactggctacaaccagtttaattcaagaagggctgctagtcatcaggrgaacaagcaagggttggtgctgcccagagtctccagctaatacacaatatggacatccccttccagggcagcgggaagagagtggctccttgtgcagtgaagctgacatccaccaactaaggcttctggaaccatgtggagactcacaaggagtgggcagggtctcagcatctggctagcagtgaaagaccctgagaagaaggtgctttccacgtggattggctcactgttcttgcccagtaatgttccagacccttggtttccacctagtgtgtattaacccactgaacagccacagaaactaacaaggaattaacagacatctaaagaagtgaagaactggaggaggccaagccaatcgtggtggtccacgcctatactccctgcattttgggaggccaaggcaggagaatcacaagctca

SEQ ID NO: 68162 - DNA, 800 bp, Homo sapiens
tggatagcaaggggccggaaagttggggtagcggtaagagggaagaagtcaacaggatgtagaaactgcattctttggtgagttggtgyattgcagggcccttcagatcagctggcatcagtagattcactgacatgcagaacctgaaagaatatctcagatgaaaaagttaatgttttacaatgcttaaatggttgtctgcagggaagttaaggggaactgtaatctaaggtctatatgattttggaacagtaggttgccagcaaccatgaggaaccaggtcagagagcaagaagacctcctgatgaatgctgaatgtgttccaagcttggtttatttttgtttctctccctcccttcttcactgattaaatttataaagtttatcgatgtggcttcaatttcttccaaagaagacttaacctaagccctgagaccactcacgccctcagtggcacctctcctccaccagaacgagcatgtaatctgctaccttaggttatacaaaatcccgaagaccattcaatacgttgagatttttattctgatttcctagggacgactcctctgtttttataaagctttttaaagtagaaagcatttttatattttgatgtggccaaagatttcctaacaacactactttcagattttatttttctgtctaatgttgggaacagatcaaatccttccctgcctgtcactcaagactatgaagttcacatattagtaaaataccatcagtgtttgtggagttcatgaatgaatgatttttttattttttgacagaatgtccctctg

SEQ ID NO: 68163 - DNA, 1340 bp, Homo sapiens
gatccctcaacaaagatactttcaagttttctttctttctgtctaatatcaggaagagattcaacccttccctgtctcacactcaggactttgaaggacacatattagtaaaactccatgtttgtgaagggaatcagtgaatgagtcctggactttcaccctatccctaaatctttcattttgatggatyaatatctaattcgatcagttaatctttaagaaagccaaaaatccaataaggattaactgggtagagattaagaagtctagtcaaatgtagctctctctgtctctctgttcaatctagcctatttcccaggctggagtggagtggtataatgtcagctcactgcaacttctgcctcctgggttcaagtgatcctcctacctcagcctccctagtagcttggaccacaggcgcagaccactgcacctggctaatttttgctgtcttagtagagtcagggttttaccatgttggccaggctcgtcttgaattcctgatctcagatgatccacctgcctcggcctcacaaaatgctcagattacaggtgtgagtcactgcacccagccaaagtggttcagtttgaacatgtgtaacaagtgtgcattggaaacatctatcttgagaatgatgcataacagtgtcacatagctttcaaagcttctcactgaaattttcaataatgaggctggggtggaggctcacacctataatcccagtatgttgggaggccaagaggggtagattgcttgagactaggagttcaagaccagcttggacaacatagcgaaatccactgtctttacaaaaagtcaaaaaataaaagatgagctgggtgtggtgatgcataactgtggtcccagctacttgggaggctgaggaggaagaatcctttgagctgggaggtcaaggctgcactgagctgggatcccaccactacactccaggctgggtgacacagcaagactctgtcagaaagagtgagagagggagagagagaaagagagagagaatgagagaagggaggcagggaaagaagacaagaaagaaaaaagggagagagagggggaaagaaagaaagaagggaggcagagagggaaagaaggaaagaagaaagagagagaaagagaaagcaagcttaaataatgaaaagaaaacaaatagaacctgttctagggatgccccatgaatgttcccaacaagcttatttgtaggaactgaaaatgtgggcatgtaggcttgtgacattcccattcccattgttttagaaccttgagtaattagtagtttcccccaatggtaggaggggttcactttcaggttcctccacactca

SEQ ID NO: 68164 - DNA, 1340 bp, Homo sapiens
gatccctcaacaaagatactttcaagttttctttctttctgtctaatatcaggaagagattcaacccttccctgtctcacactcaggactttgaaggacacatattagtaaaactccatgtttgtgaagggaatcagtgaatgagtcctggactttcaccctatccctaaatctttcattttgatggatcaatatctaattcgatcagttaatctttaagaaagccaaaaatccaataaggattaactgggtagagattaagaagtctagtcaaatgtagctctctctgtctctcwgttcaatctagcctatttcccaggctggagtggagtggtataatgtcagctcactgcaacttctgcctcctgggttcaagtgatcctcctacctcagcctccctagtagcttggaccacaggcgcagaccactgcacctggctaatttttgctgtcttagtagagtcagggttttaccatgttggccaggctcgtcttgaattcctgatctcagatgatccacctgcctcggcctcacaaaatgctcagattacaggtgtgagtcactgcacccagccaaagtggttcagtttgaacatgtgtaacaagtgtgcattggaaacatctatcttgagaatgatgcataacagtgtcacatagctttcaaagcttctcactgaaattttcaataatgaggctggggtggaggctcacacctataatcccagtatgttgggaggccaagaggggtagattgcttgagactaggagttcaagaccagcttggacaacatagcgaaatccactgtctttacaaaaagtcaaaaaataaaagatgagctgggtgtggtgatgcataactgtggtcccagctacttgggaggctgaggaggaagaatcctttgagctgggaggtcaaggctgcactgagctgggatcccaccactacactccaggctgggtgacacagcaagactctgtcagaaagagtgagagagggagagagagaaagagagagagaatgagagaagggaggcagggaaagaagacaagaaagaaaaaagggagagagagggggaaagaaagaaagaagggaggcagagagggaaagaaggaaagaagaaagagagagaaagagaaagcaagcttaaataatgaaaagaaaacaaatagaacctgttctagggatgccccatgaatgttcccaacaagcttatttgtaggaactgaaaatgtgggcatgtaggcttgtgacattcccattcccattgttttagaaccttgagtaattagtagtttcccccaatggtaggaggggttcactttcaggttcctccacactca

SEQ ID NO: 68165 - DNA, 1340 bp, Homo sapiens
gatccctcaacaaagatactttcaagttttctttctttctgtctaatatcaggaagagattcaacccttccctgtctcacactcaggactttgaaggacacatattagtaaaactccatgtttgtgaagggaatcagtgaatgagtcctggactttcaccctatccctaaatctttcattttgatggatcaatatctaattcgatcagttaatctttaagaaagccaaaaatccaataaggattaactgggtagagattaagaagtctagtcaaatgtagctctctctgtctctctgttcaatctagcctattycccaggctggagtggagtggtataatgtcagctcactgcaacttctgcctcctgggttcaagtgatcctcctacctcagcctccctagtagcttggaccacaggcgcagaccactgcacctggctaatttttgctgtcttagtagagtcagggttttaccatgttggccaggctcgtcttgaattcctgatctcagatgatccacctgcctcggcctcacaaaatgctcagattacaggtgtgagtcactgcacccagccaaagtggttcagtttgaacatgtgtaacaagtgtgcattggaaacatctatcttgagaatgatgcataacagtgtcacatagctttcaaagcttctcactgaaattttcaataatgaggctggggtggaggctcacacctataatcccagtatgttgggaggccaagaggggtagattgcttgagactaggagttcaagaccagcttggacaacatagcgaaatccactgtctttacaaaaagtcaaaaaataaaagatgagctgggtgtggtgatgcataactgtggtcccagctacttgggaggctgaggaggaagaatcctttgagctgggaggtcaaggctgcactgagctgggatcccaccactacactccaggctgggtgacacagcaagactctgtcagaaagagtgagagagggagagagagaaagagagagagaatgagagaagggaggcagggaaagaagacaagaaagaaaaaagggagagagagggggaaagaaagaaagaagggaggcagagagggaaagaaggaaagaagaaagagagagaaagagaaagcaagcttaaataatgaaaagaaaacaaatagaacctgttctagggatgccccatgaatgttcccaacaagcttatttgtaggaactgaaaatgtgggcatgtaggcttgtgacattcccattcccattgttttagaaccttgagtaattagtagtttcccccaatggtaggaggggttcactttcaggttcctccacactca

SEQ ID NO: 68166 - DNA, 2135 bp, Homo sapiens
  misc_feature (1)...(2135): n = A,T,C or G
ccccccactgttcatggaggccttcagcaggagacgctgtgaggccctgaagctgatggtgcagtcctggcccttccgccgcctccctctgaggcctctgataaagatgccttgtctggaggccttccaagctgtgctcgatgggctggatgcactgcttaacctaggggttcgtcccaggtgaggtggcccaggtgggctggtggggagggcccaggtgtccaactgaaggaacagctgsgtcgtgagaagtgaggaggcccaagggggatggtggtggtgaggaagccgagaggacttggccattcaccagctcctcagggaaagcactgctcaccacgcaaggtccatggaggtaacaggaacctctcctctaatggcactgaaaggcaccatgaaaagtgagaactgggccgggcacggtggctcacaatgtattcccagcacattgggaggctgaggtcaagagttggaggccagcctgtccaacatggtaaaccccaactctactaaaaatactaaaattagctgggcatggtggtgggctcctgtaatcccagctacttgtgaggttgaggcaggagaatcatttgaatctgggaagcagaggttgcagtgaggtgacatcacaccactgcactctagcctgggcgacacagggagacttggtctcaaaaaaaaaacaaaacaatgtggaagtgggtaggatccaaggggaaaacagagtgaagaaaagtcagagagagggacaagaagcagggaggggaggagctgctatccaggatgtggagtttaagttcagaaatgagttctgaaattctcagtctcacctctattttcccacaggaggtggaaacttcaagtgctggatttacaggatgtctgtgagaacttctggatggtttggtctgaagctatggcccatgggtgcttcctcaatgccaagaggaacaaaaaaccagtggaggactgtccaaggatgagaggacggcagcccttgactgtgttcgtagaactttggctcaagaacaggactctggatgaatacctcacctgcctccttctatgggtcaagcagaggaaagatttactacacctgtgctgtaagaagctgaaaattttgggaatgcccttccgcaatatcagaagcatcctgaaaatggtgaacctagactgtatccaggaggtggaagtgaattgcaagtgggtactgcccatcctgacacagtttaccccatacctgggccacatgaggaatcttcagaaactcattctctcccacatggatgtctctcgctacgtttccccagagcagaagaaggagattgttacccagttcaccactcagttcctcaagctgcgctgcctccaaaagctttatatgaactctgtttctttcctcgaaggccacctggaccagctgctcangtgagggagggtggtgagctttctctgcagaccacagcagagcctgttacagtaaacactagtgggcatctactgtgagnnnnnnnnnnnnnnnnnnnnnnnnnnnnnnnnnnnnnnnnnnnnnnnnnnnnnnnnnnnnnnnnnnnnnnnnnnnnnnnnnnnnnnnnnnnnnnnnnnnngtattgaatggtttttgggattttgtgtaacctaaggtagcagattacatgctcgttctggtggaggagaggtgccactgagggcgtgagtggtctcagggcttaggttaagccttctttggaagaaattgaaaccacatctctaaagtttataaatttaatcagtgaagaagggagggagagaaacaaaaataaacgaagcttgcaacacattcagccttcatcaggaggtcttcttgctctctgacctggttcctcatggttgctggcagcctactgttccaaaatcatatagaccttagattacagttccccttaacttccctgcagacaacgattcaagcattgtaaaacattaattttttcatctgagatattctttcaggttctgcatgtcagtgaaactgctgatgccagctgatctgaagggccatgcaatgcaccaactcaccaaagaatgcagtttctacatcctgttgacttcttccctcttaccactaccccaactttccggcctcttgctatcca

SEQ ID NO: 68167 - DNA, 2135 bp, Homo sapiens
  misc_feature (1)...(2135): n = A,T,C or G
ccccccactgttcatggaggccttcagcaggagacgctgtgaggccctgaagctgatggtgcagtcctggcccttccgccgcctccctctgaggcctctgataaagatgccttgtctggaggccttccaagctgtgctcgatgggctggatgcactgcttaacctaggggttcgtcccaggtgaggtggcccaggtgggctggtggggagggcccaggtgtccaactgaaggaacagctgcgtcgtgagaagtgaggaggcccaagggggatggtggtggtgaggaagccgagaggacttggccattcaccagctcctcagggaaagcactgctcaccasgcaaggtccatggaggtaacaggaacctctcctctaatggcactgaaaggcaccatgaaaagtgagaactgggccgggcacggtggctcacaatgtattcccagcacattgggaggctgaggtcaagagttggaggccagcctgtccaacatggtaaaccccaactctactaaaaatactaaaattagctgggcatggtggtgggctcctgtaatcccagctacttgtgaggttgaggcaggagaatcatttgaatctgggaagcagaggttgcagtgaggtgacatcacaccactgcactctagcctgggcgacacagggagacttggtctcaaaaaaaaaacaaaacaatgtggaagtgggtaggatccaaggggaaaacagagtgaagaaaagtcagagagagggacaagaagcagggaggggaggagctgctatccaggatgtggagtttaagttcagaaatgagttctgaaattctcagtctcacctctattttcccacaggaggtggaaacttcaagtgctggatttacaggatgtctgtgagaacttctggatggtttggtctgaagctatggcccatgggtgcttcctcaatgccaagaggaacaaaaaaccagtggaggactgtccaaggatgagaggacggcagcccttgactgtgttcgtagaactttggctcaagaacaggactctggatgaatacctcacctgcctccttctatgggtcaagcagaggaaagatttactacacctgtgctgtaagaagctgaaaattttgggaatgcccttccgcaatatcagaagcatcctgaaaatggtgaacctagactgtatccaggaggtggaagtgaattgcaagtgggtactgcccatcctgacacagtttaccccatacctgggccacatgaggaatcttcagaaactcattctctcccacatggatgtctctcgctacgtttccccagagcagaagaaggagattgttacccagttcaccactcagttcctcaagctgcgctgcctccaaaagctttatatgaactctgtttctttcctcgaaggccacctggaccagctgctcangtgagggagggtggtgagctttctctgcagaccacagcagagcctgttacagtaaacactagtgggcatctactgtgagnnnnnnnnnnnnnnnnnnnnnnnnnnnnnnnnnnnnnnnnnnnnnnnnnnnnnnnnnnnnnnnnnnnnnnnnnnnnnnnnnnnnnnnnnnnnnnnnnnnngtattgaatggtttttgggattttgtgtaacctaaggtagcagattacatgctcgttctggtggaggagaggtgccactgagggcgtgagtggtctcagggcttaggttaagccttctttggaagaaattgaaaccacatctctaaagtttataaatttaatcagtgaagaagggagggagagaaacaaaaataaacgaagcttgcaacacattcagccttcatcaggaggtcttcttgctctctgacctggttcctcatggttgctggcagcctactgttccaaaatcatatagaccttagattacagttccccttaacttccctgcagacaacgattcaagcattgtaaaacattaattttttcatctgagatattctttcaggttctgcatgtcagtgaaactgctgatgccagctgatctgaagggccatgcaatgcaccaactcaccaaagaatgcagtttctacatcctgttgacttcttccctcttaccactaccccaactttccggcctcttgctatcca

SEQ ID NO: 68168 - DNA, 2135 bp, Homo sapiens
  misc_feature (1)...(2135): n = A,T,C or G
ccccccactgttcatggaggccttcagcaggagacgctgtgaggccctgaagctgatggtgcagtcctggcccttccgccgcctccctctgaggcctctgataaagatgccttgtctggaggccttccaagctgtgctcgatgggctggatgcactgcttaacctaggggttcgtcccaggtgaggtggcccaggtgggctggtggggagggcccaggtgtccaactgaaggaacagctgcgtcgtgagaagtgaggaggcccaagggggatggtggtggtgaggaagccgagaggacttggccattcaccagctcctcagggaaagcactgctcaccacgcaaggtccatggaggtaacaggaacctctcctctaatggcactgaaaggcaccatgaaaagtgagaactgggccgggcacggtggctcacaatgtattcccagcacattgggaggctgaggtcaagagttggaggccagcctgtccaacatggtaaaccccaactctactaaaaatactaaaattagctgggcatggtggtgggctcctgtaatcccagctacttgtgaggttgaggcaggagaatcatttgaatctgggaagcagaggttgcagtgaggtgacatcacaccactgcactctagcctgggcgacacagggagacttggtctcaaaaaaaaaacaaaacaatgtggaagtgggyaggatccaaggggaaaacagagtgaagaaaagtcagagagagggacaagaagcagggaggggaggagctgctatccaggatgtggagtttaagttcagaaatgagttctgaaattctcagtctcacctctattttcccacaggaggtggaaacttcaagtgctggatttacaggatgtctgtgagaacttctggatggtttggtctgaagctatggcccatgggtgcttcctcaatgccaagaggaacaaaaaaccagtggaggactgtccaaggatgagaggacggcagcccttgactgtgttcgtagaactttggctcaagaacaggactctggatgaatacctcacctgcctccttctatgggtcaagcagaggaaagatttactacacctgtgctgtaagaagctgaaaattttgggaatgcccttccgcaatatcagaagcatcctgaaaatggtgaacctagactgtatccaggaggtggaagtgaattgcaagtgggtactgcccatcctgacacagtttaccccatacctgggccacatgaggaatcttcagaaactcattctctcccacatggatgtctctcgctacgtttccccagagcagaagaaggagattgttacccagttcaccactcagttcctcaagctgcgctgcctccaaaagctttatatgaactctgtttctttcctcgaaggccacctggaccagctgctcangtgagggagggtggtgagctttctctgcagaccacagcagagcctgttacagtaaacactagtgggcatctactgtgagnnnnnnnnnnnnnnnnnnnnnnnnnnnnnnnnnnnnnnnnnnnnnnnnnnnnnnnnnnnnnnnnnnnnnnnnnnnnnnnnnnnnnnnnnnnnnnnnnnnngtattgaatggtttttgggattttgtgtaacctaaggtagcagattacatgctcgttctggtggaggagaggtgccactgagggcgtgagtggtctcagggcttaggttaagccttctttggaagaaattgaaaccacatctctaaagtttataaatttaatcagtgaagaagggagggagagaaacaaaaataaacgaagcttgcaacacattcagccttcatcaggaggtcttcttgctctctgacctggttcctcatggttgctggcagcctactgttccaaaatcatatagaccttagattacagttccccttaacttccctgcagacaacgattcaagcattgtaaaacattaattttttcatctgagatattctttcaggttctgcatgtcagtgaaactgctgatgccagctgatctgaagggccatgcaatgcaccaactcaccaaagaatgcagtttctacatcctgttgacttcttccctcttaccactaccccaactttccggcctcttgctatcca

SEQ ID NO: 68169 - DNA, 2135 bp, Homo sapiens
  misc_feature (1)...(2135): n = A,T,C or G
ccccccactgttcatggaggccttcagcaggagacgctgtgaggccctgaagctgatggtgcagtcctggcccttccgccgcctccctctgaggcctctgataaagatgccttgtctggaggccttccaagctgtgctcgatgggctggatgcactgcttaacctaggggttcgtcccaggtgaggtggcccaggtgggctggtggggagggcccaggtgtccaactgaaggaacagctgcgtcgtgagaagtgaggaggcccaagggggatggtggtggtgaggaagccgagaggacttggccattcaccagctcctcagggaaagcactgctcaccacgcaaggtccatggaggtaacaggaacctctcctctaatggcactgaaaggcaccatgaaaagtgagaactgggccgggcacggtggctcacaatgtattcccagcacattgggaggctgaggtcaagagttggaggccagcctgtccaacatggtaaaccccaactctactaaaaatactaaaattagctgggcatggtggtgggctcctgtaatcccagctacttgtgaggttgaggcaggagaatcatttgaatctgggaagcagaggttgcagtgaggtgacatcacaccactgcactctagcctgggcgacacagggagacttggtctcaaaaaaaaaacaaaacaatgtggaagtgggtaggatccaaggggaaaacagagtgaagaaaagtcagagagagggacaagaagcagggaggggaggagctgctatccaggatgtggagtttaagttcagaaatgagttctgaaattctcagtctcacctctattttcccacaggaggtggaaacttcaagtgctggatttacaggatgtctgtgagaacttctggatggtttggtctgaagctatggcccatgggtgcttcctcaatgccaagaggaacaaaaaaccagtggaggactgtccaaggatgaraggacggcagcccttgactgtgttcgtagaactttggctcaagaacaggactctggatgaatacctcacctgcctccttctatgggtcaagcagaggaaagatttactacacctgtgctgtaagaagctgaaaattttgggaatgcccttccgcaatatcagaagcatcctgaaaatggtgaacctagactgtatccaggaggtggaagtgaattgcaagtgggtactgcccatcctgacacagtttaccccatacctgggccacatgaggaatcttcagaaactcattctctcccacatggatgtctctcgctacgtttccccagagcagaagaaggagattgttacccagttcaccactcagttcctcaagctgcgctgcctccaaaagctttatatgaactctgtttctttcctcgaaggccacctggaccagctgctcangtgagggagggtggtgagctttctctgcagaccacagcagagcctgttacagtaaacactagtgggcatctactgtgagnnnnnnnnnnnnnnnnnnnnnnnnnnnnnnnnnnnnnnnnnnnnnnnnnnnnnnnnnnnnnnnnnnnnnnnnnnnnnnnnnnnnnnnnnnnnnnnnnnnngtattgaatggtttttgggattttgtgtaacctaaggtagcagattacatgctcgttctggtggaggagaggtgccactgagggcgtgagtggtctcagggcttaggttaagccttctttggaagaaattgaaaccacatctctaaagtttataaatttaatcagtgaagaagggagggagagaaacaaaaataaacgaagcttgcaacacattcagccttcatcaggaggtcttcttgctctctgacctggttcctcatggttgctggcagcctactgttccaaaatcatatagaccttagattacagttccccttaacttccctgcagacaacgattcaagcattgtaaaacattaattttttcatctgagatattctttcaggttctgcatgtcagtgaaactgctgatgccagctgatctgaagggccatgcaatgcaccaactcaccaaagaatgcagtttctacatcctgttgacttcttccctcttaccactaccccaactttccggcctcttgctatcca

SEQ ID NO: 68170 - DNA, 918 bp, Homo sapiens
cataagcccagcagtttgagaccagctggagcaacacagcgaaaccctgtctcaaattgtctttaataaaaatkttggaattattaaaaaatgaaataaataagaaaagagaaaaatagtttgcacctacatagtagattttagtgtccaagtgcctggaagagaactttggatttctctaccccactgggcacgccttctctagcagcaaagatggagctccagttcctcagacggtgatgagccacaggaagggcagggggtggggccaatgaagatcctcttgggctgcctgacttccctcagtgtacacatcagctcagcccgaagtggggtgaagatctcccaattgacacgaaccaaggaattcaaactctcctcaggggcaggatacgtctccaggcttaacttgctcagcccactggtgtggcgcagcaggtccttcagggcgtcaatagacatgcaattgctgccaaagtagaaggtggtgagctgggagcagcggctcaggccaggcaggatggcactgagttgggagtagtggatctgacagccctccaagatgagggttttgagagaggcagcaattttctccagcagagctccgaggggttcaagactgatgcggaacagcagcacgtagctgagattcagatgctttaggtaaccgaggcttgggtactgggagagacacttcatgtcttcttccaataggtagccataagttaattccaagttctccaaggggttctggaggcacctgtggagatcaagaagttagttctgggcagtgataccagttagatgaaggtagtgccttcatctaggaaaatgcctgcgtcaaacaaacacaagtttgttcccaccatctgatgatggtcctcatggaagttgctgcatgatgaggaccctgatcgt

SEQ ID NO: 68171 - DNA, 918 bp, Homo sapiens
cataagcccagcagtttgagaccagctggagcaacacagcgaaaccctgtctcaaattgtctttaataaaaatgttggaattattaaaaaatgaaataaataagaaaagagaaaaatagtttgcacctacatagtagattttagtgtccaagtgcctggaagagaactttggatttctctaccccactgggcacgccttcyctagcagcaaagatggagctccagttcctcagacggtgatgagccacaggaagggcagggggtggggccaatgaagatcctcttgggctgcctgacttccctcagtgtacacatcagctcagcccgaagtggggtgaagatctcccaattgacacgaaccaaggaattcaaactctcctcaggggcaggatacgtctccaggcttaacttgctcagcccactggtgtggcgcagcaggtccttcagggcgtcaatagacatgcaattgctgccaaagtagaaggtggtgagctgggagcagcggctcaggccaggcaggatggcactgagttgggagtagtggatctgacagccctccaagatgagggttttgagagaggcagcaattttctccagcagagctccgaggggttcaagactgatgcggaacagcagcacgtagctgagattcagatgctttaggtaaccgaggcttgggtactgggagagacacttcatgtcttcttccaataggtagccataagttaattccaagttctccaaggggttctggaggcacctgtggagatcaagaagttagttctgggcagtgataccagttagatgaaggtagtgccttcatctaggaaaatgcctgcgtcaaacaaacacaagtttgttcccaccatctgatgatggtcctcatggaagttgctgcatgatgaggaccctgatcgt

SEQ ID NO: 68172 - DNA, 918 bp, Homo sapiens
cataagcccagcagtttgagaccagctggagcaacacagcgaaaccctgtctcaaattgtctttaataaaaatgttggaattattaaaaaatgaaataaataagaaaagagaaaaatagtttgcacctacatagtagattttagtgtccaagtgcctggaagagaactttggatttctctaccccactgggcacgccttctctagcagcaaagatggagctccagttcctcagacggtgatgagccacaggaagggcagggggtggggccaatgaagatcctcttgggctgcctgacttccctcagtgtacacatcagctcagcccgaagtggggtgaagatctcccaattgacacgaaccaaggaattcaaactctcctcaggggcaggatacgtctccaggcttaacttgctcagcccactggtgtggcgcagcaggtccttcagggcgtcaatagacatgcaattkctgccaaagtagaaggtggtgagctgggagcagcggctcaggccaggcaggatggcactgagttgggagtagtggatctgacagccctccaagatgagggttttgagagaggcagcaattttctccagcagagctccgaggggttcaagactgatgcggaacagcagcacgtagctgagattcagatgctttaggtaaccgaggcttgggtactgggagagacacttcatgtcttcttccaataggtagccataagttaattccaagttctccaaggggttctggaggcacctgtggagatcaagaagttagttctgggcagtgataccagttagatgaaggtagtgccttcatctaggaaaatgcctgcgtcaaacaaacacaagtttgttcccaccatctgatgatggtcctcatggaagttgctgcatgatgaggaccctgatcgt

SEQ ID NO: 68173 - DNA, 1257 bp, Homo sapiens
cagtgttagggatagggtagaagtcaagaatacattcattcaaggccagacgaagtggctcacacctgtaatcccagcactctgggacgcagaggtaggtggattatctgaggtcaggagtttgagacaagcctggccaacatggtaaaaccctacctctactaaaattacaaaaattagccagttgcggtggtctgcgcctatagtccaagctactagggaggctgagacaggaagatcgcttgaacccaggaggcagaggttgcagtgagctgacaatacaccactgaactccagcctgggaaataggctagattcaaaaaaaaaaaaaaaaaaaaaaaaaaaaaaagaaaaagaaaaaggagagagagagagctagatttgattcgaatttacccagttaatcctgattggatttttggctttcttccagatttactgatggaattagatattcacccatcaaagtgaaagatttagggatggggtggaagcccaggactcattcactgattcccttcacaaacaaaatggggttttattaatatgtgtccttcacagtcctgagtgtgagatagggaagggttgaatctcttcctgatattagacagaaagaaaaaacttgaaagtatctttgttgagggatcctcggccacatcaaatttatcaaaatatttcagagttaaaacagttttcaaagacagagttgacagtccccaagaacacacaatagaaatcttcatgtatccaatgatcacctgggtggtataatctaattttttttggtgtgggggaagctgagtctcactttgtcgcccaggctggagtgcagcggcgccatctcagctcactgtaacctccacctctgagattcaagcaattctcatgcttcagccttccacgtagctgggattacaggcatgcamccccacacccatgtctccattcgagtggaagaattacagtgaggacgtgattggtttaaaattaaggtcatagatcctttttggttaagatattgtttttgttttttggacagggtctctctcttttgcccaggctggagtacagcagtggtgtgagcatggctcactgcagcctcaatcttctgggctcaagtgattctcccacaccagccacccaaatagctgggactacagatgcatgtcaccatgctcggctaattaaaataaaaaaaagtagaggccaagcaccagtgactcacagctgtaatcccagcactttgggaggccaagg

SEQ ID NO: 68174 - DNA, 1065 bp, Homo sapiens
ttataccatctggtccgatctatcagcagatggcacccgagacatacggattggaaattttgatcttattatgaatgaatccagtccagaaatgcccaccctgccccctgctggctcctggggctctgctctttgggggaatcatgatgaaattgtggcagagagtagaagttgagccccattgcatgccctgagttcttgttgcctctctattatcaggaaaaggaggtgagattgaaagatgaaaaatgctgggacttctgctgagaagagaaaaaagaacaagatgtattgatcttactgtatgccagaccccatgccaagccctaaacatgaaccatctcattggatcctaccaaggtcccataagctgttggatatcatcatcctcattttacaggaagctgaggctctaggctaacatccctgacagcaacaccagcccctgagtacacagcaggatccttcacttgggtgcccactatgcaggcttcctcaccacagggaaggtcactcatcacccacaggcacttgatcgttatccaccctttgatgatgtcagattccagaacatgctgcactagtcacttccttcatagggagagagggaaggtgttatgagaaaatctctcatcaatctgacctagctccccaaaaagatgtaacttttaaaatgtcagatggaaatatttaaaaagtgttacatgcctgtatagttttagtattttacttaaagggaatgtggctgtctttactggctacaacmagtttaattcaagaagggctgctggtcatcaggggaacaagcaagggttggtgctgcccagagtctccagctaatacacaatatggacatccccttccagggcagcgggaagagactggctccttgtgcagtgaagctgacatccaccaactaaggcttctggaagcatgtggagactcacagggagtgggcagggtctcagcatctggatagcggtgaaagacgctgagaagaaggtgctttccgtgtggattggctcactgttcttgcccagcaatgttccaggcctttggtgtcca

SEQ ID NO: 68175 - DNA, 1300 bp, Homo sapiens
aggatcattctcatggccggatggtcaacacttcggatgatgtgtgatgaagagctttgccaccgaggtcaattccactttagrcccggcccagtaactcacacctgtaatcccagcactttgggaggctgagactggtggattccttgagatcaggagtttgagaccagcctgctgaacatggcaaaacctcgtctctactaaaaatccaaaaattagccaggtgtggtggcgggagcctgcaattccagctacttgggaagctgaggcagaagaatcgcttgaacccaggaggtgtaggttgcagtgagcagagatcatgccactacactccagcctgggtgacagagtgatactctattaaaaaaaaaaaaaggagaaaaaataattccatttcaggctgagtcatttcaccatcatttataggaatggatcaagttcacagaatccctaaagctccctttcctcatctgtcaggcagaaaaccacatccctgggccacagaagcccagtggagatgcaggcataaaggacaaacccagacaggatcctgcaacatcagctggggtgggcaggctgcaggcgtccctgacacacctgtatcatcagcaaaccatctatcactttcatcattctttgtgcctgctccctgaccctctgtttcagaatcatacatttcctaggtaattaatttacctggagctcaaaagaaacttttacaacagggaattagagatgggatcattcatgttcaccaaactgtggggcacaaagctgattttctgacatgtgcaggtttgctgagcattcccctcttcagtgcccacttcacttccctacttcacatcatcttcttaaaaattatcttgttggctgggcgtggtagctctcgcctataatcccagcactttgggagtccaaggtgggtggatcacctgaaatcaggggttggagaataacctggccaaaatggtgaaaacctgtctctacttaaaatataaaaattagccaggtgtggtggcccacgcctgtaatcccaggtactcaggaggctgaggcaggagaatcgcttgaacctgggaggcagaagttgctgcgagctgagatgtcacaagtgcactctaccctggatgatcaaagtgaaaatccatctcagaaaaaaaagttatcttgtttgattttacttttatttattcatttctgacaggggtcttgggatgttacccagactgctcttaaactcctaggctcaagctatcctcttgcctcagactcccaaactgctaggattacaggcatg

SEQ ID NO: 68176 - DNA, 1300 bp, Homo sapiens
aggatcattctcatggccggatggtcaacacttcggatgatgtgtgatgaagagctttgccaccgaggtcaattccactttagacccggcccagtaactcacacctgtaatcccagmactttgggaggctgagactggtggattccttgagatcaggagtttgagaccagcctgctgaacatggcaaaacctcgtctctactaaaaatccaaaaattagccaggtgtggtggcgggagcctgcaattccagctacttgggaagctgaggcagaagaatcgcttgaacccaggaggtgtaggttgcagtgagcagagatcatgccactacactccagcctgggtgacagagtgatactctattaaaaaaaaaaaaaggagaaaaaataattccatttcaggctgagtcatttcaccatcatttataggaatggatcaagttcacagaatccctaaagctccctttcctcatctgtcaggcagaaaaccacatccctgggccacagaagcccagtggagatgcaggcataaaggacaaacccagacaggatcctgcaacatcagctggggtgggcaggctgcaggcgtccctgacacacctgtatcatcagcaaaccatctatcactttcatcattctttgtgcctgctccctgaccctctgtttcagaatcatacatttcctaggtaattaatttacctggagctcaaaagaaacttttacaacagggaattagagatgggatcattcatgttcaccaaactgtggggcacaaagctgattttctgacatgtgcaggtttgctgagcattcccctcttcagtgcccacttcacttccctacttcacatcatcttcttaaaaattatcttgttggctgggcgtggtagctctcgcctataatcccagcactttgggagtccaaggtgggtggatcacctgaaatcaggggttggagaataacctggccaaaatggtgaaaacctgtctctacttaaaatataaaaattagccaggtgtggtggcccacgcctgtaatcccaggtactcaggaggctgaggcaggagaatcgcttgaacctgggaggcagaagttgctgcgagctgagatgtcacaagtgcactctaccctggatgatcaaagtgaaaatccatctcagaaaaaaaagttatcttgtttgattttacttttatttattcatttctgacaggggtcttgggatgttacccagactgctcttaaactcctaggctcaagctatcctcttgcctcagactcccaaactgctaggattacaggcatg

SEQ ID NO: 68177 - DNA, 695 bp, Homo sapiens
agagttccgttttctttcagtgccttgttcagataagtgagttcttggctaaagaagtaaacaaaatttagcttctgttaacattgttattttatgcctcaggaagaagaccagctacaaggaaatacttctgaaaaatcactctgaaccccaagctggagtgaatcttctcctgagctctctcattccagaatggcaatcttgtttcaggagagatctctaatagtgactgatggtaaaggaagaaggctgtgcctagaacaaagaatcaggctggcaaagaaatcacaggtctttcctcaaactttaaattgctactctctggagatagctacctggactttacagagctgtcagaagacttgggaaggtttgccagcattggaaaaagccacttggacttcacagagctgtcagaagacttaggaagctttgccagtagttcctgagaccagaaatacatattatgaagcaggtgctggaacaggccctggcccctacttgtgaagctgcagatataggtaagataatatcatccagaatgtggagacgaggcaatcgaygatgctggaaaagttgaagagagagtttgaatgaaggacaaaccaccgatgggaaagcttgggaggatcacttatagcttgactagcaaaaggctttgggaataggatagaaagcagcaaacctgaacttta

SEQ ID NO: 68178 - DNA, 514 bp, Homo sapiens
ttctttacaatagttcaattaccagattttacaggctctattttataaataaggaaattggggcatagagcaattcagtaacatgctcaagataagttgaccattaaatggtagagacagtctgaccccatagccctcacttatgtatggagataaaaaamgcatccctttcccactgataagaaatgaagcaccacatttacaaccctgaacaaaactcacagcaaatggggaagtgatccaattattgataaaaacatattggccattataatatcttctactgaaaatactttcttcctctctcatgaatttgtgagaatttaagttgtgattcactttcagctcagtcttagaatttattcattgcattatagaatagttgttttccaacatttttgagtatgacataccatatgaaatacattttatattataaccaaatagttacacatatgtatttggaaaattgaaattaatgtagatgaaataatatttacattgacaatatgca

SEQ ID NO: 68179 - DNA, 1504 bp, Homo sapiens
ataccataaacatgtacaattattatatatcaaaaaagcatggagtttcaaagaccttctttttaaaaagtttttaaaaatgtaataataataataatctacaatatacaggagagccctgtgacaaagagttacccaaaatgttaataataccaagtttgagaaacctgctgtatagccaagcaggctctttgggaataggggcattaatggcagagggatggagcaggcgctcttggtgtaataactgatcgtcgttttctctcttccactcttttctcccacttgtcctcacacaggagccaatgcctcggccccagaccaactgagcttagctttagcctggaacagagtcgacatcgctcgcagccagatctttatttacgggcaacagtggccggtagagtatatatcgtctcccatgaaaagcccactttggttggccaagggtatttgtttaaggagcctctgaggtcagctcagaaaacgattgctttttctttaagatggaatgtgttccttggtagcaaagtctgtatcctgagctccctttctcatatttaggaaagcaccgccatctagtggaaatttcaactgaacacaactccaaatatttccatctctatgagttgtctttaatagcaattttcagctgcaaatgatgccatttatttgaatacatctgaaaaaatataagacaaatctgtattaactaaaattaaggaaggggtagaattattaatttgcttctgattgtctttgatggggcaaagggaagggtcacacctcaggatgcagaattagcaggcttccctctgcaggcgccatctggtcctggtgactgagcacaggtcctccctatttgcaaagaacaacatgaggaarccaatgctttatataactgttcttggtttgcttccctcaattgactctaccaaaaataaaaatttgagagattggccatcaggtgggatatgtatgcatccacaggaggcagcccagcagcctgaaactcggtttctgtgcctggaatcacagcactcaccggcaagccttatcttactccttcctttcccctagagagtttctgcctgggatggagcccctgtcttcattcagtgctggtggattgctaacatggaaagatttgtcagagtctagaccctgcaacatttttgtttaatggattaaataaaaatctaagctattggcaaatccagaaagtaggctggttgttctgttttgttatgtttttgttttgttttcagttaagtgacatctttgtggtcttgcttctacagagacccagcattgatttagggcctttggtctgttgacttgggtccctcttctcaagttggcctggggtctccctcagagcctaaggataacaaaaatgaagacagcaaaagtgccccctttgacacttcgctggtgttgagaaatttaatcagataattgcaaggggaaaaaccttgtgaacccttgcaccttcttgggatcc

SEQ ID NO: 68180 - DNA, 812 bp, Homo sapiens
aaggactcggagaatgattgctgaggtcagaagccaacacaagtatgcaaaggtaggcacaaaagctaaccatctaggccgggcgcagtggctaacacctgtaatcccagcactttgggaagctgaggtgggcggatcactaggtcaggagattgagaccatcctagctaacatggtgaaatrccgtctctactaaaaatacaaaaaaaattagccaggcatggtggcgggtgaccgtagtcccagctacttgggaggctgaggcaggagaatggtgtgaacccaggaggtggagcttgcagtgagccaagatcgtgacactgcactccagcctgggtgacagagcaagatttcatctcaaaaaaaaaaaaaaaacagctaaccatctgttccagggaggagcaaacaggtggcaggcaagtggtcctagcaagaggctgagatggaatccagtatccagaatagccattcaaatagacgatgagcagacaattaacagatgggtggcatcgggtgtccagagtactgcaggtgggcagttgaatagtatctgttgataaccagaggtatagatggaaatacagctgagaaatggtgactatggtccacctgaggtctagacaactcgctgatgaggtcagacaccagcagaggcacaggtgactagaagaacatcatatcacaggatgactggcattcagatagtactgtgggatcccaacatgtacaggtatgctttgctgtccaaattctccacaatccaaacttttccaaacttgagtattggaaagcattgtagaggtagtgatttt

SEQ ID NO: 68181 - DNA, 651 bp, Homo sapiens
ctctgagcccagaaattcgaggctaaagtgagctggatcacaccagaccccaggtagccccatggacctaccagattgctcatagctctctgcattcttccagacacttccatgattctgtgccttaattaagyacctcctcctagaaacttcatttatatcctgccccactcctcatcccacctcactcccaaggagactgcatattttcaatcttccctgagctttgcactcagcacatgtatcttcgtctcctttattcccacctcctaattccatgacaattccttgaggaaaggaccatgttattaatctattttatattacatcctacatatagcaggcactaaataaatatttgtaataccaagctacaaaatctacagggaataggcaccatttaaacaagatccttttaggttgggatggagtccacgctctgttgcccaggctggagtgcaatggtgcgatctcgactcactgcagcctccgtctcccaggttcaagcaattctcctgcctaagcctcctgagtagctaggattacaggtgcctgccacccagcccggctgttttgtatatttagtagagatggggtttcgccatgttggccaggctggcctcaaactcctgacctcagatgtctgcccac

SEQ ID NO: 68182 - DNA, 1012 bp, Homo sapiens
tgcataagataaatactatgagaaatatagcaattacatttttttytggaaagtcagaatgttataggaaacattctggacacaacttcaaaaatttttagttgaaatgttccagctgtaaccatgaacacatcattaaccctccctaggcctcagtttcctctcctgggggatgggagagaatcatgacagcacctcctcagctgtgttcaccagagctttcgtcactgacttgagaagtccagtttcccaggcctgtgtctgtctgcatgtctgaatggcttatggactgatacttctatcagctctggctccatggggagtggtgatggctgaggtctgacaggggccaggcagtgctagatgaagggagaggggcccttcatttgggtgagctgccggagtgggaggcactgtgtcttgcttctgatggagtgtctgagaagcaggtccaagaggcgctgcttcaggacccgcctcagattagcacaggtccccacactgggagcagagggcatgatttctggagtgatctcagaggtgctgcagctgggaaactgattaccaagtgagaaggatgtttaatggagatggtggtgaagtgacactaacaggaagctgtactcctgattctcagcagaaataagatttgggggaaagcaggaaagttattcacatccctctgagaaaggggaggaaggcattaggtatttggccaaacagggcccttcctcctagcaaagttaagttagggaaacttgaggaacttgcagacaggggtggcactcttcccagctgaggacagaacttgtggcagattgtatttttcaaagatggccctaacagtatcttctgtcccacgtgcctttccacaatcttaccacttccctcatctagaagtggcacctatgacctctcccctggaaccaggcctgggtgactgctttgagtaatagaatatggaggaagtgacaccatgtgacatccaaggctaggctgggtcataatattg

SEQ ID NO: 68183 - DNA, 1012 bp, Homo sapiens
tgcataagataaatactatgagaaatatagcaattacatttttttctggaaagtcagaatgttataggaaacattctggacacaacttcaaaaatttttagttgaaatgttccagctgtaaccatgaacacatcattaaccctccctaggcctcagtttcctstcctgggggatgggagagaatcatgacagcacctcctcagctgtgttcaccagagctttcgtcactgacttgagaagtccagtttcccaggcctgtgtctgtctgcatgtctgaatggcttatggactgatacttctatcagctctggctccatggggagtggtgatggctgaggtctgacaggggccaggcagtgctagatgaagggagaggggcccttcatttgggtgagctgccggagtgggaggcactgtgtcttgcttctgatggagtgtctgagaagcaggtccaagaggcgctgcttcaggacccgcctcagattagcacaggtccccacactgggagcagagggcatgatttctggagtgatctcagaggtgctgcagctgggaaactgattaccaagtgagaaggatgtttaatggagatggtggtgaagtgacactaacaggaagctgtactcctgattctcagcagaaataagatttgggggaaagcaggaaagttattcacatccctctgagaaaggggaggaaggcattaggtatttggccaaacagggcccttcctcctagcaaagttaagttagggaaacttgaggaacttgcagacaggggtggcactcttcccagctgaggacagaacttgtggcagattgtatttttcaaagatggccctaacagtatcttctgtcccacgtgcctttccacaatcttaccacttccctcatctagaagtggcacctatgacctctcccctggaaccaggcctgggtgactgctttgagtaatagaatatggaggaagtgacaccatgtgacatccaaggctaggctgggtcataatattg

SEQ ID NO: 68184 - DNA, 533 bp, Homo sapiens
tcacagttatttgtagatttacgtaaagcaaataaaaaaaaaaatcagttgtctgcacagcaaattcccagatggagttgacccaggccatgctctgccttctcgtttcagctctcatactgtaaacaagtgtctttttcatggtcttaacagtgacacttttttttgtatttttatgctttttgttcgtwatttccctgtttaatagctcttacatgtaacgttgagtttctgctactgttactaagtgcaagaaggctgtgatataccttacagagaaatatatgtgttagatgagctttcttcaatcatgagttatagggctgctgtctgtgagttcaatgttcatccagataatcaccaatctgtatatgggcctgctctagaaagtgctaaactaacatttattgtgcataatgaggctatagaaaagatgggaaggtagctaaatttgtgaattcatgaggtgataactgattttaaaacaacaaaaaaagcacagtaggcagtactgttacgaggctgaaagccaa

SEQ ID NO: 68185 - DNA, 1073 bp, Homo sapiens
tagaacaatattgaggaaaatcacttcaaagttatgcctaatattaacaattcaattatacagattttaaaaatatattttcacacgtaacagattattctaattcaaaatactataaaaaactacattatactctgtacattacaattctaagacttgcagtattttttaatagtcagaaaatactgcaagattaatcaattaaaagtaatttttggaaatgctctatccagaaataaccattttaaaatttattctaaatatgtcttccttaagaaatcataagcatttcactaattaatttcacattgttattcttggaattgaggctatgggaagaaaaagaattttgyttaatcttatcaacctaacaaatatttctccaagattccatgtaattgacctgatattttgtattactttttcaaacgaagtaaaagtttttgttgttgttgttgtttgttgttgttctacttaactgtcttgataaaatgtaaaatatgcctgcttattctcactacttaccagtggtttaaatacaattttgaaccatgttgaagagtatgtagcctaggaattagctttgattgttataccttgtaagatggaaagagaatttcccccatgtaattctccatgatttttccatatggttcaactatttagtgtgagtgagtttaagaaaagggacatctgacagtctttagacaagttggagtattttacatcatgtaagaacataccatgattccaggtcttctggccctcccaagacactggctgtgtactggaagcacataaaatgacagtgacactggcttgatcatattaagggcaaatgtcaaaacagttcattttcttccaaattaatatccaagaaaagtttactgcatgtgaaatgattaaattgtagcaggactgtttaatcacaaaggaggaattgcttattctcttcaagaacaacttacttggggagaggcaactaaaagaaatgatctggaccaagctctcatgtattcaccatacagtccctacaaaatgatacaaacaaaacaagcagacctcgacatttt

SEQ ID NO: 68186 - DNA, 1073 bp, Homo sapiens
tagaacaatattgaggaaaatcacttcaaagttatgcctaatattaacaattcaattatacagattttaaaaatatattttcacacgtaacagattattctaattcaaaatactataaaaaactacattatactctgtacattacaattctaagacttgcagtattttttaatagtcagaaaatactgcaagattaatcaattaaaagtaatttttggaaatgctctatccagaaataaccattttaaaatttattctaaatatgtcttccttaagaaatcataagcatttcactaattaatttcacattgttattcttggaattgaggctatgggaagaaaaagaattttgtttaatcttatcaacctaacaaatatttctccaagattccatgtaattgacctgatattttgtattactttttcaaacgaagtaaaagtttttgttgttgttgttgtttgttgttgttctacttaactgtcttgrtaaaatgtaaaatatgcctgcttattctcactacttaccagtggtttaaatacaattttgaaccatgttgaagagtatgtagcctaggaattagctttgattgttataccttgtaagatggaaagagaatttcccccatgtaattctccatgatttttccatatggttcaactatttagtgtgagtgagtttaagaaaagggacatctgacagtctttagacaagttggagtattttacatcatgtaagaacataccatgattccaggtcttctggccctcccaagacactggctgtgtactggaagcacataaaatgacagtgacactggcttgatcatattaagggcaaatgtcaaaacagttcattttcttccaaattaatatccaagaaaagtttactgcatgtgaaatgattaaattgtagcaggactgtttaatcacaaaggaggaattgcttattctcttcaagaacaacttacttggggagaggcaactaaaagaaatgatctggaccaagctctcatgtattcaccatacagtccctacaaaatgatacaaacaaaacaagcagacctcgacatttt

SEQ ID NO: 68187 - DNA, 1073 bp, Homo sapiens
tagaacaatattgaggaaaatcacttcaaagttatgcctaatattaacaattcaattatacagattttaaaaatatattttcacacgtaacagattattctaattcaaaatactataaaaaactacattatactctgtacattacaattctaagacttgcagtattttttaatagtcagaaaatactgcaagattaatcaattaaaagtaatttttggaaatgctctatccagaaataaccattttaaaatttattctaaatatgtcttccttaagaaatcataagcatttcactaattaatttcacattgttattcttggaattgaggctatgggaagaaaaagaattttgtttaatcttatcaacctaacaaatatttctccaagattccatgtaattgacctgatattttgtattactttttcaaacgaagtaaaagtttttgttgttgttgttgtttgttgttgttctacttaactgtcttgataaaatgtaaaatatgcctgcttattctcactacttaccagtggtttaaatacaattttgaaccatgttgaagagtatgtagcctaggaattagctttgattgttataccttgtaagatggaaagagaatttcccccatgtaattctccatgatttttccatatggttcaactatttagtgtgagtgagtttaagaaaagggacatctgacagtctttagacaagttggagtattttacatcatgtaagaacataccatgattccaggtcttctggccctcccaagacactggctgtgtactggaagcacataaaatgacagtgacactggcttgatcatattaagggcaaatgtcaaaacagttcattttcttccaaatkaatatccaagaaaagtttactgcatgtgaaatgattaaattgtagcaggactgtttaatcacaaaggaggaattgcttattctcttcaagaacaacttacttggggagaggcaactaaaagaaatgatctggaccaagctctcatgtattcaccatacagtccctacaaaatgatacaaacaaaacaagcagacctcgacatttt

SEQ ID NO: 68188 - DNA, 618 bp, Homo sapiens
tttgagtccaggcatttgagaccagccagggtaacttagcgagaccctatctctacaaaaaatacaaaaatgaagtgggaggatgactttagcctgggaggttaaggctgcagtgagccaagatcatgccaatgtactcaacctgggggacacagtgagatctcgtctcaagaaaagcaaagtaatatttagtaatatacaaaaatatgtgaattaacttatattaaaaaatgtaatttgcactatgaactcaaaatatatgaagtttaatacaataaagaaccctaaagataatcaataaaatgttattttttgaataaagtgcttatggctggctaatttttgttttatacttattttttttctactttgtaaattttcactagtgaaaggygttacttttacagctagaatatttttaaaagtttgttgttcagcaactgacactcttaagattgaataacaaagggctgggcacggtagttcatgcctgtaatcccagcactttgggaggctgaggtgggtggatcacctgaggtcaggagttagagaccagcctggccaacatgacaaaaccttgtctctactaaaaatacaaaaaattaggcgtggtggcag

SEQ ID NO: 68189 - DNA, 618 bp, Homo sapiens
tttgagtccaggcatttgagaccagccagggtaacttagcgagaccctatctctacaaaaaatacaaaaatgaagtgggaggatgactttagcctgggaggttaaggctgcagtgagccaagatcatgccaatgtactcaacctgggggacacagtgagatctcgtctcaagaaaagcaaagtaatatttagtaatatacaaaaatatgtgaattaacttatattaaaaaatgtaatttgcactatgaactcaaaatatatgaagtttaatacaataaagaaccctaaagataatcaataaaatgttattttttgaataaagtgcttatggctggctaatttttgttttatacttattttttttctactttgtaaattttcactagtgaaaggcgttacttttacagctagaatayttttaaaagtttgttgttcagcaactgacactcttaagattgaataacaaagggctgggcacggtagttcatgcctgtaatcccagcactttgggaggctgaggtgggtggatcacctgaggtcaggagttagagaccagcctggccaacatgacaaaaccttgtctctactaaaaatacaaaaaattaggcgtggtggcag

SEQ ID NO: 68190 - DNA, 554 bp, Homo sapiens
ctcaagggatttttgtaatggaaatgtcctgtgtcttgactgtattgggggacccacagatacacacatatgatgaaatttcataaacctaagcgcacccgtgcacatgcacacrtacacacacatacacacatacacacgagtggctgggaaaccggtaaaatcttaatgagatcaacagactatttcaatctcatcctcattatgatcttggactatagttgagcaaggtgacaccactgggggcatatgggatctctctgtattggttcttacaactgcacatgaatatgcaataatgtcaaaacaaaaggttaaaaataaatacatgggctattgatagtggtaagcatgtgtagggacagaggctatacagaaaccctgtaatttccactcagtttttctgtgaacctaaaactgctataaaatataaagtctactaaaacaaccaaacagtgtttatttttgttttaggaggaaatatggtcaagtcatatttttttcttatcctttcaattttgtctgattatcttccttgtgattttgcctagata

SEQ ID NO: 68191 - DNA, 554 bp, Homo sapiens
ctcaagggatttttgtaatggaaatgtcctgtgtcttgactgtattgggggacccacagatacacacatatgatgaaatttcataaacctaagcgcacccgtgcacatgcacacatacacacacatacacacatacacacgagtggctgggaaaccggtaaaatcttaatgagatcaacagactatttcaatytcatcctcattatgatcttggactatagttgagcaaggtgacaccactgggggcatatgggatctctctgtattggttcttacaactgcacatgaatatgcaataatgtcaaaacaaaaggttaaaaataaatacatgggctattgatagtggtaagcatgtgtagggacagaggctatacagaaaccctgtaatttccactcagtttttctgtgaacctaaaactgctataaaatataaagtctactaaaacaaccaaacagtgtttatttttgttttaggaggaaatatggtcaagtcatatttttttcttatcctttcaattttgtctgattatcttccttgtgattttgcctagata

SEQ ID NO: 68192 - DNA, 554 bp, Homo sapiens
ctcaagggatttttgtaatggaaatgtcctgtgtcttgactgtattgggggacccacagatacacacatatgatgaaatttcataaacctaagcgcacccgtgcacatgcacacatacacacacatacacacatacacacgagtggctgggaaaccggtaaaatcttaatgagatcaacagactatttcaatctcatcctcattatgatcttggactatagttgagcaaggtgacaccactgggggcatatgggatctctctgtattggttcttacaactgcacatgaatatgcaataatgtcaaaacaaaaggttaaaaataaatacatgggctattgatagtggtaagcatgtgtagggacagrggctatacagaaaccctgtaatttccactcagtttttctgtgaacctaaaactgctataaaatataaagtctactaaaacaaccaaacagtgtttatttttgttttaggaggaaatatggtcaagtcatatttttttcttatcctttcaattttgtctgattatcttccttgtgattttgcctagata

SEQ ID NO: 68193 - DNA, 1901 bp, Homo sapiens
aatggagaggtgtttcccaaaaagaatgccccccaaaggcagccagtgactttctgtgccacacacttgagaacatctccgtgttctggggctgccaggcagtcacctgtgcaggtgtcagagcccaaatccaatcamtactaagggattgggtaaaaacatccccactgcctggagtggtggttcacacctgtaatcccagcactttgggaggccaaggtgggcagatcacgaggtcaagagatcaagaccatcctggctaacacggtgaaaccccacctctactaaaaaaaaatacaaaaaattagccggacatggtggtgggcgcctgtggtcccagctactcgggaggctgaggcaggagaatggcgtgaacctgggaggcggagcttgcagtgagccgagattgcaccagtgcactccagcctgggcgacagagtgagactccgtctcaaaacaaaacaaaacaaaacaaacagacaaaaaacacatccccactgttagttctgaggagatgcctggcctcagcattgaaaacaccaacttccctcaagcaaaggctttgttaaatctcatagaaatgatggagctcctgttacccttcttgctctggttcctggggagcttagagcctatctttggcaagtgtcctgagcctcctgcaagccttttgtgtgtgtttccttcttgccttcctccgatttttcttacacctgtgaacctgctggcaggtgaagaatcgaggtgggccccaaatttaacagctcatgaatttgaaggtgctggagtattctggacagtccagctctcaggggtggggagttgggcagagagggaggaggggattccaggggccagggccacgggcagaggaactccaggcccagagtgttacttccaggctgaggaaaaagaggtcgtaggtgggaagagtgtctttactagggcaaggacagagggcatatctgaaggcccagccaggaacagctccatccagaaaggaggcagggagtggcggggggttgggggagggagtgctgcagcggggaattggaggagggagagggcagagggactggtcttcagtgatcagattgctccttgcctggcctgtttctccagcagatgcccctgggagcctgggagcctctcccacaagctattttcccactgagtgtcaggattcccccatcccccactgagaacctgggggaagtgtcaaattatatgaaaggtaagaaatgaagacagggagcagaatttctgattaacaatgaggatatttactgagggtttattgggtgcaaggagaagggctggatgccttggggtgggaggggagacccctgccctgggatcctgcagctcctggctgctgtgggtggggtgaggggcctaagaacatagctgctgggggacctccactggtcagacgtcaggttcaggtagctgctaaccgtgtacttgtgtttctctgtttggagggtgtggcagtcttcatgcccagggtgatggtggtgccctctgccttccaggccaccatcacggcatcagggtagaagtcactaatgagaggcatcttgttggcttggagttcctcagagtgtccaaaggggcggccttgggcagacctgtgtggacagaggagggggcaagagaggcagagggagtactggggtgttgtagagccccctctctgtctaaagtctctgtgaggttcacggcatggctgtccagtccacccggggctgcctcttccctcctcattcccctccttttcactcaagacctctgcagagcagccagccccgcaccttcctaggagctcttcccaagtcaccttttctaggagccctggcccagccctcctctgcagcctctgtttccctgtgtgtacccag

SEQ ID NO: 68194 - DNA, 1901 bp, Homo sapiens
aatggagaggtgtttcccaaaaagaatgccccccaaaggcagccagtgactttctgtgccacacacttgagaacatctccgtgttctggggctgccaggcagtcacctgtgcaggtgtcagagcccaaatccaatcactactaagggattgggtaaaaacatccccactgcctggagtggtggttcacacctgtaatcccagcactttgggaggccaaggtgggcagatcacgaggtcaagagatcaagaccatcctggctaacacggtgaaaccycacctctactaaaaaaaaatacaaaaaattagccggacatggtggtgggcgcctgtggtcccagctactcgggaggctgaggcaggagaatggcgtgaacctgggaggcggagcttgcagtgagccgagattgcaccagtgcactccagcctgggcgacagagtgagactccgtctcaaaacaaaacaaaacaaaacaaacagacaaaaaacacatccccactgttagttctgaggagatgcctggcctcagcattgaaaacaccaacttccctcaagcaaaggctttgttaaatctcatagaaatgatggagctcctgttacccttcttgctctggttcctggggagcttagagcctatctttggcaagtgtcctgagcctcctgcaagccttttgtgtgtgtttccttcttgccttcctccgatttttcttacacctgtgaacctgctggcaggtgaagaatcgaggtgggccccaaatttaacagctcatgaatttgaaggtgctggagtattctggacagtccagctctcaggggtggggagttgggcagagagggaggaggggattccaggggccagggccacgggcagaggaactccaggcccagagtgttacttccaggctgaggaaaaagaggtcgtaggtgggaagagtgtctttactagggcaaggacagagggcatatctgaaggcccagccaggaacagctccatccagaaaggaggcagggagtggcggggggttgggggagggagtgctgcagcggggaattggaggagggagagggcagagggactggtcttcagtgatcagattgctccttgcctggcctgtttctccagcagatgcccctgggagcctgggagcctctcccacaagctattttcccactgagtgtcaggattcccccatcccccactgagaacctgggggaagtgtcaaattatatgaaaggtaagaaatgaagacagggagcagaatttctgattaacaatgaggatatttactgagggtttattgggtgcaaggagaagggctggatgccttggggtgggaggggagacccctgccctgggatcctgcagctcctggctgctgtgggtggggtgaggggcctaagaacatagctgctgggggacctccactggtcagacgtcaggttcaggtagctgctaaccgtgtacttgtgtttctctgtttggagggtgtggcagtcttcatgcccagggtgatggtggtgccctctgccttccaggccaccatcacggcatcagggtagaagtcactaatgagaggcatcttgttggcttggagttcctcagagtgtccaaaggggcggccttgggcagacctgtgtggacagaggagggggcaagagaggcagagggagtactggggtgttgtagagccccctctctgtctaaagtctctgtgaggttcacggcatggctgtccagtccacccggggctgcctcttccctcctcattcccctccttttcactcaagacctctgcagagcagccagccccgcaccttcctaggagctcttcccaagtcaccttttctaggagccctggcccagccctcctctgcagcctctgtttccctgtgtgtacccag

SEQ ID NO: 68195 - DNA, 1901 bp, Homo sapiens
aatggagaggtgtttcccaaaaagaatgccccccaaaggcagccagtgactttctgtgccacacacttgagaacatctccgtgttctggggctgccaggcagtcacctgtgcaggtgtcagagcccaaatccaatcactactaagggattgggtaaaaacatccccactgcctggagtggtggttcacacctgtaatcccagcactttgggaggccaaggtgggcagatcacgaggtcaagagatcaagaccatcctggctaacacggtgaaaccccacctctactaaaaaaaaatacaaaaaattagccggacatggtggtgggcgcctgtggtyccagctactcgggaggctgaggcaggagaatggcgtgaacctgggaggcggagcttgcagtgagccgagattgcaccagtgcactccagcctgggcgacagagtgagactccgtctcaaaacaaaacaaaacaaaacaaacagacaaaaaacacatccccactgttagttctgaggagatgcctggcctcagcattgaaaacaccaacttccctcaagcaaaggctttgttaaatctcatagaaatgatggagctcctgttacccttcttgctctggttcctggggagcttagagcctatctttggcaagtgtcctgagcctcctgcaagccttttgtgtgtgtttccttcttgccttcctccgatttttcttacacctgtgaacctgctggcaggtgaagaatcgaggtgggccccaaatttaacagctcatgaatttgaaggtgctggagtattctggacagtccagctctcaggggtggggagttgggcagagagggaggaggggattccaggggccagggccacgggcagaggaactccaggcccagagtgttacttccaggctgaggaaaaagaggtcgtaggtgggaagagtgtctttactagggcaaggacagagggcatatctgaaggcccagccaggaacagctccatccagaaaggaggcagggagtggcggggggttgggggagggagtgctgcagcggggaattggaggagggagagggcagagggactggtcttcagtgatcagattgctccttgcctggcctgtttctccagcagatgcccctgggagcctgggagcctctcccacaagctattttcccactgagtgtcaggattcccccatcccccactgagaacctgggggaagtgtcaaattatatgaaaggtaagaaatgaagacagggagcagaatttctgattaacaatgaggatatttactgagggtttattgggtgcaaggagaagggctggatgccttggggtgggaggggagacccctgccctgggatcctgcagctcctggctgctgtgggtggggtgaggggcctaagaacatagctgctgggggacctccactggtcagacgtcaggttcaggtagctgctaaccgtgtacttgtgtttctctgtttggagggtgtggcagtcttcatgcccagggtgatggtggtgccctctgccttccaggccaccatcacggcatcagggtagaagtcactaatgagaggcatcttgttggcttggagttcctcagagtgtccaaaggggcggccttgggcagacctgtgtggacagaggagggggcaagagaggcagagggagtactggggtgttgtagagccccctctctgtctaaagtctctgtgaggttcacggcatggctgtccagtccacccggggctgcctcttccctcctcattcccctccttttcactcaagacctctgcagagcagccagccccgcaccttcctaggagctcttcccaagtcaccttttctaggagccctggcccagccctcctctgcagcctctgtttccctgtgtgtacccag

SEQ ID NO: 68196 - DNA, 1901 bp, Homo sapiens
aatggagaggtgtttcccaaaaagaatgccccccaaaggcagccagtgactttctgtgccacacacttgagaacatctccgtgttctggggctgccaggcagtcacctgtgcaggtgtcagagcccaaatccaatcactactaagggattgggtaaaaacatccccactgcctggagtggtggttcacacctgtaatcccagcactttgggaggccaaggtgggcagatcacgaggtcaagagatcaagaccatcctggctaacacggtgaaaccccacctctactaaaaaaaaatacaaaaaattagccggacatggtggtgggcgcctgtggtcccagctactcgggaggctgaggcaggagaatggcgtgaacctgggaggcggagcttgcagtgagccgagattgcaccagtgcactccagcctgggcgacagagtgagactccgtctcaaaacaaaacaaaacaaaacaaacagacaaaaaacacatccccactgttagttctgaggagatgcctggcctcagcattgaaaacaccaacttccctcaagcaaaggctttgttaaatctcatagaaatgatggagctcctgttacccttcttgctctggttcctggggagcttagagcctatctttggcaagtgtcctgagcctcctgcaagccttttgtgtgtgtttccttcttgccttcctccgatttttcttacacctgtgaacctgctggcaggtgaagaatcgaggtgggccccaaatttaacagctcatgaatttgaaggtgctggagtattctggacagtccagctctcaggggtggggagttgggcagagagggaggaggggattccaggggccagggccacgggcagaggaactccaggcccagagtgttacttccaggctgaggaaaaagaggtcgtaggtgggaagagtgtctttactagggcaaggacagagggcatatctgaaggcccagccaggracagctccatccagaaaggaggcagggagtggcggggggttgggggagggagtgctgcagcggggaattggaggagggagagggcagagggactggtcttcagtgatcagattgctccttgcctggcctgtttctccagcagatgcccctgggagcctgggagcctctcccacaagctattttcccactgagtgtcaggattcccccatcccccactgagaacctgggggaagtgtcaaattatatgaaaggtaagaaatgaagacagggagcagaatttctgattaacaatgaggatatttactgagggtttattgggtgcaaggagaagggctggatgccttggggtgggaggggagacccctgccctgggatcctgcagctcctggctgctgtgggtggggtgaggggcctaagaacatagctgctgggggacctccactggtcagacgtcaggttcaggtagctgctaaccgtgtacttgtgtttctctgtttggagggtgtggcagtcttcatgcccagggtgatggtggtgccctctgccttccaggccaccatcacggcatcagggtagaagtcactaatgagaggcatcttgttggcttggagttcctcagagtgtccaaaggggcggccttgggcagacctgtgtggacagaggagggggcaagagaggcagagggagtactggggtgttgtagagccccctctctgtctaaagtctctgtgaggttcacggcatggctgtccagtccacccggggctgcctcttccctcctcattcccctccttttcactcaagacctctgcagagcagccagccccgcaccttcctaggagctcttcccaagtcaccttttctaggagccctggcccagccctcctctgcagcctctgtttccctgtgtgtacccag

SEQ ID NO: 68197 - DNA, 1065 bp, Homo sapiens
ttacttaatggagttagagtgaattttcacctttagtttagagtgagtcttcactctaaataagatgctggttttcatatttaaattgcattcgtacttgatcttttggtcaaagcagcaagagaccagttataaaaatctattcctcttaatttaaaggcagcgattaaaggagattcagagctttgaaactgttgtgagtattctacttaggaaaataaacactaattgaaagggctaatcaaaagctcatcatcctgaagggcacttggatggttcacaagtatgcagtttaggtagacaggtgctcttatgaggacctcatcattctaagtaaagggactttacgccatgcgttagatgagtccccttaatgagtgactatttatgatgataaaatacatctgctgctaacttcctttataatttttcaaataatttcagaaatcatgaatgaaggaaaaaatgaatgaggaatgattcaaactcartcagtaacaaaaactttgcttacataacatttccttaaagaaaatcttccttttcctaatctgtagtctttgtgcttttaattatgtcacaaaatctctacaaatatttgggcaaacaagtaattatttccaataaagttgtgctctttaaaaacacatgagtaattaaactctgttcccctttactctagttatacaagaaatttttctgtcctggtaaagatgacttcacatgccaaaccattacctcagagactaaaccaaatttcagagatgaaaaaacatttaaagatgcttttacagataattctggatgattcagactatttcctaaacagtcaaagttcctgtaagtggaattttctccttaccagactataaatcaatatgtgttggctataatgatgaattagtgacaaagaaattctaacaactatacctgatgaaaaggtcactattaggttgatagtatggttggtgggggcggttagtgattatctaggaagcttgtttttgaaactgctgccatcagtggaactttgttggtcattacaagtgcacatgtgtacaatgg

SEQ ID NO: 68198 - DNA, 1058 bp, Homo sapiens
atgtactgtgagtgctcacctgagttttggttcttgagaaggtgttttttgtgtagatagtttttaaattggtgttcttgcagggggatgatcagtggaaccttctattctgccatcttgctccatcctccagacttttttccttgtcattatttcctaaaaaatatagtataacagctatttacatagcattcatattgcattagttgttataagtaatctagacatgatttcaagcatacgggaagatttgtgtaggttatatagaaatactctgccatttcatattagggtctttagcatcatggattttggtattttcacgatgtcctggtacygaggacagatagtgagggatgactgtacacagggatgaatacactactcagtacttgtacgtttgtcatgctagaaagactcagcaaagtctcggaaccttgcaggcactgagaaaagtggctcccttttcccattctctttcattcccaaattatataatctaaattcgatgagactaatatttcaagggaagtctctgagcctttaaggagaggggcgatgtgggagaaggtcaccctgtcatggagaaatcttagaccacattcggtcatcagattcatagatgtcttaagagtcacagaagcatagcaagtacataacactccttttgattctgagaaagtgacactcagagcttttagtgtcttgactaagattacacaattaattggaagcaaatataataaatggtaaatgttttagaacctaaaaggttgtcagactccgatattttctcctgaatctgggaaagccccagctgtgttaatggagagtgtctacagatgcaacttttccccacgaaagatggctttgtagggccatttcaaaatatgtcaaatacatactttggggtggaatattttgattttcctcagggtctgctatctgtcatgtgatgctataccagagtcaggttggaatttggtatcttattgccactcagtctgttttgtcagtcttaggaactctatttcaatgttattgctggtcagttgtgc

SEQ ID NO: 68199 - DNA, 1264 bp, Homo sapiens
  misc_feature (1)...(1264): n = A,T,C or G
ttgtgctgtttggaaactcaagcaatgtgatcaagaaaaataaaagaaagaaaaagtccagttgtgctgcatgctgcagtcacagttttccctcactgatctggtgtcccaggtcagctgttcagcgtggcttaatgacagggacttccatttacaaaagtgcagcagagatttgcccagcatccacctcccatcccgcactgccctcttggtctccctccattcacttagcaaacagctgcccagtctccgcatctaattattattctccaaaacttgaaaatattaataagtctaattagaattattaaaagaattcaaaatgtatttgaaacttggaaattcttcctgaaatatgactgtatgataaccactgctaaagtcttccctgnnnnnnnnnnnnnnnnnnnnnnnnnnnnnnnnnnnnnnnnnnnnnnnnnnnnnnnnnnnnnnnnnnnnnnnnnnnnnnnnnnnnnnnnnnnnnnnnnnnnccagtccccccatccccccatcattcccccccccctccccacatccataagtcccatcaccatcattccaaccattccccatgcattcccaccttgccaattcttcctgaaatatccctgtatcataacccctgttaaagtcttccctgaaaaaggaccctatattttcttcctattgataaatactaaaatttaacaacatgtcagaaatygaaaagttgcaaagttttaatcttcttaagagaaaatgtaggagttatcagtgattctcttcagaaaggttaaatgtattttgcttctattagccttgttaatgtagctcatagctattctaatctgaagttgtactttaaatcatgtttatatgttttttcctgaatagactgactgtgacctcctcaagcttaatcaaatataatttgtctttgattcctgcactagctaacacagagtcaggctgtgagtagcaagatagaggaaggaatttaattgaagtgagagacatcttagtgttttattttcttttctgcctcacagtttccgtgaaaaaattcactgtagcaggcaataaagcagatatttgcaaaaacaccaaaagccttacctggtaaatagcagggagtttctaaatcccagttatgcccccctgagatttaatgcgaatgacaggagctttaaggagttaagcttggagaagcatgcactagtcacaaagaaggtggattctgcataaatctctgctcaacatgaaaataagagacataccttacatt

SEQ ID NO: 68200 - DNA, 1286 bp, Homo sapiens
catatttgactgcttcctctactgtgtaccttatcttatatacaatccagattcactgagcaggagatgaacgcccagttgagtgttcctctaaaccctctcctgtcacatctaaagtgcgaattcagtcaacactgattaaagcctgcaaagaaggaaactacttcatttattcacacttcctttttcttttttttcctctaatgcccactgtttcccttttaaatattgaagtctcccaaccgtctttggaagaagcacaaatctcagatgctcctgtcatattgtgttcctttttcccaggtgcatcctcaaccttggcaccagaaacatctacattgattgagacttggctccaatgctttttgrttcacacttatttataactttaaagatttctccccaaacaagaggccagtgacttttgagaaagagcttttttagtttgtcatagcctctatttctaaagaaatttaaaatctaattttcaatttagagcgaggctcttatccccacatcactgcctttaaaatctctctggagagatgccaagattcagtaagacattttcatgatgaaataccaagaaacgattccagtccttcacttgggaaaacaatgcaccctctgcaagaaaggacaggctgcttctaaagttcatggtaaacccagtcaacttggattaattgctaacccaggaattcttcctgggggatgtgggactctattagtgaaaagactttttgacctagcctcacccctacacaatgtatttaataagaagtctgacattccactactgctttagaaagacttggacccagcttctctgaggtaggatccttagatcttcatgaaaaacagaacatcacccagatactgggatgttttcttcaggtattactctgtaactattagaaggccacgttactactgtgagcttatctgctaataactgaggcagtggtcttctcaagattaagcataaataacatatattcactatctggcaagcagacaactggaaaagggcatttagcatgaaacgtgggaagctaagggaaatgtaatagtttagaagaacatgaatagatttactgaaggaaaatggcatgtaagagccgacagttagaagaatgtgcttggtattcacaatgagaaagtttcagaattaattggtagcaggggtgcatactattggataagcatagattgccctctgaatattttgttaaaattttaatttacattttaagttaaatgattaattgctccgttcatatgca

SEQ ID NO: 68201 - DNA, 514 bp, Homo sapiens
cagtgagccgagatcgcaccacygcactccagcctgggcgacaaagtgagactctgtctcaaaaaaaaagaaaaaaaagaaagcacttcctgcacatgggcctgggctgaaacctgaggacaagcaggctcatttgggcatctgaaggggcgacagtgtacatgatccccagagatcccacaaaggaccagcttggacaccctctccaggctgttctacccaagtgtataggaccctttcttacctccagcaaaaccactgcctcctctccattctttggatgatactcatgcatccaggccaggagctcctcgggcagaatggccaggaacagctcaagcaacagcaagtctaacatctgctccttggtgtgaatctcaggccttaaccactcacagcagagcttccagagctggctcaaggcctcacagggcccaggagtctccttgtatcagaactgtcagaaacgctggccgaataactactgtttgtttgggctactcctttttgggct

SEQ ID NO: 68202 - DNA, 1508 bp, Homo sapiens
tttgcagaagaatgctcaattagaaagatcttcaaacttgccctagcagcacaagtatccttagatcagttttcttcaatgtgcctcaaccaagaaaatgaccttttccttaattacctattctaaaggtggtgatcaaaatttttaagtggtcagataycaaatgtattgttccgaaacaaaatgagaggctttgttagtcagtgttaattaatggaagcagaaagaggagaatgtggagcagtgttatttatctttcctattaagaacttgtctggaatttcataaatgaggtacagaagacacttattctacttgtaatttgagctatgaaatttgtcctatgtctaatgcaaccagcatttaaaaaaaacacaattaaaagaaagaaaaagaaagctagcagcttgcaaacggtgcctctttgcacgaaaggaccacatttcagaatgtggtttatgggactccgcctgtattaagctgaccaaaatgggggtgacccatagacaatagatttctttattgtattgttttgacacagaacaagtgacattcctcaggccccttttcatgttacagtctgccacaaaatacgtctgtactccttttacctgcagaactgggttatatcaaccccatcacttttaggcttatctgatgacaaatgaaaattgatactggtggggaggctaatgacaacttggttaccagacaaccattcacctctgtttcaaagttctttgagctgtttcagtgtaaaactggaaaaatgtttatgagcaacaataaactcacatttccataaatatatttatacaagaaaaatgggaaaccatggacaaatgtgttctttatataatatataatatgtattaatgcaaagattagacattatattatgattatgtgtacatacagatttcttgtgtacccctgtttatatgttctaatatgactttatctgtgtatgttgatgtggatatagttatgtgtgtagtcaaagcattttttgaaacactctggaaataatgcatatgttgctatagaatgaacaaagtgcctaaaccattgattgtgtgaatgctgctcatataatatgtaggttctatgtgcttctatgtatcagaatggctggaaaagggaggagttcttagaatatcttctataatactcctagtgacatcatgatttcattgttttggaatatagcatgaaatagatttgtacctttttccccccttgagcactgagaaaattatatgttctaccaaatagtaaggaaataaggatctgttgaaaacaatctattttaaatattttatgaatgattacacaagcattatataaatatgcagtaattacatatgctaatacatacatttgatatatctaagttttcaactgcaaatattttctagcatgcttttctatagttacatttactctgtatggaaattgtatcttagctttagccttggataaatttcaaagaatcacagatcactgca

SEQ ID NO: 68203 - DNA, 676 bp, Homo sapiens
gaccgaggcttctggccacttcaactaggtgaaccagcaacacgccaggcaccaccaatattctcagctggaggaagagactcctgggaacctctcttggttatgtaaaggtgaggcaagtagacactcattgcccaggacctcctatggcctgacaaagatcaccacgcccaatctcccttggtacacagaagtaattccagaggagcaggtgggtaaatttgcaaatttccaggagaccaaaaagtttcctggaagaatgccytgcccaatcccagcaccctcgaagatggatgtggtgacatccacatttcaggacatagcatcgtggatctaagcctcatccctggcctggaagtcccagggaagggacatggcttgggatcgaagctcactacctcttaggactcagcccctcgggagcaaagtaagcatgaactaaaataactagaacttcaagaacatgagaatggggcaggctcacagcctagcaggccaaggcatccctgcagcagcagatgaggaggcccaggagtgcccagggctgggtccgacagctaaaaaccctgagcgaaggggcggctctctccaaagtcttctgacacaaagcaccgtggattcttaggttattcaggaatgggggaggcctcactagggagaaaccagctagtggatg

SEQ ID NO: 68204 - DNA, 631 bp, Homo sapiens
ccttccaagcagtcggccccagtcccatccactccttatcccctccctggggagccccacatgctgctccatcaagagctctccaccctgcctttggtgtctcagaagggcttggactctcgattcacgcaggtcacaagctctctacccctcawttcccctcttctgtaccttgaggatgaaacgtgatgctgtccttgagagtgcagcatgataagtgcttcataaatatgaaaatgtgccctacgagctccacccttccaagccccgcagggcatcaggctcccccagcccgaaggtccagaacacaccaactctgtgcccaccagcatcccacacagatctgaccattcccaacttgcccctgtcctttcttcccacagtggtcaaaatgcgcatcaaggagatcaagatagagaatggggaccggaagctgattggagcccagaaaaagaagaagctgctcaagccgggccccctgaagcgcaaggacaccaagcggctggtgctgcacatgaagaatggcgcgggctgcccctgcccacagctggacagcctggcgggcagcttcctggtcatgggccgcaaagtggatggacagctgctgctcatggccgtctaccgctgggac

SEQ ID NO: 68205 - DNA, 641 bp, Homo sapiens
ccttcgtaatagaaattttctcttttttttcccccactaagcaagtcacttctcaatgaaaaaagtaaaactaagcttctcatattcatagtatttagcttacaaaaattttgtcttctctccctttttacttctgccaaattgaaagataaaagatatagttaattcataaaattggataattaacaccaattaacttaatctgtgtccataccaaaaaatgaaacatttttactatttttggacccttaacaaaacacatacattgaaaagcggaatttttttcttgatgcttagtaagcatcccatgaagctgcaatttttttttttttttttttgagacggggtctcactctgtcgcccaggctggagtgcaatggcatgatctcagctcactaaaacctgcacctcccaggttcaagtgattctcgtgcctcagcctccsgaatagctgggattacaggcacacaccaccatgccctgctaatttttgcatttttagtaaagatagggtttcaccatgttggccagattggtctcaaactcctggcctcaagtgatccatctaccttggcctcccaaagtgctgggattacaggcatgagccactgcacctagccaaggctacaatcagtactatt

SEQ ID NO: 68206 - DNA, 987 bp, Homo sapiens
  misc_feature (1)...(987): n = A,T,C or G
ttattaaatgcttcacattttttacttcagcagaagcataaacacaaaagcctgttccatgaccctaaagacaggatttccttgaatgacgcgctaatgaaaaatgcaaaccagtggaagttttgactcattgcaccagggtctgcaacattccaaccaaagatctgccctggaccaagagagaaatcactcctcaaatcaaaagttacccttaaccccttacgttgagaatatttctgcttttgtacaacatggaaacagaaaaagatccatccccagaaatacctgatttttactaatacgartatgaatttactaatatgaatagctccctttgacttggcatatagtgtctgattacgtgtgttgatcacaaaacttaccttcaaaatgcccaaattcagagatcaggtggccaggttctggaccaaagggccacacttttctcctagctatagctaactgaaccagggaaggtagcatgacccaaaggcttcccagcaacccaagatgtggctggaggaaaaaaagatgagctgggccagtcagatcccaccctctcaggaatttgaactagagaagagaatttgacagagaagagaccatgatgggccatgcacaaattttactgaaggaacacaaactacaactaggtgtagaaaaaagatgcaacaagcaaaggcaagtctgggtacagcatgagtgtgaagagaacaaaacataaattcaaaaaggaagacatccttganagacaccaggaggtggctggaattaatcccccaccaaccaccacttttgagtaagtttaaatgagcctttgctcacttagggagcctaactgaaatggttctctctgttattttatttaagcctaaaaaccctatgaagtgagtattattaacctctgcaggccacagagctattaagtagcaagatcagggaatcaagctcagcaatgtcttgctctacatcctagggcttattcac

SEQ ID NO: 68207 - DNA, 987 bp, Homo sapiens
  misc_feature (1)...(987): n = A,T,C or G
ttattaaatgcttcacattttttacttcagcagaagcataaacacaaaagcctgttccatgaccctaaagacaggatttccttgaatgacgcgctaatgaaaaatgcaaaccagtggaagttttgactcattgcaccagggtctgcaacattccaaccaaagatctgccctggaccaagagagaaatcactcctcaaatcaaaagttacccttaaccccttacgttgagaatatttctgcttttgtacaacatggaaacagaaaaagatccatccccagaaatacctgatttttactaatacgaatatgaatttactaatatgaatagctccctttgacttggcatatagtgtctgattacgtgtgttgatcacaaaacttaccttcaaaatgcccaaattcagagatcaggtggccaggttctggaccaaagggccacacttttctcctagctatagctaactgaaccagggaaggtagcatgacccaaaggcttcccagcaacccaagatgtggctggaggaaaaaaagatgagctgggccagtcagatcccaccctstcaggaatttgaactagagaagagaatttgacagagaagagaccatgatgggccatgcacaaattttactgaaggaacacaaactacaactaggtgtagaaaaaagatgcaacaagcaaaggcaagtctgggtacagcatgagtgtgaagagaacaaaacataaattcaaaaaggaagacatccttganagacaccaggaggtggctggaattaatcccccaccaaccaccacttttgagtaagtttaaatgagcctttgctcacttagggagcctaactgaaatggttctctctgttattttatttaagcctaaaaaccctatgaagtgagtattattaacctctgcaggccacagagctattaagtagcaagatcagggaatcaagctcagcaatgtcttgctctacatcctagggcttattcac

SEQ ID NO: 68208 - DNA, 870 bp, Homo sapiens
  misc_feature (1)...(870): n = A,T,C or G
gcagtggcaccaggtaaaccaagcagaccaaaataataacacgaaggctctgaaaagaaaaatgttgacccatagcccacaacattaggccaagccctgcacggaaaacctaaacagggtgactacctgctaaaataaaagaatctaaatgggactcagggtctcctttcatccagtcccttcaatcttgttagcatttactcacttagatggcttctgcctaaaatgctgtaagagggcctcacagagaagacccatttaaaggaactaaatcattctgtactctgtctgcacagatcagagataagtttcatagaggcttcagggtggtgtactgagagtnnnnnnnnnnnnnnnnnnnnnnnnnnnnnnnnnnnnnnnnnnnnnnnnnnnnnnnnnnnnnnnnnnnnnnnnnnnnnnnnnnnnnnnnnnnnnnnnnnnncacagatcaagagataagtttcatagaggcttcagggtggtgtactgagggtaacagagaaagaaaaaaaaagagaacagagtccttgcatcacccattgcaagagagatttctcttcttatattgaggtcatttattaaattgactatcttactattggctaagtgcaaagaacacctgatttacctaagtgtattaaattgtagtattttctttatctttttctttttagctaatttttaattagtgaatctattttcatgmccttaatttttatgattgaaaatttagactgtatctccaaatactccctcaacaaatttaatatttctctatttccgggatattttgcacttaaaagctattctactgccaatgtgtttagccaactgcattcaaagcataagatagaatatcactatataggg

SEQ ID NO: 68209 - DNA, 557 bp, Homo sapiens
ctctaaatatgtaaattctggtttctgcttgggctgtgccttactgggtaagcttggggaagtccctgatgcctccagtatctcaagtttccatttataaagtgatggacttagaattattgtaaatgagagtcaaatcacttattgagctattttcatatatctgaaaacttagaaccataaagactgagaatccatataacagggaggatcattcgctttatgacctggaggttcaagactacaaagacacaaagcaaaaccttaacagagcaccaacacccattttcagtctccccatgggcagccccctgtgggggtggtttgtccgtgctctctgtctactctcaaagcagcatacgcttctataaccaggaagttcaggaagagcttcatgtgcytggattgatggcaacatggtgaaggaaaactattgacagatatgtgaacatgttaattcttaattttattatgaaatgaccagccaatgtttatattgaaagctaaacatatctaatatctgagcacaatttgaacattaatataatgtggagaaa

SEQ ID NO: 68210 - DNA, 1160 bp, Homo sapiens
ttttaatattatctatatctttatagatagtttaatattatctatatctttaatattatctatatttctggaaaaagttgggactataaattttccattttattgcatttatgtttttttttaaacaccacagttctcacagatatttgagggttctttgggtctgtgtactatatgaaaattttagcatgtttatgggaaactgtcaattaaattaagatattatgttataattcaatttaggaaacaaaaagaactttccaatgtatttttcggtcatcattgtatggtagtgccagagaaaatatttaaagattggtatgaattagaaagtagtacaggccgggcgyggtggctcacgcctgtaatcccagcactttgggaggccgaggcgggcggatcacgaggtcaggagatcgagaccatcccggctaaaacggtgaaaccccgtctctactaaaaatacaaaaaattagccgggcgtagtggcgggcgcctgtagtcccagctacttgggaggctgaggcaggagaatggcgtgaacccgggaggcggagcttgcagtgagccgagatcccgccactgcactccagcctgggcgacagagcgagactccgtctcaaaaaaaaaaaaaaaaaaaaaaaaaaaaaaaaagaaagtagtacaattaaccagtcctagaaacgtctgctccacttgttccactgagttaaggactccacatttgtatttgttaaaacatttgcattgtggcagaatttctaaggagtaagattcaccagacttatcactgaacattttactaaaaagcgttgcttttgtttggcaatcttcctaatcataaagtgattttattttaagatgttaaagttggttaaatggaggagacactgctattgaaagaaacaaataaattaaatgtagtctttgttaaattttcttattaagattacatattttaacaaagataagtgtgacagtaaaaatatttgctttttcataggcagatagaaatactctccacatttcttgagagaaattctgaaagtgaaaggacagattgttagatctaacctaaagattatgaggagattaatcatctaccaaggactgtgagtttcatggagtatgtgtcacaggggataactggaatgtaagta

SEQ ID NO: 68211 - DNA, 796 bp, Homo sapiens
ttaaaagagctcttatcaccatcaacatataaggtgaggcagaagaaaaggcatgagggccagaagaaatatgtagtgaggcagggagatcaggagacagtaatatccytgacagcaatgctacgtaagagggaatagttaactattatacccacatattctttgctgcttctcattctcaggcatctgaaattcaaaagtatgtcttccagcaagacccgaggacaggtaaactggctccatattgcacagaaaaccttttttccttctttaacataccatttcccatgtactatttaagtggacaatattatttactttaatcatgaaataaccaaagtgtatttctagtatatgctctctaattacattctgagagctgaataaatgtcctggtaaaattaaaaccaaaatgccccatacttgtctaagctaaccaagataaattggcagctctctaattactttggctgtgagaaatagtctgggaaccaatcaactaaggctgatttttggccaaaatattttagaagcagtgaaatataaaacttgagtttccactattatgttaaaagcattaatagttgtttatattttaatcataagggtttccactcactgtttactgtctgacacagtgcccataatctgtttctcaaaatattctacaaagtatgtattatccctgttttacaaataataaacagtagtcacttatccaaagccactaatggagaaccacacagctgtgtataccttccctcacacacacttcataatgcaatcacagctccat

SEQ ID NO: 68212 - DNA, 701 bp, Homo sapiens
aatgctgtcaccagccgtatgatgtacatattataattatttgtacattacaaataaagaaatgagggtcagggaagtgcattaaggtggccaatgtaatagtaagtagaaaagcattaattccagactatgcaaggagactccagcatccctcatattacttcagtctcataaactttgctagacagactgacttagtggatgagaagcatccaaggactgaagggcatcattactattcaacatcaacatggtgtgttttttraatttttggataaattctatttgattccttcaccaggaaaagcaggaccaactggggagactggagaaacagaacgttaggaagaaaatggaagaaaaagataagcaaactgtacagtgaatcattaatccaagtaggtgcattagaaagttagatactaaagaatgagttatcttttaagatataagtgccaggcttaatgctaagcactttatatgtgtcatttaaatgtatttaatcctcacaaccctaaaaaagttctataatcatctctattttagagataaggaaactgtgacacagacagttcaaatatctttaccaaggccacatggctggtaaacaggatagctgaaattcaaactccaggtgtctagttctagtgcttgcacttttaccactatgccattctaccacccatcttttcagaataaaa

SEQ ID NO: 68213 - DNA, 614 bp, Homo sapiens
ttctaggggctggttagagggactggaaacacgggttccaggcctggctccttgtgtgaggctgcagcacagcagccccttgtccaaaggtgctctgttccaagaccaccagtggatgtctggaactgcaggtagtaccggacccttcatatactgtgttttctccatctgataaccaaggtggctactgagtgaccagtgggtgcatagtgtagacagctggatgaaggaagagttcacatcccaggcagatcagagtggggcagtgcaggaattcattactctactcagcacatggtgccattaaaaacttgtgaattggctggccgggcrcggtggctcacgcctgtaatcccagcattttgggaggctaaggtgggcggatcacgaggtcaggagatcgagaccatctggctaacacggtgaaaccccgtctctactaaaaatagaaaaaattagccgggcgtggtggcgggcgcctgtagtcccagctactcgggaggctgaggcaggagaatagcatgaacccaggaggtggagcttgcagtgaaccaagatcgtgccattgcactccagcctgggtgatagagagagactccatctcaaaaacaaaa

SEQ ID NO: 68214 - DNA, 680 bp, Homo sapiens
tgtgcccggcctgctttttaacagtttattttttcttagtgtactaatgtggtgaatttcattgatttattattattttttaaaattttattttaatataaagttacagaaagattataagaagagtacaaagaactcgtatatcctttacccagttcatatttgcaccatttttcatttatcatttccccgattgtcttaccatttccccttccatatatagtctttctatagatgtaaacgcacacacacacgtccttttttttttttwtaaaaaaaaaaaacaaaaaaaaaaacaaggtctcgttcattcagtggtatgaacacagatcacagcagccttgatctcctgggctcaagtgatcctcttgtctcagtccttgaacagctggggaccacaggcatgcaccaccacgctcagtgaattgttgttgttattgttattgttgttttgtagatacagggtctcactatgttgcccagcctggtctcgaactcgtggccttaagtgatcctcctgccttagcttccccacttttttttatgtcttaatcacttggttaaggtgattttctgccaggcttttccattgtaaagttaccaattttcttttcgtaatcaatgatttgttggaagatgctttgagactagagtttattctttaacccctaaatattttg

SEQ ID NO: 68215 - DNA, 680 bp, Homo sapiens
tgtgcccggcctgctttttaacagtttattttttcttagtgtactaatgtggtgaatttcattgatttattattattttttaaaattttattttaatataaagttacagaaagattataagaagagtacaaagaactcgtatatcctttacccagttcatatttgcaccatttttcatttatcatttccccgattgtcttaccatttccccttccatatatagtctttctatagatgtaaacgcacacacacacgtcctttttttttttttwaaaaaaaaaaaacaaaaaaaaaaacaaggtctcgttcattcagtggtatgaacacagatcacagcagccttgatctcctgggctcaagtgatcctcttgtctcagtccttgaacagctggggaccacaggcatgcaccaccacgctcagtgaattgttgttgttattgttattgttgttttgtagatacagggtctcactatgttgcccagcctggtctcgaactcgtggccttaagtgatcctcctgccttagcttccccacttttttttatgtcttaatcacttggttaaggtgattttctgccaggcttttccattgtaaagttaccaattttcttttcgtaatcaatgatttgttggaagatgctttgagactagagtttattctttaacccctaaatattttg

SEQ ID NO: 68216 - DNA, 563 bp, Homo sapiens
tgggttttatgctcaatgtggtttgagcttagaatgcaaagaaaagttgagagctgatactgaagactgtccctgcttggcacccggacaagaagagtggagtgtagaaatggcaggtactcagcataagtatgtgcaaaccccygatgtttagcttttatcatagcagttatatgataaaagccagggggtttgcacacagttatgatgaatacctgccatttctgccagcatcctacactctggcttctagtaataaattatcagttttacttttatgaacttccctgccccctctcagtttatttgccatgtgtgagactgaccccatctcttgctctatgaatgagcacaaaatttagacctggacagtaagagtcttgcatctccctggccatggtgattaactcagcagtcagcacatgtccagagacattccaaaaagcaggcacccggaacttatgcttgaactactgtgaaagaaggatgtttctcactgggttgactgacataacagaatgtcaacctacagcagcaagcagccatctgtccaccatttattc

SEQ ID NO: 68217 - DNA, 805 bp, Homo sapiens
cccagagtgccatatggttcactgggatcaatgccaggatccgaatccaggtcccctgactcccagcccagtgttcatttctcctcttataacatctgttactcctgctgggcagcagactcctcaggggcagtgacccacctcttccatcttgttcacttaggtatccccccacatagagaggtgacaatcaaaaatatctgttcgtcaataagttaaccgtactcaggttaagccgctgttggtcactcaggttttatgcagagctgaacatcagagtaaaaggtctcaacagaaaaaaaaaaaaatcaccaacccataaatacatggtttatgatctctgaaaatactagaaactctaaacacgatttccagggtggaagccttgggaacagcagccacagagcctcctcttgtgaagagatccaagccggagttytattgtcatggggttggcaggcaccacacccctagccatctatatagcttgagagcaaaagtttccacactgcctctaagtcagttttaaccaacttgaatcctcctcaaaatatttaacagcctctctccttttcccaaacactgtaactgctaagcttcctttcatctttccataatcaaacctgcctaaagttttttagtaagttgaaatcacgtgttcttttgcacattaacaatccattccatcccccagggaacagcctttgccagagtatgaaggaactccaaggagttagggttggaaattggcattagccacagctgaagttagttttttcaagcaaaaccctgtgaagttcttcat

SEQ ID NO: 68218 - DNA, 634 bp, Homo sapiens
cctctgtgtgcataagccttgggtcctcgcgaaagcaggggagagcctgggattcaactcagaggccccagaggatctctgaggatgatctgagagcggacgaggggtttgtctctccccaggactgggtcagtgttgcttatggagccccatacacatccttcccacattaagatttcctgagtaagaggcgccggagggaagggggagcaggggccttcttccaggctgctcccggttacrgtacacagtggcccctcacccctcacaccacaggccatgggtcccagtcacagcccccactcctggtgagcacctgctgggtagactcggaaacccctgcaggcaatagaaagacccccgccccagacatgctaaaccatccagacagtattcactgctatatgtccgtctcttggttgtgttgggagaagcaaagcttagtggcggcggtagaactgccctgatagcaaatgacaacaggagaggggctgtaggacagggctcagggcctgtgcgtgtccgggaggggctgcaggacagagcttgggcctgtgcgtgtctgggggcggcctgccctgccagctcctctcctcccaggctgaatgccaccttttacagaggtgcattggca

SEQ ID NO: 68219 - DNA, 627 bp, Homo sapiens
gttttatttctgatactgttgttgagtcacgtagggttaatttagtgggaagaatagtttcaaaacagtaaataaacattagtctctgtcctaagtcaataattacttttttaaaaagttctaagtagagagctttttccctttttactgaaaaataaaaacatcttcaaaatcgcttatatgaatcacttttcaaatgtaaaatcttaatgtttctcataaaacaccaagtacggatgctgacaggtatgaaattcaaaagttatttgggatttgatgctcagaaggtaattgcatgctgtgtatgttgaactctaaattgggttgggctcatctgtatagattcacagacaagaattaaagtcttgaaggtaaactcattgtcctctatcaataaccagaaatatgccttctttgaatctgatattccctgacattctcctgcattaatgtgttgaagtcagataaatctttaggttatttrttttgaactgttggattctagagtactgcttcagatttcattttttttaaccatagttctttttttatcagaaggttattttcttagaaaaatatatgcaagcattgtcctttgaaatttttctcgggtgttgaatgttaagt

SEQ ID NO: 68220 - DNA, 1241 bp, Homo sapiens
caagcctatgaggtagataatattattcccattttacagttaaggaaactgaggcacagtcacttgcccaagtagtaaggggctgagagttatgagagttacagggtggaagctagagaggtgggcaggagcaggagaatgtgcttgggtgaactgcaaaggacccaggaaaccccagcatacgccgtcagtgtggcccctcccagatcctcccctgccctcaatccctgcagtaaccagaaccagacctggattagggtttgaaatctgacaggaggyaagttggctcagagccagcaaggaaattcattcactttcaaaaacaaaccagcccccacagccaccccgccacacgtacacactgcatgcctactgaacagaatgacttggagccctgaatgaaccgccctgaatggccgcccagggagtggaaccattttcatcctctgtgggctggttcctgcaaggctcatacctgccgctcacacactcagagccagagatggtcgggacaggtgggaagatgtgttggagggagctaaccctgcccacttcacaggtagggaaagcgaagccctgagaaggcagtggttcccagtgagctggttagaggcagagcctgcttaaggatcctggtgctctgacctccattccagtgctctgtcttttcatcgctcatccatttcctcctggcccccccaggaagtgactagctctctacaccagcaacatggggatcttggtacaaacaatggccaaatggcctctgcagtgatcagggacttctccaaggaaggagaaggaccaagggggccaacaggtgcctgtgcgtcagtgcactggtgcactcccaagggatatctgggatatgagtcatcttgcatctgctctggggaacaagagtctattaatgagccattgaactctgggctcctgcaaggcagggcagttccatgttcaggatggaccaggtgtgtgatgtgtcggtctgatgcaccttgggaggacagcagcatgcagggtcatggcagcactagtcccatcctctctggggaccctatgtctgtgggctcaggcctgttttgcatctacagtctaattcactccagtccctctggacctgtgtctggcctcccaggataacattccactccctttctgggtcatggctcaggcttgcaagtctggctgttgtggtttcagatgaccttgagcaggctgcttgtattccttaacctcat

SEQ ID NO: 68221 - DNA, 1241 bp, Homo sapiens
caagcctatgaggtagataatattattcccattttacagttaaggaaactgaggcacagtcacttgcccaagtagtaaggggctgagagttatgagagttacagggtggaagctagagaggtgggcaggagcaggagaatgtgcttgggtgaactgcaaaggacccaggaaaccccagcatacgccgtcagtgtggcccctcccagatcctcccctgccctcaatccctgcagtaaccagaaccagacctggattagggtttgaaatctgacaggaggcaagttggctcagagccagcaaggaaattcattcactttcaaaaacaaaccagcccccacagccaccccgccacacgtacacactgcatgcctactgaacagaatgacttggagccctgaatgaaccgccctgaatggccgcccagggagtggaaccattttcatcctctgtgggctggttcctgcaaggctcatacctgccgctcacacactcagagccagagatggtcgggacaggtgggaagatgtgttggagggagctaaccctgcccacttcacaggtagggaaagcgaagccctgagaaggcagtggttcccagtgagctggttagaggcagagcctgcttaaggatcctggtgctctgacctccattccagtgctctgtcttttcatcgctcatccatttcctcctggcccccccaggaagtgaytagctctctacaccagcaacatggggatcttggtacaaacaatggccaaatggcctctgcagtgatcagggacttctccaaggaaggagaaggaccaagggggccaacaggtgcctgtgcgtcagtgcactggtgcactcccaagggatatctgggatatgagtcatcttgcatctgctctggggaacaagagtctattaatgagccattgaactctgggctcctgcaaggcagggcagttccatgttcaggatggaccaggtgtgtgatgtgtcggtctgatgcaccttgggaggacagcagcatgcagggtcatggcagcactagtcccatcctctctggggaccctatgtctgtgggctcaggcctgttttgcatctacagtctaattcactccagtccctctggacctgtgtctggcctcccaggataacattccactccctttctgggtcatggctcaggcttgcaagtctggctgttgtggtttcagatgaccttgagcaggctgcttgtattccttaacctcat

SEQ ID NO: 68222 - DNA, 824 bp, Homo sapiens
atggaaaccatgttaccgtgttacagcagtggagcagtggacagggaacaagtaactggaaagagggagaaatcatgactgctaaagcagggattcacaggacaaggggtgcttgcgaaaagccccagggtcctggggctctcgctgttcacctgagagaatctcatcttcacaacaggatcatgcactcccaagggagagactatgcagcctcctttgtctcctgcaaagcctagtacaggagaggaggaaggtcctggaaagccatgttgattcacagcccaattcctctctatcacacttgcctccatgccagaaattccaccattaacactgttcttctaattgagttaagcattgccctccatatattacattctcactctgctttcaaaatataayatcctctgtgctctctcccgatataggctgactcctaatgctccaaatcacttaaattatattcagtatgcctccctaaaaattaatcagatttaagttaacatactctgattctacagaaaccagctgacatgttgagcccatagcctgggctctctgtggaggaaacaaaggtagacacaggctgagcctgctttcagggagctcatggtcaaagaggaggagaggagacagggaacaagtaactggaaagagggagaaatcatgactgctaaagcagggattcacaggacaaggggtgcttgcgaaaagcaaatggaatgaggtaacacatgtataagcatctggctcatgcctggaggggagcaggttctcaataaatagtggctaagtttaaactccattccttcatttttctcaaa

SEQ ID NO: 68223 - DNA, 576 bp, Homo sapiens
ccgaaaccaaccttctcctttgccttgtttgataacaaagctggctcctgtgaaaatttagacaaaaggtttgtagaaagtgccgggcacaatgtagctctttgattttagcttccctttctgagcttttccccatctagactctcatagagaatggtgatactggcagggtgcactagggtaaaaggcagaggctgcccayggttggaggccactgattcaggggctctggccacctcagagttcgtttgaccacccccagggctcaggggatcacattttggctcaccttgcctcagggcagtagactccatctgtccccaggctccctcctttgcctttcttattctgcctggtccctgctggggctataccctcccaggggggaggatactggtcctacagacatctgcctttcctctccctccagcaccagcctcggtggaaagcttccaggtgacatggtttggaagttcaaacttcaggaaagaaaaagcatgctctataacacaacaagtacgcagccaggactagattcagtccccagtgtgggcactcacttgggcaagtggctta

SEQ ID NO: 68224 - DNA, 645 bp, Homo sapiens
gtaaaaagagcacgtggaatgggaaattttgtgatggcatcttagaaacccaatttcccccatagacctacatagcgtctaccttcctcttctagattattcttgggaaattaaaacgtcagcatgtcgagtcagagtcttaacaaaggctctgccaaagacgacatccagcaggtattcacatcactggagcatccctccaggcactctatgttgcagtggtgccaatctggggatttgtattttgaggcatatcactcattttccccactcaaccacgcagacagtactgacctcctgcaataacatcacagatctccatttctctcttcatcctcttccagttggcttccacctttaggggcatgcacttccacacaggtgcctatcttttggattaatgagcctccctccctcagcagkctctttaaaacagggtatagcttttcaaagccaaaatccatcctgactcacattctaccacatgctgagttgatgacaccagaggcagggattagagtgatgcttctacaagccaaggaacaccaggggccaccaaatgctggaagagacaaggaagaattctcccttagaggcttccagggtagcgtggcccctgccaatacctcgatctcagatgtccag

SEQ ID NO: 68225 - DNA, 561 bp, Homo sapiens
tccatttgggggaaaatcaagcaatgaagcaaccaaagaaacagggaaaagagaatctgcatgactcccaccgtcagaatgcagtcagcaatggccccaaattgaaaaccaagcgtcctatcggacatgagttagccaactgccctattttataagcagtgtgattctaagtcaaagaaaaacaggtgtctttaatcagaatgaaaatatgaggcaatgatatcccaagagcaagakttatcccattttagtgcctgaactatacagcttaaggtgaactatacagctatagaactacacagcttaaggggagctatatagcttaagaacaatggagatttgagatcctgcctttgatattatgagtaagaatttagaacttaaaatggttgttctaggtatatagaaaatccatccccctctggaaaagactctcttctccccactataaatgagaataaatttcttcttttggtcttaactcccatgagacaagtattttaaggtatcagtttagaaacgaaattgttttggctattctagcaagtttaatgtgcagag

SEQ ID NO: 68226 - DNA, 561 bp, Homo sapiens
tccatttgggggaaaatcaagcaatgaagcaaccaaagaaacagggaaaagagaatctgcatgactcccaccgtcagaatgcagtcagcaatggccccaaattgaaaaccaagcgtcctatcggacatgagttagccaactgccctattttataagcagtgtgattctaagtcaaagaaaaacaggtgtctttaatcagaatgaaaatatgaggcaatgatatcccaagagcaagatttatcccattttagtgcctgaactatacagcttamggtgaactatacagctatagaactacacagcttaaggggagctatatagcttaagaacaatggagatttgagatcctgcctttgatattatgagtaagaatttagaacttaaaatggttgttctaggtatatagaaaatccatccccctctggaaaagactctcttctccccactataaatgagaataaatttcttcttttggtcttaactcccatgagacaagtattttaaggtatcagtttagaaacgaaattgttttggctattctagcaagtttaatgtgcagag

SEQ ID NO: 68227 - DNA, 1012 bp, Homo sapiens
ttcattagggagaaggtttagaccccattgttcacaatttgtttcacctccactgtagcaggcatccaactgcaggatgactatgtaagtgttgtattagtgcattctcacactgctaataaagacatacccgagactgggtaatttataaagaaaaagaggtttaatggactcacagttccacatggctggggaagcctcacaatcatggcagaaggcgaaggaggagcaaaggcacatcttacatggcagcaggcaagacagcatgtgcaggggaactggcctttataaaaccatcagctctcatgagacttattcaccatcacaagaacagcatgggaaaaacccacccctatgattcaattacctcccactgtgtccctctcatgatatgtggggattataggagctacaattcaagatgagatttgggtggggacacagccaaaccatatcaagtatcttcctttctcatcatgctacagaaaccagcaccaccgctggcctcaaacaggcatatgaatgcctgctgaaggaatgaatctgggcagggacaagatgaagctacatcagagggagacataaaacccaaggatcagtcattcacagttccaggccccacaaacagtagcagctcgtctggaagggcaactctcagtgggtaccaataacaggcctggctgtatgctgatgtccagattgtcatcattggggacacagtgatgtaggccacctttgcatgggtatacatagccaggtgcatattaatagccaatattgaactgctatacaaacaattacaattaccagttataaatacatgaactgttatcctgatattcacctgcctacataattggaactttggtccaggtctgtagataagaaattgttagtagtaaatttattagtgccacatttgyactatagttatctacactactcccttgattatttaaactggtgtttttatgccttaatttattaatattataatccttatctctataaa

SEQ ID NO: 68228 - DNA, 334 bp, Homo sapiens
ggaagcacgggaacccatcagaaccggcatctgtcgccaacacccctgtggtgagccttgccactgggccctgagaagctcagagcagtcaaaaaagagcagtgggacatgacccaggtcagatgtggcttttcygtaattgtacaccaatgatcaagagaaaatgaaggattttaatatgtaagtccttgtcaggaaccccggcccacccttgaccccagccatgtgcccctaggagcctgggacccccagcccagtaggcgtgcatcagtgtccacatgcacccatgcaagtacacaggatgcactcaggacatggccccagaagccaggat

SEQ ID NO: 68229 - DNA, 1372 bp, Homo sapiens
tagtgcgaggaagatgggaaggggcttggagctgctctcctctctccatgtgttcagtagccttgaagctctttaaaccccatggatcatggattttgtttgtttgtttgtttgtttgtttgtctgtagaaagggggtctcactaggttgagacctagttgttcaggaggtcaaggttgttcaggctggtctcaaactcctgaactcaagaaatcctcctgcctctgcaccccaaagtgctgggatttcaggcataagccactgcacccagcctagttaatggacttttatgcaggcttccccacataagcatgattacgtggtcttcagccccactccccttcccagaggatggggggtggagctgaaggttccaaacttctcatcatggcttggtctttctggtgaccaacccccctccagatgcccacaaagaggcacctctttggaacaaaagatgctcctagtacccaggaagttccaagggcttaggagttctgtgtcaaaactagggtcaaaggctaaacattagaacaagagatgcacctagaacccctatttctcaagaaattttaagggttttaggagctccgtgccagaaattggggacaaagaccaaatatacatttcttatatcacaatatcatagtgggccagatcatgcagagaggtcacattaattaattaattaattcaatagatatggattaagcacctactatgtgctgggaaatattctgggtactagacaaagaggactaaacaagaaaagtccctcctctcatgaagcttacattctagtggtaggaaacagacactacayacaaatgaatgaatgaatgaatgaattcagccatgaaagtacttaggagaaaataaatcatcaggagagaacagagagtgacttgaggggagggcactactttctatgagtggtcaggaaaagcatgaatgaggagaaggagccagctgtgtgaagatcacagagaagaacattgtgggcagaggcaatggcaggtgcaaaggtatcaggagaacccgcccctgaatattcaacgtgggcccttttctatttttcctaagtgtcagtcggtctgagaaataaagggaaagagtacaaaagagagaaattttaaagctgggtgtccgggggagacatcacatgtcagcaggttccatgatgccccccaagctgcaaaaccagcaagtttttattagtgattttcgaaaggggagggagtgtatgaatagggtgtgggtcacaaagatcacatgcttcacaaggtaataaaatattacaaggcaaatggaggcagggcgagatcacaggaccggggcgaaattaaaattgctaatgaagtttcgggcatgc

SEQ ID NO: 68230 - DNA, 1113 bp, Homo sapiens
ctgcaattggcatccttactcagaaacggtgggagaaggaaacctctgttctctcaggcaccccctgaccctcacaatacccagggtggttatgggttttcctacttcatagtaggccagcatccctccttccttggtgaaggggcctggagtgccagaccctgtggctggggcccccactctggtgtctgatgaggaggccagtgtgaaggagcgtccgtaggtaggcatgccaaggatcagcttgctggcaggggtccccttctgcagccactgttgcacagcagcatcctggtggaagagggcagggttaattttctcagccctcagcctggttctgattatctaagtctgggggatccagaggcagagctaggagggcaggggctcctcagctggagctctacgggcctttgttaggattccagccctaccccatcttctttagagcctgccttagacccgtgaccccagtgaagaagctgcatggcatgataaccagagagcgtgggcttcggacgcagacaaccattcactgaacaaatgtgtactgatggcccactgtgtgccaggcgctgtccatggtgcttcagacacatcagtgaacaaggcagacacagatccctgccttacccagcagcttatttaacctcactgaaccttggtgttctgtctgtaacatggaaataaggaaaatatccatctcttagggcattgtgagaattaaaggttataatgcatgtaaaaggtcagcacaacgcaataaagggtcgctgtggtcatcatcgttatcatgattgttgtcttagttttaccctgagtacaaaagcagggaattgggtctgctttatttatctctgtatccycagtgtctagaatgacacctgatgctcagatagaacaaaggcttccttacccacctttgaataaggccttcccctgattatatattacttggtgtaacacccccaggcctgtgacgggagaaggtacccggtacaagtatgataaattaatgaataatgaagcctcattccttaagccaagagtatggttcactttcccccagaagctgccctagttttgtcaggtctagttactctgagcccactt

SEQ ID NO: 68231 - DNA, 1759 bp, Homo sapiens
taaagaaagctctgaagtcattttgaagagtctttgttcttactcctgggtttcccgagacccatggctctgctctcaggagagatgaggctgcttggctgttccttgtcctcacaggcatgagggggggggtgaggattaggcgtggggccaacaggaaagggggaggcctgtgtgtatgagagagccttgaggactccccagcactctagaaagaggctgctgtgtggcctctccagggcccagcactctgctctgcctggtgtggagaaaatactctgcaatagctggagggtttgaatagctttttccacttccctttccaaaatactttcatagcagctctctcaactgctcagccaacagcccaggtgaaaaaggaaaggcaaggattgttatgcctcatttgacagatggggaaactgaggcacagggcagggaagtgacttgctcaaggtcacacatcaaggctttggaagaactgggactggaagcccagtgtcctcagtctacatggagtgctagggctgggggtggcggggaaacaggagtgttggcagaggttctggggaggctgcctggggcaggagactcactgggatatcttggcaatgtcatagctgctgtcaatggtgaccttccccgcagacagtgctgcgctgagcaggagctgctttttccctggctgggcttcctttataaattcggccttcatttcctagatgggagacaggcaggtgagagaaagggtcccaagtggcatgagaggtagactcatcgagggcggactaggtctctgcgcaacccatttgctgtactccccaacctgcctggggcctagtggaagtgataaagtggctcatcagtggtcccatcctcaagtcacccatccttttcctaaaaaactgactaatcttctccccaaacccatgcacacccatcagcactcaattactccctgtcctggagggagcatcggacagtgggtgacccctattggcccacagatgactttgggagacatttgcctttcggtctgtgctttgttctagctggtgcatgaaatcccaaagttaaagtgattgctgctggtattgtgaacaatttgtttagactctccttctgcccctggtaactggagatacttaggctgcccccaggcagagctgagagctgctggacacagtgcatgctgggtatgggtggcatcagtatgggattgaagggtgggcaatgggcaatgcactaagtgggtagttataagtgggtgctctgctcagtcacaaccttccacctcttagaaccccattcccacctcccaccatggtcacaagaagccttccttgctatgtgagatcttcagggcacagggtcccaggacactgccctgaggctgaagtccctctttacctgtcctcaggaggacagcagctgacgccggcttctagcccaccccattccctcatgcctgcccacctccctccctgtccctgacctgaccagcaccttgattagggtggtaaaatgctgtttgtctctccgtccagggtagagccaggcaaggtccagcccatcaaagccatgggtgcgcagaaatggcggtactgacttgatgaaagtccggcgactctgggtgttggaggctatcttggaaaatctaggaccaaaatcagccctgtagcatgctcagcactgatatgctaggtgccttgggcctctggtggggtttccaggacctgcagagctgggatccygaggc

SEQ ID NO: 68232 - DNA, 735 bp, Homo sapiens
gcatgatgggtcttggtcttcttccacttcttggtacttttcaatttctgcaataagttcagacatggacagacatattaagctggttctcctaaacacacataacaatccactgtctaatcctcacacagggacttcaggctcctcagcatgagagtaggacactgtgagagatattcttcaggaggcatgaaggctgatcaccatagagattccttggtttttgtcccagaaactgtgggtaaaattccctattctggtagatcgttatcccaatatcatttgtcccaagtttgtgcaaatggttatgccatatttttccaatcgatttaaagaaattgcccccaaatggttgctaggagaaaaactgcactattcagccctgtctcatcaaatactcagattgttcatggtagcgaggatttcagacgctgaaattagagtgaaggatgaaatctacaagatctacaaaattgagacaaaatcagagttgtgtgaatttgtcacatctgcccaggtccaatgtcatgagagtaggattagggcgccacaggcatggcctgagactaggaagagagccttgctcactgacccatcccttgtctgggcttccaagtggaactagagtttcattcaacctacatrtgcctataggtcctccctgtggcaatgacatctctcagctcagtaagggccacttgcagtaggaatatgaccctaaccagaagactcagt

SEQ ID NO: 68233 - DNA, 753 bp, Homo sapiens
caaagttacctggggcatgatgggtcttggtcttcttccacttcttggtacttttcaatttctgcaataagttcagacatggacagacatattaagctggttctcctacacacataacaatccactgtctaatcctcacacagggacttcaggctcctcagcatgagaataggacactgtgagagatagtcttcaggaggcctgaaggctgatcaccatagagattccttggtttttgtcccagaaactgtgggtaaaattccctattctggtagatcgttatcccaatatcatttgtcccaagtttgtgcaaatggttatgccatatttttccaatcgatttaaagcaaatgcccccaaatggytgctaggagaaaaactgcactattcagccctgtctcatcaaatactcagattgttcatggtagtgaggattttagacgctgaaattagagtgaaggatgaaatctccaagatctacaaaattgagacaaaatcagagttgtgtgaatttgtcacatctgcccagatccaacatcttgagagtaggattagggcgccacgggcatggcctgagactaggaagagagccttgctcactgacccatcccttgtctgggcttccaagtggaactagagtttcactcaacctacatgtgcctatagttcctccctgtggcaatgacatctctcagctcagtaagggccacttgcagtaggaatatgaccctaaccagaagactcagtggatcc

SEQ ID NO: 68234 - DNA, 753 bp, Homo sapiens
caaagttacctggggcatgatgggtcttggtcttcttccacttcttggtacttttcaatttctgcaataagttcagacatggacagacatattaagctggttctcctacacacataacaatccactgtctaatcctcacacagggacttcaggctcctcagcatgagaataggacactgtgagagatagtcttcaggaggcctgaaggctgatcaccatagagattccttggtttttgtcccagaaactgtgggtaaaattccctattctggtagatcgttatcccaatatcatttgtcccaagtttgtgcaaatggttatgccatatttttccaatcgatttaaagcaaatgcccccaaatggctgctargagaaaaactgcactattcagccctgtctcatcaaatactcagattgttcatggtagtgaggattttagacgctgaaattagagtgaaggatgaaatctccaagatctacaaaattgagacaaaatcagagttgtgtgaatttgtcacatctgcccagatccaacatcttgagagtaggattagggcgccacgggcatggcctgagactaggaagagagccttgctcactgacccatcccttgtctgggcttccaagtggaactagagtttcactcaacctacatgtgcctatagttcctccctgtggcaatgacatctctcagctcagtaagggccacttgcagtaggaatatgaccctaaccagaagactcagtggatcc

SEQ ID NO: 68235 - DNA, 753 bp, Homo sapiens
caaagttacctggggcatgatgggtcttggtcttcttccacttcttggtacttttcaatttctgcaataagttcagacatggacagacatattaagctggttctcctacacacataacaatccactgtctaatcctcacacagggacttcaggctcctcagcatgagaataggacactgtgagagatagtcttcaggaggcctgaaggctgatcaccatagagattccttggtttttgtcccagaaactgtgggtaaaattccctattctggtagatcgttatcccaatatcatttgtcccaagtttgtgcaaatggttatgccatatttttccaatcgatttaaagcaaatgcccccaaatggctgctaggagaaaaactgcactattcagccctgtctcatcaaatactcagattgttcatggtagtgaggattttasacgctgaaattagagtgaaggatgaaatctccaagatctacaaaattgagacaaaatcagagttgtgtgaatttgtcacatctgcccagatccaacatcttgagagtaggattagggcgccacgggcatggcctgagactaggaagagagccttgctcactgacccatcccttgtctgggcttccaagtggaactagagtttcactcaacctacatgtgcctatagttcctccctgtggcaatgacatctctcagctcagtaagggccacttgcagtaggaatatgaccctaaccagaagactcagtggatcc

SEQ ID NO: 68236 - DNA, 753 bp, Homo sapiens
caaagttacctggggcatgatgggtcttggtcttcttccacttcttggtacttttcaatttctgcaataagttcagacatggacagacatattaagctggttctcctacacacataacaatccactgtctaatcctcacacagggacttcaggctcctcagcatgagaataggacactgtgagagatagtcttcaggaggcctgaaggctgatcaccatagagattccttggtttttgtcccagaaactgtgggtaaaattccctattctggtagatcgttatcccaatatcatttgtcccaagtttgtgcaaatggttatgccatatttttccaatcgatttaaagcaaatgcccccaaatggctgctaggagaaaaactgcactattcagccctgtctcatcaaatactcagattgttcatggtagtgaggattttagacgctgaaattagagtgaaggatgaaatckccaagatctacaaaattgagacaaaatcagagttgtgtgaatttgtcacatctgcccagatccaacatcttgagagtaggattagggcgccacgggcatggcctgagactaggaagagagccttgctcactgacccatcccttgtctgggcttccaagtggaactagagtttcactcaacctacatgtgcctatagttcctccctgtggcaatgacatctctcagctcagtaagggccacttgcagtaggaatatgaccctaaccagaagactcagtggatcc

SEQ ID NO: 68237 - DNA, 753 bp, Homo sapiens
caaagttacctggggcatgatgggtcttggtcttcttccacttcttggtacttttcaatttctgcaataagttcagacatggacagacatattaagctggttctcctacacacataacaatccactgtctaatcctcacacagggacttcaggctcctcagcatgagaataggacactgtgagagatagtcttcaggaggcctgaaggctgatcaccatagagattccttggtttttgtcccagaaactgtgggtaaaattccctattctggtagatcgttatcccaatatcatttgtcccaagtttgtgcaaatggttatgccatatttttccaatcgatttaaagcaaatgcccccaaatggctgctaggagaaaaactgcactattcagccctgtctcatcaaatactcagattgttcatggtagtgaggattttagacgctgaaattagagtgaaggatgaaatctmcaagatctacaaaattgagacaaaatcagagttgtgtgaatttgtcacatctgcccagatccaacatcttgagagtaggattagggcgccacgggcatggcctgagactaggaagagagccttgctcactgacccatcccttgtctgggcttccaagtggaactagagtttcactcaacctacatgtgcctatagttcctccctgtggcaatgacatctctcagctcagtaagggccacttgcagtaggaatatgaccctaaccagaagactcagtggatcc

SEQ ID NO: 68238 - DNA, 577 bp, Homo sapiens
attactcctactgtcattgctgttggttttcattgcagtagatgtttaggtttccatttcttcctccccttatcatttcctaacgtaccataggttgaccatacttcaaaagctgtactctcatggccactgcatcgaattttgagcatattttatggaaaactattgagctcactcttttcatgatcacagtttgctgtgtgtcatgagggcactaactcagagtgtcctttgactcccttaccagtatgtcacctggccaattcactaggtcactttctctctgtctctgtctctgtctctgtctctgtctgtctttctctttcattgttttctacctggccctgttctrtcccatcataaaggcaataatttgttacctcattaatggatctgtcctttttcttttcaaactcttccttacgttagccatgaaatctaggtggggctgtgtggtttctgattccccctggcttattctttactttttcccacttttccaggctcagcagggagctgctggatgagaaagggcctgaagtcttgcaggactcactggatagatgttattcaactc

SEQ ID NO: 68239 - DNA, 577 bp, Homo sapiens
attactcctactgtcattgctgttggttttcattgcagtagatgtttaggtttccatttcttcctccccttatcatttcctaacgtaccataggttgaccatacttcaaaagctgtactctcatggccactgcatcgaattttgagcatattttatggaaaactattgagctcactcttttcatgatcacagtttgctgtgtgtcatgagggcactaactcagagtgtcctttgactcccttaccagtatgtcacctggccaattcactaggtcactttctctctgtctctgtctctgtctctgtctctgtctgtctttctctttcattgttttctacctggccctgttctgtcccawcataaaggcaataatttgttacctcattaatggatctgtcctttttcttttcaaactcttccttacgttagccatgaaatctaggtggggctgtgtggtttctgattccccctggcttattctttactttttcccacttttccaggctcagcagggagctgctggatgagaaagggcctgaagtcttgcaggactcactggatagatgttattcaactc

SEQ ID NO: 68240 - DNA, 577 bp, Homo sapiens
attactcctactgtcattgctgttggttttcattgcagtagatgtttaggtttccatttcttcctccccttatcatttcctaacgtaccataggttgaccatacttcaaaagctgtactctcatggccactgcatcgaattttgagcatattttatggaaaactattgagctcactcttttcatgatcacagtttgctgtgtgtcatgagggcactaactcagagtgtcctttgactcccttaccagtatgtcacctggccaattcactaggtcactttctctctgtctctgtctctgtctctgtctctgtctgtctttctctttcattgttttctacctggccctgttctgtcccatcataaaggcaataatttgttacctcattaatggatctgtcctttttcttttcaaactcttccttacgttagccatgaaatctagstggggctgtgtggtttctgattccccctggcttattctttactttttcccacttttccaggctcagcagggagctgctggatgagaaagggcctgaagtcttgcaggactcactggatagatgttattcaactc

SEQ ID NO: 68241 - DNA, 577 bp, Homo sapiens
attactcctactgtcattgctgttggttttcattgcagtagatgtttaggtttccatttcttcctccccttatcatttcctaacgtaccataggttgaccatacttcaaaagctgtactctcatggccactgcatcgaattttgagcatattttatggaaaactattgagctcactcttttcatgatcacagtttgctgtgtgtcatgagggcactaactcagagtgtcctttgactcccttaccagtatgtcacctggccaattcactaggtcactttctctctgtctctgtctctgtctctgtctctgtctgtctttctctttcattgttttctacctggccctgttctgtcccatcataaaggcaataatttgttacctcattaatggatctgtcctttttcttttcaaactcttccttacgttagccatgaaatctaggtggggctgtgtggtttctgattccccctggcttattctttactttttcccacttttccaggctcagcagggagctgctggatgagaaagrgcctgaagtcttgcaggactcactggatagatgttattcaactc

SEQ ID NO: 68242 - DNA, 643 bp, Homo sapiens
tcccacgtcaagagaaagccaacatgtttttcctccaatgcataaaaggaacttccatagggctggcaggagtcaggctgttcaagacaactggaaggagttgaataacatctatccagtgagtcctgcaagacttcaggctctactacctccagcagctccctgctgagcctggaaaaggaggaaaaagtaaagaataagccaggggaaatcagacacaacagagccccaactaggtttcatgggtagcatagggaagtggttaaaaaactaaaaggatagatccattaatgaggtaacaaattattgccttcatgttgggacagaacagggccaaatggaaaagaatgaaagagaaagacagatagacacacacacacacacacacacacacacacacacacacacacacacasagagagaacgagctcagtgaattgtccaggtgacacactgatgagggagtaacaggacactctgagttagtgccctcaggacacacagcatacagggatcatgaaaagactgtgctcaataattttccataaaatgtgctcaagtttccatgcagtcgccatgagaatacagtttttgaagtctggtccacctacagtaggttagtaaatgataaggggaggaagaa

SEQ ID NO: 68243 - DNA, 643 bp, Homo sapiens
tcccacgtcaagagaaagccaacatgtttttcctccaatgcataaaaggaacttccatagggctggcaggagtcaggctgttcaagacaactggaaggagttgaataacatctatccagtgagtcctgcaagacttcaggctctactacctccagcagctccctgctgagcctggaaaaggaggaaaaagtaaagaataagccaggggaaatcagacacaacagagccccaactaggtttcatgggtagcatagggaagtggttaaaaaactaaaaggatagatccattaatgaggtaacaaattattgccttcatgttgggacagaacagggccaaatggaaaagaatgaaagagaaagacagatagacacacacacacacacacacacacacacacacacacacacacacacagasagagaacgagctcagtgaattgtccaggtgacacactgatgagggagtaacaggacactctgagttagtgccctcaggacacacagcatacagggatcatgaaaagactgtgctcaataattttccataaaatgtgctcaagtttccatgcagtcgccatgagaatacagtttttgaagtctggtccacctacagtaggttagtaaatgataaggggaggaagaa

SEQ ID NO: 68244 - DNA, 554 bp, Homo sapiens
actgagtcttctggttagggtcatattcctactgcaagtggcccttactgagctgagagatgtcattgccacagggaggacctataggcacatgtaggttgaatgaaactctagttccacttggaagcccagacaagggatgggtcagtgagcaaggstctcttcctagtctcaggccatgcctgtggcgccctaatcctactctcaagatgttggatctgggcagatgtgacaaattcacacaactctgattttgtctcaattttgtagatcttgtagatttcatccttcactctaatttcagcgtctgaaatcctcgctaccatgaacaatctgagtatttgatgagacagggctgaatagtgcagtttttctcctagcaaccatttgggggcaattgctttaaatcgattggaaaaatatggcataaccatttgcacaaacttgggacaaatgatattgggataatgatctaccagaatagggaattttacccacagtttctgggacaaaaaccaaggaatctctatggtgatcagccttcaggcctcctg

SEQ ID NO: 68245 - DNA, 714 bp, Homo sapiens
actgagtcttctgkttagggtcatattcctactgcaagtggcccttactgagctgagagatgtcattgccacagggaggacctataggcacatgtaggttgagtgaaactctagttccacttggaagcccagacaagggatgggtcagtgagcaaggctctcttcctagtctcaggccatgcctgtggcgccctaatcctactctcaagatgttggatctgggcagatgtgacaaattcacacaactctgattttgtctcaattttgtagatcttgtagatttcatccttcactctaatttcagcgtctaaaatcctcgctaccgtgaacaatctgagtatttgatgagacagggctgaatagtgcagtttttctcctagcaaccatttgggggcatttgctttaaatcgattggaaaaatatggcataaccatttgcacaaacttgggacaaatgatattgggataacgatctaccagaatagggaattttacccacagtttctgggacaaaaaccaaggaatctctatggtgatcagccttcaggcctcctgaagaatatctctcacagtgtcctattctcatgctgaggagcctgaagtccctgtgtgaggattagacagtggattgttatgtgtgtaggagaaccagcttaatatgtctgtccatgtctgaacttattgcagaaattgaaaagtaccaagaagtggaaga

SEQ ID NO: 68246 - DNA, 714 bp, Homo sapiens
actgagtcttctgtttagggtcatattcctactgcaagtggcccttactgagctgagagatgtcattgccacagggaggacctataggcacatgtaggttgagtgaaactctagttccacttggaagcccagacaagggatgggtcagtgagcaaggctctcttcctagtctcaggccatgcctgtggcgccctaatcctactctcaagatgttggatctgggcagatgtgacaaattcacacaactctgattttgtctcaattttgtagatcttgtagatttcatccttcactctaatttcagcgtctaaaatcctcgctaccrtgaacaatctgagtatttgatgagacagggctgaatagtgcagtttttctcctagcaaccatttgggggcatttgctttaaatcgattggaaaaatatggcataaccatttgcacaaacttgggacaaatgatattgggataacgatctaccagaatagggaattttacccacagtttctgggacaaaaaccaaggaatctctatggtgatcagccttcaggcctcctgaagaatatctctcacagtgtcctattctcatgctgaggagcctgaagtccctgtgtgaggattagacagtggattgttatgtgtgtaggagaaccagcttaatatgtctgtccatgtctgaacttattgcagaaattgaaaagtaccaagaagtggaaga

SEQ ID NO: 68247 - DNA, 745 bp, Homo sapiens
atttattattattacttattagtaatattttaggttttgtcttctttgcctccacttcacatgatttattggctgcaaacaaatatagttattccttttattttcatttcagactttgccatgttttcagggccagtccaactcagttaaacaattacaagttgactgccacatgtacacatagcactaaactaggattttgtagaggatgcagaggtgaagagtagggagcctctgccgtctacgggttcaaggtccaatgtggaggacatgtctctaaatcatgccgttatcagttagactgtggagaatgctacaactgaagaacagcaaggctctgtgggacttgaggggaaaaagagattaatctccacaggggttattcaagttcatggctctctctagttagtgaagttgttcatgatgctgaaagtccctcctgtgcacagtgcccggcacatgctgtagagcctgctcagcactgttttgacaagtggtacatttacatggtaaaaaaatctaaaactctccaaaaggacatacagtggaaagtccgtctcttaacacattccgtcatccttcctctctggagacacatgcttttcacaatttcctgtgtctgactgattgttaaakatttgttttctggaagatcctttttcaattttattgaattcaccccaatgtaataaacattctgcatatgtgccaggtgctgtgttaggtcgtgggaataccacgaata

SEQ ID NO: 68248 - DNA, 731 bp, Homo sapiens
cctttgtcagatgggtagattgcaaaaatgttctcccattctgtaggttgcctgttcactctgatggtcattcctccgaagattcttatgcaggaagcttattcctatgtgtgcgcaagtgtgttggaggtggggatatatgtatgaaagagaatgaaggaaagaatcagactacgaatagctcagtacacgacactcctgccggcatctgtgggctgtgggcattggcagtagttgcagcctttaacagccagcctggcattggcactgaccaattggaatgggcatcaactaatggagcaaggtccttgatggcccatttcatgctaggcttttatcctttaacaatcaygttgtagggaggtgaggaaggggccctgcagaagtagtccagatggccaggccagtagcagggggatcttaggtatcaaggcagaggttatttaccaaccagtatggttgtatttgagtattttgacaagcagtacactggctgaagctctggaaatctctctgtatcctagacttctggagtagttcctatccaggtgcagctgttgttgttattagatgtgtgttttctttcttgcattgtgtgtttgtgtgatagtttgctcagacatcattggtgtgtgtctgaactgctatttggttagaacctcaccatttgttcttagccctctctgtatgtccatggtgttcagtccagattgaggtctgctgacttggtt

SEQ ID NO: 68249 - DNA, 514 bp, Homo sapiens
acacatttaagaaatcaggattaaggaagctgtacagatgtaaactttgaagaaaacaatgaaaaaaagaatastggagagctgaatacgtgtggccaaactatgtcacttaccaaagggccagtcatcatcttttataacatgctagcacagtggtttgcagaatgtattctcatgcctgctttcaggataaaaacgttaaagagacatgcctgggaaattccttttccttttaatcaggataaagtggcctgttgaggcctgggaaagtgtattggatttcacctttgatctcccatacgtcagtctctttacaagtggtcatttctctgaaaggtacaagctgggactatttggcattgagttccagaatggcctttatcatcttgatgacaatttttccaatttctttaacagtttattcagttgtaaaactacagtgactcatgtaattagaggtttccctctgtgtcaacagagaggatttttggaaccaacaagttggacaagtttc

SEQ ID NO: 68250 - DNA, 530 bp, Homo sapiens
ctgtgtctgctaccttggctgctccaaaaactaatggggctgattcaagaataagtgtgttcctacagggatgcagaaaaaaaataataaattctatccacacagtcattatcatgaccttcattttgattcttgatgtgatgacagccgtatttgcagctcgtacagccgtgatgctaattagaatggaaacacagcactttggataaacttcctttttgagaaggtttatttaattcactgtacagtctcggtctgaacacctgcagacagactggggggttgcatggatttgactggctattagagaattgcctcgctctggctcttggcattatcactttgggaaaaattaactttcatggactaagcagcactatacaactctgcctctcaaaccacctgtggaggaggaccactgtatttttttttttgtttttttttgtttttccttcttaattttatcctctatgaatgaaacawggtcttactcttcatgactagattcaccacccttgtttgacaaccct

SEQ ID NO: 68251 - DNA, 854 bp, Homo sapiens
ttggcgttccttcttggtacctgtcctggcttcacatcttcagccatgattacaaagtgctcctgtcccctggctggggttgaccgccgtgccgcttaggcctgcccgtcgatcagaagagtgccattatactcttagagctgtgtacacactcttttgtytcctgtgctaggctgtaaactcctgaagggaagagactgtgtattacatttttttttcggtcacattgtgtctcataatttagtagtagtacagtaaatatttattaagtggataagtgaacctgatagtatctcaacagatttaaaagggtcttagctatcctttaaatgtaaatgccatgtatacattgggctgcttaattattttctatctgtagttctcagctgaacaggaccctcaagcacgtggagatatatttgtgtctagatactccttttcatggtatttgattcatccaattaaatgattctatggccactttttggtctttccttttccgtggcattcagcctatgcagtgtggagcccttggagttcttgagcatcttccaagggcggcttcaggaatcgggttctggcgcagtctcctcagcagagctttgctcttctttatttattggggttccactttagattgcacttgggaaaaaaaggacttgtttggaaaaccaccaccctgttccatagactgatgcttttcacactgttttttgctgatttcgactcccagtcttgtgtgtccctcataaacatggctgttgtccctgcaggctgccagctgggaccttgatggcatctgcatgttaatggggtctggaaagaggtgcagcctcaggtcctcaaagcacagg

SEQ ID NO: 68252 - DNA, 811 bp, Homo sapiens
gtccagaggggccagcctactcgtggataaaaccaaaatatggcttcatgctcaaactcatgcacccagtagctgcgtttcccattgcctgcttttatccagattttcttcatcgaaactagactccatatctccactcccttgcatgcatgtttttccagttctcctactggtgtttatatctattcagtgacccaagctggaaaccttggggttatcattcatggattcttcccgcctccacccccagcaaatccagctaatcccaagcccatttgattaaacttcttcagtgtctctctctctctctccatctcgctccatttccatcctgaaaatcctggtagactgacgttgccattcacagagccttccgtgataacattctagccaggttcctctatgccataccggtttcaccataattttgccagaattgtttttgtgtaggatatatctgattatttactatccttatatgaaaagagacctgaatcttaagttacccagtgataacccattggctccagtgtacaattcttctgccttcaccctgcatgtggtgccctagcagggtggcctcactatgcgctccagctccgttgcctgcctcatctcctatgaatcttaaactcctggctcgcagaactgctgcttgggaagagggatgcaaggtaatacacctctgtgagcttcttccaggggttaaaagagccgtgtttcggggagcaagaggaaagccargttctcctctgcagcctcaaaggaagggagaatgaataattttcatgcggggccaacagggaaggca

SEQ ID NO: 68253 - DNA, 891 bp, Homo sapiens
ccaagcagctgggattacaggcacctgccgccacgcccagctaatttttgtatttttagtagagacgggatttcatcatattggccagattggtctcttggccaggctggtctcgaactcctgaccttgtgatctgccctcctcggcctcccaaagtgctgagattacaggcgtgagccactgtgcttggcctagaagttaatttattgaaacaaatcaatggaggctctgcaaagaagcccctcattgttctgatagctgtaacatgatgaagaccggcagaagcatccttcatgcagctgtccactgtgcaagtggttttagcaaaaccaaaatgaaagtacattttatcatttcattgtatcccagagaatcatagaaattgagatttgaaaggtatctaatccaatacccccaagtcatattcttgattgggaaccaaacacccagctgccaatactatgtcaaatgtttattgagcatccactatgctccagacacttgttttacactcaccaacaaacttaccaagctgattctataatgatcagtacaattttgtaggtattaggaagatcagagaggttggaccacctctttgaggtcacacagctggatggaggcgctagcatgcttctccactatgttctgctgccactgggaagcgaagagacttgcaaacataccaggtatattaataatattccagccactacaaatagcaatrtacagtgtttgcactagaccaatgacagtggtaatacagtgaaaagagtaatcatttttaccagtttcagagtactaagacaataatgtggaaatgaaaaaactgccaggctcagtggctcatgcctttaatcccagcatttcaggaggccagggtgggaggat

SEQ ID NO: 68254 - DNA, 745 bp, Homo sapiens
ggctttaatattttaagtcaaataaaattttagatattcctagattgtcaactacatgattcaaaactttcttccattgaggaaattgtcaccagaggttttgttttgttttaatggcaaaaaacatggacaaagtgatagcaatctatttttgtctattcgggaaccactattttgtcatatgacttgatcaagcctttgaaatactttttttttttttagctctgaaacgcaattaagatgcttaagcactgttgaccttacagaattgttttatatatggtgactctacatcctggtttgcccaggtactgttttcattaataataccctcttgtacaaataaaaaatatcatgatttgygtaataaattatagggccattctaattataaggattcaattagatacaagaaatatgaaagtgcttcaaaagtcataaggagctatagaaaattatgattttattcatttttattttatgttctgattggctctttgatttcttcttgtggtcagaaaaagaatgcatattaattgtcatgagattataaaatatgcagaagatataagaagaagatcaatttaaactttgatcctatgaatacacccagagtcaatcatggttaatattgtggtcctattttttcctgtcatttgtctttccacacacattccttgcacagtttccatcatagccttgttgttaatggcccagcttttatggacagcgtatttgactgcca

SEQ ID NO: 68255 - DNA, 930 bp, Homo sapiens
atcctttgataattgcattcattttaagatgagccattcaaaattgctacctgtccaacctacacaagatgagcaaactagagacatgaagataaaaattgctagttgtctctaaacagaccattttaatatcactacagtcaagttttagacactctagactcacatatgaactgaattcactacttctcttttagctttttgtactatatacttgtattccaaaagtagaacattaataattgtcatttcttgtctaacatgtaaatgagatttaaaatacaatgaccttctttcagttctgcttgtacattgtttgtcataagctagactaataagactccaacaaaaagattataatcgtaaaaaatgtatagtttcacaactgtggatgaaattaaaatctacataattaatccaccttgagtactgatcatttataaagaatagataactaatttcattcttgcaataaacacaaaataaattatcaactgttttctaacrtactttctcctttaccacagaaggtaataatactaacaaaattggactttacattaatcatatgcttgcttccaaattatgatttgacagtattaaaaaggggaatttgtttgctaggttgtgaggatttttcccaactttctaatgatttcataaatttttatgcatttagaaaattcttaagtatccaatgattatctttttgattaataacaaaacttgaatttctgaccaagttcactaataaataataacaggttgtcctaagaccagccatttttttaaaaaattaaatgtctttaattttataactaaatgtaaatttacacatttattgtatgtactttcttaaaagaagacattaaaaattgaagcaatgatgttgtttcagtaatttttttaaaaacttcaaattgttatcta

SEQ ID NO: 68256 - DNA, 1426 bp, Homo sapiens
  misc_feature (1)...(1426): n = A,T,C or G
tgtatgcatattacatactcttttaattaacaaattcaacttcacctgttatgacaaaccataacataagaagcttatgtatagagatgtakgggaatgagtccatttataataacatacctagaagtaacatactgttgacttagtgtagtgaaataacctaaaaatactggccacaagattcattataaatcaaaaagttctttacacaatgactgattgatttgagaacagaaggatgctgggtgttttgttactaaggctatttctggcagtcatccaggaattacaactgcacaaccttacaaacagcatagaaattgactattttaacaaagggtctcaccaggataatgagtagtgcacattaaatctcactgtgcattgataagctctctttgaactttgctaagcttccaacaatggtgacaggcctctggcactttcagaataagtgggccctgaatggtgctgcagggatgaggttttgtgtgtgtgtgtgtgtgtgtgtgtgtgtgtctgtttgtttatgttttctcaaggaagaccatattttaatacatttagnacatgttttgcaatnnnnnnnnnnnnnnnnnnnnnnnnnnnnnnnnnnnnnnnnnnnnnnnnnnnnnnnnnnnnnnnnnnnnnnnnnnnnnnnnnnnnnnnnnnnnnnnnnnnnaaccatattttaatcacttagacttgttttcatttctaattagatctgggttcttaagaaaacttgtgaaataccagaaaggaatctatcacaattattatttataaaaaaggatccagattcttttttagattaatctttaatgttgtatatttaggtcctaaggtaatgaaaagcttctgcaaacattttaaagacattatgaggaggaaaaatgtacaggttaggttatatgaaatgtgtaacacttcattttagcctacaaaaatgacaatttcgtgtttcaaactaattttactatttacataattaacaggctcacctaaacatgttttcttcttaaattttgacttcctaaatacaggcttctgattttatgtgaactcaaattaagtttttatttgtaatgttgatcccaagatgagagatctttacacacacacacacacacacacaaacacataaacacacaatatatatgtaattctagaagaaaacaggactccacagaagactgtctataagaagaaataaataataaatggcaagtaaagcaaacaagtgtgtaaaatatgttcaatctaaacacgaaagaatcagattagaactaatataatagcagatgtcagcagaatggttgatcagtctaagcttcctaaggtccttgtattgtttggaagaagggtaaaatattggttatcaatatcttgttaactttgctggttaaaatttccataaaaaccc

SEQ ID NO: 68257 - DNA, 1426 bp, Homo sapiens
  misc_feature (1)...(1426): n = A,T,C or G
tgtatgcatattacatactcttttaattaacaaattcaacttcacctgttatgacaaaccataacataagaagcttatgtatagagatgtaggggaatgagtccatttataataacatacctagaagtaacatactgttgacttagtgtagtgaaataacctaaaaatactggccacaagattcattataaatcaaaaagttctttacacaatgactgattgatttgagaacagaaggatgctgggtgttttgttactaaggctatttctggcagtcatccaggaattacaactgcacaaccttacaaacagcatagaaattgactattttaacaaagggtctcaccaggataatgagtagtgcacattaaatctcactgtgcattgataagctctctttgaactttgctaagcttccaacaatggtgacaggcctctggcactttcagaataagtgggccctgaatggtgctgcagggatgaggttttgtgtgtgtgtgtgtgtgtgtgtgtgtgtgtctgtttgtttatgttttctcaaggaagaccatattttaatacatttagnacatgttttgcaatnnnnnnnnnnnnnnnnnnnnnnnnnnnnnnnnnnnnnnnnnnnnnnnnnnnnnnnnnnnnnnnnnnnnnnnnnnnnnnnnnnnnnnnnnnnnnnnnnnnnaaccatattttaatcacttagacttgttttcatttctaattagatctgggttcttaagaaaacttgtgaaataccagaaaggaatctatcacaattattatttataaaaaaggatccagattcttttttagattaatctttaatgttgtatatttaggtcctaaggtaatgaaaagcttctgcaaacattttaaagacattatgaggaggaaaaatgtacaggttaggttatatgaaatgtgtaacacttcattttagcctacaaaaatgacaatttcgtgtttcaaactaattttactatttacataattaacaggctcacctaaacatgttttcttcttaaattttgacttcctaaatacaggcttcygattttatgtgaactcaaattaagtttttatttgtaatgttgatcccaagatgagagatctttacacacacacacacacacacacaaacacataaacacacaatatatatgtaattctagaagaaaacaggactccacagaagactgtctataagaagaaataaataataaatggcaagtaaagcaaacaagtgtgtaaaatatgttcaatctaaacacgaaagaatcagattagaactaatataatagcagatgtcagcagaatggttgatcagtctaagcttcctaaggtccttgtattgtttggaagaagggtaaaatattggttatcaatatcttgttaactttgctggttaaaatttccataaaaaccc

SEQ ID NO: 68258 - DNA, 550 bp, Homo sapiens
tccactcctgtctccttgctgactacttgcctattcgaaaaaaggcaaataaagcccttttttcctcaaaagccagtgttttgtgcacactggacagtgagactatttgctctataatggtcccacagacattacttctgattttcaatgatccaaattggataatgtttaaaaaatacaaaagacttgatcagatgactatcataataaaatacgtaaaaaataaactccagttcagtggccatatcttttgcaaactgaatttcctagaaragccacaaaaccttaaaatgcaattagatgtgatcaggaaattatatggatgaaggcacatgattttggcacaaaacaacagtggttaatgttagtgtaattacatattagcataccaatacattttcaataaattcttcttaattgagaaaactagatctattttcttcttaggagaaaagatgtgaaaactttctttatgttaattctccctccgcaaattgtctgaatcatatcagttcattttaaattgaattggctttcaaaatatttaaat

SEQ ID NO: 68259 - DNA, 850 bp, Homo sapiens
gactgatggcagaactgtattctgttttttggcctggcagtaacactacaactgatcagacaaggatgactaaggacagaagagatgtgaaggcagctaaaccctcactgcatgaaccatggtcagagagacactgtttgaaaaggagcaagcattggaagggccacatttggggtgggcagtggaaagcatgcaacacagaaggagtcctaagacctaccttcaaaatccctacactgtaaaaaattagaccaatcttcctagttctaagattgtatgattaccaaatttatctacctatctactaatcaccagggtacaaggaattcaaagacgaaaacctcatctattaacaaattcttttgtcaaaccactttttttgtttggtgtttttygtttttgtttttttttttttggccaaagggggataggagtaacctatgctaaagagtaggcactggccaggcatggtggttcatgcctgtaatcccagcactttgggaggtcagggtgggaggatggcttgagtctaggagttcaagaacagcctgggcaacacagcaagaccctgtctctaaaatagaaaaactaactggctgtagtgttgtgagcttgtagttccagctgctcgggaggatgaagtgggagaattgcttgagcctgggaggtggaggttgcagtgagcagtaattgtgtcactgcactccagcctgggcaacaaaacaagatcctgtctcaaaaaataaaaacaaaatataaagagtaagcaaagagtaagcactgcagtaagtcctttacacatcttatctcataaaatactcataaactctctggaaagtaaattctatca

SEQ ID NO: 68260 - DNA, 705 bp, Homo sapiens
ccataggaactaactctggaattaatcttctgtgagaggcatgccttatcttcattgcctactctagctaccagaatttttgtttcagtggttaattggggtatgtccatcctagacatttcaaagaaaacctggagaatttttaatccagcactttttgaagactacaaaaaagaaagtttaagtgcagcaacaaaggatagtgrcaagaaccagttatttgaaactgagttcaaatcctacctttaaaaaaaaaatagttctagctatatacttaaataataaggcttactttaagaagttatataaattaggggagacagtgaatgacactatctgaaataaagcagatgctcaagaaatgtcagtttttattatagtttagaccaagaacatctaatcaatggaatgagagcagcatatagttaaccagagtatatgtatgtatataaacaacctagtatatgtatgtgctgtaataccaacttccaattcctctctgccagaaacatgtgaaaacctttagccaagcatgtgtttctgtggcagtctactctgtagatctaatcttacgtactttagagtcttatcatttttattcatgacacatgctgctctcttgggtcaacagtttgcactgggataactactttagttagtgactcattctcctttgaagaatacctttggttactatccatgcat

SEQ ID NO: 68261 - DNA, 705 bp, Homo sapiens
ccataggaactaactctggaattaatcttctgtgagaggcatgccttatcttcattgcctactctagctaccagaatttttgtttcagtggttaattggggtatgtccatcctagacatttcaaagaaaacctggagaatttttaatccagcactttttgaagactacaaaaaagaaagtttaagtgcagcaacaaaggatagtgacaagaaccagttatttgaaactgagttcaaatcctacctttaaaaaaaaaatagttctagctatatacttaaataataagrcttactttaagaagttatataaattaggggagacagtgaatgacactatctgaaataaagcagatgctcaagaaatgtcagtttttattatagtttagaccaagaacatctaatcaatggaatgagagcagcatatagttaaccagagtatatgtatgtatataaacaacctagtatatgtatgtgctgtaataccaacttccaattcctctctgccagaaacatgtgaaaacctttagccaagcatgtgtttctgtggcagtctactctgtagatctaatcttacgtactttagagtcttatcatttttattcatgacacatgctgctctcttgggtcaacagtttgcactgggataactactttagttagtgactcattctcctttgaagaatacctttggttactatccatgcat

SEQ ID NO: 68262 - DNA, 705 bp, Homo sapiens
ccataggaactaactctggaattaatcttctgtgagaggcatgccttatcttcattgcctactctagctaccagaatttttgtttcagtggttaattggggtatgtccatcctagacatttcaaagaaaacctggagaatttttaatccagcactttttgaagactacaaaaaagaaagtttaagtgcagcaacaaaggatagtgacaagaaccagttatttgaaactgagttcaaatcctacctttaaaaaaaaaatagttctagctatatacttaaataataaggcttactttaagaagttatataaattaggggagacagtgaatgacactatctgaaataaagcagatgctcaagaaatgtcagtttttattatagtttagaccaagaacatctaatcaatggaatgagagcagcatatagttaaccagagtatatgtatgtatataaacaacctagtatatrtatgtgctgtaataccaacttccaattcctctctgccagaaacatgtgaaaacctttagccaagcatgtgtttctgtggcagtctactctgtagatctaatcttacgtactttagagtcttatcatttttattcatgacacatgctgctctcttgggtcaacagtttgcactgggataactactttagttagtgactcattctcctttgaagaatacctttggttactatccatgcat

SEQ ID NO: 68263 - DNA, 1186 bp, Homo sapiens
gagatataagtcaaatacagactaattgttatattattttatatattaaatcgttggattacatcataataacttgcaagttgaagttaaattttttcattattatttggatttatattttaatttaaaaacaccattggtttgtatacaaaatcaatgtcatttttttctgattacaaacttagtatttatttgcttttagatgatttacacatcataaagagttctcagaaattagaactttaatcgagattatttattacaacatcttttaatatccattttaaaaacattgttgaggtataatttatatatcataaagttcactcattttacatgttcaattcaatggtttttagtgtatttacagagttgtacaactatcaccagtatctaactgtagaacaactttgattcaatagcaaattgagttcctttatgtttgtttcccgagttttccatctgattatttcaactttctgttcacttaatctttattaaaaagtatattaaatacaattatgttttagatttacaagygaaatttttcagggacataaaaaggaaaagaatatcaataaaagtatagctctatgacctgtgatatatgtgctagaatgggtgtcagaggaatctgactaaacttcctaagaattattgctttgtgattatgtcccttctacccgttggggattttggcttcagacttaaaatttcagactaaagatgggtagcatctaattgtcaaaaaaagtgttgcaattaaatgatttaatgtaatgtttttatagaaattcaaggagaagcaaagcaattttgaattttcattatcttgacaacagtctggttgagatgggtgctatttgggtggactaaagaagatatggtaattattaatccctttagattctaaaaatctattactatatcaaattctcattattagactatttcacaactagaataagttactttatttccctgtagaagccttacaagactcttcttttatgttacattcttcaattttataaaggaacaacattaaatgaaggagagtcctgcatcttttttgtaatttctcatgaaggattctatgtgataccccttattaaaagctttatacaatattttcctctcagtgaggagagtgagactccagtttattgctcataaaaaaaactaa

SEQ ID NO: 68264 - DNA, 665 bp, Homo sapiens
ttgggaaggaaagtgacacactggtgcacaacccgtatggtgcccatcatctcagttcaggtccaaggmgagagtgggtatggctttgtgagctggccactggttctgtgttctcaggaaattctctaatcatcactgattgtgttgccctggctagcaagagcaaaggggctccccaaccgtttagcacttggcaggtcttcagaggggtgtagaaagaagcaacttccacctactcttttggctgagctctgagttgctcagaggttgatatcagccagagtcttgctgcattcttcttctgtgctgcagcttcttcccgtgggcactccaacaggtcctcacttctctatactttccattcaaaacttgttcattcactggtaactttgatctttctgagaagagctggcatgtaatttccctaatcagcttgaaaaagaaaccattttgtttttagaatgtatacatttatcactataaattttctccttagtgctgcttttgctgtatcccattagttttggtatgttgtgttgtcattttcattagtctctaaatattttctaatttccactgtggtttcttctttaattaattgatggtttaagagtgtatttaatttccacaattttgtcagttttccagttttacttctgttattg

SEQ ID NO: 68265 - DNA, 3565 bp, Homo sapiens
  misc_feature (1)...(3565): n = A,T,C or G
atgaatatttatagtgtccttctaaggaactgttatccactcccaccccaggatagactgtcctgacctctaggagtctctttaatgagtccgcagtggggaagacatgatactttccggtttatgcacacatataggttggcagtgtggaatttatgaatgcttcattaggaaaggccactgccaatataggattagttttgaaaagagttgtctaagcagccttcttttaccaagcatgcaaatatgaactagttaactttattaggataatacttatagacagtaatataaggattacaagttgcatagtcaaaatcatcataaatagtctaagtaatacagtgatagggcctgtgtcagatgtcattcatggaggtaaagatatttttatgaagtggagaattgtggaatacttgttacatttccttggtaaagtgtaagtccttcaaaggtaaaaccaattcttactcatctttgtatttctaacacagtacctagcacttgtttgttgaatgaataaatgagtgaatgaacctgatcccttagatttttttgaaatgaagaggttaaattgtttcctggaaatagaaaatgtacgtgcaaacccatccttgctgctccactttgactgagaaggatgccttaggatcccttctccagtaatcttttaattgagcaggtgagagaggtcttaaaatgtttactgaatggctggatatggaattacagcagtggaccacaaagctcccttcctccccactcattttttaattcctttgtggagaggagggataaatggtagaacaaaacattccagagcattgtgactaaatgagctatcaccagaagaaatcaaacaaaggagcatttaggcacaaattgaagaatgccaccagggctgattctgcatttgagacatcccgctaaaactggaacatgcttatttttgtgttgccgtaaggataatctgttttaaagaaagtgttcccatacacacccctaccactaggttataaattctgcattagactcaaggtttctggttaccttgtttaaacaagcttataactaaatattaagatgtttctccaatagagcatgtttgaattttacagctggcagggagcctatggcttaggaaattgagtggcttctccaattttgtgccagagatagggctagggatttggtttttctaattctccaaatagtgtctttccaccgcacggtgttgtagaaagccattaaaaaaaaaaatgatcctggagcgttttgatcccagaatgtttttaaaaattgatgcatactctaagtcagtaagtcaggaattataaactgtggcatgtggaacaaaatccagcctggttttgtatataaagttttattggaacacattcacacccattcatttacatatcatctacagtgctgcaatggcaaaatgagtgattgcatcagagaccacgtgacctgcaaagcctaaaatacgtattatttggacctttatagaaaaagttggctagcccttagtataaagtaaggatgaaaagttaccttaaaaattaacattaccaatttgtaataaattggaagtaaaataggatttctgagaaagctaaaagttagcttgttgttgagaggtataaatactctatataaaaaactaaaacacctgcttgcattaaacaaacaaaaaaaaagccctgggtttctaaggaatctctgagcacttagactcacagattttgagtcgacatcacgtgccacttctgtacttaaaaannnnnnnnnnnnnnnnnnnnnnnnnnnnnnnnnnnnnnnnnnnnnnnnnnnnnnnnnnnnnnnnnnnnnnnnnnnnnnnnnnnnnnnnnnnnnnnnnnnngctcattgatgccaatgctgctggtccartgcttctggccccagggccacactttgagagccactgatttatagatttttattacttatttcaagacatttatattaggtgtggtatggctgatagcacttaggagacatcaaactatatacaccttctcatctttgtttcaaaattaccagccattttttttcagtttacagtagttccaaatgactccatcatgtagcataatcgtttgtattttgttgtgacgaagatggtcatgttagtggaaagcagcactttactagaaatgctgaaatatttcatttatttcataaaaggaaagctttacatattgcaaatgattctcaaggttgctttttgcactgtataattccaaatgttgatgtggttgctatgactttaggaaagttctttaattgaataacatcaatttgatcatatattttaatctaaacaaataacttcttaatgttttgcctttccttttgcattacctttccaactagctctcttgatgacagggcttttctctgtagagttaaaaaaaatcaggtttattgaggtatcatttgcatgcagtgaaattcactgtacagttctgtacgttttgacaaatgcgtatggttgtgtagccaccaccataagaaacagaaaaattcctttgcctcggaaaattccttagtgctgctatgtggtcagccttttgcctcacctctcacctctcacccttggcagctgctaatgtgtgttctggtgtaccttgcctttccagaaggtcatataaatggaataatacaataggcagccctctgagttttgctttttcctttgttgtaatgcatctgagattcatccttgattaattaatcagtagtttgctcctttttattgatgagcagtatgacattgtatggatgtaccagtttatctttccaccagctgtagggcattgggttgtttccagtttttggtgattgactaaagctgctctaacagtcatgtacaagtttttgagtgaacgttaagttttaatttttcttgaggaatatacttaggagtaggatttctgggttgtatgttaagtgagtaattttatgtgaaactgccaaactgttttccaagtattcccaacaatgtatgagtgttccacttaccccacatcctcagcatcatttgatattgccattttttccttttatttttatctgatttgataggtgtttttctgtgatgtctttaattaatacaacaagccaatagctgccaacagtggctgaaccttaggaactataaaaataggacccatccttacatctggttagaagcctcaccctctgccattatccacagatgctgctgctcttcccctagtctgggcccacttttgtggtcgccatggtacaggtgctaactctaccagtccttagaaggacccagatgggaacaagtgaacaaaaagcatctctgggctgggtgtggtggctcacgtctgtaatcccagcactttgggaagccgaggtgggtggatcacctgaggtcatgagttcgagaccaacctggccaacctggtgaaacctcgtctctaccaaaaaatacaaaaattagctgggtatggtggcacatgcctgtaatcccaactacttgggaggctgggggaggagaatcacttga

SEQ ID NO: 68266 - DNA, 3565 bp, Homo sapiens
  misc_feature (1)...(3565): n = A,T,C or G
atgaatatttatagtgtccttctaaggaactgttatccactcccaccccaggatagactgtcctgacctctaggagtctctttaatgagtccgcagtggggaagacatgatactttccggtttatgcacacatataggttggcagtgtggaatttatgaatgcttcattaggaaaggccactgccaatataggattagttttgaaaagagttgtctaagcagccttcttttaccaagcatgcaaatatgaactagttaactttattaggataatacttatagacagtaatataaggattacaagttgcatagtcaaaatcatcataaatagtctaagtaatacagtgatagggcctgtgtcagatgtcattcatggaggtaaagatatttttatgaagtggagaattgtggaatacttgttacatttccttggtaaagtgtaagtccttcaaaggtaaaaccaattcttactcatctttgtatttctaacacagtacctagcacttgtttgttgaatgaataaatgagtgaatgaacctgatcccttagatttttttgaaatgaagaggttaaattgtttcctggaaatagaaaatgtacgtgcaaacccatccttgctgctccactttgactgagaaggatgccttaggatcccttctccagtaatcttttaattgagcaggtgagagaggtcttaaaatgtttactgaatggctggatatggaattacagcagtggaccacaaagctcccttcctccccactcattttttaattcctttgtggagaggagggataaatggtagaacaaaacattccagagcattgtgactaaatgagctatcaccagaagaaatcaaacaaaggagcatttaggcacaaattgaagaatgccaccagggctgattctgcatttgagacatcccgctaaaactggaacatgcttatttttgtgttgccgtaaggataatctgttttaaagaaagtgttcccatacacacccctaccactaggttataaattctgcattagactcaaggtttctggttaccttgtttaaacaagcttataactaaatattaagatgtttctccaatagagcatgtttgaattttacagctggcagggagcctatggcttaggaaattgagtggcttctccaattttgtgccagagatagggctagggatttggtttttctaattctccaaatagtgtctttccaccgcacggtgttgtagaaagccattaaaaaaaaaaatgatcctggagcgttttgatcccagaatgtttttaaaaattgatgcatactctaagtcagtaagtcaggaattataaactgtggcatgtggaacaaaatccagcctggttttgtatataaagttttattggaacacattcacacccattcatttacatatcatctacagtgctgcaatggcaaaatgagtgattgcatcagagaccacgtgacctgcaaagcctaaaatacgtattatttggacctttatagaaaaagttggctagcccttagtataaagtaaggatgaaaagttaccttaaaaattaacattaccaatttgtaataaattggaagtaaaataggatttctgagaaagctaaaagttagcttgttgttgagaggtataaatactctatataaaaaactaaaacacctgcttgcattaaacaaacaaaaaaaaagccctgggtttctaaggaatctctgagcacttagactcacagattttgagtcgacatcacgtgccacttctgtacttaaaaannnnnnnnnnnnnnnnnnnnnnnnnnnnnnnnnnnnnnnnnnnnnnnnnnnnnnnnnnnnnnnnnnnnnnnnnnnnnnnnnnnnnnnnnnnnnnnnnnnngctcattgatgccaatgctgctggtccagtgcttctggccccagggccacactttgagagccactgatttatagatttttattacttatttcaagacatttatattaggtgtggtatggctgatagcacttaggagacatcaaactatatacaccttctcatctttgtttcaaaattaccagccattttttttcagtttacagtagttccaaatgactccatcatgtagcataatcgtttgtattttgttgtgacgaagatggtcatgttagtggaaagcagcactttactagaaatgctgaaatatttcatttatttcataaaaggaaagctttacatattgcaaatgattctcaaggttgctttttgcactgtataattccaaatgttgatgtggttgctatgactttaggaaagttctttaattgaataacatcaatttgatcatatattttaatctaaacaartaacttcttaatgttttgcctttccttttgcattacctttccaactagctctcttgatgacagggcttttctctgtagagttaaaaaaaatcaggtttattgaggtatcatttgcatgcagtgaaattcactgtacagttctgtacgttttgacaaatgcgtatggttgtgtagccaccaccataagaaacagaaaaattcctttgcctcggaaaattccttagtgctgctatgtggtcagccttttgcctcacctctcacctctcacccttggcagctgctaatgtgtgttctggtgtaccttgcctttccagaaggtcatataaatggaataatacaataggcagccctctgagttttgctttttcctttgttgtaatgcatctgagattcatccttgattaattaatcagtagtttgctcctttttattgatgagcagtatgacattgtatggatgtaccagtttatctttccaccagctgtagggcattgggttgtttccagtttttggtgattgactaaagctgctctaacagtcatgtacaagtttttgagtgaacgttaagttttaatttttcttgaggaatatacttaggagtaggatttctgggttgtatgttaagtgagtaattttatgtgaaactgccaaactgttttccaagtattcccaacaatgtatgagtgttccacttaccccacatcctcagcatcatttgatattgccattttttccttttatttttatctgatttgataggtgtttttctgtgatgtctttaattaatacaacaagccaatagctgccaacagtggctgaaccttaggaactataaaaataggacccatccttacatctggttagaagcctcaccctctgccattatccacagatgctgctgctcttcccctagtctgggcccacttttgtggtcgccatggtacaggtgctaactctaccagtccttagaaggacccagatgggaacaagtgaacaaaaagcatctctgggctgggtgtggtggctcacgtctgtaatcccagcactttgggaagccgaggtgggtggatcacctgaggtcatgagttcgagaccaacctggccaacctggtgaaacctcgtctctaccaaaaaatacaaaaattagctgggtatggtggcacatgcctgtaatcccaactacttgggaggctgggggaggagaatcacttga

SEQ ID NO: 68267 - DNA, 1239 bp, Homo sapiens
tagtatatcctataattgaaataagttttacagkgcggattctaactgaagcttataaaaacacagtgagaatatgggacgaacataagtggaatgaactgatgtaaaaacagtatctgaaaacatgaaatatacaagaacagaaatataatttgcaattgcttaccgaaatacctcctcatatttgcatttgggctacaaagatttcaacaaatatgaacacacctacaaatgtaacagtgaaattggtattgttcccgcgctccatgttgtggaatgtggttctactaaaacaatgccactagtatttctccctgcaggaaggttggttgaacaatttgatataaaaatcaacctatggaagaattaaaccccagttgctgtggcatctccgcattggaaaaaagtcaaaatgatggggctcctattgtcccaggaatggtgtcattcagtgtatgggtgacaaagtgaatacatggttgtcaatggagctgcatctaagattgttcctgactttggggatttcccttccctctttacgaattacatttcaacaaagccaagtatcccaactctttgatctcttcaattccaactgcagttccccttggatgctccactgcccaacctatcccattacttcttatgtgatacacgagatgggtggataagagaagaaaacaatcaagtgcttttgtttcaagtataacaacacctatttcccactcctttggaaaacattaaagggatttgtcattctttaggaaaaataaaaaattttatgaaagagtatgacattcaataaaattaacaacacaggtcacaattaagactgctgaccagtgtgaattcaaatcaaatcacctagcataaactaaaatgaacgggtcccaagaccgaggcaactgctagagacaaacgtgtccctctttctctgcggaataacaacataatactagagcctatgggaagatcaaggtatcaggatagtggaaaaagaaaaggatatgtgacaacctgatacttgtcggggcggaagggttggagagaaaatgagagtctatatatggtaattgggacaggcatgggagggggtgtgatcctttgagaatgaacctcagaaggagggaataccaaccaagagcaaaaaggtcatacaaaaatgttagcagtcagctcatctcagctcaggatgtcaccacaagggattttatctgcaattcatgcaaattcaaatgc

SEQ ID NO: 68268 - DNA, 991 bp, Homo sapiens
ctcattaactgtggtattcccatggcctggaacaatatccagcacatagaaaaccttcaatagaagaatacatgaatgaataaatgacatttgaaattaattttggaagataagtgatagaggcaataataaagtttggagctgtaatttttttctttattcttctagtactgacatcattttatggtgatgtacacggtactgtctcattttaagtatagacattagagcaactggttggagagaagacactgttataaaatgaaagcaacatcaattgcatttaggatatttggattctggtctcagctttactactagctcagagtggctattagcatgccactcctctgtgggcttatttcacttgtaaaatcayggagcagatgagctattttctaatgttcattctgatccattaattaccatcttgaatcagtgtcacttgtgattttactattagtccatgttgccatcatattgcttttttcatattctctgttttagtttctttccaaactttctccttctgcctttttcctcaatatttacaatatttctttttttgagacagagtctcactctgtcacccagactggagtgcagtggcgcaatctccgctcacttcaacctctgcctctcgggttcaagtgattctcctgcctcagcgtcccaagtagctgggattacaggtgcccaccaccatgccagctaatttttttgtatttttggtagaggctgggtttcactatgttggccaggctggtcttgaactcctgacctcgtgatccacccacctcggcctcccaaagtgctaggattacaggcataagccacagcgcccagccaatatttaaaatatttcttagcactttgagctcttccccagatactgttttgccttaaaaggctaattttgcagatggacttgagattaacttggttagtcttgagacagacttaatacagatgttatctattcagctatgca

SEQ ID NO: 68269 - DNA, 991 bp, Homo sapiens
ctcattaactgtggtattcccatggcctggaacaatatccagcacatagaaaaccttcaatagaagaatacatgaatgaataaatgacatttgaaattaattttggaagataagtgatagaggcaataataaagtttggagctgtaatttttttctttattcttctagtactgacatcattttatggtgatgtacacggtactgtctcattttaagtatagacattagagcaactggttggagagaagacactgttataaaatgaaagcaacatcaattgcatttaggatatttggattctggtctcagctttactactagctcagagtggctattagcatgccactcctctgtgggcttatttcacttgtaaaatcacggagcagatgagctattttctaatgttcattctgatccattaattaccatcttgaatcagtgtcacttgtgattttactattagtccatgttgccatcatattgcttttttcatattctctgttttagtttctttccaaactttctccttctgcctttttcctcaatatttacaatatttctttttttgagacrgagtctcactctgtcacccagactggagtgcagtggcgcaatctccgctcacttcaacctctgcctctcgggttcaagtgattctcctgcctcagcgtcccaagtagctgggattacaggtgcccaccaccatgccagctaatttttttgtatttttggtagaggctgggtttcactatgttggccaggctggtcttgaactcctgacctcgtgatccacccacctcggcctcccaaagtgctaggattacaggcataagccacagcgcccagccaatatttaaaatatttcttagcactttgagctcttccccagatactgttttgccttaaaaggctaattttgcagatggacttgagattaacttggttagtcttgagacagacttaatacagatgttatctattcagctatgca

SEQ ID NO: 68270 - DNA, 991 bp, Homo sapiens
ctcattaactgtggtattcccatggcctggaacaatatccagcacatagaaaaccttcaatagaagaatacatgaatgaataaatgacatttgaaattaattttggaagataagtgatagaggcaataataaagtttggagctgtaatttttttctttattcttctagtactgacatcattttatggtgatgtacacggtactgtctcattttaagtatagacattagagcaactggttggagagaagacactgttataaaatgaaagcaacatcaattgcatttaggatatttggattctggtctcagctttactactagctcagagtggctattagcatgccactcctctgtgggcttatttcacttgtaaaatcacggagcagatgagctattttctaatgttcattctgatccattaattaccatcttgaatcagtgtcacttgtgattttactattagtccatgttgccatcatattgcttttttcatattctctgttttagtttctttccaaactttctccttctgcctttttcctcaatatttacaatatttctttttttgagacagagtctcactctgtcacccagactggagtgcagtggcgcaatctccgctcacttcaacctctgcctctcgggttcaagtgattctcctgcctcagcstcccaagtagctgggattacaggtgcccaccaccatgccagctaatttttttgtatttttggtagaggctgggtttcactatgttggccaggctggtcttgaactcctgacctcgtgatccacccacctcggcctcccaaagtgctaggattacaggcataagccacagcgcccagccaatatttaaaatatttcttagcactttgagctcttccccagatactgttttgccttaaaaggctaattttgcagatggacttgagattaacttggttagtcttgagacagacttaatacagatgttatctattcagctatgca

SEQ ID NO: 68271 - DNA, 991 bp, Homo sapiens
ctcattaactgtggtattcccatggcctggaacaatatccagcacatagaaaaccttcaatagaagaatacatgaatgaataaatgacatttgaaattaattttggaagataagtgatagaggcaataataaagtttggagctgtaatttttttctttattcttctagtactgacatcattttatggtgatgtacacggtactgtctcattttaagtatagacattagagcaactggttggagagaagacactgttataaaatgaaagcaacatcaattgcatttaggatatttggattctggtctcagctttactactagctcagagtggctattagcatgccactcctctgtgggcttatttcacttgtaaaatcacggagcagatgagctattttctaatgttcattctgatccattaattaccatcttgaatcagtgtcacttgtgattttactattagtccatgttgccatcatattgcttttttcatattctctgttttagtttctttccaaactttctccttctgcctttttcctcaatatttacaatatttctttttttgagacagagtctcactctgtcacccagactggagtgcagtggcgcaatctccgctcacttcaacctctgcctctcgggttcaagtgattctcctgcctcagcgtcccaagtagctgggattacaggtgcccaccaccatgccagctaatttttttgtatttttggtagaggctgggtttcactatgttggccaggctggtcttgaactcctgacctcgtgatccayccacctcggcctcccaaagtgctaggattacaggcataagccacagcgcccagccaatatttaaaatatttcttagcactttgagctcttccccagatactgttttgccttaaaaggctaattttgcagatggacttgagattaacttggttagtcttgagacagacttaatacagatgttatctattcagctatgca

SEQ ID NO: 68272 - DNA, 991 bp, Homo sapiens
ctcattaactgtggtattcccatggcctggaacaatatccagcacatagaaaaccttcaatagaagaatacatgaatgaataaatgacatttgaaattaattttggaagataagtgatagaggcaataataaagtttggagctgtaatttttttctttattcttctagtactgacatcattttatggtgatgtacacggtactgtctcattttaagtatagacattagagcaactggttggagagaagacactgttataaaatgaaagcaacatcaattgcatttaggatatttggattctggtctcagctttactactagctcagagtggctattagcatgccactcctctgtgggcttatttcacttgtaaaatcacggagcagatgagctattttctaatgttcattctgatccattaattaccatcttgaatcagtgtcacttgtgattttactattagtccatgttgccatcatattgcttttttcatattctctgttttagtttctttccaaactttctccttctgcctttttcctcaatatttacaatatttctttttttgagacagagtctcactctgtcacccagactggagtgcagtggcgcaatctccgctcacttcaacctctgcctctcgggttcaagtgattctcctgcctcagcgtcccaagtagctgggattacaggtgcccaccaccatgccagctaatttttttgtatttttggtagaggctgggtttcactatgttggccaggctggtcttgaactcctgacctcgtgatccacccacctcggcctcccaaagtgctaggattacaggcataagccacagcgcccagccaatatttaaaatatttcttagcactttgagctcttccccrgatactgttttgccttaaaaggctaattttgcagatggacttgagattaacttggttagtcttgagacagacttaatacagatgttatctattcagctatgca

SEQ ID NO: 68273 - DNA, 656 bp, Homo sapiens
atggattcaaatagtttgctccggggtctccaaaagattcagtagaaattatttttagaatttctgcttctcagcacttacctgaatatctgatagaaaggttgtggaagttcagagttagagatattaaacaatccactcctgctgtgccatgtaaaacagcatgaaattgaactctttagtattcgggggtagataaagttgttttgttctgaattcatgcactccatgtcacagtttatatggatgataaatctgaggaagatcagataaaaatagggctctgcacactcttagagatctaaattccttgtaaacataaatatttgtatgagtctatatgatcacatatgaaaacagacaggcagggtgcggtgggtcacgcctggaatcccagcactttcagaggccgargcgggcagagcacctgaggtcaggagtttgagaccagcctggccatcatggtgaaactccgtctctactaaaaatacaaaaattactcaggcatggtggcacatgcctgtaatctcagctactcgggaaacaggcaggagaactgcttgaacccaagaggcgtaggttgcagtgagccgcggtcgcacaactgcactccagcctggacgacagagtaagactccgtctcaaaagaaagacaa

SEQ ID NO: 68274 - DNA, 1190 bp, Homo sapiens
ttcatatacttcaggttttttgattcgattaaaaaaacccaattagtttctattaactgtttaaaattttcgtaaaaggtatttttgtaaggcctgataatcattttcattgatttttggcagcrtattcccagttcttaggaatgcatattcagggttgtcctttgattttgagtgttaattttttaaaaagatgactgttttgttgattattgaaatagcatgaaaacttgtttctttgaaggtaaataaaattgaaacagttttcaaacttatataatgatttcttttctttttttaaatcatattagtaaagataataagaaaatgcccagtccccaggagaatgtagttggtagagtgggcactgtgttctcttggcaggaatatgattggagtaagcatcctgaagagaaggtgggcagtgtgcatcagtcttggtaaacatcttcttgcgcttttaccattttctcacactcttaggaaatgagcagaaatgtaggcaaaaggtgattgttgtagtgccagttttatcagtgaaaatagaattgtaactaaaatgtccaatgatataggaatcattgaataaccaattgtgtccatacactgtaatttttaaaaattttacagaaaagcattggaaaggaaatcactatggctaataatattactacccaaatatccattgttgaaatttgtaaaaataaaaatatttaatggcaccctttctagtttattaaaggtaaaaaactgttaacagttcattgtatatctcttaaaatatcagcatatatctgtatcttttcgaaaatctacacaatgttattcaagatcctatagattattttgccatgtctttaatatatcattctgttcaatatatctttcattagccgggcgcggtggctcacgtctgtaatcccagcactttgagaggctgaggtgggcagatcacttgagatcaggagttcaggaccagcctggctgacatggagaaacctcatgtctgcgaaaaatacaaaaattagctggcatggtggtgggtacatgtaatcccagctacttgggaggctgaggcaggagaattgcttgaatttgggaggcagaggttgtggtgagctgacattgtgccactgcactccagcctgggcaacagagtgagactccatctcaaaaaaaagaaaaaaaaa

SEQ ID NO: 68275 - DNA, 1083 bp, Homo sapiens
gcattcttaatggacaaatacacaagttatggcttgccaacctatctaacccagccagaatggactataatgctacttgcaaagtagaatgtgtgatgagattgcttctatttttkttgttgttgttgttgtaatttaataaagaataattattttatttatttgtttacttatttatttattttagaaatgggatctcactgtgtcactgaggctggagtgcagtggcaagatcatagctcactgaagcctcctgggctcaagcgatcctcccgcctcaggactgcccccctccgccacccccatcccctgcctgtagctaggaaggactgcaggcacgtaccacagcacctggcttctatattttgttttaataagaggttagtggagaaccagtctcacagagctttgttaacgggaaaggaaaaagagattttaagacaattttaggaagctcaggatttccatctttcacttttattcaaaatgaagcaaatgattctgtattttcaaaattcgtcaattattcaattgccagttccaacagtttatcctgtagagttaaattgtctttcaatgaaagcaacagattatggatctatgaatttcccatgcacgaatcttcttttgatggaaataaaatgtaaatgtcccataacttgtttgaccataacattttacagatatgcaatatcaagattatcactaacatcactgataattgttgctaaactatggggcatgttgtaacagtctctggatattctgttcttccaagcttctgtcatttttgcccttcaatcttctttgccattgaaaatcatgctgcattttttctccctgcttagaagtagtaaaagcatttaaaatgccaaaaatatcacacaaagaagcatgcctattgtcccaaaccacattgggaccttataaagatgtttgttttactttctaggaacactaagagtttgtttcacagtcaaacattcctaatagtacttttctcttcagtaagcatcgtatctcacctacaacagttgtttatgatcagcttccatatgaacacatattataataaagagaata

SEQ ID NO: 68276 - DNA, 760 bp, Homo sapiens
aattttatcttctccaaatggccatccagttgtcccaacaccacttattgaaagggctggcttttcctgcaagatataagataccatctttatcatacgctaaatttccatatgtacttatgtctaattctggactttctatttttttcctagtagtcttcctgtttacttattagttttgattaaagatcctttataataatatttgttatttgacaagaactctttcttctcacagctcttctttttgggggttttcataactcttcttgcatttttatttttccgtatgagctctgcaatcaattttctagaaaaaaaatgtggtattaaaaaaaaatagccagatgtggtggcacatgcctgtaattmcagctactcaggaggcagaggcacaagaatcatttgaacctggaaggcagaggttgcagtgagccaagatcgcaccactgcactccagcccgggcgacagagcgagactcagtctctaaataaataaatacgtggtatttttattagatcttgttaaaattatatattatcttgaggagaattagacctttacgatgatgagttagtcccatcacagaacaagggatgtcttttgctttgttcaagtctacttttatgcctttagggagtatcttaaagttttcctcagagaagttttggtggttttagtggtatcaaataaaacacttgacactgcagcagatcaaagcaaaagctttgttacagaaaaagtaatactaggagggag

SEQ ID NO: 68277 - DNA, 651 bp, Homo sapiens
catactaaaataagctgcaaatgaactgagataaatcttaaaatgtaaacataacaagaagaaatagtaggcaaatatgtatcttatttgtgaagaggaaattgtttttctaagcttaaaatcctaaaatgaaaagaaaaaaatgatactcatttatattaaaatttcaaaaacttgatataaaatagttaaacagtaagtttaatgcaagttaaatactaagcaacaaaaatactggtgttaatgtggcaaaggattaatttttaatatatgaatgctatgaaatatatcagtatgaatgatactaaaatctagatagaaaaatgagcataaggcatgaacacagaatttgtaataaaagcagcagaaatgactagtaaatgtgtgactaatttgcaagctctctagcaagcaaaaaaagtgcaaattaaaacaacagtataatatcatttttctccaaatyactaatttttaaaaatcaggtaagtcctgattaatttacttatttcatagttttataatttcataagtaagtatttcatatttcatcatttaagtaaattaattaattaaaatgttgtttggtaaaatagagaatcagagcaaaaggaggtagtatatgaaggtatgtcaaacttgctaagcgttggt

SEQ ID NO: 68278 - DNA, 581 bp, Homo sapiens
tgagtgtcaccatagtgactagtgtcaccatagagtcactatagtgtctagaaagacacaccatagtgtctagaaagggctaaacaaaagttaaagactatcagaattccccagtcttagggatcttgtagcttcctggggctatagcacaaaagaaaaaaatgagtgacagcagccaaagtctgggtgtccctggatttcccagactccattttaagaagcaatctgaaattagtgttttgacttcccaaggtcctgcctgatcctaagacattctccaggctgaaagtgtagtagggtgggatcccctgcaatgcacaccacttgtcctcttcargtggtttttgcaagcctgccccaccatgggaactccttcgtcagtggggcctatcttgtgggtgctttttgtggaaaacattttgtgttgatgtttgaaataattgacaagttaccaagtgcaagtgcatgtaagattggctgagagcatttacatgtcacacatatagatacacttatttttatgtctctgtctcagagcattttacaatgttgtgtgattgctgattagggaaacttgacat

SEQ ID NO: 68279 - DNA, 670 bp, Homo sapiens
tcaattttccttcttggtcatctgttgcctataccatgggtattataatctcttcaccttgaaataacttctcctggctgggcgcgctggcttatgcctgtaatcccagcactttgcaaggctgagtcgggcagatcacgtgaggtgaggagwtcgagaccagcctgaccaacatggtgaaatcccatctcttctaaaaatacaaaaaaattagccaggcgtggtggcacacacctgtaatcccagctacttgggaggctgaggcaggagaattgcttgaacctgggagatggagatcgcagtgggctgagattgtaccactgcacttcagcccaggtgaacgagtgagaccatctcaaataataataataataactttttttattagagaggaacatggttttatttaattagtcatctattataccatcaactcaagcagctgttgataatatgtaatcttcaaagacctttttatatttattttttaaacttccatttattaaataataatttaaaagtattaattaggctctcagagaataactaaaactccactggagaatttgacatctacgtgccctttttttcaacataatagaatgctatttactgcagttaagcagtaattcttatttaaaaaaaattttttttaactgcctttgtataa

SEQ ID NO: 68280 - DNA, 862 bp, Homo sapiens
ctttaaggcattgttttccgttcctgtttcacaggtgaggaaaatgaggcagagaatgaaacatttccatctggatgaccaaaccgtcagctcctaaagggccgcagaggctgagggcgctgctggcagccggccctctgtggacatttgctgaataaacagaagatatgtgcaccagtgttcgctcctttgggtgataccatcccatttttattttctggatttccttcctgatgggtccattgttcctcattttcctctagcattaaattcctttatcttttcattcccacacagtcgctgcctgtggttgaaaattgagtcacctctcaggccccagtgactttcctggagaagtccaggaagcaggcctgctgcaagatccgggcaaattcctggaatccattccccgaggtcagcatatgagctcaaacctgggactgaccsgggcagacataagaaggaacacttcccccacaccccacgaggatttgcactcgagtgttccaaaccatcctggggcgaacgggacacagtggggaacaactggtcatatctttatgccagcgtttgccagagcctgcgcccagagaaccagctccacagatctatgccaaaaggctctatgccaattaagtttgtgaagcatcatatattatattctctggggattggccgggcttgggggctcatgcctgtaatcccagcactttgagaagctgaggtcaggagtttgagaccagcctggccaacacggcaaaaccccgtctctactaaaagtacaaaaattagccagacgtggtggtgggcgcctttaatcccagctactcaggaggctgagacaggagaatcgcctgaaccc

SEQ ID NO: 68281 - DNA, 822 bp, Homo sapiens
acgaaacattgttcatttttctggactttctgattttttgtaatgattattatctttacagaaaagaagtatattaagtgatttcgaaatcagagagccttcaaggtcctgcttctgattatgatggagacgatcaaaagtaaccaacacttccatcataaaaaggaaaaataattatatttttaacccattgggagactgaggacacagaaatttaggtgagactaaatctcacagagggataaatgcttcgtatatgaactaggatagaggcagctttaatgccaggaaacaggtgaggaagcagaacagtcactgggtagactactttgcaggggaaagagaaactggctgaacttttaacaatcatgggctctatggaatattgaaaacatacaagcttcagacaaagagcaagttctcactattcaccaattctcaaccttgggacttttaacaagtgctcagcagcatgtgggcaattgagtctagatagggagcaaaaagagattttcagtggcacagaaatcccgggacagtgctggagagcagagcggaatgtcagttacatggtgcatggataagcaagcccagatgaaaggagggaccttttacagcttaaagcttttgaaactggtagtaaattaaaactaactaaagctataaacccaaccccaacttagctcaattcctgatttgatcagagagatcagcccttgtggaggagaaatattttccactycagtctctgtaattggcttatatacaatatctggcatataatacacaactgtgagacattcatagaaggaggcaaatgtg

SEQ ID NO: 68282 - DNA, 532 bp, Homo sapiens
tatttgcaaaaaagaaacaaaatatcctcaataaaattttctcaaaacaaagctatctaccgcaaatgaagcagacacaatttatcgaatgaataaggaataatacaatagtgtcacattatcttattggtcaatatacattatataattacacaaagttttgtgtagtgtattggagatagaaatctttgctaacaataatgaatttcatttgcaaattttcagcctaggctcttttgtgcatgtgtgtataaatgttacttaaaaagagttatgtattatatatagtagagatctagatgtttcctaaatataaaattttcccaatgattagcatgcctgattagcagggtaattttgcttattgtccttataaatacagaagtgattcgatttgtaataatctgtccatgcatcatctcaactgcaggtaatttasatgcttctacagctaagatggcccaagtatcaatggctgtcataccttttcatcaaagatgcccattttagttccacttctaggaaggacact

SEQ ID NO: 68283 - DNA, 907 bp, Homo sapiens
tggacaattaaaccattaatttgtaatcatgaaaacgtattcggcggccggtcgcagtggctcacacctgtaatcccagcactttgrgtggccgaggggggcggatcacgaggtcaagagatcgagaccatcctggccaacatggtgaaaccccgtctctactaaaaatacaaaaattagctgggcgtggtggcgcgtgcctgtagtcccagctatttgggaggctgaggcagaagaatcacttgaacctgggaagcagaggttgcagtgagtggagatcacgccactgcactccagcctggtgacagagcaaggcgacagagcaatgtattgggccctgtgctgtttggtttcacatgtattaaaaaaaaaaaacccttaaaagttatactaatcaagcctgggtgtgatggctcatgcctgtaatcccagcactttgggaggccaaggtgggtggatcacttgaggttaggagttcaagaccagcccggccaacatggtaaaaccccatctttactaaaaatacaaaaattagctgggtgtggtggcaggcacctgtaatcccaactactcgggaggctaaggctggagaatcgcttgaacctgggaggcggaggttgcaatgagccgaggtcatgccactgcactccagtccagcctgggagacagcgccagaccctgtctcaaaaaaaaaaaaaaaaagttagacgcattaaaaaaaaaaaaaaaaaacctcaaaagttatacgcatcactggtcagtagtataatcaactacagcttactggcaggcaggatagctggttgcccaatctgctctttatctccatagcacggcagccaggctggttacataagtgactgcagtcatgcgttgcttaaccatagggttaggttctaagaaatgc

SEQ ID NO: 68284 - DNA, 907 bp, Homo sapiens
tggacaattaaaccattaatttgtaatcatgaaaacgtattcggcggccggtcgcagtggctcacacctgtaatcccagcactttgagtggccgaggggggcggatcacgaggtcaagagatcgagaccatcctggccaacatggtgaaaccccgtctctactaaaaatacaaaaattagctgggcgtggtggcgcgtgcctgtagtcccagctatttgggaggctgaggcagaagaatcacttgaacctgggaagcaraggttgcagtgagtggagatcacgccactgcactccagcctggtgacagagcaaggcgacagagcaatgtattgggccctgtgctgtttggtttcacatgtattaaaaaaaaaaaacccttaaaagttatactaatcaagcctgggtgtgatggctcatgcctgtaatcccagcactttgggaggccaaggtgggtggatcacttgaggttaggagttcaagaccagcccggccaacatggtaaaaccccatctttactaaaaatacaaaaattagctgggtgtggtggcaggcacctgtaatcccaactactcgggaggctaaggctggagaatcgcttgaacctgggaggcggaggttgcaatgagccgaggtcatgccactgcactccagtccagcctgggagacagcgccagaccctgtctcaaaaaaaaaaaaaaaaagttagacgcattaaaaaaaaaaaaaaaaaacctcaaaagttatacgcatcactggtcagtagtataatcaactacagcttactggcaggcaggatagctggttgcccaatctgctctttatctccatagcacggcagccaggctggttacataagtgactgcagtcatgcgttgcttaaccatagggttaggttctaagaaatgc

SEQ ID NO: 68285 - DNA, 907 bp, Homo sapiens
tggacaattaaaccattaatttgtaatcatgaaaacgtattcggcggccggtcgcagtggctcacacctgtaatcccagcactttgagtggccgaggggggcggatcacgaggtcaagagatcgagaccatcctggccaacatggtgaaaccccgtctctactaaaaatacaaaaattagctgggcgtggtggcgcgtgcctgtagtcccagctatttgggaggctgaggcagaagaatcacttgaacctgggaagcagaggttgcagtgagtggagatcacgccactgcactccagcctggtgacagagcaaggcgacagagcaatgtattgggccctgtgctgtttggtttcacatgtatwaaaaaaaaaaaacccttaaaagttatactaatcaagcctgggtgtgatggctcatgcctgtaatcccagcactttgggaggccaaggtgggtggatcacttgaggttaggagttcaagaccagcccggccaacatggtaaaaccccatctttactaaaaatacaaaaattagctgggtgtggtggcaggcacctgtaatcccaactactcgggaggctaaggctggagaatcgcttgaacctgggaggcggaggttgcaatgagccgaggtcatgccactgcactccagtccagcctgggagacagcgccagaccctgtctcaaaaaaaaaaaaaaaaagttagacgcattaaaaaaaaaaaaaaaaaacctcaaaagttatacgcatcactggtcagtagtataatcaactacagcttactggcaggcaggatagctggttgcccaatctgctctttatctccatagcacggcagccaggctggttacataagtgactgcagtcatgcgttgcttaaccatagggttaggttctaagaaatgc

SEQ ID NO: 68286 - DNA, 907 bp, Homo sapiens
tggacaattaaaccattaatttgtaatcatgaaaacgtattcggcggccggtcgcagtggctcacacctgtaatcccagcactttgagtggccgaggggggcggatcacgaggtcaagagatcgagaccatcctggccaacatggtgaaaccccgtctctactaaaaatacaaaaattagctgggcgtggtggcgcgtgcctgtagtcccagctatttgggaggctgaggcagaagaatcacttgaacctgggaagcagaggttgcagtgagtggagatcacgccactgcactccagcctggtgacagagcaaggcgacagagcaatgtattgggccctgtgctgtttggtttcacatgtattaaaaaaaaaaaacccttaaaagttatactaatcaagcctgggtgtgatggctcatgcctgtaatcccagcactttgggaggccaaggtgggtggatcacttgaggttaggagttcaagaccagcccggccaacatggtaaaaccccatctttactaaaaatacaaaaattagctgggtgtggtggcaggcacctgtaatcccaactactcgggaggctaaggctggagaatcgcttgaacctgggaggcggaggttgcaatgagccgaggtcatgccactgcactccagtccagcctgggagacagcgccagaccctgtctcaaaaaaaaaaaaaaaaagttakacgcattaaaaaaaaaaaaaaaaaacctcaaaagttatacgcatcactggtcagtagtataatcaactacagcttactggcaggcaggatagctggttgcccaatctgctctttatctccatagcacggcagccaggctggttacataagtgactgcagtcatgcgttgcttaaccatagggttaggttctaagaaatgc

SEQ ID NO: 68287 - DNA, 718 bp, Homo sapiens
aagtttattccattactgaaatattaaattatagtaaccccatagatatttatagagtaacaaccatgttaaaatctcagcatggtgttctacaggtgataaagatttttaaaagaatatcctttaaaggtggtcctgatctcttgattaatactaggagaatgttcttttcacttgctagtaattgatatatagtaggcatcaaatgtagttatcaaaacaatgggtggatggatgaatgcttggtgattatgaaggtaatgctttcatacggccttgtaaataaaaatggatcaggtggtgactcctttcttagactatttgtgggtttaagggatatttatttattatggattycaattttatatgtgtcaagaaaaatgagtggatgagctataatactatacaaataaattggtataattcaaattaaaaacaaaagacagcataaagggaattaaaattaacagacacttgcaataaagtaattggagttacatttataagaaagtttgatagctaagtgaaaggggatgtgtatttaaagtgtatagttttttgaaagaagaaggcatataaattcatttgttgagataggctccctaggaccataaggtttagttgattaatgagtttgactagatattatctcttcagttccaagaagttgtcctcaaaggaagagcttacagggaaaataacatcctaatccagatat

SEQ ID NO: 68288 - DNA, 718 bp, Homo sapiens
aagtttattccattactgaaatattaaattatagtaaccccatagatatttatagagtaacaaccatgttaaaatctcagcatggtgttctacaggtgataaagatttttaaaagaatatcctttaaaggtggtcctgatctcttgattaatactaggagaatgttcttttcacttgctagtaattgatatatagtaggcatcaaatgtagttatcaaaacaatgggtggatggatgaatgcttggtgattatgaaggtaatgctttcatacggccttgtaaataaaaatggatcaggtggtgactcctttcttagactatttgtgggtttaagggatatttatttattatggatttcaattttatatgtgtcaagaaaaatgagtggatgagctataatastatacaaataaattggtataattcaaattaaaaacaaaagacagcataaagggaattaaaattaacagacacttgcaataaagtaattggagttacatttataagaaagtttgatagctaagtgaaaggggatgtgtatttaaagtgtatagttttttgaaagaagaaggcatataaattcatttgttgagataggctccctaggaccataaggtttagttgattaatgagtttgactagatattatctcttcagttccaagaagttgtcctcaaaggaagagcttacagggaaaataacatcctaatccagatat

SEQ ID NO: 68289 - DNA, 610 bp, Homo sapiens
aggtgattcgagatgggctataggaaccaaggcctcccccagcgtgaaattaccaggtgtgagcggcgccaccccactgtggggaggcgggtcccacgggcactgggcacctggctgtgcctcattcctgagtctcccacagcctcacaccacagcaagagacaaggcggccctgattcacagcccagctctgccctgtgccaacgcagagccctgggcgcaggacggggccactctgtgccttagcttcctcagccatgaagtaggatagacggggacccggtgccctcctacaggcacagtggggacgaaacacaccaacgcggcgcaggacacraacgctccaagcctgtctgtcccggctgttcccactgcacgccagagagccagaggccttggggccaggtcactgcccagctcagagcccagggagccccgagcagtggccctgcacctcctgccacttctgggtgattctagaggagtccccttacccagggcccctctggcctctccccaaggggcacaaaacggcccccgagaaagctcccagactcaagcctatgactcttcacagcctcctgagacactggcccagtcccggggctcc

SEQ ID NO: 68290 - DNA, 708 bp, Homo sapiens
atcctaagccctctgcctttcagttcggcaggggttcagcttcctctccacaagcccctcaccccatatgcccaccacggcccatgtgtaggaccagcctcctttcccatcagaagctgccagcaaccaccgtgatgaggatgggagggggtggccagcaggacccatctagggtggggcaagggtgcttacccaggctcatgtggccaaaggaaaaaatgcagccatcagccccactgaccaccgactggagcacgtcggccacggtccccgagcagacttcggcctaggggggcaagagaatcaggcagggctgtggccccttccttctgccacgtctgtgggcctgaggccggtctgtcctggcacatgcaggcagtcgacccacaaggagattgggctgcacacctgggaccaaggacagatcccatgtgcacacggaaagcacagaacacacatgaacaggacccaggacacacgtaggakggactggccagacacgtgcagacacacacccgcaaagcccagaagtccagccgccgggcgcaggggcagaccaccacgcgcagagagacgcacacgcagccacacggtgcacggctcagcatgggcagggagcaccgggcgcccccagagcccagagcccaacagctgctcggaaagcttcccgggagggcgggctccggaaaaccaggcctttccctgtgg

SEQ ID NO: 68291 - DNA, 1069 bp, Homo sapiens
tcccatccccacccagcccacatgtgaccacggccagactcccccagagcacgtccctgccccgacataaagcttgtaccccggaagccgctagggctccatctctgcttctggctggtgttcagaggacaatggttcacatccctcaagctcaagtcctcccccaaatgcccatcctcaacccctgggaccccaaagaagcaagagagacaagacgagcacaaggacgtgccctccacccatcacaygctgaaccacagggaatcccggaggcagcaccgcctgtccagggaagagaaagcccaggtcccacagaggctgcacagcgaggctgggcccacccaggcttcctccctcccggcccttccccaggctccctccccaacagtaactgggagctccgagctccacggcctcccgagcagagcccttcctggtagagttagccagtgccccgcctgccagccagggagccgtgccccctcacacctccccaggctgccaccaaagcctgtgacacctgggctcagctgggaatgctgctgatgccaggcaccccaccctgcggatccccgaggcgggtgccactgccaggcacaaaggtggccctggcagcagtggaagccgggccaggctccaagcagcgagggaaggtggcagccccaagtctgggggcccaggggctctgaccacaagtggcgagcatccgtcatgggaccactcgggcgcagctcctaccctcccaggaccattgcctatttgggggcaacagacctgggacccccaaatcacaggcctgggggctgtggagacagagatgcccccatccatccagggggctaagagggcttcctcggacaagtgacagaggaggaacgaaaagctggcaggaggaacgaaaagctggcaggagtcacctccagtcaaaccagagaggcaacaggagaagcaaacagaagcccatgagcagcgtccaaggagaaacaggactcgccaagccacacagagcggtaggagggctcccagcctcagaccatgacaactgattccctgtacacaggggccaccc

SEQ ID NO: 68292 - DNA, 1069 bp, Homo sapiens
tcccatccccacccagcccacatgtgaccacggccagactcccccagagcacgtccctgccccgacataaagcttgtaccccggaagccgctagggctccatctctgcttctggctggtgttcagaggacaatggttcacatccctcaagctcaagtcctcccccaaatgcccatcctcaacccctgggaccccaaagaagcaagagagacaagacgagcacaaggacgtgccctccacccatcacatgctgaaccacagggaatcccggaggcagcaccgcctgtccagggaagagaaagcccaggtcccacagaggctgcacagcgaggctgggcccacccaggcttcctccctcccggcccttccccrggctccctccccaacagtaactgggagctccgagctccacggcctcccgagcagagcccttcctggtagagttagccagtgccccgcctgccagccagggagccgtgccccctcacacctccccaggctgccaccaaagcctgtgacacctgggctcagctgggaatgctgctgatgccaggcaccccaccctgcggatccccgaggcgggtgccactgccaggcacaaaggtggccctggcagcagtggaagccgggccaggctccaagcagcgagggaaggtggcagccccaagtctgggggcccaggggctctgaccacaagtggcgagcatccgtcatgggaccactcgggcgcagctcctaccctcccaggaccattgcctatttgggggcaacagacctgggacccccaaatcacaggcctgggggctgtggagacagagatgcccccatccatccagggggctaagagggcttcctcggacaagtgacagaggaggaacgaaaagctggcaggaggaacgaaaagctggcaggagtcacctccagtcaaaccagagaggcaacaggagaagcaaacagaagcccatgagcagcgtccaaggagaaacaggactcgccaagccacacagagcggtaggagggctcccagcctcagaccatgacaactgattccctgtacacaggggccaccc

SEQ ID NO: 68293 - DNA, 1512 bp, Homo sapiens
atgatttagttagatatgtttttaaagaactagaaatataattgattttcttgttttggctctggagtggagtggggacgaaacagaatggattcacacttgtttagatttactaaaatggaaagatcatatccctagtctccctatagcaaatgtcacctgctagctgttttttttkttttttttttttttttttggaggttgaagttttgttctgtcacccacgctggagtgcagtggtatgatctcagctcatggcaagctcacctcctgggttcaagcaattctccctgcctcagcctcctaagtagctgggattacaggcctctgccaccacgcctgcctaatttttgtatttgtagtagagttggggtttcaccatgttggccaggctggccttgaactcctgacttcaggagattcacccgcctcagcctcccaaagtgcttgggattatgggtgtgtcactgcacttggatttaatgggatatttcactacagacttcagtaaacagaatattagcatttttggtgttctttttattttactcatacagtttttctttggactcaatcacaataacagaattaaagatcaaagtgtaaaagttaaagaccagtacagattcaataattattcttttctacatactgtgtttaaatgatatccctttttctttttgttcttatagctcgagctgtaaaagccaaaggtccggtgatgatcccatacccttttttccagtctcatgttgaagatttttatgtagaaggccttcccaaaggaatttttttttttttttttttttgagatggagttttcactcttatcgcccaggctggggtgcaatggcgcaaccttgctggtcactgcaacctctgcctcctgggttcaagaaattctcctgccttagcctcccaagtcactgggattacaggtgcccaccaccataccaggctaatttttgtatttttagtggagatgcggtttcaccatgttggccgggccagtctcaaactcctgacgtcaagtgatcttcccgcctcgactcctgatatcaagtgatcttcccgcctcggcctcccagagtgctgagattacagacgtgaacccatgcctggccaggaattttgttttttaggaaggctttctactaatggaattcctggccttgagaggatgttactttagaaggaaaggatttttttgttattaaaaggtaagattcctggattcttattggactgttatctctgttatgagtaatccatctttagtcattcaccactagggttgtatttaattaagtctgagttattttatggtggttttgttttgttttgttttgtttttaccgaattttgttctcattgccgtggcttgagggcaatgacgtgatctcaggtcaccacattctctgccttccaggttcaagcaattctcctgcctcagcctccttagtagctggatttacaggcatgcgccaccatgcctggctaattttttgtatt

SEQ ID NO: 68294 - DNA, 987 bp, Homo sapiens
tgcatccttcccctgggactcctctgccagagcctgagagctttctcctgcacacaggctaggggtagggcagttggaattgatccatgccttctagctagactgtgggtcccctcagtcttgggcatggtgacagcccagcatcagacagaggtcagtatcaaactagaaaatttaataaatgctgtcagatttgtagacccaagaaaatataaactgccaatcacggaggaaaaaaatctctcaatgatcttatctttatatgattcccttgctgcctggagattgacatttccttggggataatctggtcataggattggtgaaggtggaagggaggcaacctccgaaggtggggccctctgctcacctgggacagggagggcctgaggtaggtgtctgtgtgggctggggaggaggatgggagcagtgcttctagatgtttccactttctcctcattagataataatgaatgggtgatttccctagtcactgcagtgtgaggaaatctacaaaawtaatttcacaatacactttacaggataggtggagaaacacatgaagcacaactgcagtgggttataaaaaatggcctttcgagttgagcagtaaattcgttcaagcagccattctgaaggacaaactggctctgtatttaacaggggcattccagcacttctctagctactgggttgacaatgactcaccaaagcctctggtagccaccacaggacgcccagagcacgttttaaagctgaacaccaaactgcggacttcgggagtaagtgaactgactggtttttattttgttttactgcttttaacattacagtaactgttacaggttccagcaggataactgggtggaaatgagtttggtttcacttagtctctctaaagagaaagcaagttggtagactaatacctaataaaagcaaagctgccaacaattgaaattgcctggactgctctgtgtgtcccacatg

SEQ ID NO: 68295 - DNA, 987 bp, Homo sapiens
tgcatccttcccctgggactcctctgccagagcctgagagctttctcctgcacacaggctaggggtagggcagttggaattgatccatgccttctagctagactgtgggtcccctcagtcttgggcatggtgacagcccagcatcagacagaggtcagtatcaaactagaaaatttaataaatgctgtcagatttgtagacccaagaaaatataaactgccaatcacggaggaaaaaaatctctcaatgatcttatctttatatgattcccttgctgcctggagattgacatttccttggggataatctggtcataggattggtgaaggtggaagggaggcaacctccgaaggtggggccctctgctcacctgggacagggagggcctgaggtaggtgtctgtgtgggctggggaggaggatgggagcagtgcttctagatgtttccactttctcctcattagataataatgaatgggtgatttccctagtcactgcagtgtgaggaaatctacaaaattaatttcacaatacactttacaggataggtggagaaacacatgaagcacaactgcagtgggttataaaaaatggcctttcgagttgagcagtaaattcgttcaagcagccattctgaaggacaaactggctctgtatttaacaggggcattccagcacttctctagctactgggttgacaatgactcaccaaagcctctggtagccaccacaggacrcccagagcacgttttaaagctgaacaccaaactgcggacttcgggagtaagtgaactgactggtttttattttgttttactgcttttaacattacagtaactgttacaggttccagcaggataactgggtggaaatgagtttggtttcacttagtctctctaaagagaaagcaagttggtagactaatacctaataaaagcaaagctgccaacaattgaaattgcctggactgctctgtgtgtcccacatg

SEQ ID NO: 68296 - DNA, 987 bp, Homo sapiens
tgcatccttcccctgggactcctctgccagagcctgagagctttctcctgcacacaggctaggggtagggcagttggaattgatccatgccttctagctagactgtgggtcccctcagtcttgggcatggtgacagcccagcatcagacagaggtcagtatcaaactagaaaatttaataaatgctgtcagatttgtagacccaagaaaatataaactgccaatcacggaggaaaaaaatctctcaatgatcttatctttatatgattcccttgctgcctggagattgacatttccttggggataatctggtcataggattggtgaaggtggaagggaggcaacctccgaaggtggggccctctgctcacctgggacagggagggcctgaggtaggtgtctgtgtgggctggggaggaggatgggagcagtgcttctagatgtttccactttctcctcattagataataatgaatgggtgatttccctagtcactgcagtgtgaggaaatctacaaaattaatttcacaatacactttacaggataggtggagaaacacatgaagcacaactgcagtgggttataaaaaatggcctttcgagttgagcagtaaattcgttcaagcagccattctgaaggacaaactggctctgtatttaacaggggcattccagcacttctctagctactgggttgacaatgactcaccaaagcctctggtagccaccacaggacgcccagagcacgttttaaagctgaasaccaaactgcggacttcgggagtaagtgaactgactggtttttattttgttttactgcttttaacattacagtaactgttacaggttccagcaggataactgggtggaaatgagtttggtttcacttagtctctctaaagagaaagcaagttggtagactaatacctaataaaagcaaagctgccaacaattgaaattgcctggactgctctgtgtgtcccacatg

SEQ ID NO: 68297 - DNA, 987 bp, Homo sapiens
tgcatccttcccctgggactcctctgccagagcctgagagctttctcctgcacacaggctaggggtagggcagttggaattgatccatgccttctagctagactgtgggtcccctcagtcttgggcatggtgacagcccagcatcagacagaggtcagtatcaaactagaaaatttaataaatgctgtcagatttgtagacccaagaaaatataaactgccaatcacggaggaaaaaaatctctcaatgatcttatctttatatgattcccttgctgcctggagattgacatttccttggggataatctggtcataggattggtgaaggtggaagggaggcaacctccgaaggtggggccctctgctcacctgggacagggagggcctgaggtaggtgtctgtgtgggctggggaggaggatgggagcagtgcttctagatgtttccactttctcctcattagataataatgaatgggtgatttccctagtcactgcagtgtgaggaaatctacaaaattaatttcacaatacactttacaggataggtggagaaacacatgaagcacaactgcagtgggttataaaaaatggcctttcgagttgagcagtaaattcgttcaagcagccattctgaaggacaaactggctctgtatttaacaggggcattccagcacttctctagctactgggttgacaatgactcaccaaagcctctggtagccaccacaggacgcccagagcacgttttaaagctgaacaccaaactgcggacttcgggagtaagtgaactgactggtttttattttgttttactgcttttaacattacagtaactgttacaggttccarcaggataactgggtggaaatgagtttggtttcacttagtctctctaaagagaaagcaagttggtagactaatacctaataaaagcaaagctgccaacaattgaaattgcctggactgctctgtgtgtcccacatg

SEQ ID NO: 68298 - DNA, 987 bp, Homo sapiens
tgcatccttcccctgggactcctctgccagagcctgagagctttctcctgcacacaggctaggggtagggcagttggaattgatccatgccttctagctagactgtgggtcccctcagtcttgggcatggtgacagcccagcatcagacagaggtcagtatcaaactagaaaatttaataaatgctgtcagatttgtagacccaagaaaatataaactgccaatcacggaggaaaaaaatctctcaatgatcttatctttatatgattcccttgctgcctggagattgacatttccttggggataatctggtcataggattggtgaaggtggaagggaggcaacctccgaaggtggggccctctgctcacctgggacagggagggcctgaggtaggtgtctgtgtgggctggggaggaggatgggagcagtgcttctagatgtttccactttctcctcattagataataatgaatgggtgatttccctagtcactgcagtgtgaggaaatctacaaaattaatttcacaatacactttacaggataggtggagaaacacatgaagcacaactgcagtgggttataaaaaatggcctttcgagttgagcagtaaattcgttcaagcagccattctgaaggacaaactggctctgtatttaacaggggcattccagcacttctctagctactgggttgacaatgactcaccaaagcctctggtagccaccacaggacgcccagagcacgttttaaagctgaacaccaaactgcggacttcgggagtaagtgaactgactggtttttattttgttttactgcttttaacattacagtaactgttacaggttccagcaggmtaactgggtggaaatgagtttggtttcacttagtctctctaaagagaaagcaagttggtagactaatacctaataaaagcaaagctgccaacaattgaaattgcctggactgctctgtgtgtcccacatg

SEQ ID NO: 68299 - DNA, 1044 bp, Homo sapiens
ctaggtgatgggttgatgggtgcagcaaaccaccatggcacacatttacctatgtatcaaacctacactttctgcacgtgtatcccagaacataaaataaaatttaaaaaatatatacactgattcatgatctcctttctctccttctgaaacactctttaaaactttttagcatttccccctctgtcttccatgtctcctaactacatgtttcttattttccatttccttattcctgtgttcattttggatagccccttctgacctatattacagtttactagttcactcttyaactgcttctaacatactaatattctgttaaaaccattcatttgggtttaaatttcaattatgttattctctatggacattctatttgttttcttttaatcttcttggccattctctagagtttcctgttccattatgatatttttaattttttgttttactttaaacatactaaatatagttattttattttctgtatctgatactttcaataactgcagtcttcgctagtcttttttctgtgctcttgctcatagtttttttcgtttgttttcatgattagaaaaacagagagagaagaaggagagtaaagggaggaggaggaggaggagaaaagaagaaagcagagaagaagggacagagaaaaaaaggaagttggttctaacgtttctctaacaactgtcttcagtgaaacgctcccaccttgtggatttttaggttattgaaattaaccagtcttctgggtgcagcacaccaacatggcacatgtatacatatgtaacaaacctgcactttgtgcacatgtaccctaaaacttaaagtataataaaaaataaaataaaaagctacacaaattaaaaaaaaaagaaatcaacctaattcctagattaccacctcttgattcaaatgctttaaatctaggcttttcatctgagtctttctttttagttattctgtttatcttcaaaacactcctgctttgaatcattcaaaatctacctccctccctctgtttgactaccatcaatt

SEQ ID NO: 68300 - DNA, 1044 bp, Homo sapiens
ctaggtgatgggttgatgggtgcagcaaaccaccatggcacacatttacctatgtatcaaacctacactttctgcacgtgtatcccagaacataaaataaaatttaaaaaatatatacactgattcatgatctcctttctctccttctgaaacactctttaaaactttttagcatttccccctctgtcttccatgtctcctaactacatgtttcttattttccatttccttattcctgtgttcattttggatagccccttctgacctatattacagtttactagttcactcttcaactgcttctaacatactaatattctgttraaaccattcatttgggtttaaatttcaattatgttattctctatggacattctatttgttttcttttaatcttcttggccattctctagagtttcctgttccattatgatatttttaattttttgttttactttaaacatactaaatatagttattttattttctgtatctgatactttcaataactgcagtcttcgctagtcttttttctgtgctcttgctcatagtttttttcgtttgttttcatgattagaaaaacagagagagaagaaggagagtaaagggaggaggaggaggaggagaaaagaagaaagcagagaagaagggacagagaaaaaaaggaagttggttctaacgtttctctaacaactgtcttcagtgaaacgctcccaccttgtggatttttaggttattgaaattaaccagtcttctgggtgcagcacaccaacatggcacatgtatacatatgtaacaaacctgcactttgtgcacatgtaccctaaaacttaaagtataataaaaaataaaataaaaagctacacaaattaaaaaaaaaagaaatcaacctaattcctagattaccacctcttgattcaaatgctttaaatctaggcttttcatctgagtctttctttttagttattctgtttatcttcaaaacactcctgctttgaatcattcaaaatctacctccctccctctgtttgactaccatcaatt

SEQ ID NO: 68301 - DNA, 1044 bp, Homo sapiens
ctaggtgatgggttgatgggtgcagcaaaccaccatggcacacatttacctatgtatcaaacctacactttctgcacgtgtatcccagaacataaaataaaatttaaaaaatatatacactgattcatgatctcctttctctccttctgaaacactctttaaaactttttagcatttccccctctgtcttccatgtctcctaactacatgtttcttattttccatttccttattcctgtgttcattttggatagccccttctgacctatattacagtttactagttcactcttcaactgcttctaacatactaatattctgttaaaaccattcatttgggtttaaatttcaattatgttattctctatggacattctatttgttttcttttaatcttcttggccattctctagagtttcctgttccattatgatatttttaattttttgttttactttaaacatactaaatatagttattttattttctgtatctgatactttcaataactgcagtcttygctagtcttttttctgtgctcttgctcatagtttttttcgtttgttttcatgattagaaaaacagagagagaagaaggagagtaaagggaggaggaggaggaggagaaaagaagaaagcagagaagaagggacagagaaaaaaaggaagttggttctaacgtttctctaacaactgtcttcagtgaaacgctcccaccttgtggatttttaggttattgaaattaaccagtcttctgggtgcagcacaccaacatggcacatgtatacatatgtaacaaacctgcactttgtgcacatgtaccctaaaacttaaagtataataaaaaataaaataaaaagctacacaaattaaaaaaaaaagaaatcaacctaattcctagattaccacctcttgattcaaatgctttaaatctaggcttttcatctgagtctttctttttagttattctgtttatcttcaaaacactcctgctttgaatcattcaaaatctacctccctccctctgtttgactaccatcaatt

SEQ ID NO: 68302 - DNA, 1044 bp, Homo sapiens
ctaggtgatgggttgatgggtgcagcaaaccaccatggcacacatttacctatgtatcaaacctacactttctgcacgtgtatcccagaacataaaataaaatttaaaaaatatatacactgattcatgatctcctttctctccttctgaaacactctttaaaactttttagcatttccccctctgtcttccatgtctcctaactacatgtttcttattttccatttccttattcctgtgttcattttggatagccccttctgacctatattacagtttactagttcactcttcaactgcttctaacatactaatattctgttaaaaccattcatttgggtttaaatttcaattatgttattctctatggacattctatttgttttcttttaatcttcttggccattctctagagtttcctgttccattatgatatttttaattttttgttttactttaaacatactaaatatagttattttattttctgtatctgatactttcaataactgcagtcttcgctagtcttttttctgtgctcttgctcatagtttttttcgtttgttttcatgattagaaaaacagagagagaagaaggagagtaaagggaggaggaggaggaggagaaaagaagaaagcagagaagaagggacagagaaaaaaaggaagttggttctaacgtttctctaacaactgkcttcagtgaaacgctcccaccttgtggatttttaggttattgaaattaaccagtcttctgggtgcagcacaccaacatggcacatgtatacatatgtaacaaacctgcactttgtgcacatgtaccctaaaacttaaagtataataaaaaataaaataaaaagctacacaaattaaaaaaaaaagaaatcaacctaattcctagattaccacctcttgattcaaatgctttaaatctaggcttttcatctgagtctttctttttagttattctgtttatcttcaaaacactcctgctttgaatcattcaaaatctacctccctccctctgtttgactaccatcaatt

SEQ ID NO: 68303 - DNA, 1044 bp, Homo sapiens
ctaggtgatgggttgatgggtgcagcaaaccaccatggcacacatttacctatgtatcaaacctacactttctgcacgtgtatcccagaacataaaataaaatttaaaaaatatatacactgattcatgatctcctttctctccttctgaaacactctttaaaactttttagcatttccccctctgtcttccatgtctcctaactacatgtttcttattttccatttccttattcctgtgttcattttggatagccccttctgacctatattacagtttactagttcactcttcaactgcttctaacatactaatattctgttaaaaccattcatttgggtttaaatttcaattatgttattctctatggacattctatttgttttcttttaatcttcttggccattctctagagtttcctgttccattatgatatttttaattttttgttttactttaaacatactaaatatagttattttattttctgtatctgatactttcaataactgcagtcttcgctagtcttttttctgtgctcttgctcatagtttttttcgtttgttttcatgattagaaaaacagagagagaagaaggagagtaaagggaggaggaggaggaggagaaaagaagaaagcagagaagaagggacagagaaaaaaaggaagttggttctaacgtttctctaacaactgtcttcagtgaaacgctcccaccttgtggatttttaggttattgaaattaaccagtcttctgggtgcagcacaccaacatggcacatgtatacatatgtaacaaacctgcactttgtgcacatgtaccctaaaacttaaagtataataaaaaataaaataaaaagctacacaaattaaaaaaaaaagaaatcaacctaattcctagattaccacctcttgattcaaatgctttaaatctaggcttttcatmtgagtctttctttttagttattctgtttatcttcaaaacactcctgctttgaatcattcaaaatctacctccctccctctgtttgactaccatcaatt

SEQ ID NO: 68304 - DNA, 889 bp, Homo sapiens
  misc_feature (1)...(889): n = A,T,C or G
ttttctgctctctgggttatttaaggccttcagttgtctactctactaattcctctaggtgtgtaagtacgaaaatatgattttaagacaataagggaaaagcttaagtgttgttttttgtttttgtttttttttgttgttgttrttgttttagagaaagctactgagggttatgggcagcgtaatagaactttgtcatattttatttcattcatatttccaatgtgtttctttattatttgcaaacaattaaaggccttacccatgagatatataatagactttggtaagtacaaatcgatggcaatacttttgaaaaaaagcttaatggttagttgtgccaggatttgcagcaacgctggcttttaaaagatttcttcagagtgaaactgacaatgtggacagtgacatatataatggcaacactcttccttgaaaaaaacaggaattgccagggtggtctgtgtatacaatctatttctgaatctgatttcttaaattctcttaaagacacaactaaggcatttcttcttctctagttatttatttttctgtggaaatctacacatgtataaaaattacagggtgaataactaaggttgtattaaaatagttttttgaccctgcagtatcttattcaaaaccttaccttttcattttagcctccacctaacgtgtgcatctgaaatgatgttttcttaaactcttaatggcagatgtttaggaaaaagcttttgattaattcagtgaatgataactcacactctgcattaccttgctgcacttttttaaagcagcatggtaacagctatgtctagagtattgaaattccagggcataaggaaaggtgactgtgaggattttagattttgggaactagaaggggtna

SEQ ID NO: 68305 - DNA, 889 bp, Homo sapiens
  misc_feature (1)...(889): n = A,T,C or G
ttttctgctctctgggttatttaaggccttcagttgtctactctactaattcctctaggtgtgtaagtacgaaaatatgattttaagacaataagggaaaagcttaagtgttgttttttgtttttgtttttttttgttgttgttattgttttagagaaagctactgagggttatgggcagcgtaatagaactttgtcatattttatttcattcatatttccaatgtgtttctttattatttgcaaacaattaaaggcyttacccatgagatatataatagactttggtaagtacaaatcgatggcaatacttttgaaaaaaagcttaatggttagttgtgccaggatttgcagcaacgctggcttttaaaagatttcttcagagtgaaactgacaatgtggacagtgacatatataatggcaacactcttccttgaaaaaaacaggaattgccagggtggtctgtgtatacaatctatttctgaatctgatttcttaaattctcttaaagacacaactaaggcatttcttcttctctagttatttatttttctgtggaaatctacacatgtataaaaattacagggtgaataactaaggttgtattaaaatagttttttgaccctgcagtatcttattcaaaaccttaccttttcattttagcctccacctaacgtgtgcatctgaaatgatgttttcttaaactcttaatggcagatgtttaggaaaaagcttttgattaattcagtgaatgataactcacactctgcattaccttgctgcacttttttaaagcagcatggtaacagctatgtctagagtattgaaattccagggcataaggaaaggtgactgtgaggattttagattttgggaactagaaggggtna

SEQ ID NO: 68306 - DNA, 889 bp, Homo sapiens
  misc_feature (1)...(889): n = A,T,C or G
ttttctgctctctgggttatttaaggccttcagttgtctactctactaattcctctaggtgtgtaagtacgaaaatatgattttaagacaataagggaaaagcttaagtgttgttttttgtttttgtttttttttgttgttgttattgttttagagaaagctactgagggttatgggcagcgtaatagaactttgtcatattttatttcattcatatttccaatgtgtttctttattatttgcaaacaattaaaggccttacccatgagatatataatagactttggtaagtacaaatcgatggcaatacttttgaaaaaaagcttaatggttagttgtgccaggatttgcagcaacgctggcttttaaaagatttcttcagagtgaaacwgacaatgtggacagtgacatatataatggcaacactcttccttgaaaaaaacaggaattgccagggtggtctgtgtatacaatctatttctgaatctgatttcttaaattctcttaaagacacaactaaggcatttcttcttctctagttatttatttttctgtggaaatctacacatgtataaaaattacagggtgaataactaaggttgtattaaaatagttttttgaccctgcagtatcttattcaaaaccttaccttttcattttagcctccacctaacgtgtgcatctgaaatgatgttttcttaaactcttaatggcagatgtttaggaaaaagcttttgattaattcagtgaatgataactcacactctgcattaccttgctgcacttttttaaagcagcatggtaacagctatgtctagagtattgaaattccagggcataaggaaaggtgactgtgaggattttagattttgggaactagaaggggtna

SEQ ID NO: 68307 - DNA, 889 bp, Homo sapiens
  misc_feature (1)...(889): n = A,T,C or G
ttttctgctctctgggttatttaaggccttcagttgtctactctactaattcctctaggtgtgtaagtacgaaaatatgattttaagacaataagggaaaagcttaagtgttgttttttgtttttgtttttttttgttgttgttattgttttagagaaagctactgagggttatgggcagcgtaatagaactttgtcatattttatttcattcatatttccaatgtgtttctttattatttgcaaacaattaaaggccttacccatgagatatataatagactttggtaagtacaaatcgatggcaatacttttgaaaaaaagcttaatggttagttgtgccaggatttgcagcaacgctggcttttaaaagatttcttcagagtgaaactgacaatgtggacagtgacatatataatggcaacactcttccttgaaaaaaacaggaattgccaggrtggtctgtgtatacaatctatttctgaatctgatttcttaaattctcttaaagacacaactaaggcatttcttcttctctagttatttatttttctgtggaaatctacacatgtataaaaattacagggtgaataactaaggttgtattaaaatagttttttgaccctgcagtatcttattcaaaaccttaccttttcattttagcctccacctaacgtgtgcatctgaaatgatgttttcttaaactcttaatggcagatgtttaggaaaaagcttttgattaattcagtgaatgataactcacactctgcattaccttgctgcacttttttaaagcagcatggtaacagctatgtctagagtattgaaattccagggcataaggaaaggtgactgtgaggattttagattttgggaactagaaggggtna

SEQ ID NO: 68308 - DNA, 2890 bp, Homo sapiens
acacacacataccaatcacacatatacctgtacatactcacatatgtacacatccatatgcccccatacacacatatgtacataaacatagacacctatagtgggctgaaaaatgcaacccccccaaagatatcaggtcctaacccctggtacctgttaccttacttggaaaaggggtctttgctaacattactaataacctgatgagggggaaattatcctggattatccagataggccctaaatggcatcacaagtcaagtgtcttcagaagagagagacaggaagagatttcacacatacacacagaaaagacaaggccatgtgaagacagaggcagagacaggagtgatgtggccacaactcaaggactgcccacagtccccggaagctggaagagcaaggattagattctcccctggagcctctacatggagtgctgccctgccaacaccttgactgcaacccagtgacactgatctcagggttcggcctccagcgttgtgagagaataaatttctgttgctttaagccaccaactttgtggtaatttgttatagcaaacttatacatctatcagtttatacacacttatacaacatctatcagtatatacacacggaaaacttatacaacatctatcagtatatacacacaggttcatacactcacagatttacacactcatccaaccatgcacacacacccagagccatcactcatttacacaatcatgaacatgcagtcacacttacacaaggatccatttatgcactagcagttaagttggttatcaccaaagtatctttaaggaaacaaaaatctcgaatcacacccttctcaaataaatatataagaaaataagatgtcaacatattaataacaattggaagagaagacaataagtgaattttctccatatttagttttatacataaataattataactaacactagatgaaagtcttttctgtgccaagccactgtgccaattgttttctaggtataatcacaccaatagtatacacatgagaaactgaggagcagtgaggatgcataacgtgcccaaggtcagagtgataaagctgagatgtgaactcgggcattgagtaggattctggaggctacattttaatcaataaggaaagccttttggaaaagcctcacacgattggggcgagccttaaaagccttttttaaaagccttttaaaatctcaacatttttctttaataaaaacctatgtatttcattatgcaacatttcaccagtgccacttcctactttatttcagtcatagcatctgtgcacatgctggaatcaaggctaattgggtcatcttcatctgaaatctgctctccatctggtaagagccttttctttactctgtggagcaacccccccaacccgctgtgtgccccccacacagtatgaggccttctgccgctggaggcaagacatggccatgtgcactgtgcacacaaggtgtgagcccacaccaacagcatcgtgactcagctttccaggtgccacactgagtcttgaagctctttcttgcgactgtgattctggaaatactattattctcttttatgctccatatataggtcacatattctgatgtaccaaatcaaaaaccatgctagataaacatgttttcttttttagggccagaatattacaaactgaggcttcctgaaaataagaaatggtcattatacctacatcccatctcatagcgtagccatgaatagcaaactattttcaggctagatattctgattatagcacaaactgtttcaccagaggcatgggggaaaatatagcatatttttacataaaaataggccattctaagagagtaattaaaatactgctttattcatctgagtcctcacttagggactccttattttaagtcactctggacaatcacctgattctgtttctacagtagttctgtaagtccccaaatcatctcttttcagctatcagtcctggctgagtgtccactcaataatcttggcattcacaatatcatttgtccagattccctctcctaccttctcccgggttgaactgcttccttccttgcctagggcaccctgtgaacmgtttttgtcctggtttctgtgtctacactccactctgcatgggtaggtggatagttattttaaggtagccttttatactcaccaaaatacttggatcctgccttttccccattgttgttcttacaattgtgtttcttccttgagcctgtgagcttatcctcaccatgaaggcacttgcttgtaaggcacctctcttcacaccacacgcaggagggcaggaaggtggcttctttctctaacttccctgacaagagaagaactggccagcatgggccaggaggcttgcaacaggcagggcactgaaacagatgggatacctgagaggaggcaggagcccaccacttgaggagtcacaagagaggtgagaaaagtccagccccacctgtggctaagaggaagggctagagcagcctcaggagcagtgaaccaatttcctctgtcttttctgggcatcgagggaccaacaaagacaacacccatgctcagaggctataagtagctctggcacagggcttcagagcagttatattagtggagacaatcaaaggtttaattttttttttaatatcatataaataaatgaggaatctggccttctcctccaacatcttccttggtgtctcccccttacatgttctcatttgttctgggaaggacatcaagcacaggtgacaacccttatcagggacagggtgggggtcataccagcaaattgaaatgccacattcacccagaccttggaggagaaaatacaattgctgcctctcaccctgagg

SEQ ID NO: 68309 - DNA, 612 bp, Homo sapiens
ggagacttgcccagagcttttgaaaatattggaagcatttgtaacccaaatatcatgggaatgaaagaatttagagtattatctgcatctgagataagatgttaaaccactgttccccagagtggctgggtctgagatctctgtatttgctgtgtgaatacttgcagtaagaattgggaaataattatggaacaaacaatttctaagttatgtgaagttgagggatgtcttccgggcggcattccgcctgagagccttcccctcctgcccaaacctccactgggacctagcaaagcaggaagtgcctgagggtggcaccagtggaaggagaagttcagtacatcsagttgtgtaaaagcacaaaaacagtgattggaaatgggattaggcactagaaccattcgaggttctctgtattttccaaatggctgtgactcggggaaagcgcttgttggagtgggacagagaaagggatcagaaaagataaaaccaaaatgagaaaaggaaaggatctggttcagagatggcaaaacttacaaatatacaactgaggagggactgacagtaaaatcattcttactatatctgcatatcgtgtgtaatgttttgagt

SEQ ID NO: 68310 - DNA, 612 bp, Homo sapiens
ggagacttgcccagagcttttgaaaatattggaagcatttgtaacccaaatatcatgggaatgaaagaatttagagtattatctgcatctgagataagatgttaaaccactgttccccagagtggctgggtctgagatctctgtatttgctgtgtgaatacttgcagtaagaattgggaaataattatggaacaaacaatttctaagttatgtgaagttgagggatgtcttccgggcggcattccgcctgagagccttcccctcctgcccaaacctccactgggacctagcaaagcaggaagtgcctgagggtggcaccagtggaaggagaagttcagtacatccagttgtgtaaaagcacaaaaacagtgattggaaatgggattaggcactagaaccattcgaggttctctgtattttccaaatggctgtgactcggggaaagcgcttgttggagtgggacagagaaagggatcagaaaagwtaaaaccaaaatgagaaaaggaaaggatctggttcagagatggcaaaacttacaaatatacaactgaggagggactgacagtaaaatcattcttactatatctgcatatcgtgtgtaatgttttgagt

SEQ ID NO: 68311 - DNA, 1734 bp, Homo sapiens
atgtctctactcacacacttatatccacacacaacactttcaagtagcccttttcccagcttagctggggttgcaccctcgatgttctgcagcttgcctttccatgctgggtacaggtgtcatgatggtgaattttacgtgtcagcttcactgggccacgggatgcccaaacatttagtcagacatcatttctggtgtatctgtgaggatgtttttggaagaaattagcatttgagtcagtgactgagtaaagcagattgcttttccaaagatgggtgggccttgtccgatcagttgaaaacctgaatagaacagaaaggctgagtaagagggaactcctcctgcccaaatgttttgaggtgggacgttggtcttttcctgcctttggacacaaactgagacattggctcttcctggatcttgagcctgctgagtttcaggctagaatggtactgtgggctccctgggtcttcagcctgctgaccgcagattttaggacttctcagcctccatagtcgtgtgagccagttccttataatcactcagtctgttggtctgtcatctatctatcaatatctgtcagtcatccatctccatccatgtatccaatctatctagatccatctatcaatcttctgtacctacctgtcaatcatctatttatcttatctatccatccatccatccatctcatrtatcatgtatcttactggttcatacagaaccaatgagagacacttatatccatctcctgttgtttctgtttctctggagaatccggagtaatacaggtgtcatcccccatcagtgcatgagggtccactgcattttttcctgtgattgcccccacctttgacagacctgtcctgtgattcatttgattcttcccttggtgattgagtttgttgccagttttttttttttttttgccaccatcagctgtcttgaatattctgtttttaaaaaccttattttgtagagacagagtctccccatgttgcccagggtggtctggacctcctggccttatgcagtcctcctgcctcagactcccaaagtgctgggattacaggcatgagccactgtgcctggccttgaatattcttgcatctgtatcgtaatgcatgggtaagaatttctgtaagtcacctgtgtaacagacatctttttcaacatttgtttttggtgtcttttgttggatagtcattttacattttaatgtaattaaatttatttttttccttatttgggatatgtgtttttttggtgtgtcttgttgaagaaatacttgcttgaaaatgttctcaattgtatcctaaaagagtttgttttgcttttttttccagttgagttttaaaattcatctcagcttaattttaaaaaattccatcccctactccccctgcagaccctggcaaccatcagtctacttcctgtttttatggatttacattttctggatatttcatataaatggaagcatacagtatatagccttttgtgtctggcttctttcactgagcataatgttttcaaggttcatccattttgtagcatggatcaatacttcattcccatctgtggcttactaatattccattgcatgaatataccatatcttgtttatccatttgtctgttgatagacatttgggttgttttcatcttttgactattgtaaatcatgctgctgtggacaagcaagcatgtataaatttttgtgtggacatatgtt

SEQ ID NO: 68312 - DNA, 517 bp, Homo sapiens
cagcctgagtgacaagcaagattgcatctcaaaaaaaaaagtaaaawcttcatatgtcttaaaatgtaaacgcagccttctatttcactttatgtaaatattcttacatttgacatggacctagtaaaaggtcaatatggtcatagttcttaagttctttaaattcaacttcttattggtatgagaataacaaaaagaataattcagtcacatgagattattacaaagtttacacagagaagacctgaaaatttgtacaatgctgaaatacagtgataaagtctgtaataacaagatacgattacaacttatgcatgacagtagacaatgatatatacccaaaacaacctcttagatttcatttacaatatttttgttatctccttaagttagaaggatcaggaattccagtggtcatcagggtatcttttttacagattctgctaaaatcttctacaaattattgctaatgggttatttggctcttgattattggtttgtaattgccacagccatt

SEQ ID NO: 68313 - DNA, 1284 bp, Homo sapiens
  misc_feature (1)...(1284): n = A,T,C or G
ttaaaccaaacacagctgctgtataatagacacaatggtgtaaggttacgttgagtttccccaaataataaatgttttaattgaaaattgactgatgatgagttcctttcctttcttcggtctcctgtaaagtaatcctgaaaatatctaaagtgtttgtatgcacactcacccaggaatttatgtattgttttaatttataaggaaacacggaccataaccaaattattgacttaacctaacatttaccacaataaaatttctttaaannnnnnnnnnnnnnnnnnnnnnnnnnnnnnnnnnnnnnnnnnnnnnnnnnnnnnnnnnnnnnnnnnnnnnnnnnnnnnnnnnnnnnnnnnnnnnnnnnnnacctgatattcaggagttttttcctaggtgtagcttagctaattttttcaatgtttttgtttgggactttactaaatgctgtgatttctctctattctcagacccactcttaatacaggattattgagttaacgattcagatgaataagactagttacaaattgtacatcacaaacactgtatcatttaatattttcaaacagagcatgatttcattaatttgcccctatgatcttacttaatcctcaaatcaaccacatgagctgaccaatattttcatccacatattataaatgaaaccagtgagatacagtgacttacatggtattgcaactccaaaaatggtgaagctgtaacttgaagtcagttaattgtcaaagccaatgcctaagcgctgatattgtctttccaaacacttatagccaattctagatgcccaatctctaatcaagccttgattcctatgtactcatagttgaatgcaggaactttcaaactgataattcatattttcattgcattattttatagtacatttatattgaatgattctttgtcatattgctttatctgctttgtcagaagcttctggtgttagcatatctgtatgttgcatttattcattctgagctcagtatctcacttgcttcttttcaaggttatcggtactcattatagagtttagacatttgcaatgcaaagataaggcttagacatttttctgtaagttattctagttctgaccatatgaaaaccaagtaaatgtggtcattagtggtgtctttgttaggttatcatcacatttttctcagtagttaagtaacaaaatttttattttataatcagatttcaaaatattgaattcaaaattgccattatatatctaactatgartatctcctagaaattttccaa

SEQ ID NO: 68314 - DNA, 589 bp, Homo sapiens
cagcttttcactgtgtttaatttacattcttacttttcatagtttacaatcttgccataggcagctgaactgggacagtactagaaaagcactgtgcttatacaaggaacacaaattttttctttttttttttttttctttttgagacagtctcgctctgttacccaggctgtagtgcagtggcatgatcttggctcactgcaacctccgcctcctgggttcaagcaattctcctgcctcagcctctcgagtagctgggactacaggcatgcaccaccacacccggctaatttttatatttttagtagaggcggggtttctccgtgttggtcaggctggtctcgaactcctgacctcaaatgatctgcctgcctcrgcctcccaaagtgctaggattacaggcatgagtcactgcacccggcctatttcttttactgtaaaaataaatgatggatagaaatgcctataagcagaaatttccaaattccagacatctgtaaaaatatctcttagataaaattgtaatttccagttatattttattatttttttttagagacagcatctggctccatcacataggctggat

SEQ ID NO: 68315 - DNA, 804 bp, Homo sapiens
tccaccgcaatcatccagctgtttcaccagcagttctctttacttgtctccttcacattttgtgtgtgcgtggtggcagggcagggccggcggagtgctcccaagcttcaagaggtctacatctgactcataactttatttaggctgcatcccagatagtgaaataaacacatggtgacaaagtctacgattttctcttgtaaattttttwaaagtattaaaatcctcacttttcatccagtgctgcaatggagcaagatgaacaagttaagtaggaacagcatgcctgaattttgcatgcaatttcccattatgagtggaaactggcctgaacttctacagtgttttgtagcacatacttctttagttaaagagggtggaaattaagctgtagtttatgaggcttttaattctgtaccaagacaaatcagaaactccccatattattttttggttgttgttttttgtgttgttttggtttggttttgttctaacaatatcttgggcaaatgacaatttctgttttctttttctttttcttttgttttgttttgttttgttttgttttgtttttaagatggagtctcactctgtcacccaggctggagtgcaatggcacaatcttggctcactgcaacctctgcctcccgggttcaaacgattctcctgcctcagcctcctgagtagtgggactacaggtgtgctccaccacacccggctaatttttgtatttttagtagagaaagggtttcatcatgctggccaggctggtctcgaactcctgacctcaggcgatccacctgc

SEQ ID NO: 68316 - DNA, 1143 bp, Homo sapiens
cactgtcttctgaactctgatcattgtttcttgtacactgactccaagttaggacataataacttgcaatattagatcacccagatcaccccaatcccaaatcctactctttcaatggcaattgcatgaataaaggtaaacagtacaygtttaattaggccagatgttacataattgagacctggtcaatgggcctccatataggcctacagagcaggagaagccaggtgccctgaggctctggggtgagggtggtatgcagttgcaggagttgttctatggcaggaaatgaggctaagccttgccctggagggagacatctggggccttctaaggggactgcttctgcccctaattacgcacctaccattctacctcctcattactaggaaagagaaaagaccaagaccttcacacagaggatgcctaaattattgattagtcttttccaaactggaaaattggcaatacatacttgacttttcatcacttacattatcccctttttacaaatgaagaatgtgatacttcctgagacaactttgctgcaagtgagtgagggaaccaagaacataatcaaaagcttgtggagagacttctagtgctcatgctcatctagttcttttcttctgggcacacagggggattacgctttctgcctcccttgtagttaagtggggaccatgtgattagttatggccaatgggctgtgagtagacgtgatgctatctccaggctggggtgagacccttcagtactgtaattgtaattgcaatgtaattgcaggggtgagacccttcagtactctctcttccccatctcagtgatcaaggccacatgttccagttagctcagctataagatggtggaaccccagtcatcctgagtccctgaggaatcatatggagcagcccctcaatattcacccaaccaaatcatgtaggatttgtgaatgagtgagaaataaaatttttgttgtattaaacctctggggttttgtggctacagcataaacctaacctatcaggacttaacaaaaaagactttagtctagtggagggctaagatatgtacataagtacaatgcagcaaaggaaaactgacatttgatggcctgagccatctacagtactcaaccaacat

SEQ ID NO: 68317 - DNA, 1143 bp, Homo sapiens
cactgtcttctgaactctgatcattgtttcttgtacactgactccaagttaggacataataacttgcaatattagatcacccagatcaccccaatcccaaatcctactctttcaatggcaattgcatgaataaaggtaaacagtacacgtttaattaggccagatgttacataattgagacctggtcaatgggcctccatataggcctacagagcaggagaagccaggtgccctgaggctctggggtgagggtggtatgcagttgcaggagttgttctatggcaggaaatgaggctaagccttgccctggagggagacatctggggccttctaaggggactgcttctgcccctaattacgcacctaccattctacctcctcattactaggaaagagaaaagaccaagaccttcacacagaggatgcctaaattattgattagtcttttccaaactggaaaattggcaatacatacttgacttttcatcacttacattatcccctttttacaaatgaagaatgtgatacttcctgagacaactttgctgcaagtgagtgagrgaaccaagaacataatcaaaagcttgtggagagacttctagtgctcatgctcatctagttcttttcttctgggcacacagggggattacgctttctgcctcccttgtagttaagtggggaccatgtgattagttatggccaatgggctgtgagtagacgtgatgctatctccaggctggggtgagacccttcagtactgtaattgtaattgcaatgtaattgcaggggtgagacccttcagtactctctcttccccatctcagtgatcaaggccacatgttccagttagctcagctataagatggtggaaccccagtcatcctgagtccctgaggaatcatatggagcagcccctcaatattcacccaaccaaatcatgtaggatttgtgaatgagtgagaaataaaatttttgttgtattaaacctctggggttttgtggctacagcataaacctaacctatcaggacttaacaaaaaagactttagtctagtggagggctaagatatgtacataagtacaatgcagcaaaggaaaactgacatttgatggcctgagccatctacagtactcaaccaacat

SEQ ID NO: 68318 - DNA, 689 bp, Homo sapiens
taatgggtacgcagtttcttttgggggtataaaaatattctggaattagtggtgatgaattacagctctgtgaatatataaccgtttacttgtatatttttaaatggtgaatttcatgatatgtgacttacatctcatcaaagctgttattaacaaaacagtacccacctcctaccttatagggttgctgggatgatttttttttttttttttttagatggagtctcgctctggcgcccaggctggagtgcagtgaggtgatctcggctcactgcaacctctgcctcctgggttcaagcaattctcctgcctcagcctcccaagtagctgggattacaggtgcatgccacaacgcccggctaatttatatatttttagtagagacagagttttgcctttttggccaggctaatctcaaactcctgaccycaagtgatctgcctgcctcagcctctcaaagtgctgggattacaggtttaagccaccatgctcagcccactgggagaatcatatgaagtccccagtatatgtcctagccctagagctcctttgtcaatggtatcagagatgtaattagtatcatcactctatcctccaaggttacctggggcacaaatagaagcatacaaacaagctgataacagtgactaattctggggcaagatctgagtttgagagtggtggaaaaa

SEQ ID NO: 68319 - DNA, 666 bp, Homo sapiens
ccgggggcacttaaattctgtctgaacaaagaaccctttaaggatctgatgaaagctaaagcaaagcgcgtgcacacacatttcccacgtgccttcatggagccccgtgccygccagatgaagagcttccaggcaggaggtgaaccacagaggcacagaggcctgggtggacccacacccgggagaatggggatggacactcagcacaggccaagcatcctgaattcacggccattggaggtgggacatggagcaaagcccgcaacttcccctctgctccctcccttctggtgggcatcgggagatggcccaaaaggaggtttagaaagagcacaggaagagccagttcagccaggcaggcctggaaatcaggcagggagaagcgcgaagcccacgccagcccaagagcgcctctcacctctggatttagtgagttattctctgaggactttgtggataacaagatgtgggtgaagccatcctgcttcctgaccacaatatctctgtatctgtaggcactttctgtttgcctcacgctgaaacgcaatcgcttgtcaaaaggctggtctcttctgtcgtcaataaatttccttttgctggcagtcactcctgtaacagatgtctgtatgttggttgtcccattggctgttaatgcatccatgaacg

SEQ ID NO: 68320 - DNA, 606 bp, Homo sapiens
agaagttcccttgagcactgggatgcagctgtgaagaggaatatattgacttcacttaaaaggacatgtgcacgtacagcagggacatggcgcaggagcacaggcctgctgactcgtctgatttggaggacgtcccctaagtgcttagggcggcaggagtgtaggagtgcctcttggtgccttggtaatttgtcccgactaccctaacaaaccattccttttactcttctttttaaaagacaaacactaataacggaagcagaagggataaaaattcctccaacaactcactcatgtacacgcaaatgttaatgaagcccctaatgtgtgtaaacaattggactaggcaatgtaggagattctaaagaccactgaaatatctgcacaayacttccattttaccatttaaagtttaagtgaatttgtccatctactctggatctttccctggatattttaaaaacatccgattttattttttcagactgttctagggaatcggctcccatccatccaatctaagtactcaagccacgttagttaaaccttctgcacccaaggcaaaagagccttggagaattggactccctggcaccttctccaagg

SEQ ID NO: 68321 - DNA, 1201 bp, Homo sapiens
tgctgcctggtctggaaatcactgcaagggtttttcccagagaaccaaagtaagataaatgaaagatgctacacaattctgagagggctctgcctccatccataacttcaccctgagccccaagacttgccccctgctcctgcattaacaacttaaatccttcaggaaaaactccaggctgcagcttggctgcagccctgtgaggtcctaccaggggagcaaaataaagctgaacttacagtgaagtccctgagccggcatccttcttccaggtccactgctggagagacaaggacttggtcctcttccaaaactactgagggggccaccgagagtttagggcgatccacccgtgaccccagcatggcagaagcaaatcatttcaccatctcacatacctcctgccgctttcaccccagagtaaaaggcaaaacaacaaagttcttttgagctcccttctgcagaaggaggcaggactcagagaaagggaaggtgctggtttcaactcctgtcgaaagaataaacagctgtttcaggagatggggagtagacagagccctcagcagccaggggctttgttccttgcaggcctttgggaaacgagctgtttatcaggcctgttgactcagagctgtgtgccaaggcagaaatgttcctctctggatccatgagcggcccagcctccttgccaagcaaaaccatggtccaaactgggcctagtatgggaggaggaaaggccaccacccacccttgagagggacaccaagggggcccacatcacacactactggataaaaatggaaaccattctggacccaaacaacttcaagtgactgctcctaggaccagccaccagccaatggagacgttaaaacacacacacaaacacacacacaccacagaggagtggayaaagggctatcttgagagtcctcaagactggtggaaattctacctaaatgttcctcaaagttaagtccttcctctacatcttttaggcttcagaagtcgctgtttggtttgaacactacatttttatagaatgttacgggatctcccacagcacaaagcacactacaagaactttaaaaggtcaccaaggctcaactccgctctctggctgaataatgcttaacccttcccatacccacctcctgctcccaaaatagaatcttgcagctggaagggacctaggggcagt

SEQ ID NO: 68322 - DNA, 642 bp, Homo sapiens
ccattagaatgtgacctctctatggatggggacttggcttgcctacttcactgccagaacttcagtgcctggcacagcgtggctgctgtataataatggctaatagttgtggggagaatgaatcaacctcctttcctccatctctaactctcaaaatgagagtaaagaagaggaaagggttaaggaactcagagggcaggcgcagctgcagcaagttcttggtggaaggccagcactcaaatccagcaggaatggggttgggagttgtggatcggctttgagtgtgattggaatagtgcagctgacaagatctggaagagaagaggtagtagtgtttgttaaatctyccagcgtgggcaggcttttgttttttttcttttctttttctttttttttgttgcctgagaagcaaaggataaagatggatcatctggttcagtaacacagtcttaaagtgaaaaatctgggggtttctgtatgggaaaagagagagagaggattcaaaggaaaaagacaatagaggatttaatccaaaacatctaaaagcaaatattgttttcggggattttcagagattctctacaaaaggagaaagagactgactactaaggaggagagagatacaaccgtggagaggtttta

SEQ ID NO: 68323 - DNA, 642 bp, Homo sapiens
ccattagaatgtgacctctctatggatggggacttggcttgcctacttcactgccagaacttcagtgcctggcacagcgtggctgctgtataataatggctaatagttgtggggagaatgaatcaacctcctttcctccatctctaactctcaaaatgagagtaaagaagaggaaagggttaaggaactcagagggcaggcgcagctgcagcaagttcttggtggaaggccagcactcaaatccagcaggaatggggttgggagttgtggatcggctttgagtgtgattggaatagtgcagctgacaagatctggaagagaagaggtagtagtgtttgttaaatcttccagcgtgggcaggcttttgttttttttcttttctttttctttttttttgttgcctgagaagcaaaggataaagatggatcatctggttcagtaacayagtcttaaagtgaaaaatctgggggtttctgtatgggaaaagagagagagaggattcaaaggaaaaagacaatagaggatttaatccaaaacatctaaaagcaaatattgttttcggggattttcagagattctctacaaaaggagaaagagactgactactaaggaggagagagatacaaccgtggagaggtttta

SEQ ID NO: 68324 - DNA, 1075 bp, Homo sapiens
attttcttgtatttgttgtgcttcagggtttttttttaagtttaaaattaaaagaaaaacatctcttgcttgctcttccctctctttcctgccagctagtcacagagctcacttaaatcttccttcacagccatcatatctgcccatctccattgcattgcaccatcctaattctgamctttatttttccacatacaaatacaagtatgtaataactattttctatttttccctcattcacataactgtcagattaatgtttctaaaacatttgttacccccaaaatactagaaataatgtggtaacccctctgcaacctgctacagtattccacccttatctgcagggtacaagttccaagatccccagtggatgtctgagaccacggatggtactgaaccctatatacactttgttttttctatacatacatgcctatgataaggcttaatttaaaaattagacacagtaagagattaaaaacaatagtaaataataaaatgggaaaattttaacctactgtaatacaagttatgtgaatgtggtctctctctctgaaaatatcagtattttcaaactggggttgattggcagtaagtgaaactgcattactgcattactgcattactgaaactgtaggcaaggggggactgctacattaccagaggagtattaactgagaaggcttgaccaagacagcagggaactgtactcaagagtatgacaatatctaggctaagttctggcaaatagtgagtgcttgaccctggtgaagggcaggtacgtgtggacaatcgaaagcaagcaataacattatgccattagcaatccatagccaattagaaatgtaagtgacaatactagctaacacattgcttttcctatggaatcttacatagatttatatattttaattcatttagtcctcacaagtccatgtgacacattgttagcacaggttgagtatcccttctctaaaatgcttgaggccagaagagcttcagattttggaatttggggggcttttggaatatttgtatatatgtaatgagatattttgggatgagactcaag

SEQ ID NO: 68325 - DNA, 1075 bp, Homo sapiens
attttcttgtatttgttgtgcttcagggtttttttttaagtttaaaattaaaagaaaaacatctcttgcttgctcttccctctctttcctgccagctagtcacagagctcacttaaatcttccttcacagccatcatatctgcccatctccattgcattgcaccatcctaattctgacctttatttttccacatacaaatacaagtatgtaataactattttctatttttccctcattcacataactgtcagattaatgtttctaaaacatttgttacccccaaaatactagaaataatgtggtaacccctctgcaacctgctacagtattccacccttatctgcagggtacaagttccaagatccccagtggatgtctgagaccacggatggtactgaaccctatatacactttgttttttctatacatacwtgcctatgataaggcttaatttaaaaattagacacagtaagagattaaaaacaatagtaaataataaaatgggaaaattttaacctactgtaatacaagttatgtgaatgtggtctctctctctgaaaatatcagtattttcaaactggggttgattggcagtaagtgaaactgcattactgcattactgcattactgaaactgtaggcaaggggggactgctacattaccagaggagtattaactgagaaggcttgaccaagacagcagggaactgtactcaagagtatgacaatatctaggctaagttctggcaaatagtgagtgcttgaccctggtgaagggcaggtacgtgtggacaatcgaaagcaagcaataacattatgccattagcaatccatagccaattagaaatgtaagtgacaatactagctaacacattgcttttcctatggaatcttacatagatttatatattttaattcatttagtcctcacaagtccatgtgacacattgttagcacaggttgagtatcccttctctaaaatgcttgaggccagaagagcttcagattttggaatttggggggcttttggaatatttgtatatatgtaatgagatattttgggatgagactcaag

SEQ ID NO: 68326 - DNA, 1075 bp, Homo sapiens
attttcttgtatttgttgtgcttcagggtttttttttaagtttaaaattaaaagaaaaacatctcttgcttgctcttccctctctttcctgccagctagtcacagagctcacttaaatcttccttcacagccatcatatctgcccatctccattgcattgcaccatcctaattctgacctttatttttccacatacaaatacaagtatgtaataactattttctatttttccctcattcacataactgtcagattaatgtttctaaaacatttgttacccccaaaatactagaaataatgtggtaacccctctgcaacctgctacagtattccacccttatctgcagggtacaagttccaagatccccagtggatgtctgagaccacggatggtactgaaccctatatacactttgttttttctatacatacatgcctatgataaggcttaatttaaaaattagacacagtaagagattaaaaacaatagtaaataataaaatgggaaaattttaacctactgtaatacaagttatgtgaatgtggtctctctctctgaaaatatcagtattttcaaactggggttgattggcagtaagtgaaactgcattactgcattactgcattactgaaactgtaggcaaggggggactgctacattaccagaggagtattaactgagaaggcttgaccaagasagcagggaactgtactcaagagtatgacaatatctaggctaagttctggcaaatagtgagtgcttgaccctggtgaagggcaggtacgtgtggacaatcgaaagcaagcaataacattatgccattagcaatccatagccaattagaaatgtaagtgacaatactagctaacacattgcttttcctatggaatcttacatagatttatatattttaattcatttagtcctcacaagtccatgtgacacattgttagcacaggttgagtatcccttctctaaaatgcttgaggccagaagagcttcagattttggaatttggggggcttttggaatatttgtatatatgtaatgagatattttgggatgagactcaag

SEQ ID NO: 68327 - DNA, 1075 bp, Homo sapiens
attttcttgtatttgttgtgcttcagggtttttttttaagtttaaaattaaaagaaaaacatctcttgcttgctcttccctctctttcctgccagctagtcacagagctcacttaaatcttccttcacagccatcatatctgcccatctccattgcattgcaccatcctaattctgacctttatttttccacatacaaatacaagtatgtaataactattttctatttttccctcattcacataactgtcagattaatgtttctaaaacatttgttacccccaaaatactagaaataatgtggtaacccctctgcaacctgctacagtattccacccttatctgcagggtacaagttccaagatccccagtggatgtctgagaccacggatggtactgaaccctatatacactttgttttttctatacatacatgcctatgataaggcttaatttaaaaattagacacagtaagagattaaaaacaatagtaaataataaaatgggaaaattttaacctactgtaatacaagttatgtgaatgtggtctctctctctgaaaatatcagtattttcaaactggggttgattggcagtaagtgaaactgcattactgcattactgcattactgaaactgtaggcaaggggggactgctacattaccagaggagtattaactgagaaggcttgaccaagacagcagggaactgtactcaagagtatgacaatatctaggctaagttctggcaaatagtgagtgcttgaccctggtgaagggcaggtacgtgtggacaatcgaaagcaagcaataacattatgccattagcaatccatagccaattagaaatgtaagtgacaatactagctaacacattgcttttcctatggaatcktacatagatttatatattttaattcatttagtcctcacaagtccatgtgacacattgttagcacaggttgagtatcccttctctaaaatgcttgaggccagaagagcttcagattttggaatttggggggcttttggaatatttgtatatatgtaatgagatattttgggatgagactcaag

SEQ ID NO: 68328 - DNA, 1611 bp, Homo sapiens
aagaatggtgtgtctgtgtgtttgagcatgcctatgtgtgcgtgtgtgcatgtctgtctctgggatggacagatgagagaaaaaactgttccagcctctattggatgtagtgaagtcagttgcagaagatgaggtcaacgttgtctcagtcagtacaatccactgtaaccagctctgtgtgtcacactgttgcatcatacttgggggttttgtttttgtttttaatctgatctggcacagataacttatcatttcccttggaagagataattctttcatttctcaactcccaatttcccttgcattatatccaaaatattatttgcatcgtataatccataggtatttcctgaccaaatcatacatactacttagtcaatttatatgtgaaaaacattctgaatgatagtatgtgatgtggaaaagccattcatatttactaccaagcaactgtctgaagaacactggctaggcactatyggttattcaagacaggaagttagaaatgtgatctctgttcttaaggaagacagtctagacatgaaaataattacagcagaaaatttatattctcatccggatcaggaaaactatacaataggcagactaatataatctgtactgttgctattacaagcccatgtttatgaaaatgattattaaaactctaaaagcatgcatttagctcacttagctttgttattatagtattcgattatatatgaaacttaatatttaaatagcgatatgaacaaataatttaaaagggaagtttcatgatttccaggaaagaatagtttatttcactatgaactagaggaatagtctacaagcttcttaaattctgaatgagtttaccaaactgaacagtgactaagtccagggagttgtattctaatggcctttcacttgctaccttatacagttctctatacaagttttgttactttgcactgtttgaaaattttgaaacaataatctcaaagaatttcaatttgaaaagatagttttgagccctaccttttaaaatgggcttttaaggagtgatttgaacaagttggcaaacaaggaaaaaaggaatttcaccaaagaaatgtctgaaagaaggccatggaatgagactcaacagggaacagaaagaaagttaacccaaatggaaaggaagcccaaccaatacctagagctcaggctgtggggtcaagatcttcacgtgggccacgcgcggtggctcacgcctataatcccagcactttgggaggccgaggtgggtgaatcacctaaggtcaggagttcgagactagcctgaccaacatggtgaaaccccatctctatgaaaaattcatacactcgctgggcacagagggggccacctgtcatctcagatactcagaaggctgaggctagagaatcgcttgcatgcgggaggcggaggttgcattgcgccaacatagagtcattgtactatagcctgggcgataagaatgaaactccatctgaaaaaaaaaaaaaatcttcaggtgtggagggcagggtatttatatttcatctatcaggtaaagataagaaaattatttaatgtgcgtgtaagcatgcacatatttgtatatagta

SEQ ID NO: 68329 - DNA, 1107 bp, Homo sapiens
catatgcctttctcacagaacacagtgtcctaatacttttgccaatagccattcttcattttagcattttcattatgcattctgatttttaaccttgaaggtttttaatggagccatataaatttgcctcaagatgacatgaaatattaccagatctcatctatataagttcttatcacctaagcagatattatttttggtaaaacctaggaacatgttacccaagttaagtcaagtcaatgcttatgctgatagcataagatttttaaaattgtatttctgcattctaattaaactgggtgggaactatttgttgctgagagtttagttattaaagatgctggctgctacgcttaaccttcatgtccttttagacatgtgatctaagaaaatttattaaaaaatttctcagcctcatcagttcatgataagctgtctttcagccaggctttaaccctcatttgaaacttctttattgtcaagttcttatgcactgaaatatagctctcttggattgcaaattttattctttcaaatatctatctctttaatttcctcttacctgacttttatcttattggaatctccaattttgcagctctttccacatctctcagttaattcccctgtattgacagcaattacctcttctctctacctggatcccatgggcagccatttcctttgtatttgctcttatatctttcccttcctccttgttcttctgtcaattctgtctttgattctccaactctgggtaattgccactgcccactttccctgagagagaacctactcattctttcattcrttcagtacgtatttattcagatccttctatgtgccaaacatggtgcccgatgttagaacatagtagcaagaatttctgcgttcttgaagtttaacatttagtggggagattactatatattcatgtgactactcccaccctgaaaccctactgctactccacagtccttttgcttatagctagaaggtttcctctggcctccatctagattatggttaacagcattcccagagaacttgattaaagaaatgcagtgttaggtctggtactgaatagatatctgcaccttattaaaa

SEQ ID NO: 68330 - DNA, 1107 bp, Homo sapiens
catatgcctttctcacagaacacagtgtcctaatacttttgccaatagccattcttcattttagcattttcattatgcattctgatttttaaccttgaaggtttttaatggagccatataaatttgcctcaagatgacatgaaatattaccagatctcatctatataagttcttatcacctaagcagatattatttttggtaaaacctaggaacatgttacccaagttaagtcaagtcaatgcttatgctgatagcataagatttttaaaattgtatttctgcattctaattaaactgggtgggaactatttgttgctgagagtttagttattaaagatgctggctgctacgcttaaccttcatgtccttttagacatgtgatctaagaaaatttattaaaaaatttctcagcctcatcagttcatgataagctgtctttcagccaggctttaaccctcatttgaaacttctttattgtcaagttcttatgcactgaaatatagctctcttggattgcaaattttattctttcaaatatctatctctttaatttcctcttacctgacttttatcttattggaatctccaattttgcagctctttccacatctctcagttaattcccctgtattgacagcaattacctcttctctctacctggatcccatgggcagccatttcctttgtatttgctcttatatctttcccttcctccttgttcttctgtcaattctgtctttgattctccaactctgggtaattgccactgcccactttccctgagagagaacctactcattctttcattcattcagtacgtatttattcagatccttctatgtgccaaacatggtgcccgatgttagaacatagtagcaagaatttctgcgttcttgaagtttaacatttagtggggagattactatatattcatgtgactactcccaccctgaaaccctactgctactccacagtccttttgcttatagctagaaggtttcctctggcctccatctagattatggttaacagcattcccagagaacttgattaaagaaatgcagtgttaggtctggtactgaatagatatctgcacyttattaaaa

SEQ ID NO: 68331 - DNA, 1440 bp, Homo sapiens
ataaaaagagccctatcgatccacttggtcattgctgatttatttgatcaaggttctcacaccaggacttccttacagaactataaattcgttgaattttgatgaaagaccatgtggcccagatcatagtcatctgtgtatctggataattaatgacatagggctgattccctccacagtgatctgtgaaagataatcactttgaaaggagttatggggaaaacaggcacaaattcccaagcttgccctccccattaaaacttagatgacattcctgcaccccctcccctcaattttacaccctcttctttggtgctcagcattaagccattctttctccgcttctgtttaaatcttagttcttcaggcccttgttctcagccctatactcttttttttttmaacaatttgctcttggcaacttcatcaaaatctgtagcttcacctgccactttggacttctaagtgtattcccacagcctaagccactctattatgcatatttattcaactacttgcttagcctctctacctaggtgtcacataagttaccttagactcaacaggtccaaacctgaactcaccacttcacctcccacaaacatgcctctccccaaattcaccccatcttaggatcctcccagcccctccagtggaaacactggcagtgcctccctctcacctgttacccagacacattcactcagttaccaaggcctatggcttcctcctacatatttctcaaatttttccccttgtagctattcccaccattgcaccttaattcagggcctcttcacttctttcctggattatacgaattctcaattcagctttcagaatattatttttcaaagcataaaagttatttcattatttccttcaaaaaatcacttcataatatctgatgtattagggataaatttgaagcacattaaatatttaatgtctaggactctgcctatttttccagcccttcatctcctgctgtatattaagggatacctactgtaagatattaataaaccatattaaaaggattctgatcaactgcaatctagtcttgttcatcttcacaaaaatactcaccggaatttgatttatatatactttatgttagcatttatcaaaattcccactgaatcttgtatgttacattatcatagtctttaccacattgtgctataataaacaatttacttggttattttccctattagaaaataaattccctgtagacattatctattttgctgtatgctcccagagcctagtggtgtgctcaataatttgttgttaaataaatgtataaatatattaaatgctgtagtgaacaaactgcagttattgcctttaaggaatcatattggaggaaacacaggtttaataattaattataataccaacttagatatctgctactaaactggtactaacaaa

SEQ ID NO: 68332 - DNA, 1440 bp, Homo sapiens
ataaaaagagccctatcgatccacttggtcattgctgatttatttgatcaaggttctcacaccaggacttccttacagaactataaattcgttgaattttgatgaaagaccatgtggcccagatcatagtcatctgtgtatctggataattaatgacatagggctgattccctccacagtgatctgtgaaagataatcactttgaaaggagttatggggaaaacaggcacaaattcccaagcttgccctccccattaaaacttagatgacattcctgcaccccctcccctcaattttacaccctcttctttggtgctcagcattaagccattctttctccgcttctgtttaaatcttagttcttcaggcccttgttctcagccctatactcttttttttttaaacaatttgctcttggcaacttcatcaaaatctgtagcttcacctgccactttggacttctaagtgtattcccacagcctaagccactctattatgcatatttattcaactacttgcttagcctctctacctaggtgtcacwtaagttaccttagactcaacaggtccaaacctgaactcaccacttcacctcccacaaacatgcctctccccaaattcaccccatcttaggatcctcccagcccctccagtggaaacactggcagtgcctccctctcacctgttacccagacacattcactcagttaccaaggcctatggcttcctcctacatatttctcaaatttttccccttgtagctattcccaccattgcaccttaattcagggcctcttcacttctttcctggattatacgaattctcaattcagctttcagaatattatttttcaaagcataaaagttatttcattatttccttcaaaaaatcacttcataatatctgatgtattagggataaatttgaagcacattaaatatttaatgtctaggactctgcctatttttccagcccttcatctcctgctgtatattaagggatacctactgtaagatattaataaaccatattaaaaggattctgatcaactgcaatctagtcttgttcatcttcacaaaaatactcaccggaatttgatttatatatactttatgttagcatttatcaaaattcccactgaatcttgtatgttacattatcatagtctttaccacattgtgctataataaacaatttacttggttattttccctattagaaaataaattccctgtagacattatctattttgctgtatgctcccagagcctagtggtgtgctcaataatttgttgttaaataaatgtataaatatattaaatgctgtagtgaacaaactgcagttattgcctttaaggaatcatattggaggaaacacaggtttaataattaattataataccaacttagatatctgctactaaactggtactaacaaa

SEQ ID NO: 68333 - DNA, 677 bp, Homo sapiens
ccactgtggacattccccttctcagctcatatatccatccttattctcagcaccctggctggggtcctcatcgtctctcctgggctcttacaataacctcccaacgtcccttccagcttgtattaaactgtagcctccttgccaagcaagaacaaacagagataaagatgtctatcaagaaagtaagtcaacagagagggggataactccagcgaaggactgaaaacaaagattttccctcagactaccaataaaatggctatttgaaaactgaccagtgtatgagacagaagattcagaagatgtgaaagtttaaagcattgcccttcaggggctggaaagcctaccaagtatcagctggctgtgctgtggttccttgtaaccatgactgatgcttgctacataataatcatggasacattgtccctaacccccgaacaaagtaaaccaaaaccaggagataggcacttgaatttaacagtgtcagattgtcaaatttttacaaaatattgactatgactaaaaaagctattttcatttgatatgtgtcttacccagtgtttcatctttgggaagataagtcaggctttgtctaagcagctccagagagaattttgaagttaggtaaacaaacaaacagtgaccgtggggatgttccccgctaaccttcctgcagg

SEQ ID NO: 68334 - DNA, 677 bp, Homo sapiens
ccactgtggacattccccttctcagctcatatatccatccttattctcagcaccctggctggggtcctcatcgtctctcctgggctcttacaataacctcccaacgtcccttccagcttgtattaaactgtagcctccttgccaagcaagaacaaacagagataaagatgtctatcaagaaagtaagtcaacagagagggggataactccagcgaaggactgaaaacaaagattttccctcagactaccaataaaatggctatttgaaaactgaccagtgtatgagacagaagattcagaagatgtgaaagtttaaagcattgcccttcaggggctggaaagcctaccaagtatcagctggctgtgctgtggttccttgtaaccatgactgatgcttgctacataataatcatggagacattgtccctaacccccgaacaaagtaaaccaaaaccaggagataggcacttgaatttaacagtgtcagattgtcaaatttttacaaaatattgactatgactaaaaaagctattttcatttgatatgtgtcttacccagtgtttcatctttgggaagataagtcaggctttgtctaagcagctccagagagaattttgaagttaggtaaacaaacaaacagtgaccgtggggatgttccccsctaaccttcctgcagg

SEQ ID NO: 68335 - DNA, 455 bp, Homo sapiens
taaaatgtgggtcagacgtgtttggttttataacctttaaaaggtgagtgagtccaggtcctggtgaaccctttatccagggcaaagggaagtagtaatttgctgcctcactcacgtaggtataagctagtttatttggataaaataagttcactttctctctttagagcaataattttattccttgagaaacagttgyccttgctctgctccttgtttcttctcctgagctgaggctcctgccttgacctttctttttatagaataaaaggaacatagataatttaaagacagacgggatctctgagatctactaatttaattttgctttgtttttcaggaatgagcaattggtgactcagtgagttagagcattatcaatgcaccagtaaaagattttgtattagaatcccagttttcctgcttggtggttcagtgaaataccctatcctata

SEQ ID NO: 68336 - DNA, 625 bp, Homo sapiens
cggattaaatcctgccctatgaattcctagccaggtgacctcaggcctacataacctttctgtacctcaacttcctcatccagaaaacagggatgatgctgtctacctcattggatggttgtgcaggatcaaagattcagtcattcagcaaacctataccgagtacctactgtacaytcatgagtgctaggcagccagccttccaggtgctcaggtacatctgtgaacacaactggctattggaggaagcaaaatcagtaacatgacctgctctctttgatctgtgctacagaaaaaaaggaaagtggagaggcatcaggaagtcaagagtgctggggaggggctggtaacagtcatggtattaaagaggagggcaggcaggccttactgtgaaggtggtatttgagatgaagtagttggtcagagtccctgtttgacacatggagaccaccttgacagcaaaggccctaagggggagcggtgcgaagcaaggtgggctggtgagtgagaggagagggatggcatagagctgggtgggggcacaggagcccgtggggaaggtgttcgcctctgaatgaagtggggttgtatcagataccacgggtgaagcatcgggaagaggatc

SEQ ID NO: 68337 - DNA, 298 bp, Homo sapiens
aataaatgtaaatttttaacattaaataggtgctacaactacttacttaaaaacatacttaagatgccatatcacttaggatacttttgcctacaaagtaaaaggaatcttaaatatgataatgtttcttatctcacacagcaagaagtccagaggtagaacaagatcctgacctgatgccattagggctttggttccatatctctccacttctcaggatttatttatttatttggtattgactttgrctttgttcttgagcaaaagatgcctaccagcacctactgggcaacatgca

SEQ ID NO: 68338 - DNA, 828 bp, Homo sapiens
ctttttctcaaatatttgaatatagtaatatttggactgtggttggttgaattcacggattgatacaagaggccaactgtactccgactgtggctgtaaatctaatttgttatacatccactttattttattttttacttttatttttttgagatagagtctcactctgtcacccaggctggaatgcagtggcacatcttggctcactgcaacctccaactccaggtccaagcaattctcrtgcctcagcctctcaagtagctgggaccacaggtgaaagccaccatgtcaggctaatttttgtaatttcagtagatacggggtttcaccatgctgcccaggctggtctcaaactcctgacctaagatgatccacctggttcggcctatcaaagtgctggaattacaggtgtgagccattgcaaccagcatgtacatcactttgttcaggatatagtaacattgaaataaatgatttttaaaataagagcaaagaaaatgtttttcctcccagaagggagcaacattcatatgaaggccaacaaccatatgaaggaaagctcaatatcacttattgttagagaaatgcaaatcaatggtacaatgagatatcgtctcacaccagtcagaatggctactatgaaaataaaaaaatagatgctggtgaggttgtagagaaaaaaggaacacttatacactgttggtgggagtgtaaattagctcaaccattgtagaatacagtctagtgattcctcaaagatctagacagaaataccattcaacccaacaatcccattactgggtatatatcaaaaggaatataaatcat

SEQ ID NO: 68339 - DNA, 828 bp, Homo sapiens
ctttttctcaaatatttgaatatagtaatatttggactgtggttggttgaattcacggattgatacaagaggccaactgtactccgactgtggctgtaaatctaatttgttatacatccactttattttattttttacttttatttttttgagatagagtctcactctgtcacccaggctggaatgcagtggcacatcttggctcactgcaacctccaactccaggtccaagcaattctcgtgcstcagcctctcaagtagctgggaccacaggtgaaagccaccatgtcaggctaatttttgtaatttcagtagatacggggtttcaccatgctgcccaggctggtctcaaactcctgacctaagatgatccacctggttcggcctatcaaagtgctggaattacaggtgtgagccattgcaaccagcatgtacatcactttgttcaggatatagtaacattgaaataaatgatttttaaaataagagcaaagaaaatgtttttcctcccagaagggagcaacattcatatgaaggccaacaaccatatgaaggaaagctcaatatcacttattgttagagaaatgcaaatcaatggtacaatgagatatcgtctcacaccagtcagaatggctactatgaaaataaaaaaatagatgctggtgaggttgtagagaaaaaaggaacacttatacactgttggtgggagtgtaaattagctcaaccattgtagaatacagtctagtgattcctcaaagatctagacagaaataccattcaacccaacaatcccattactgggtatatatcaaaaggaatataaatcat

SEQ ID NO: 68340 - DNA, 828 bp, Homo sapiens
ctttttctcaaatatttgaatatagtaatatttggactgtggttggttgaattcacggattgatacaagaggccaactgtactccgactgtggctgtaaatctaatttgttatacatccactttattttattttttacttttatttttttgagatagagtctcactctgtcacccaggctggaatgcagtggcacatcttggctcactgcaacctccaactccaggtccaagcaattctcgtgcctcagcctctcaagtagctgggaccacaggtgaaagccaccatgtcaggctaatttttgtaatttcagtagatacggggtttcaccatgctgcccaggctggtctcaaactcctgacctaagatgatccacctggttcggcctatcaaagtgctggaattacaggtgtgagccaytgcaaccagcatgtacatcactttgttcaggatatagtaacattgaaataaatgatttttaaaataagagcaaagaaaatgtttttcctcccagaagggagcaacattcatatgaaggccaacaaccatatgaaggaaagctcaatatcacttattgttagagaaatgcaaatcaatggtacaatgagatatcgtctcacaccagtcagaatggctactatgaaaataaaaaaatagatgctggtgaggttgtagagaaaaaaggaacacttatacactgttggtgggagtgtaaattagctcaaccattgtagaatacagtctagtgattcctcaaagatctagacagaaataccattcaacccaacaatcccattactgggtatatatcaaaaggaatataaatcat

SEQ ID NO: 68341 - DNA, 2825 bp, Homo sapiens
tgcattaattcaaatgaaatagaacttctaatgctcaagaatattcttatcagctggtcagtatatcttcactttagcaataaagctttatgtggagcartatcatcagaatattgcttcatgagcaagagcaaccaggaagatgatcataatagggttaaaagattgcaatggtctgaggtagccacaagagatatacgtccctctccttggatagccctgaaactactcttgtgtgttcttgctgttttattatccttttggtggactctatatagaatttctgccttcactcagcatattgttatttatcttccaaaatgctaaaacaaggtagattagattgtctttcttgtatatcagtagtattgtattaatgccttctaaagtttattcataagttccttgactacatttcagcaatgtgttttttattctaatttcatttaggaagggtttttctcatggcaatgaactgtgtattagcatggggatgttagttgctgtttttgcaaatagctgatttcatatgttacagttttaagtccaattatcttaaattattatgaaactgttaaatataatttaacatgaacctgtgtgtgtagtatgttttgtaataaagcaaaatggtttaaaatgtacaaaaatatatacagaaaaaaatgaatagaatacttcatgttttgagccataattttcaataagcataatctatataatctgtatttggtacaaacaactatctggtacaaatagttaaaaaatgagatatatattacaattttaaatacttgtactaaacactttgctattacatagacccaccaatttttatgcaaatacttaccaaaaaattaccatagctatttattatgatgtttaaaaattttacttactaacattaactcataaaaacagcagcctctgatgagtaatgtgctagttttgctgccttttaaaattatctttacatagaaatattaggtcttttaacaagatacgctcttctttttttggctctgaaaccaaagcattaacaaatttcgagattggacaaaaaataatttatcattaattactttttaaatagtaatttttaattagcaataattatttttctgtgaactaatactgatagattgtgcatatatctgttagaaatgtgtagaaatatataattttatcttgaattattactttagttattaattttatttattattgctattataattattatttattgttatcaagagagaagtgtgaattacaataacctttttaaaaaatgatttgacatacctattaaaatttaaaatatgcatttcttttgacctagcaatcccacttttagaaatatgtttttcagaaataaaagcttcagtatattagaatacgtgtacaaagaagttcagtgaatatatgatttattattttaaaaataacaatctgaaagttatctgatacatcaaaggatgggatatcatggaatcatttctttttaatttttaattgtaatttttaatggttcatagtaggtgtatatatttatgtggtacatgagatactttgatataggcacacaatgcgtagtaatcacatcatgtaaaatgtggtactcatctgctcaagcatctatcctttgtgttacaaacaatccagttatactcttttgattattttaaaatgtacaattaacttattaatgactatcatcaccctgttgtgctctcaaatactaggtcttattcattctttctttttttttgtacccattatccaaactcacttctccccctctaccctaccactacttttcccagcctctggtaatcatcgttctactctttatctctattagtttatttgctttaatttttagatcccacaagtaagtgagaacttgtaatatttgtctttctgtgcctgccttatttcacttagcataatgacctccagttctattcgtgttgttgcaaatgacaggatctaattttttgtatgtctgaatagtactccactatgtataagtaccacattttcattattcattcatctactgatggatacttaggttgcttccaaattttggctattgcaaacagtgctgcaacaaacgtgggagttcaaatatctctcaatatactgatttgtttaaatcataaactatatccaagggtagtaacttggcaaaatatgtaaaatacaaatcactgtgcattgcttttattttgttaaaaagtaaagaggtatgtgaatagatatcccccaattcagtaaatatcccaccattacatacaaatatatgtaaatatatatgtatacatacacacattccgtgggttaagtgaaaggcagaatatgatatacataaaattgttaatatatttacttataaatgtagattggaaggggtatgtgaggagaaactattagttgtcctcatgtagctctatatttggtcaatttgtttcaataagcaagtattttacttttttaagttaaaagagtaatttattaataaattcaattgttatgtctttcaggtttttgttttcatttctcatttaaatgttcttggacttagttgtatttaatgccaattttcatgacagctcaaaatcattggtagactttgttgatcatcctgaagccactccaaacatatatagtcctgtaaatttttgttgttttattgctttcaaggtggaaattggttcaattctttgacactattttattcatatcctgtcttctcttatcaagatatacttactgggagagcaaggcaagagcgaatattttaggcattgatttgggag

SEQ ID NO: 68342 - DNA, 2825 bp, Homo sapiens
tgcattaattcaaatgaaatagaacttctaatgctcaagaatattcttatcagctggtcagtatatcttcactttagcaataaagctttatgtggagcaatatcatcagaatattgcttcatgagcaagagcaaccaggaagatgatcataatagggttaaaagattgcaatggtctgaggyagccacaagagatatacgtccctctccttggatagccctgaaactactcttgtgtgttcttgctgttttattatccttttggtggactctatatagaatttctgccttcactcagcatattgttatttatcttccaaaatgctaaaacaaggtagattagattgtctttcttgtatatcagtagtattgtattaatgccttctaaagtttattcataagttccttgactacatttcagcaatgtgttttttattctaatttcatttaggaagggtttttctcatggcaatgaactgtgtattagcatggggatgttagttgctgtttttgcaaatagctgatttcatatgttacagttttaagtccaattatcttaaattattatgaaactgttaaatataatttaacatgaacctgtgtgtgtagtatgttttgtaataaagcaaaatggtttaaaatgtacaaaaatatatacagaaaaaaatgaatagaatacttcatgttttgagccataattttcaataagcataatctatataatctgtatttggtacaaacaactatctggtacaaatagttaaaaaatgagatatatattacaattttaaatacttgtactaaacactttgctattacatagacccaccaatttttatgcaaatacttaccaaaaaattaccatagctatttattatgatgtttaaaaattttacttactaacattaactcataaaaacagcagcctctgatgagtaatgtgctagttttgctgccttttaaaattatctttacatagaaatattaggtcttttaacaagatacgctcttctttttttggctctgaaaccaaagcattaacaaatttcgagattggacaaaaaataatttatcattaattactttttaaatagtaatttttaattagcaataattatttttctgtgaactaatactgatagattgtgcatatatctgttagaaatgtgtagaaatatataattttatcttgaattattactttagttattaattttatttattattgctattataattattatttattgttatcaagagagaagtgtgaattacaataacctttttaaaaaatgatttgacatacctattaaaatttaaaatatgcatttcttttgacctagcaatcccacttttagaaatatgtttttcagaaataaaagcttcagtatattagaatacgtgtacaaagaagttcagtgaatatatgatttattattttaaaaataacaatctgaaagttatctgatacatcaaaggatgggatatcatggaatcatttctttttaatttttaattgtaatttttaatggttcatagtaggtgtatatatttatgtggtacatgagatactttgatataggcacacaatgcgtagtaatcacatcatgtaaaatgtggtactcatctgctcaagcatctatcctttgtgttacaaacaatccagttatactcttttgattattttaaaatgtacaattaacttattaatgactatcatcaccctgttgtgctctcaaatactaggtcttattcattctttctttttttttgtacccattatccaaactcacttctccccctctaccctaccactacttttcccagcctctggtaatcatcgttctactctttatctctattagtttatttgctttaatttttagatcccacaagtaagtgagaacttgtaatatttgtctttctgtgcctgccttatttcacttagcataatgacctccagttctattcgtgttgttgcaaatgacaggatctaattttttgtatgtctgaatagtactccactatgtataagtaccacattttcattattcattcatctactgatggatacttaggttgcttccaaattttggctattgcaaacagtgctgcaacaaacgtgggagttcaaatatctctcaatatactgatttgtttaaatcataaactatatccaagggtagtaacttggcaaaatatgtaaaatacaaatcactgtgcattgcttttattttgttaaaaagtaaagaggtatgtgaatagatatcccccaattcagtaaatatcccaccattacatacaaatatatgtaaatatatatgtatacatacacacattccgtgggttaagtgaaaggcagaatatgatatacataaaattgttaatatatttacttataaatgtagattggaaggggtatgtgaggagaaactattagttgtcctcatgtagctctatatttggtcaatttgtttcaataagcaagtattttacttttttaagttaaaagagtaatttattaataaattcaattgttatgtctttcaggtttttgttttcatttctcatttaaatgttcttggacttagttgtatttaatgccaattttcatgacagctcaaaatcattggtagactttgttgatcatcctgaagccactccaaacatatatagtcctgtaaatttttgttgttttattgctttcaaggtggaaattggttcaattctttgacactattttattcatatcctgtcttctcttatcaagatatacttactgggagagcaaggcaagagcgaatattttaggcattgatttgggag

SEQ ID NO: 68343 - DNA, 2825 bp, Homo sapiens
tgcattaattcaaatgaaatagaacttctaatgctcaagaatattcttatcagctggtcagtatatcttcactttagcaataaagctttatgtggagcaatatcatcagaatattgcttcatgagcaagagcaaccaggaagatgatcataatagggttaaaagattgcaatggtctgaggtagccacaagagatatacgtccctctccttggatagccctgaaactactcttgtgtgttcttgctgttttattatccttttggtggactctatatagaatttctgccttcactcagcatattgttatttatcttccaaaatgctaaaacaaggtagattagattgtctttcttgtatatcagtagtattgtattaatgccttctaaagtttattcataagttccttgactacatttcagcaatgygttttttattctaatttcatttaggaagggtttttctcatggcaatgaactgtgtattagcatggggatgttagttgctgtttttgcaaatagctgatttcatatgttacagttttaagtccaattatcttaaattattatgaaactgttaaatataatttaacatgaacctgtgtgtgtagtatgttttgtaataaagcaaaatggtttaaaatgtacaaaaatatatacagaaaaaaatgaatagaatacttcatgttttgagccataattttcaataagcataatctatataatctgtatttggtacaaacaactatctggtacaaatagttaaaaaatgagatatatattacaattttaaatacttgtactaaacactttgctattacatagacccaccaatttttatgcaaatacttaccaaaaaattaccatagctatttattatgatgtttaaaaattttacttactaacattaactcataaaaacagcagcctctgatgagtaatgtgctagttttgctgccttttaaaattatctttacatagaaatattaggtcttttaacaagatacgctcttctttttttggctctgaaaccaaagcattaacaaatttcgagattggacaaaaaataatttatcattaattactttttaaatagtaatttttaattagcaataattatttttctgtgaactaatactgatagattgtgcatatatctgttagaaatgtgtagaaatatataattttatcttgaattattactttagttattaattttatttattattgctattataattattatttattgttatcaagagagaagtgtgaattacaataacctttttaaaaaatgatttgacatacctattaaaatttaaaatatgcatttcttttgacctagcaatcccacttttagaaatatgtttttcagaaataaaagcttcagtatattagaatacgtgtacaaagaagttcagtgaatatatgatttattattttaaaaataacaatctgaaagttatctgatacatcaaaggatgggatatcatggaatcatttctttttaatttttaattgtaatttttaatggttcatagtaggtgtatatatttatgtggtacatgagatactttgatataggcacacaatgcgtagtaatcacatcatgtaaaatgtggtactcatctgctcaagcatctatcctttgtgttacaaacaatccagttatactcttttgattattttaaaatgtacaattaacttattaatgactatcatcaccctgttgtgctctcaaatactaggtcttattcattctttctttttttttgtacccattatccaaactcacttctccccctctaccctaccactacttttcccagcctctggtaatcatcgttctactctttatctctattagtttatttgctttaatttttagatcccacaagtaagtgagaacttgtaatatttgtctttctgtgcctgccttatttcacttagcataatgacctccagttctattcgtgttgttgcaaatgacaggatctaattttttgtatgtctgaatagtactccactatgtataagtaccacattttcattattcattcatctactgatggatacttaggttgcttccaaattttggctattgcaaacagtgctgcaacaaacgtgggagttcaaatatctctcaatatactgatttgtttaaatcataaactatatccaagggtagtaacttggcaaaatatgtaaaatacaaatcactgtgcattgcttttattttgttaaaaagtaaagaggtatgtgaatagatatcccccaattcagtaaatatcccaccattacatacaaatatatgtaaatatatatgtatacatacacacattccgtgggttaagtgaaaggcagaatatgatatacataaaattgttaatatatttacttataaatgtagattggaaggggtatgtgaggagaaactattagttgtcctcatgtagctctatatttggtcaatttgtttcaataagcaagtattttacttttttaagttaaaagagtaatttattaataaattcaattgttatgtctttcaggtttttgttttcatttctcatttaaatgttcttggacttagttgtatttaatgccaattttcatgacagctcaaaatcattggtagactttgttgatcatcctgaagccactccaaacatatatagtcctgtaaatttttgttgttttattgctttcaaggtggaaattggttcaattctttgacactattttattcatatcctgtcttctcttatcaagatatacttactgggagagcaaggcaagagcgaatattttaggcattgatttgggag

SEQ ID NO: 68344 - DNA, 553 bp, Homo sapiens
ccacagcagctccacaagatctaattaggcctcgatgaagcatygctttcctctctacccctagagctttatttttctgccaaaaagtacacaacttataaattcagttgcttctatgattgactttttcatttaaaaaaatcatttcaaagtaattgttgagctaagttgctgacctaaaaccagaacccatcttcaaaaggatcttgcacctataacatggtctggaatgaattctatcaggtttgtaagtaatttattattcccatagtattctgacagtaaaaagaataagaagtgtatatttaaaactggttattattgttgcttaagcagcacaatgattcattctacaactgtaactaataagtaatatgtaacagtagaaaaataccctggaaaaatgaatcatcttgtaatgtattcatttataaattttattaaatgaaagacaacatcattacaatacaacatcattacaattattatatcaaactaataataactcttaagatccagagatagaaatagcaacaataagattactaaacat

SEQ ID NO: 68345 - DNA, 553 bp, Homo sapiens
ccacagcagctccacaagatctaattaggcctcgatgaagcattgctttcctctctacccctagagctttatttttctgccaaaaagtacacaacttataaattcagttgcttctatgattgactttttcatttaaaaaaatcatttcaaagtaattgttgagctaagttgcwgacctaaaaccagaacccatcttcaaaaggatcttgcacctataacatggtctggaatgaattctatcaggtttgtaagtaatttattattcccatagtattctgacagtaaaaagaataagaagtgtatatttaaaactggttattattgttgcttaagcagcacaatgattcattctacaactgtaactaataagtaatatgtaacagtagaaaaataccctggaaaaatgaatcatcttgtaatgtattcatttataaattttattaaatgaaagacaacatcattacaatacaacatcattacaattattatatcaaactaataataactcttaagatccagagatagaaatagcaacaataagattactaaacat
